United States Patent Application Publication US 2014/0141044 A1 - sequence listing, part 8

SEQ ID NO: 4672 - DNA, 126 bp, BradyrhizobiumColbertium
ttgggggccaccgagctcggcggtgccggaatcagtccctccgttccggtgccgaaccccgtccctgccgatggcgcgatgtcgatcaacggcacgccgttgatcggcggcgcgggcaatccctga

SEQ ID NO: 4673 - DNA, 315 bp, BradyrhizobiumColbertium
gtggcccccaacggtatcccgacgcgtccgacggtcattggcgaggacgaaagcggcggagccgccgcgctgccagcgcatgcgctcgatgagttgccggacagtccgccgccatcgaacaatgcgccaggcgaggcggagtttgccgatgtcggacagttcgacatgccttgcgcaggattgagcggcgaggtgccgggcgttgcaatctcggtcgatcccagcgggatgcctacgggccgggtggattgcggattgagcggcgatgtcgcgagcatgccgggagaaggttgtattccgggcaccatcgtttga

SEQ ID NO: 4674 - DNA, 240 bp, BradyrhizobiumColbertium
gtgcagctggatcgggtcatcgaaaaggacgccggctcctacggctggcagccggagagcctcagcgcattgcgcggccatcagccaacgccccgctcccttgccgaagcagagagcggcgacggcttcgatttcacggctgcgttggattcgcttgatcgcgctcgcgccgccgatcacgtcggtgacatgcgcgcgtgccgccgggaactggcacgcgcgcggtccattctgagataa

SEQ ID NO: 4675 - DNA, 786 bp, BradyrhizobiumColbertium
atgaaacctcgtcgcgccagcctcgccttcgccgtcaccctttcgctgttcgcgaccgtcgacacggcgcgtgcggagccgctaaagaacatcgtcctggtgcacggcgcctgggtggacgcgtccggctggaagccggtttacgagatcctcaccaaggaaggtttccatgtcaccatggtccaggagccggaaacgtcgtttgccgatgacgtcaaggcgacgaagcggattctcgaccttcaaaacggcccgacgcttctcgtcggccacagctatggcggctcgatcatcaccgaagcgggtgttcatccgagcgtcgtcggcctcgtctacgtcgccgcgcacgcccccgacgtcggcgaggacgaatctgcgctgggcaagaagacgccgagcgtgctcggaaagaccgagggtgtcatcaagatcacgcccgacgagttcacctatctcgatcccgtgcaattcccgaagctgttcgcgcccgatctgccgcgtgatcgcgccgagttcgtcgcacgttcgcaggtcccggccgccgcacaggtgttcagcacgccgctgacggcggcggcatggaagaccacgccgagctggggcatcgttgccggcagcgaccagatcatcaatcccgatctcgagcgctggtactatgaccgcgccaagagccacaccacggtgatcccgggcgccagccactcggtctacgaatcgcatccgaaggaagtggcggccgtgatcacccgcgctgcgcgcagcatcgatcagcaggccgcgcgctga

SEQ ID NO: 4676 - DNA, 864 bp, BradyrhizobiumColbertium
atgatctcgcggtggacctccacgcaggcggcggtggggcgggaggaagcaacgacgccaacagaccggtacttcttcgccatcgctctgaagacgacccgtctcaagctgaccagaggcgctcaaaccatattcgacggcatcatgcccgcgggcacgctctatgtcggcgcaccgtcaaagtcgctttgcgcacatttccatgcgtcatgcgattttctgcacttccacgttccggcaaaatgtctgccgttatcgccgacgggagagcacccggtcactcccgaggagttgaacgacatggttctactgcgcgacccgttcgccgcgcaactcgcaaaggcgctgaccgaacacggccatccggtcgaccgcgacttcgcgcgttgcatcgcccagactttggcaatgcatgtggcccggcgcgaagcgccgcgcacgaaggtcaacgctctgccgaaatggcgtctgcgccgcatcgaggactatgtcaggacgcatttcgaccaatgcatcagcctgtcggacctggctggagtcgccggactatcgcggatgcacttcgccgcgcagtttcgggccgcgaccgggtaccgaccgcgtgaatatctgctgcatcagcgcgtcgagcaggcgaaatccctgctgctgaactccgagacctccctggcccaggtggcgctggcggtcggcttctgcacgcaggcgcacttctccaccgtcttcaagcgcattacgggcaacactccggcacgctggcggtgctcgagccggaacgcccaggcctcatccgcgccggctggcgacgatccagcttcggggcgcaaggccgtacctcaccttctgccgtatgcgctttcgtga

SEQ ID NO: 4677 - DNA, 381 bp, BradyrhizobiumColbertium
atggccaagaccccagtgattgcgatcgtggacgacgacgaaggcgttcgcacgtccctcgcaagcctggtgcgttcgctcggctatgaggcgcacgcctatgagtccggggtcgatttcctgcgacaaccaccgggaaacgatccggaatgcatgatcgccgacgtccagatgccggtcatgacgggcgacgagatgcaggctaagctggttgcctccggccgccgtttcccgatcatcttcatgacggcatttccgagcgagacggtgcgccagcgcgtgatggcggcgggcgcgcactgctacatcggcaagccctcgagcggcgacgaaatcatccgctgcctcgaagaggcgctggcaggcgccggaccacaatag

SEQ ID NO: 4678 - DNA, 672 bp, BradyrhizobiumColbertium
atgacacgaccaagccaagcgcatccgccggccacctcctccagttcagtcgtcatcatcgttgatgacgacgcaggcattcgcgcctcgctcgacagcctattccggtcggttggcctcgaaacacgcctgttcggctcgccggccgaactgctcggcggcacgctgcctgacggcccgggctgcatcgtgctggacgtcaggcttcctggcgtgagcgggctagacctccagggccagttgacccgccagggcatcaattatcccatcgtcttcatgacgggccatggcgacattccaatgtcggtgcgtgcgatgaaggccggcgcggtcgacttcctctccaagccttttcgcgatcaggatatgctcgacgccgtgacgacagcgctcgagcgcgacgcgcagcaccgcgccgaagccgcggcgaaggaggatatccgagctcaatacgagaccttgacggcacgcgaacgcgaagtgatgggccatgttaccgccgggttgatgaacaagcaggtcgctggcctgatcgggctcagcgagatcacggtcaagatccatcgcggcaacgtcatgcgcaagatgggcgctaagtcgctggccgacctcgttcgcaaggccgaggcgctcggactttcccagacccgcaggactacggaccaaacctga

SEQ ID NO: 4679 - DNA, 1977 bp, BradyrhizobiumColbertium
atgttgtcggcgcgatcaaatcgcggcatcaacgccgctggaatgatgcgaacgaaactggcgacgatgacgactcctgaccgggccacgcattcgtccacgagccgtgtgggcctgcggttctggtcagccttccttgccctcgcggtcttcctcgtcgatgtgctgacgccgctcgagggcgcgatcgccgttctctacgttgttgcgatcctgctcgcagcgagaacgaacaggcggaacgacatcctcgtcgcggcgtgtggctgcgcgatgctgacgatagcggcgtatctcctctcgcacgatctgcaccacatcgcctcgccggcccttcgcgccgtggtgagcctcgcagccatcgccatcaccacactgctcgcgctgcagaatcatgccgcgaccaatcgcctggcggcacaggcgcgcctgctcaatctctcgcatgacatgatcttcgtccgcgatcacgccggcgtgatcagcttctggaataaggccgcggagcagacctatggctggccggcggaagatgcgctcgggcggtccgccgacgagttgctgcagaccacctatcccgataggcgagagaccatcgagcgtgttctgctcgagaccggacgctgggaaggcagagtgaagcagcgcacgagggccggcgccacactcacggtcgatgcgcgctgggccttgcagcacgaccatctcggcaaaccggtcggcgtgctcgaaacgcacaccgatgtcacggatcgcgtggcggcgcacagcgcgctggtgcagagcgagcagcgataccgccggatgttcaacgcaagccggatcggcgtcgtggaggaggactggacagacgtacgggccacgctgggagcgctggacaccggcggcgccgaattgcgcgaccatctggcacgacatcccgatgtcgtccgctccgcccgcaggcttgccaggatcatcgacgtcaatccggccatgcagaggatggcgggcgccgacggcgcttcggccttcatcgcgaatgtggacaagctcctcagcgagaacgaccgcagcttcgtcggcgcattgctggccttcacggaaggagagcccttctacgaaggcgagaccgagatcgtcaggctggacggccgcaaggttcccgtgctgttcacgatcagctttccggccgatccggatggagatcgcaacgtgctcgctttcgtcatcgatatcaccgagcgcagacaggcgcaggatgcgctgctcgccgcacaggccgatctcgcgcatgcggcgcgcgtcgccaccttgggcgagatcagcgcctccatcgcccacgaggtgaaccagccgctggcagcaatcgtcaccagcggcgaagccggcctgcggtggctccgacgggacgtgccggacctgagggaagtcgccaccacaatgggccacgttgtcgcccagggccggcgagccagcgagatcgtggctcggatccgcagtttcctgaagaaggcaccgccccagcaggacgagttgcagattgacgagattatcgaggaggcaaccgctctggtagcccgcgagttcgcgaaagacgacgtcgccctcgccatggagatggaacccggcttgccgccgatccgcggcgatcggatccagcttcagcaggttctcgtcaatctgctgatcaatgccgcccaggccatgtccagccaatccggttcccgcctcgtcacgttgcgcaccggcaccgtcgatggcgagagcctcgcaatcacggtgcaggacagcggccccggcatcagcccaaacgacctgccgcgcctgttcgatccgttctttacgacgaagcacggcggaatgggcatggggcttgcgatctgccgaacgacggcggaagctcatggcggccagttgtcggcagagagcatccctggctcgggagcgactttccgcctgacgttgccgttcagcaaacaccacgcctcaccatga

SEQ ID NO: 4680 - DNA, 777 bp, BradyrhizobiumColbertium
atgtcgctacagctgtcacggccgcttaccaccaaggatcatgcgatcggctcgatcgatatctcaagcctcggcggcagaagtcggccttcgggatattgcgatcaggccggctgcgagggaacgacgctgcctcggggtcatctcgatgtcgccctcgctatcgaggcgccggatgcacagaggtccgagagccgtccaagggacttaatcgatcccgtgctgcggcagctttcggatgcgcttgcagcgacggaggcactgcaccatccgcattccgccatcctggccgacgcattgcgccttgccattctgacccaccgcgccagcgcgcaggcagtgacccaacgcagggaggccgagcccgatgtcgaagagcgagagggccgtgcgcgtcgtaccgtgcgatcgttgcagaaatggcgcctcaagcgcgtaatgcaatatgtcgacgaaaacctgggcgcgaagatcacgcttgagcacctcgcagccgttgccgggctgagccggatgcactttgccgcgcagttccgggcagcggtcggcatgcggcctcacgaatatctgttgaagtgccggatcgagcgcgcccaggagctgctgaagcagggggacgtctccctagtcgacaccgcattgaccgtaggattccagacccaggcacacttcacgactgtgttcaagcggttcgtcggcgatacgccctatcaatggcgcagcgcctatcttgcgcaattcatgccgctcccgcgcgccggagccatgctgtcatga

SEQ ID NO: 4681 - DNA, 219 bp, BradyrhizobiumColbertium
atgagcgagatcggcattcaactcctgatgctgccattggccggaatccatatgacgcccgtgcacaacgaggtcacgtgctggctcgaaattgcccgtgctctcggcaattcgtaccgcttggccacttcagggctgagcttgggcgcgctctatggccgcctcatcttcaccttctgcagagctaccctcacggtgtctcgcgactgcacgtactga

SEQ ID NO: 4682 - DNA, 621 bp, BradyrhizobiumColbertium
atgaagttcgtcttcatcgcgaagcaccgggcggtctggccggtggcatggctatgcgaagcactgggagtgtcgcggtcgggcttccatgcttggctgaaccgctctcccagcgccagatcccgcagtgacaaagagcttggcggtaaggtcaaggccagtttcctggcgagtgaccgcacctatggcgcgcgccgggtgtggcgtgacgtgctcgccgacggggctgactgtggcctgcaccgcatcgagcggctgatgcgcttgcaaggtttgcgagcgcggccgcggcgccggcgcttgccgaaggacagtggcgatcggcaactcgagagcgtgccagcgaacctgctggaccggcggtttttcgccgagcggccgaaccagaagtggatcgccgacttcacttatctctggacggccgagggctggctctatgtggcggcggtgatcgacctgttctcgcgccgggtggtgggctggtcgatgagtgccgccatgacggcacaactcgtgacggacgccttgttgatggctgtctggcgccgcggcaagccggatgcgctgctgcatcattccgatcaagcagtcagtatacgagcgatcagttccagcgactga

SEQ ID NO: 4683 - DNA, 246 bp, BradyrhizobiumColbertium
atggccgaccacggcatcgtttgcagcatgagccgctccggcaacgtctgggacaacgcggcgatggaaagcttcttctcctcgctcaagaccgaacggacggaaagcaaaacctacaggaccagagacgaggcacgagccgatgtgttcgaccacatcgaaagattctacaacgccacccgcaggcactcgaccatcagctgtctcagcccggttgagttcgagcgcaaggtgggattagcttaa

SEQ ID NO: 4684 - DNA, 393 bp, BradyrhizobiumColbertium
gtgtcggtcccgatcccaatcttcgatcagaaccagggcaatattctgtcggcgcagcagaaccttgccaagacgcgggcggaacgagaagcgaaccgcaacactctgatcgtcgtcgccggacgggcctacgacaacgttcagggctcgctgcgggaactcgcgatacttcgcgactccggaatcccgaaagcccaggccgcctccaacgagatcgaacagggttacggcgccgggcgcttctcgctgctcgaagtgttggacgcgcaggccaacgtcacccaggctcgtctacgggagcaggaggcgctgcagaactaccatgtcgccgttgccacgatcgaaggactcgtcggcaatcccttcgctctggcgcgggagagcgcacgatga

SEQ ID NO: 4685 - DNA, 483 bp, BradyrhizobiumColbertium
gtggcggacctgtcgacgatctgggtcgacctctcgatctaccgtcaggatctcaggcgcgttcggatcggggacgaggtcctgatcgatccggacgacggcgcgggagacatcaagggcaagatctcttacctggcacccgtcggcgcaagcgagacccagacggcggtcgcgcgcgtagttctctcgaacccggacggacggctgcggcccggactgttcgtgactgctcgtctgatccttgctgagcggaaggtcgcggtcgccgtgcgcaccggcgcgatccagacgttcgagaacaagagcgtcgtgttcgtgcgcgagggtgacgacaagctcgaggcgcgtcccgtcgagctcggagattccgaccagaaattcgtggaggtccgcgccggcatatccgccggggaaaggtatgtcgcagagaattcgttcgtcgtgaaggcggagatgggcaaaggagaggccgagcatgattga

SEQ ID NO: 4686 - DNA, 519 bp, BradyrhizobiumColbertium
gtggcgctgctgctggtgctgctgctgctcttcatgagcttcggatcgatcgccgatgcgcttctggtgttcagcggcgtgccactggcgctgaccggcggcgtgctggcgttgttgttgcggggcatcccgctgtcgatcagcgcgggggtcgggttcatcgcgctatcgggcgtcgcggtcctcaacggtctggttatcatcgcgttcatcgaacgactccggcacgaaggaaagtccgtgctcgaggccgtccatgaaggggcggtgacccggttgcgcccggtgctgatgacggcgctggtggcatcgttgggcttcgttcccatggccatcgcgaccggcgccggcgcggaggtgcagcggccgctggccaccgtcgtcattggcggcatcatctcctcgacgatcctgacgctgctggtgctaccggcgctttacgtgctgttccggaaggactctgcgccggcccctaagccggacaatgtcgacggcgctgcggtgggaagccacgcatga

SEQ ID NO: 4687 - DNA, 1347 bp, BradyrhizobiumColbertium
gtgttcgccggaaccgtgaacggagaagctctgctccggatcaaggtcagcgcctccgcccaagacaacaccatcgcccgcgtcgtcaagctggttgaggaagcgcaggagtccaaggcgcccacggaacgcttcatcgatcgcttctcgcgctactacacgccgagcgtggtggtagtcgccaccatcgtggctatcctgccgccactcgtctggacaggcgcaagctggcgcgagtggatctacaagggattggccatccttctgatcggctgcccgtgcgcgctggtgatctcgacgccggcggcgatcgccgcgagcctcgcgtccggagcgcgccgcggcctgctcctgaagggaggagccgttctcgagcgcttgcgcgacgttaccgtcgcttgcttcgacaagacggggacgctcaccgcggggaagccaaaggtcacggacgtcgtcggattcggtcacggggaggtcgagatcttgtccgttgccgcatcgctcgagcgcggctccagccatcctctcgcgcttgcaatcctgcaggcggcctccgacaagagcgctcggccgcagcatgtcgaggacttcgtaaatctggcgggagagggcgtcagggcagttctcggggggcgtacggtctttcttggctcgcccgctgcggccgaacggattgccccgcttgccgaagaccagagaaagctcgtcgaggcgctcaacgaaggggggaagacggtatcggtgctcgtcgtcaatggcgagatcgccggttgcatcgccatgcgggacgagttgaggagcgatgccgtcgcggcgctgcggcgcctggccaacggcgggggccggtctgtgatgcttacgggcgacaatccacgcaccgccgccgcgctcgcgcgcgatctcggcatcgatcatcgtgcccagatgatgccggaggacaagcagcgcaccgtcgaggcctacaagaaccagggggaggtcgttctcaaggttggcgacggcatcaacgatgcgccggctctggccgccgccgacattggcgtcgcgatgggcggcggcaccgatgtggcgctcgagaccgcggatgccgcggttcttcacgggcgcgtcgccgatgtgccggccatgatcgaactgtccagacggacgatgggcgtcatccggcagaacatctcgatcgcactgggactgaaggcggtttttctggtcaccaccatcgccgggatcaccggactttggcccgccatcctcgccgacaccggcgcgaccgttttggtcaccatgaacgcgctgcggctgctttcgataccgggccgcggtagagcgggcgagggggcgtccacatga

SEQ ID NO: 4688 - DNA, 996 bp, BradyrhizobiumColbertium
gtggcgttcgtttatgcgcgaacagcaagggcgaagggcttcctcgccgccgccttgggcattctcggcagagcatggcagctctatgtcgcctacatcctgctgttcgtcttctacgtcgtcacgatcggatacgtcgcccagcggtacggccacgcccacctgctcgacgagttcaacatccggcttctcattcgagatccggtcgagttcctcaagcacgggctcttgctcgaatacaagccgctgaacctcgacgtcctgccgctctacatcgccttgatgatcgcgtttccaccgctgctgtgggtcctcatgaggtggcccaacgtcgcgctggcgatctcggcgggcgtctacgtcgcggcacaggtgtgggggtggaatctaagggcgtatcccgccggccattggtacttcaacccgttcgcatggcagttcctgttcgtcatcggcgcgtgggttgcggtcgggggcgcgactgcggcgaggacgctcatctattcgaggacgacgcttgccgccgcctgtctctttctcctgtttgccgcgatcgtcacgctcgcagcgcggaccggccacgcggaaatggtccccgagcccgtccggtcgctgttcattccgaacaacaagacgcatctcgcgccgtaccgcgtcgtccattttctggcgctcgcgatcgtcgtctcgcgactgattccgaaggaggcgccgttcctgtcggctccttggcttcggccgctgcggctgtgcggagagcgatcgctcgaagtcttctgcgtaggcgtattcctcgccttcgtcgcctacttcgccatcgacctcgtctccgattcgctcgccttccagatcgtcgtcagtgtcaccggcatcggcatcatgatcgccttcgcctatttcaagacatggaccagggcctttcgcgcggcatccggccgaaaagcgccagagcgcgaaccgatccgtcagccacgactagcgcaaagggagcgataa

SEQ ID NO: 4689 - DNA, 249 bp, BradyrhizobiumColbertium
atgatggcttcgctgatcgaggaagccgaagcgatcaattggtacgaacagcggatgtcggtcgagaaggacaagaaggctaaggccatcatggcgaacgcgcagaaggaggagttcaagcatttcgggatgaacctcgaatttctgctgcggcggaagaaggagtggcgcgaggagctcaagggaatcctcttcacgcagggcgacatcgtcaagctcggcgagaaggccgagaaggcagtcgactga

SEQ ID NO: 4690 - DNA, 240 bp, BradyrhizobiumColbertium
atggaacgacgtggagaccagcgccggagggttctcaagaagggatcgatcgagttcggaagctccgcgatcgattgctccatccggaatctcagcgatcgcggcgcgatgttggaggttgaaagtccgctcggaatccctcgcgggttcacgcttgtggtgccggcggacggaacacggcgcgcgtgtcgtgtcgcgtgggtcaaggagaagcggttgggtgtggagttcgaagagtga

SEQ ID NO: 4691 - DNA, 474 bp, BradyrhizobiumColbertium
ttggcgctcggaagcatcttgagtctgatcgcggccataggcgccgccgagggtcgcggcagtatcgcgagcgaacgcccgtatgccgcggaacacatcgacttgcttccggtcgacatccgtcacggcctggcccgtctggagcgtccatgcggcgggaaagctgcagcgacgcactacttctctacgaccatcgacgccggcggcctgcacttcaggtcgttgcatttcgaaaacttcgcctgcgaacggcgagaagccatctgccgggcggagcgatgccttcatgaagtctacctggagcggggtggccgttcgcgccgtgtcttcagcgcctatgtcgacgacatgaagctgatcaacgccggcgggaccgtcgcattggagctcgagggaggccggccggcgatactacgttggaacggacgcacattcgcgcccgtccattcattcggaaagggccaagagcggtga

SEQ ID NO: 4692 - DNA, 276 bp, BradyrhizobiumColbertium
gtgctggtgcagacgctggtgttctcgatcgtactgctgctcctgctgctgaagacggaaggcgacccggcatctgcactgctgttcggcttcatcaccttcatgttcgtctacgtcctctacctcgtccgcctcctagagcagccgttcgccaaggggcacggctcggtggacgacgtgagcttcttcctgctcgacgaactcgagcgaaacctgcgccggacgctcgaagatccggacggcggcgcccaaaatacgaccacgacgggagattga

SEQ ID NO: 4693 - DNA, 831 bp, BradyrhizobiumColbertium
atgaccgcgacctacatgattgcggaggtcatcggaggacttgtgaccggcagcttggcgctgctcgcggacgccgcccacatgctaaccgacgtcggcggactcgcgctggcgttgctcgcgatccgcttcgccgcccgcgaagcgaccccgcagcggaccttcggctaccttaggatggaggttttgtcggcgctggccaatgcggtcgtgctgctgctgctgacggtctacatcctgtacgaagcctatcagcgcttcctgtcgccccccgaggtcttgagcggaccgatgctcatcgtcgccgccatcggcctggccgtcaatctggtcagcatgtggctgctctcgagcgggtcgtccgaaagcctgaacgtcaagggcgcgtacttcgaagtgctgagcgacatgctcggatcgatcggcgtgatcgttgccgctctgctcatgatgtggaaggggtgggcgcttgccgatcccatcatcggtgccggtatcggattgttcatcgtgccccggacgtggtcgctcctcagccaagtcacgcacatcctgatggaggggaccccgcccaacgtcgataccggtgccatcgagaagaagctgcttgccatcccgggaaccgtggccgtccacgatctgcacgtctggaccgtcacgtccggcttcgacgccatgagttgccacctcctcgtcaccgacatgtcggcgggccgggaggcgctgcgcgaggcccggaacctgatgaaggcggaatacggcatcgagcacacgacgatccaaatcgaggacgaggccatgagagctgaggaaaccgtgctccatgtctga

SEQ ID NO: 4694 - DNA, 630 bp, BradyrhizobiumColbertium
gtgtttcttctcgtcgcgaccggcgccatcggatgggaatccatattgcggctgtacgaaccggagcccgtcgccggcctgaccgtgatggtggtcgccgccatcggcatcgtcgtcaacggcgccacggccatgctgttcgcgagcggccgcaagggcgacatcaacattcagggggcatttctgcacatggcaggcgacgccgccgtttcggccggcgtcgtggcgtcagcagcgctcatcctctggaccggttggctttggctggatcctggaatgagcctggtcatctgcgccgtcatcctgtggagcacatggagccttctgcgcggctcggtcgcgatgtcattgagcgcggcaccggccggaaccgacatggaagccgtccggtcgtttctgctgcagcggccgggcgtagccaagatccacgacctgcatatctggccgatctccacgacggaaacggcgatcacgtgtcatttggtcatgcctaccggacatcccggcgacgatttcctgatggaatcggcccggctgctcaggacagagcacaagatcggacacgcgaccctgcagatcgagaccgacgagaacaacgcgtgcgcgctggcgcccgacgacgtggtctag

SEQ ID NO: 4695 - DNA, 219 bp, BradyrhizobiumColbertium
atggaccgggtgcgcgaagacgccggcagcggtgtgggcgccgaagccgaaaggcggctatgcgaggcggacttcttcgtcggtgagttcctaagccaccgccaacagaaagccgacggccgccggatgcttcggacggtcgtggatcggtgccgtcccgtggacatcatcttcgccgctgctcaagccgagctgcgcgacgacaaagaggcgaagtag

SEQ ID NO: 4696 - DNA, 231 bp, BradyrhizobiumColbertium
atggacgtggttcgccgcgaaagtgagaaggaggatgcggaatcgcgccgcatgtccaaggttcagcgcgttttcttcgtcgttggactattgacgctgatagcattgtcatccggctcgatcggcatcgtgctgtatcgtgcgtttcccgacagcaattgggtcacgctagtcgctccgctgggcgcagcggccgccgtggtcgctctacggaagctattcgctgcctga

SEQ ID NO: 4697 - DNA, 243 bp, BradyrhizobiumColbertium
atgccggacacatcgcagatcaaagagcatatggacgtgatttcttcggacaagaagaccgtgggaaaggtcgaccatctggagggtagcgataagataaagctcaccaagcagagttcgcccgacggcgaccaccatcacttcattcccgtgtcctggatcgatcatgtggaccagcacgtccatctaacgaaatcaggcgacgaagtcaccgctcactggcagcatgaaggccgcaagtaa

SEQ ID NO: 4698 - DNA, 1881 bp, BradyrhizobiumColbertium
atgagcctaaactccgcccttgccagcgcgatgagcggtctgcgtgccaatcaggccgcgctttcgatcgtctcgtcgaacgtcgcgaattcgcagacgccgggctacgtcgcgcagacaccgaaccagatcgaggtcaccaccggcgacttcggctcgaccgcgatgacgacaggcgtcagccgggagctcgacacctatgtgctgaaccagctccgcaccgagaccggcggaagcggctacgccgaccaaatggcgagcatcctgaagcagcttcagaatgtgtatggcacgcccggtaacagcggcacgctcgaaaccgcgctcaacaacttcaccacgtcgctgcaggcgctctcgaccagtgctggctcgtcgtcggcgcagagggtggcgctcggcgcggcgcaggcgttggcacaacagctcaacgtcaccaccaagggtatccagtcgctccgctccaatgtcgaacaggatctcgggacctcggcgcagcaggcgaacgcggccatgcagaaggtcgccgacatcaacaccaagctgcagggcctgtcggctaacgatccgtccgccgcgacgctgatggatcagcgcgatcaggccatcaacacgctgtcgaaatatgtcgacctccgcgtcaccaccgacggctcgaaccaggccaacatctacacaacgacgggtatccaactggtcggtgcgggtctcgcctcgcaattcacgttctcatctgccggtgccctctcggcgacctcgctctacaacatcgatccgaccagatccggcgtcggcgcactcaacgtcaaactgccgaacggctcgatgatcgacgtcgtcgccaacaacgtggtatcctcaggccagatggcggccgatctgaagctgcgcgaccagacgctggtgcaggcgcagaatcagatcgaccaactcgccgccgcgatgtcgagcgcgctgtcggacaagaccacggccggcagcacggtctccggcccgcccgccggtttcgacctcgaactcgccggcgcgcagcctggcaacaccgttaacatcacctacacggatacggccaccaacacccagcgccagatcacgctggtcaacgtcaccgatccggcggcactgccgctccagaacgcgaccaacgccaatcccctgcggatcggcttgaatttctcgggcggtatgggcgcgatcgcttcggcactcaacaccgcgctgtccggcacgaatttgtcgttcgccgcagccccatcgccggcgacggccactacgctgcgggttaccggcgacagcaccggccttaccaaggtcagttcgtcctccagcaccatgacgatctcgtcgctcacctccggcaatccgcagattccgttgttcaccgatggcggacaggccctctataccggcgcgatatcggcatcgggctctcagatgaccggccttgccggtcgcatcgccgtcaatacgcagctcgcctccgatccgagcaagctttcggtctacaacacctcgccggtgacgcccgcgggcgacaccactcgctcggactatctctactcgcagctcacgacggcggtgtactcctactcaccgcagactggcctcggctcgtcgggccagccctttaccggcagcatctcgagctacctccagcagttcctcagcgtccagggtaatgccgcgacgcaggcgatccaacttcagcagggccagaacgtcgtcgtctcgacgctccaggccaagttcaattcgacctccagcgtcaacctggactcggagatgtcgaacttgatccagcttcagaatgcctatgcggcgaatgccaaaatcatgtcggtcattcaggaaatgatggacgtgctcattaaagctcaatga

SEQ ID NO: 4699 - DNA, 216 bp, BradyrhizobiumColbertium
atgaagaagcttggtcttttggtattcggcttggccatctcgttcgctctgccggctagggcggagacggtgatcgtcaagaagggcggacatcatggtggatacggcgcgcgggcagagatgcgcggccattatggcgccggcatgtaccgcggcatgagaacgcacggaaaccggaccgtcgtcattaagcgcgggcacggccaccgctattga

SEQ ID NO: 4700 - DNA, 1983 bp, BradyrhizobiumColbertium
atgaagaaggtcatcatcggcatgatcctggcggccggtccggccgccgagggactttcagccgatctcggcgaggtccggcccggccaggccgtcgactggagcggccccttcgtcggcggccatttcgcctatggcgtcgggtcctcgcagtacgctttcggcgccccgggactggctccgtcgtccggatcgatcgacctgacgaactccctcaacgcgttcaagggaaccggctcctacgctctcggactgagcgccggatacaatcacgtgctgccctcacgcatggtcgtcggcgtcgagggcgatctcacctttccgaacacgatctccgggacggccgccgtcggcaccgcgcagcgaccggcgaccttgaaggaaaccgtcctgacgtcgggtacgctgcgcgctcgcctgggctatgcgccgggaccctggttgttctacgccacgggcggcttcgcatggagctacgatcaggcgacgctcgacggccccccgggagacaagatcggtttcactcggctcggctccgcctggggcgccggcgccgaagtcgccctgtcggcaaactggtcggcgcggttcgaatatctctacacggacttcggcgcgaaggagaaagggttcggcggcacgcagcgtctgtcctcggatctcgcggtgcagaccgcccgcctcggcctcaactaccgcttcggtcaaaatgggcagaaggttctcgaggacggcttgacgcccttcgaaaccgaccagttcagcatccatgggcagacgacctatctgcagcagtatgcggcgcctttccgctcgccctacacggggacgaacagcctcatcccgaaccagacccgtcagacctgggacgtcacgctctacgccggattccggccttgggccggcggagaattctgggtcaacccggagatcgatcaggggttcggcctgagctcgaccttgggtgtggccggatttccgagcggcgaggcctacaaggtcggatccgctgcgccctacgcccgcattccccgcgccttcttccgtcagacgttcgacctcggcggagagaccaagaaggtcgacgccgacatcaaccagttcgccggcacgcagagtgccgaccgcttggtcctgacggtgggaaaattcgccgtcaccgacgtcttcgacaccaacaagtacgcccacgacccgcgcaaggatttcatgaactggtcgatcgtggacaccggcacgttcgactacgccgccgacgcctggggcttcacatacggcgccgcggtcgagtggtacaagggcaactggacattccgcggcggcttgttcgatctgtcgaccgttcccaacagcaccgagctggatccgacgttctcccaattccagtggatcggagagatcgaacatcgccatgagatctggggcaagccgggcaaggtcgcggttacgggtttcttgacgcgcgggcgcatgggtcgcttcgacgacgccgttgcgctcgcgcaagcgacgggcacagccgcggacaccgccctggtccggcgctatcagagccgggccggcatcagcgtcaacctggagcaggaggtcacgaaggacctcggcgtcttcgccagagccggcgtcgccgacggatccaaggagtcctatgaattcaccgacatcgacgcgactgtcgccgccggcctgtcgctcgcgggttcttcctggaacagacccaacgacacgttcggattcgccggcgtagtgaacggcatctcgcaagcgcgccgcacctacctcgatgcgggcggtctcggcattctcgtcggagacggacgcctgccgaatgccggccccgagaagatcatcgaaacctactacagctttccgttgtggtcgtggcgcgcgacgctggactaccagctcgtcgtcaatcccgcctacaaccgcgaccgcggtccggcctcaatcttcggcgtacgcgtccgttcgcaattctga

SEQ ID NO: 4701 - DNA, 789 bp, BradyrhizobiumColbertium
gtgatcgaccttcatgcccatctagacctctacccggatcccgtcgcgacagccgacgaatgcagagcgcgagacctcttcgtcctgtcggtgacgaccacaccatcggcatgggctgggaccgcggcgctggcgcgaggagcggcgaagatacgcaccgcgctcggcctgcaccctcaactggctcacgaacgacggggcgaacttcagcttttcgacgagttgctccccgagtccagatacgtcggcgagatcggtctagacggcggcccggaactgaaggcgacctgggaaacgcagcgccacgtctttgacgaaatccttcggatgtgcggggcggtcggaggccgcatcatgacgatacacagcaggcgggccgccgggcccgttctcgatgcgctcgcgtcgcggtccgatgcaggcgtcgccgttctgcattggttttccgggacgcgccgcgagctcaaacgcgcggtcgatcagggttgctggttcagcgtcggcccggcgatgctcgccggcgagagaggacgcggcctggttgccgaaatgccccgcgacaggatactgaccgagacggacggtcccttcgcacaggtcgaggggcgctccctgtttccttgggacgtcgccaaggccgagccgattctcgccgatctatgggccgtggacgaaggcgaggtccggggccaattgcttacgaacctcaagcgactcacgacgcggatcgctccggagcgcggcagcgcccccgggcggggctcttcgggtgttggctgcgccggctaa

SEQ ID NO: 4702 - DNA, 1269 bp, BradyrhizobiumColbertium
ttgctttgcgcgccggccgaggtgcgtcggctaaaggagaaaggcacgctcagggtcgtcctctacggccagccaggggctgatgatcgcggcagcgcgggtgcggccgtgcgcaacgacattcgcagagcgcgtctggctccgaaccgcagggcgtgggatctgctgtccatcgcgatgtccgtcatggcggctgatgcagcgggacgacgtagcctaagtccggacggctggacacgcgagttcgagatggaagtcgcggtcgccgaaccggcattctggaacaagtccgcggacctcctcgccgacgcgttgacgtttctcacgaccgaccgatggcgattccgtttcatcgccggcggtgcagcgccgcagccgccggcggaagttttccgaccgcccgaaggcagcgtcgtgctcctgtcgggtgggctagacagcttgagcggcgccatcgaccttgcggcgtccggacagcgacccgtcgccatcagcaagacagtccggggcgatggagaaaaacagatcaggttcgcgtcgttgatcggcggcggtctgcgccacttccagttgaacgacaacgcggccgttccgggcaccgaagatacctcccagcgggcgcgctcgatcatcttccttgccttcggcgttctcgtcgccacggcgctcaagccatatcgtcccggcggcaacttgccgctctacgtctgcgaaaacggcttcatcgccatcaacccgccgctgacgggaagccgcatcggaagtttgagcacccgtacggcccacccttacttcctctcaaggttccaggacgttctcgacgccgcgaacctgggcgtgagtatccacactccttatggatacacgaccaagggcgagatgctgaagacgtgcgcggaccaggacttgctgcgcacgctggcggcgaactcgacgagttgcggccgctttcagcgctacaactatcgccattgcggacggtgcgtgccgtgtcaggtccgcagagcggccttcctcgcttggggcgaagacgatccgaccgactacgtctacgaacatctcggtcgggacgatccggatcacgccggcttcgacgacgtccgctcggtcggcatggcgctggcggcctcaaagggtgcggggttcgacgattggcttggcggagcccttgcgtggcaggggatcgagcagcgcgatgcgctgaaggatatgctacgacggggacttgccgaactcggcgccttgcacgcgaaatacggtgtcaagtga

SEQ ID NO: 4703 - DNA, 633 bp, BradyrhizobiumColbertium
ttgggcaatttcgcgcgatccggggacggccgcgaccttagacgcgggctcggacactacgtccgcaatggctacgggggatcgaatttcgcgacgcagcggttcggcggcaccgctcaaacggcgggatcgctcggccatgccctctattccacggcgcagggggatgcaaacgctcccgtcgatgcggccgcgctcgctggccggtcgaccgaagagatcgcgagcgcgatcatcgaggccgtcagaccgatcgacgggactcaggatgcggaagccgaacgtgcgtccatccacgacgcgatgtccgaattgctgacggaatacccggacgccgatctcctcgatctgtccgatcccgaacgcgagttcgtcatcgaaaaattcacggccatcgatgtggcacggcgcttcgagctggatgtcggcaagacgttgctggagagagcgcccaccgcgaccgtcgcgctggctcgactgaaacagatgcggtcgtatatcgccgagactgtggccgcctccttccgcaaactcaaggaacagggacgcaggctcaccgccggacgcgtcgcgcgcgtcgttcaggctgcgttgcgcgagacgttcgaggtcttcgaggggtacgaagagtga

SEQ ID NO: 4704 - DNA, 171 bp, BradyrhizobiumColbertium
gtggaaggaataaagcttctagccgcgctggcgctgctgctgcgagcggatctgggaggcccggccgagcgggagggcgacggcattctcgagcgcggtctgaccttcgatcttgcggcgaatatcgcggatgatccggcccagcgtaagcgaagctttgtccccatttga

SEQ ID NO: 4705 - DNA, 2613 bp, BradyrhizobiumColbertium
atggcatcgggcggaattaaggaaagcggctcagtcgttctcatcaccggcgccagtggattcatcggccgcgggattatcggacgcttgggccgacaatatacgctagtcggtctggaccgtgcgggcccccctcaccctccctctccagcgaatgtcatcgacttcgacttgacgtcagaagagagcgtgaaagcaggccttaacgagctgcagaggcgtttcggaaagcggatcgcttccgtcgtgcacctggcagcttattacgacatatcgggtgacccaaacccgctatatgaacgggtgacggttgaaggaacacatcgcctgatcgatgcactacaatcattccaggtcgaacagttcgtgtttgccagcacgatgcttgtctacaaggcaacagaccggcccgatgcaaaaatcagggaagactctccgatcgagccgtcatgggcctatccggagtcgaaggtcagaaccgagacggtgctgcgcgaacggcatggtcacatccccgtggtcatgcttcggatcgccggcgtttacgatgatctcggccattcacctttcatcgccgagcaggtgtcgcgaatttatgagcaccgcgcgacggcgcatatctatcccggcatgctttgcgccgggcagtccttcctgcatcttgatgacttagcgaacgcgatcgctcggctgatcgagcgaagagatcgccttcccaccgaattgccgctccttgtgggcgaacccgatgcgattggctacgccgaagtgcagaacatcatcggcgaggcgctgcatggcgaggattggacgactattcgcgtccccgagaccctggcgcttgccggatcgtggcttcagaccgaagtcttgggggatgatcaattcatcaagccctggatggtcgagcagtcaagcgctcactatgtactcgatatatcgcgcgcgcggcagttgctggattggcagccgcgacattcattgcgacagacattgccaaagatcatcgatgcgctgcgccgtgatccgaccgcatggtacaaagccaacaagctcaatcccgcgctcgtggcgtggtacggacagcgtccggcgccggcccagtcaggcaatgaaaagaaggatgcgcatggcgccgcccaggcctctgcgccccctcaccatgggacggatcatgccactcgaagcggccacgaccacatgtcgaagatgaaagacgaagagcgacgcacgcgatgggcgcattacgcgaacgtggggctgggtctttggctggctgccagtcccctggtttacgacgctatgcgtgcagatagcatcaatacaaatgttctcgtcgtgtctctggaccgggacctgccttcgctcgagtggcggacgagcttgctcctcgcgagcgatgtgatcagcgggctcttgattgcctgcttcggcgcgctttcgctctcgagcagaacggcctggtgggcgcaatgggcagcggctgctgtcggtttatggctgttattcgcgcccctcttgttttggagcccgagtgccgcgcaatacaataacgatctcctggtaggagcgctggtcatttcgttcgcggtgctcgtgcccatgatgcctgggatgagcatggccggcatgatggaccccaaagtaattccccccggctggacttattgcccatccacgggcgcacagcggctgcctatagccgcaatgggcctcattggcctgattatcgcccgcgtgctgacggcatatcagctcggacatgtggaccacgtctgggagccattcttttccggcaatcccaatgatccaaggaacggcaccgaggagattatcacgtctactgtttccaaggcatggcccattccggatgccggccttggggctgtcgcctatacgcttgaaatcttaatggctgtcatggggggccgcgaccgctggcgtacgatgccctggatggtgacgttcttcggcattctcgtcattcccttgggcgtcatcagcatctacttcatcattatccagcccatcgtcatcgggacctggagcacgccagcacttattgcagcgcttgcgatgctcatcatgattccattcgcattggacgaagtcatcgcgatgggccaatttctgtactggtccagttgccggggcaagccgctcattcgcactttctttaggggcgatgccgtggatgccggggcagaggatcgatcggatgggctggcgagctggggcgcattctggaccgatacaatgcggggcgtctgcgtgccttggaatctcgctggctgcatggccatcgccgtgtttctgatgttcagccgacttatcttcggcacgaccaacgcgatggctaacagcgaccatttgatgggggcccttacgctgaccgtcgcaattattgcgaccgcggaggtggcgcgtattctgcgactattgatcgtgcttttcggagcttggctgatcgcagcgccatggattctggatggggcaacgagaacggcgtcctggagtagcgtcttcctaggtgtcgcattagctattcttagtctgcggcgtggcaagagaacccgcgaacactacgctggttgggaccgcttcgtcatctag

SEQ ID NO: 4706 - DNA, 1920 bp, BradyrhizobiumColbertium
ttgaacgagctcagccgtcgccatctactccggctcgcctcactgtccggcgctgccggcttagcttcgtcagccctgccgagttgggcgcaaagcggccccttccatcctgcaagccggctctcagaggtttccggaagcagcatcgatctgaccctcgacagggcggcctggccgatcaacggcaaagcaggttccgcgatcacaataaatggaactgtgccaggtccgattttgcgcttgaaagagggacaacgagtccgcatcgctgtcacaaaccgcatggacgaagccgcttccatccattggcatggcatgctggttccattccgcatggatggcgtgcccggcgtgacctttccgggaatcccggcccgcagcaccttcgtctatgagtttcccgtcgtccaaagcggaacttattggtaccatagccactccggctttcaggagcaggtcgggctctacggcccgatcgtcatcgatccaaagggcgttgatcccgtccaatacgatcgagagtatgtggtgatgctctcggacttcagcttcctatctccagagatgatcatccagcggttgaagcaggagggcggtgtattcaactatcagcggcaaactgtcgccagtttgctcgcgggccgggaccagacgttggccgagagacttcagtgggccaagatgctgatggaccccaccgatatttccgatgtcacaggtgcgatatacacgttcctgatcaacgggtatggaccggaagataactggacgggtttgttcaggcgaggtgagcgcatccgcttaaggttcatcaatgccggcgcgcagatggtgttcaacgtgcggatacccggcctgcatatgacagttgtcgccgccgatggacagatggtgcggccggttcgcgtagatgaattccagatcggcaacgccgaaacctacgacgtcaccgtccagccgatggacgataaagcttacacgatcgtctctgaggcagtcgaccgctccggaatggggcgcgccacgctggcccccaggctggggatgacggcgccggtcccgccgcttcgtgagcgaccgctggcgacaatgaaggacatgggaatggacatgtcttccatggatatgggggacatggacaaatcaacaggatcgaacagtagcgggatgtccgggatgtcgggcatgtccaagggcgtccaaacgggcgctcaagccaaacagggaatgcagcaatcaggcggcatgcagggcatgtcggggatgtccggtaagtcgggcatggcgcgaatgtcatcatccactccgcctggaatggctccgcaaaagccgcgcggttcagacctgatgagcggccccgaaatggatatgcgcgatcccaaaaatgcaccaggcgtcaagatggggcctggcgtccagacgattgcgcccatgccgcaagatcgaacgggggatcccggcatggggcttgaaagcgtagggcatcgggtcctgacgtatcgggatttgattgcccttgagcgcaatcccgaccctcgcaccccgacccgggcgctcgacatccacctcaccggcaacatgcaaaagttcatgtggggctttgatggggaaaagttcagcgaaaccaccaaaccctacacgttccgaaaacgcgagcgtgttcgtgtgacgttgatcaacgattcgatgatgctccatcccatccacctgcacggtcatttcttcgaagtggtgaatggcgctcccgaaaaccacaggccacgcaagcatacggtcaacgtgttgccaggtggaaaagtaagcttcgacatcactgccgaaccgggtgactgggcctttcactgccacatgctctaccacatgcatgcgggcatgtttcaggtgttcagtgtgcggccactcacaggcgataacgcatga

SEQ ID NO: 4707 - DNA, 930 bp, BradyrhizobiumColbertium
atgccgggtatgagcatgcccgctaacaagccggctgccgctgttgcgccaaaaaaaaagagcgccgcaaaaggagcggcatctgcaaagacgtcgccgaactcgcaaggcgctcaggatggatcaatgtcaggcatgcaaatgcccgggatgaagaccaagggaaaaaatgccgcgcccgccgcggcgtccattcctcactcgccgcctcctccgccgccgccagaccatgctgcggattattattacgatcccgcgcagatggctgaggcgcggcgcgaactccgtcaagagcagggcggcggagtatactcgaaggtgtttttcaacatcgctgaatttcaattgggccagcccggcggttaccgctgggatggacaggcttggctgggcggcgatatcaaccgattcgttgtcaaaagccaaggcgatggcagccgtcgcgaaggtctcgacagcgccgaagtccagttgctctattcgcgagccgtggcaccttacacagacgtgcaggcaggtattcgctacgatttcaaacccgatccctcgcgggcctatctgacgttaggcgtgcagcagctctttccgtattggttcgagttcgagggagctctctttgtttcgaacaaaggagagctgctcgcccggctcgaaggatcttatgatttgctgttgacgcaacagttggttctgcaaccgcgcgccgaattgaattttgcggctcagaactcgcaggatattggcgtcggagcaggcctttccaacgccgaactaggcctaaggctgcgatatgaattccgccgggaatttgccccttatatcggcgtctcctacgatcagaagcttgggaatacagctgcgtacgcgaggagttcaggcaaagacagcggctcaacaaggtttgttgtggggctacgctcctggttttaa

SEQ ID NO: 4708 - DNA, 219 bp, BradyrhizobiumColbertium
atgctccagaccgcgccgaaccatatggcgtcaatttcaagcggtgcagggccgagtcaaaacgcaaaaagtggctaccagacccgtcccgcaggcaatcaagtcagtctggaggaggaaatgatgaagtcggctcaaaatcaaatggattatgcggctgccacctcgttgtactcgaaaagcctgaacctgcttaagacagcaatcgggaagcgctag

SEQ ID NO: 4709 - DNA, 369 bp, BradyrhizobiumColbertium
atgtggcagttgctcgcgccggccgaaaagcccaagagctacatcgtcgatgtgacggagccagaactctccttcgccgggcgcgaggggaaggcgctttttgatacgaattgtgcgccttgccacggcctgaaggcggcgggtacggaccacggtccgccattggtgcacgacatctacaatccaggccatcatgccgatgcggcctttgtgttcgcggcccagaacggcgtgcgccagcaccactggtcttatggcaacatgccgcctcaaccgcaggtgagcgcacagcagatcatgtcgatcgtacagtacgtcagagaactgcaggtcgccaacggcatccgctttcgatcgcaccggatgtag

SEQ ID NO: 4710 - DNA, 516 bp, BradyrhizobiumColbertium
atgaagcccaaggagggaacttcgcccgcgtcttcgaaaccggctcagcgcaagcaggacgcgctgaaacgcctaacctgggagataatctcgattaatttctccattgagaaacttcatcgcattcgggcaagagccctcaacatcagcggcccgcagtggaagatcttgttggccatttccgaccatgaagatgcaaacgacggaatccccgtcaacgttgtcgccaagacgttgcatgtcgacgcttcattcgtgacaacgcaatcaaaaaagctggagaacatgggctttttaagccggaagccttgtcctgcagacgcccgcgttatgcggctcgctttatcaaaagcgtcagttcagcaacttgccagcgtggccgagcaagaaatcgcgctcagcgaatttattttccaggatttttgcgagaaggagctgagcgagttcagcatcaaactcgcttcgatcaagaagcgcctggacaaggctcggttgaagctggcgctggagttttga

SEQ ID NO: 4711 - DNA, 1479 bp, BradyrhizobiumColbertium
atgaaatgccgggtcaccacggcgagcttgcggaccatgattatccgcgccctgtcgatttccgcagcggccgcgttgactctcaacccggtgctgacgccggtgatcgccgacgattatcgcccggcggcgcaggtttccgccgccgacggccagatgaacgcgcgtttcctgtcgctcggcatcggcaagtcgatcgtgatcgacctgccgcgggacatcaaggacgtgctggtggccgatcccaagatcgccaatgcggtcgtgcgctcgtcgcagcgcgcctacatcatcggcgctgcggtcggccagaccaacatcgtgttcttcgattccgccggccagcagatcgcgtcctatgacatcgcggtcaagcgcgacctcaacggcgcgcgtgccgcactgaagcagatcctgcccaattccgatatccagatcgacggcctcggcgaaggcgtggtccttaccggtaccgcccagagtccgatcgaggcgcagcaggccaacgacatcgccgcgcgcattgccggtggtgccgacaaggtcgtgaactcggtcgtcgtccgcggccgcgaccaagtcatgcttaaggtgacggtcgccgaagtcgcgcgcaacatcatcaagcagctcggcatcgatctctccgcaaacctcaattacggcacggcggtggtgaatttcgctcactccaacccgtttaccgcctacggacgcaacctggtagacggcaacaaccttaccacgaagttcggcgcaacgccgtcggtgcagacagtcctgcgagcgatggaaagcgctggcgttttgcgcaccttggcggagccgaatctgaccgcgatctccggcgagtcggcgaccttcatcgccggcggcgaattcccggttccagcgggctatgcctgcgatcccaccacccgtgtttgcaccacccagataagtttcaaaaagttcggtatctccctgaactttaccccggttgtgatgaccgagggtcgaatcagcctccgtgtgatgacggaagtgtcggacctgtcgaacgaaaacgcgatcacgctgtcacaggccgtgagctcgacgtcggtcaactcgttgacggtgcccgcgatcaagacccgccgcgtcgagacttcgctggaaattccgtccggtggcgcgatagcgatggctggcctgatccagcagcagaccaagcaagcagccagcggcctgccaggcctgatgcagcttccgatcctcggctcacttttccgcagccgcgacttcgtcaacaacacgactgagctaatcgtgattgtggcgccttatatcgtccgcgcagtcgcgcaaaaggatctgtcgcgcccggatgacggctttgcggcgccttcggatgcgcaggcagaattgctcggcaacatcaaccgcatctatggcgtgccccgtcggaccgagccggcgcgcaaatacgggggctcctacgggttcattgttgactaa

SEQ ID NO: 4712 - DNA, 129 bp, BradyrhizobiumColbertium
ttggcgctgcgcagcatctccgaggccaatgccaaggaacccgcgtcggatgagccgacacgcaagcgcggcgagagcatctcgatcatccggttcggcgtgccgagccagatgacggcacagaagtga

SEQ ID NO: 4713 - DNA, 522 bp, BradyrhizobiumColbertium
gtgccactctggcgcgcacgggcgagcgtctcggtctgttccggcgtgacctcgagcaggacggttcgggccggcgacggcgcggacgtcaggcggcagcatcgcagccctgacgccgcagaagtcggccttaacctacttctggtcgcggatgtctcaccccgcattaaggaagcacgtgcgatcgcgccgagcctgggtgtttccgatggacgatcggtgcggcgaatgaaggtggcgctggcggtcacggccgggcaggtctgccacgggacctcttccggcttgacgggctggccgggggccgatggcgttcttggcgacgaggacgtcaatgatgggaagctgtacgaccgggcggcgggaggcggggctgacttgtcggagcagccggcgaggcgcgcggcttcgccggcaccagtggcggccaccaggattacggtgcgtgccttacccatttcgctttacaatcatgcggcgtccagctcccagttgagcagtcatttgtcaaagtatggttaa

SEQ ID NO: 4714 - DNA, 150 bp, BradyrhizobiumColbertium
ttgatcctgcaatttcaggcatccaggggcgctaacgatagcctggccaagcgccgtgcccgattgatgcgcatggccgtggttgcggcgacatcagaggcgttgacggtacaacttccctcgcgctcgggaaaatctgcgcgcgcttga

SEQ ID NO: 4715 - DNA, 1866 bp, BradyrhizobiumColbertium
atgggtttgaattcagccttggccagtgcgatgagtggcctgcgtgccaaccaggccgcactctcgatcgtctcgtcgaacgtcgccaactcgcagacgccaggttacgtcgcccagacgccgaaccagatcgaggtcacgaccggcgacttcggatcctcggttatcaccaccggcgtcagccgcgagctcgatcgttatgtgcaggaccagctccgtacggagaccgggggcgctggctacgccgatcaaatggccaacatcctgaagcagttgcagagcgtctatggcaaccccggcggcagcggcacgctcgaaagcgggctcaacaagctgaccagcgcattgcaggcgctgtcgacgagtgcaggcgcgcagtcggcgcagaccgtagcgatctcagccgctcaggcattggcgcagcagctcaacgtgtccacgaagggaatccagtcgctgcgctccaacgtcgagcaggacctcggcatctcggcgcagcaggccaacgcggctatgacgcagatcgcagccattaacggaaagcttcagggcctggccctgaacgatccgtccgccgcaacgctgatggaccagcgcgaccaggcgatcaacacgctgtcgaaatacgtcgacgtgcgggtcgtaaccgacgcttcgaatcaggccaacatcttcacaaccacgggcattcagctcgtcggcgccgatctcgcatcgcagttcgccttctcttcgagaggcgcactcaatgcgatcgcgctttacgatcccaatccggccaagtccggcgtcggcgcgctgaacgtcaagctgcccaatggctcttcgatcgatgtggtcgccaacaatgtggtatcctcgggtcagatcgccgcagatatcaagctgcgcgaccagacgctggtgcaagcgcagacccaaatcgaccagctcgccgcagcaattgcgagcgcgttgtcagaccagaccgcggccggcaaggctgtaacgggaccgcctgccggcttcgacgtcaatctgtcaggcgccttgcccggcaacaccgtcaatctgacctatacggataaaacgagcaatacccagcgccagatcacgctcgtcaacgtgactgaccccgcggcattgccgctccaaaacgcggggaatgccaaccctctcaaggtcggggtcgacttcagcggaggcatgacctcgatcttggcaacgctcaactctgttttcggaggcacgcctttgacgttcgccacctccggcgcgacgttgcaaatccgcgacgacggcacgggctcggcggccgtcaacagtgcctcgctcaccaagaccatctcgtcgctggcgtcgggcaatccgcagctgccgctcttcaccgacggcggcgcgctctataccggcgcgatcaccgcggccggctcgcagatgacgggacttgccgggcgcatccaggtgaacgcggcggtactgagcgatccgaccaagatgtcgatctatagcacctcgccgcagacgccagccggcgacaccacgcgttcggactacctctattcccagctcaccaatgccgtattctcgtactcgccgcagaccgggctcggctcaacagggcaacccttcaccggttcagtttcgcgctatctgcagcaattcctgagcgtgcagagcaatgcatcgactcaggcgacgcagctgcagcaggggcagagcgtcgtggtttctacgttgcaagccaagttcaactcgacctccagcgtcaacctggacgcggagatgtcgaacctgatccagttgcagaacgcttacgccgccaatgcgcgcatcatgtctgttgtgcaaacaatgatggacactctaatcaaggctcaagcatag

SEQ ID NO: 4716 - DNA, 1263 bp, BradyrhizobiumColbertium
gtgattgccaaccagaccgaggcgacctacaaatttacggacaatgccggcttcaagcataccgcgctgggcggcttcgaatacgaccgggagaggtcgtcgatcgaccgctatctcggcctcagctcggaagcgctgcccggcggctttagcgggaacggttcgctggcgggcgtgagcgtgttctatccgcagttcaccaacctccccttcggtgtgccgtttggcctctcgggattgccgaccaagatcgcgatcgacaccaagagcatctacgtcatcgattccgccaactacaacgacctactgatcctcaatggcggcgtccgctatgacgactacaacatcaaggtgaacggctacggcaccgtcaacggcgtcgccaacgtcttcggtcagcaagagcagcatacggggatgccgaacttcaacctcggcctgacgctaaagcccttgccgaacggaagcgtctacgccgcctacgccacatcgtcgaacccggtcggcgcggagttcgacggcaccagcatccagtatggcggccttgcaccggtgctgaacggcaatccgcctcagatcttcggtccggagaagaacagggcgatcgaaatcggcaccaagtgggaattgttcgaccggcacgcgctgctgaccgccgcactgttccagaccgaaaaggaaaacgcacgcgagtcacgcaacatcacggccgcaactgcgaccgcggcgtgtccctacccagccggcaccaccggtaccgtctcctgcctcagcgcgggcgcggcctatcgcatccgcggcatcgatctcggccttggcggcaacatcaccgacaaatggagcgtcatggcgggactcgtgctgatgcagtccgaggtcacgaagtccaacatcccgcccgccaataccacgctctatgcaaccaatgtcggccggccgcttgcgaacgtggcgcaccagtcgttgagcctgctcagcaaataccaggtgactgatgtctgggagcttggcggccaggccgtctatcgttcgaaggtatatggcggcacgttcctcgccgccaaccaaggcacatcgatcccgagctactggcgcttcgacgcctttgccgaggcgaagatcaaccagaactggaagctgaaggttcacgtcaacaacatcttcgacaagcgctactacgatgcgctgtatcagagcgccgcaccgttcgtcttccaagctccaggacgcgcagcctatcttgtgatttcagcgcgatactaa

SEQ ID NO: 4717 - DNA, 1052 bp, BradyrhizobiumColbertium
gagtttgatcctggctcagagcgaacgctggcggcaggcttaacacatgcaagtcgagcgggcgtagcaatacgtcagcggcagacgggtgagtaacgcgtgggaacgtaccttttggttcggaacaacacagggaaacttgtgctaataccggataagcccttacggggaaagatttatcgccgaaagatcggcccgcgtctgattagctagttggtagggtaatggcctaccaaggcgacgatcagtagctggtctgagaggatgatcagccacattgggactgagacacggcccaaactcctacgggaggcagcagtggggaatattggacaatgggggcaaccctgatccagccatgccgcgtgagtgatgaaggccctagggttgtaaagctcttttgtgcgggaagataatgacggtaccgcaagaataagccccggctaacttcgtgccagcagccgcggtaatacgaagggggctagcgttgctcggaatcactgggcgtaaagggtgcgtaggcgggtctttaagtcaggggtgaaatcctggagctcaactccagaactgcctttgatactgaagatcttgagttcgggagaggtgagtggaactgcgagtgtagaggtgaaattcgtagatattcgcaagaacaccagtggcgaaggcggctcactggcccgatactgacgctgaggcacgaaagcgtggggagcaaacaggattagataccctggtagtccacgccgtaaacgatgaatgccagccgttagtgggtttactcactagtggcgcagctaacgctttaagcattccgcctggggagtacggtcgcaagattaaaactcaaaggaattgacgggggcccgcacaagcggtggagcatgtggtttaattcgacgcaacgcgcagaaccttaccagcccttgacatgtccaggaccggtcgcagagatgtgaccctctcttcggagcctggagcacaggtgctgcatggctgtcgtcagctcgtgtcgtgagatgttgggttaagtcccgcaacgagcgcaaccc

SEQ ID NO: 4718 - DNA, 2064 bp, BradyrhizobiumColbertium
ttgaaccacaggacgtcacgcggcactttcgggcgcgagaccgggatcatcgatctcggccacgagccgccgctgtccgtcgatggctccgaagccgccgtgatcgaccgtcgccgcgtctcggtgcaatggttcagtgggacaattctgaccggactctgcggcgcagccctgatcggcggcgccgttttcgcatcgctcgacggcgaaatgaccttcgccaaggtgccggagcgggtcgaaggagcgctgcgcggtgcattcggcgccgccgatcgcgcggccacgctgcacaagagcgatcgcctgccgccgccgagcgaatccacggcctcgcgcaacatcgtgcgcgtctcgacggttgcccgcgtcggtagccgcgacgtgatgcgggtgcgccccttcgtccggatcgccggaaatttgtcgatgacgacgagcgacctgtcggcgaagatcccaccgttcaacgcccagcgcctgctcaccgatgtcggctccgatccgaagacggcatccgacgatcccaacaatccggaagccgtcgagcccgacgcggaagtgtccttcgtcaccaaggacctgtcggcggtgctgccgaaggccaagatttccgcggtggtggcgctcgacgatatcctgatgcgggtccgcgacgccgccaactggcgcggcaatggcggcgtgcgttacgcctcgcttgccaatgccacggccgacatctccggcgcgaccggcccctccgacatcaagatggcctacgccaccgaaacgtcctcgtccgatccctatgccggtttcgagacgcgcgtggtgccggagaacgtcacgctgctgcccaagaccaaggagcagatcaccggcggcaatcccaacggcgaacgcgtccacatggtcaagaagggcgacagcgtcgctggcgtgctgcgcgatctcggcgcgaccgccgaggagatcaaggccatcacggcaacgctcggcccgcgcggccgcgatggcggcctcaaggaaggcgagaagctccgcatcctgatggcgcccgcaagccccggcgcgcgcctgcaaccctaccgtgtcgtcatcgccaacgagaccatggtcgaggcgattgccgcattgtccgatctcggcaaatacgtcgcggtcgacgtctccagcatgaataccgtcgcggacgctgcggccaacgccagcagcgacgacgacagcgatgacgacggctccggcgtgcggctctaccagagcatctacgagacggcgatgcgcaacaaggtgccgatgcccgtcatcgaggacatgatcaagatctactcctacgacgtcgatttccagcgcaaggtgcagccgggcgactcgttcgatgttttctacgccggtgaggacgagggcgtgacgtcgagcgaaaagaacgaggtgctgttcgcctcgctgaccgtcggcggcgagaccaagaaatactatcgctaccagagccccgacgatggcgtcgtcgactactacgacgagaccggcaagagcgcgaaaaagttcctggtcagaaagcccgtcaacaacgccatcatgcgctccggtttcggcggccgccgtcacccgatcctgggctatgtgaagatgcataccggcgtcgactggtcgacctcctacggcacgccgatcttcgcctccggaaacggcatgatcgagaaggccggccccgagggcggctacggcaagtacatccgcatcaagcacgccaacggctatgagaccgcctatggccacatgtcggccttcgccaagggcatggagcccggcaagaaggtgcggcagggccaggtgatcggcttcgtcggttcgtcgggcctgtcgaccggtccgcacgtccattacgagatcctggtcaatggccgcttcgtcgatccgatgcgcgtgaagctgccgcgcggtcgttcgctggaaggcccgatgctggcaagcttcgaaaaggagcgcgaccggctcgagggcatgatgagcggccgtggcagcgccatcgcccgcatgtcggacgcaacgggcggtcccttgcaggtcaccaaccggtag

SEQ ID NO: 4719 - DNA, 1620 bp, BradyrhizobiumColbertium
atgaagaatgggctcgcctgcgcagctgtcgtcgctgcgctgttctcagccacgaccgcttcggccgacggctgggaggtcacaaggctcgttccaggctcggccttccacggcgtgcacgggctcgcggtcgacaaagccggccatctgtttgccggcagcgtcgcgggcgcggcgctctacgaggtcgacatcgccagcggtagcgccaaggttgcaatcccggcgccggtcggaatggccgacgacatcgcgttcgcgcccgatggcaccatggcctggaccggatttctcgccggcgagctctatgcacgcaagggcgacggccggatcaagaagctcgcgagcggccttcccggcatcaactcgctcgccttccgcaaggacggcaggctctacgccaccaccgtcttcctcggcgacacgctttatgaaatcgacgtcgagggcatcaagccgccgcgtcagatcatggagaagatgggcggactcaacggcttcgagttcggtcccgacgacaagctctacggtccgctctggttcaagggccaggtcgccaaggtcgatgtcgacaaggcggagctgaccgtcgtcgccgagggcttcaaagtgccggccgcggtgaacttcgattccaggggcaacctgttcgtgatcgacaccgcgctcggccagctcgtccgggtcgaccccaaatcgggcgccaaggccaccgtcgcgcaattgaagccgtcgctggacaatctcgccatcgacggcagggatcgcatctacgtctccaacatggccgacaacggcatccaggagatcgatccggcgaccggccaagccaagcagatcatcatcggcaggctcgcgctacccggcgggatcggcgtcacctcggagaacggcaaggacacgatccacgtcgccgacgtgttcgcctatcgcacggtggacggggccaccggcgaggttaccgagaagacgcgcatgcatgccgccggcaggacgctcgaataccccatgagcgcgacggcgaagggcaacgacgtgatcctgtcgagctggttcaccggaaccgtgcaggtcatcgacggcaagaccggcgcgacgcgagacatgctgcacggcttcaaggcaccgcatgacgcggtcgtgctcgcggacggcagcatcctggtggccgagcttgggaccaagtcactggtcaaggtgagcggtgagcatggcaaggatcgcgtcacgctgatcggcgatctcgagggaccggtggggctggtccgcggcgccggcgacgaggtctacgtcaccgaagcctttgccggcaccgtctccaggatcgacggcaatggcaagaaggcgctggtcgccaaggagctgaaaatgcccgaaggcatcgcgcgcaccagcgacggccaactgatcgtggcggaggtcggcgccaaacggctgatcgcgatcgcaccggagagcggcaaaatcaccgagatcgcggccaatctcccgatcggcctcaccggcgcccctggcggcctgccgacgcatatcccgaccggcgtcgccgtcggtgcaacgggcgcgatctacttcagctcggatgtcgagaacgcgatctacaaggcggtgaagaagtag

SEQ ID NO: 4720 - DNA, 267 bp, BradyrhizobiumColbertium
atgacgcgcctctcacgcgacgatgtcgtcaaagccgtggaccgcgccgacgatgtcaccattgcccagatcatcggaacaggcgcgaccgctgaggaactcgccgaggcccaggcctggctcgccaatgacgagcccatgatcaacgatttgcggccgctggcgcagggacgggtgcgcgagttggttgatattctgtcggagctggaagaggacgacgaggaggctggaccggcgaaagcgggctcagcgcccgcagccggctag

SEQ ID NO: 4721 - DNA, 2640 bp, BradyrhizobiumColbertium
atgaacatcgagaagtacaccgaacgctccaggggcttcatccagtctgcgcagtcgctcgcgatgcgcgaggggcaccagcaattctccaccctgcacgttctgaaagtcctgctggacgacaatgagggcctcgctgccggtctgatcgaccgtgccggcggcaattcccgtgcaatcctgaaggcgaccgaggacgcgctcggcaaggtgccgaaggtctccggcggtggcgccgggcagatctacctcgcgccggagcttgcccgcaccttcgacgcggccgagaaggccggcgagaaggctggcgacagtttcgtcaccgtcgagcggctgctgctcggcctcacgctggagaagaccagcgaggccggcacgatcctcaataagggcggcgtcaccccgcaaaacctcaatgcggcgatcgaggcgttgcgcaagggccgcaccgcggattcggcgaccgccgagaacgcctatgacgccctgaagaaatatgcccgcgacctgacccaggctgcgcgcgacggcaagctcgatccggtcatcggccgcgacgaggagatccgccgcaccatccaggtgctgtcgcgccggaccaagaataatcccgtgctgatcggcgagcccggcgtcggcaagactgccatcgcggaaggccttgcgctgcgcatcgtcaacggcgacgtgccggagagcctgaaagacaagaagctgctctcgctcgacctgggcgcactgatcgccggtgcgaagtaccgcggcgagttcgaggagcggctgaaggccgtgctccaggaagtgaccgggagcgagggcactttcatcctgttcatcgacgaaatgcacacgctgatcggcgccgggaagggcgacggcgcgatggacgcctccaacctgctcaagcctgcgctcgctcgcggcgagctgcactgcatcggcgcgaccacgctggacgagtatcagaagcacgtggagaaggacgcggcgctggcgcggcgcttccagccgatcttcgtcagcgagccctcggtcgaagacactatctcgatcctgcgcggcctgaaggacaagtacgagcagcaccatggcgtgcggatcaccgattccgcgcttgttgcggcgacgacgctgtccaaccgctacatcaccgaccgcttcctgccggacaaggcgatcgacctcatggacgaggccgcggcgcggctgaagatgcaggtcgattccaagccggaagagctggattcgctcgaccgcgagatcatccggctcaagatcgagcaggaggcgctgaagaaggaaagcgatctcggctccaagtcccggctccagaccctggagaaggaccttgccgagctagaggagaagtcggctgccctgacggcgcgctggagcgcggagaagagcaagctctccgatgcccagaagctgaaggccgagctcgatggcctgcgtgtcgaactcgccaacgcccagcggcgcggcgaattccagaaagccggcgagctggcctatggccgcatcccgcagctcgagaagcagctagccgacatcgaggccaaggagaactccggcgagatgatggaggaggcggtgaccgccaaccacatcgcgcaggtggtctcgcggtggactggcgtgcccgtcgacaagatgctggaaggcgagaaggagaagcttctcaagatggaggagcagctggggcagcgtgtcgtcggccaggccgaggccgtgcgtgcggtcgcgaccgccgtgcgccgttcgcgagcgggcttgcaggacccgaaccggccgacaggctcgttcatgttcttgggccccaccggcgtcggcaagaccgagctgaccaaagccttggcggagtacctgttcaacgacgagaccgcgatggtccgcctcgacatgtccgaatacatggagaagcactcggtctcgcggctgatcggcgcgcctccgggctatgtcggctatgacgagggcggcgcgctcaccgaggcggtacggcgccggccctaccaagtggtgttgttcgatgagatcgagaaagcgcatcccgacgtcttcaacgtcctgttgcaggtgctcgacgacggccgcctgaccgatggccagggccgcaccgtcgatttccgcaacacgctgatcatcatgacctcgaacctcggttcggagtatctggtgaaccagccggagggcgaggacacctcggcggtgcgcgagcaggtgatgggaatggtgcgggggcacttccgccccgaattcctcaaccgcgtcgacgagatcatcctgttccaccgcctgcagcgcagcgagatgggccgcatcgtcgagatccagttcacgcggctgcagaagctgctgaccgatcgcaagatcgtgctgacgctcgatgccgccggccgcgactggctcgccgccaagggctgggatcccgcctacggcgcaaggccgctgaagcgggtgatccagcgctatctccaggacccgctcgccgagatgatcctcgccggcgacgtcagggacggcgacagcgttgcgatctcgtccgaaggcaatgtgctgaccttcaacggcaaggcgccgcagaccgccgagattgcgcagttcgaggcgccggtggcgaagcgcaagctgaattga

SEQ ID NO: 4722 - DNA, 789 bp, BradyrhizobiumColbertium
atgatagacagccacattgccgagattaccgatctctaccgatacccgatcaagggcctgacgcccgaacgcctgtcgcgggtccctttgcgggtcggcaagaccctgcccgccgatcgccgctacgccatcgagaacggcccgagcggcttcgatcctgatgcgccccagtggaagccgaaaatccagtttctgatgctggcgcgcaacgagcggctggctgaactccatacccggttcgacgacgccagccatgtgctgaccatcagcagggacggccgaatcgtcgcgagcggggacctcgagaccgccgccggacgtgcggccatcgaggcctatttcagtgagaacttccagccggagctgaagggcccgcccaaggttctgtccggccgcgaccacagcttctccgacgtcgcccgcaaggtcgtctcgatcatcaatctcgacagcgtccgcgcgatcgagaacatgctggacggcgtcgccgtgcatcccctgcgctttcgcgccaatctctacgtcaagggctggccggcttggtcggagctcgacctcgtcggccggacgcttgcggtcgggcaggcccggctgcaggtggtcaagcgcatcgtccgctgcccggccaccaatgtcgatcctgaaacggccaagcgcgatctcgagataccgccgacgctctcgcgccatctcggccacatggattgcggcatctacgccgaggtcatcgccgacggtgacattggcgtcggcgatgcggtggcggtggaggagccgaagctggtgtga

SEQ ID NO: 4723 - DNA, 645 bp, BradyrhizobiumColbertium
atggttgagttgtttgcgtttcgcctgtcgcgttgtgttgtcgcgctggcgcttttctttgcggcggtcgccgcgttcgtttctccggcctcggcacggccgcttcatcgtcatagcgcagagcggcacagtcacgtgcaccacgccagacatcatcatcaccgccatcatgcacgcagctcgcgcttcgcgcggagcgcggcacagctgcaggcgagtggcttcgacaacacccaggccagctatgatccgaatgccaacgccggcggtgcggggatgaacggcggcttcggtggcggatcgggtctcgtgtccgaagcgcgccgctatctcggcggcaatccgaccgggcgcggcagactttggtgcgcgcgcttcatgaatatggtgctgcaacagaccggccatcagggtaccggctccgacatggcgagctctttcgcgcgctacggcacgcgcgtgtccggcccgcaggtcggcgccatcgcggtgatgtcgcgcgggcgccggggcggccatgtcggtatcatcaccggcatcgatgcgcagggcaatccgatcatgatctccggcaacagcggcaaccgcgtccgcgaagcgccggtctcgcgcggccggatctatgcgtatgtgatgcccaattga

SEQ ID NO: 4724 - DNA, 1884 bp, BradyrhizobiumColbertium
aatcaagtgccttaagggtgttcggtggatgccttggcgctgagaggcgatgaaggacgtgctacgctgcgataagccgtggggagctgcgaagaagctttgatccgcggatttccgaatggggaaacccaccttcgatagccggaactccaagaccttgggttttggggttcgaccagaaatgatcgggaccatgaccgcaaggttttggatttccggttatcaagagaaggtatgagacttctgaatacataggaggtttcaagcgaacccagggaactgaaacatctaagtacctggaggaaaggacatcaacagagactccgttagtagtggcgagcgaacgcggaccaggccagtgatacatcaaagacaataggaaccagtcaggaaagctgggcctcagagggtgatagccccgtacgagtaatgcgatgatgtatccacgagtaaggcgggacacgtgcaatcctgtctgaacacggggggaccaccctccaagcctaagtactcctcagcgaccgatagtgaaccagtaccgtgagggaaaggtgaaaagcaccccgacgaggggagtgaaatagacctgaaaccggacacctacaaacagatggagctcaagattcgttctgggtgacatcgtaccttttgtattatgggccagcgacttaatttaacgagcaagcttaagccgataggcgaaggcgtagcgaaagcgattctgaatagggcgtcaagttcgttgtattagacccgaaacctagtgatctagccatgagcaggttgaaggtgaggtaacactcactggaggaccgaacgggtgcctgttgaaaaaggctccgatgacttgtggttaggggtgaaaggccaatcaaactgggaaatagctggttctccgcgaaagatatttaggtatcgcctcgcacgaatgcttcggggggtagagcactggatgggctagggggacttaccgtcttaccaaacccaaccaaactccgaatacccgaaagcaatatgcgggagtcacacggcgggtgctaacgtccgtcgtggagagggaaacaacccggacctacagctaaggcccctaattcgtggctaagtgggaaaggatgtggaaatcccaaaacaaccaggaggttggcttagaagcagccatcctttaaagaaagcgtaacagctcactggtctaaataagggtttctgcgccgaagatgtaacggggctcaagccacgagccgaagcttagggtgtagtccgcaagggctacgcggtagcggagcgttctgtaagcctgcgaagggcgactcgtgagagcgcctggaggtatcagaagtgcgaatgctggcatgagtaacgacaaacactgtgaaagacagtgtcgccgaaagtccaagggttcctgcgtaaagttaatcttcgcagggttagccggtccctaaggcgaggccgaaaggcgtagtcgatgggaatgcagtgaatattctgcagccagtggatggtgacgaatcccgtgtgttgtccgaccttactggattggttgggcctcgaaggggttccaggaaatagcctccacatcagaccgtacccgaaaccgacacaggtggactggtagagtataccaaggcgcttgagagaactatgttgaaggaactcggcaatttacctccgtaacttcgggataaggaggcccattgctcgcgcaagcgggcagtgggggcacagaccagggggtggcaactgtttaacaaaaacacagggctctgcgaaatcgcaagatgacgtatagggtctgacgcctgcccggtgccggaaggttaagaggagaggtgcaagccttgaatcgaagccccggtaaacggcggccgtaactataacggtcct

SEQ ID NO: 4725 - DNA, 132 bp, BradyrhizobiumColbertium
ttgaaggcgagcgccgaaaatgatccggagataatgaaggatccgcgcaacaacctgctgcacgacccaactcggatcgatctcctctttacgatgtcagaaaacacgcatcttgctgtctatccagactag

SEQ ID NO: 4726 - DNA, 73 bp, BradyrhizobiumColbertium
ggggccatagctcagctgggagagcgcgtgctttgcaagcatgaggtcgtcggttcgatcccgtctggctcca

SEQ ID NO: 4727 - DNA, 74 bp, BradyrhizobiumColbertium
gggcttgtagctcagttggttagagcgcgcgcttgataagcgtgaggtcggaagttcaagtcttcccaggccca

SEQ ID NO: 4728 - DNA, 467 bp, BradyrhizobiumColbertium
ttgggttaagtcccgcaacgagcgcaacccccgtccttagttgctaccatttagttgagcactctaaggagactgccggtgataagccgcgaggaaggtggggatgacgtcaagtcctcatggcccttacgggctgggctacacacgtgctacaatggcggtgacaatgggatgctaaggggcgacccttcgcaaatctcaaaaagccgtctcagttcggattgggctctgcaactcgagcccatgaagttggaatcgctagtaatcgtggatcagcacgccacggtgaatacgttcccgggccttgtacacaccgcccgtcacaccatgggagttggttttacctgaagacggtgcgctaacccgcaagggaggcagccggccacggtagggtcagcgactggggtgaagtcgtaacaaggtagccgtaggggaacctgcggctggatcacctcctttctaaggat

SEQ ID NO: 4729 - DNA, 1476 bp, BradyrhizobiumColbertium
gtggacacgcttccgaacgaaggcttccgcccggtggacctgtgtggctacaccgaagccggccaagtgcgcttcgcctccatatgggagcggacaacgacgccggaatgggtggcacgccacggcatgacggccggagaataccagcagcagttcaatcattgggccacccacggcttcatcctgcaccgggtgagcggctacctggacggcgggcaaacccgctacgcggcactctggagccgcggaccggacctgacctggcaggcccggcacgggatcgacgccgcgcaacatcagacggaattcaacgccctggtgaatcgcggctatcggctggtcaagggaaacgggtatcccgagggcggcacggttcactacgcctcgatctggcacaagcccttcctgtcggatcgtgatgagacgacgatccgccaggcggtgcagaacttcatgaccgctcacaacgtgcccggtgtctcgatcgcgatgacccgcaacggcgcgctgatgttcgcacgcgcctttggcaactcggatagcgccggaacgccggtcctgccaagccacctctttcgtatcgctagcgtgtcaaaaccgatcacctcgatggcggtcttccgggcgatcgaagccggattgctggcgctcaccgatcgggtcttcgggcagggcggcatcctcggcacgcagttcgggacactgccctatccggatcagcgggtcacgcaaatcacagtgcagcatctgcttgagcacaccagcggctggagcggcgcgcaggacccgatgttcggccagcccagcgccacacacgcggatctgatcggccagatggttggcctcacgcttgcaaacaacccgggtgcgatctttgactatctgaacttcggctattgcgtgctcggccgcgtgctggagcaggtgtccggcttgagctacgccgacttcgtgcgacagcgggtgctcgcgccctgcggcgtgacggacatgcacatcgccggagacaccctggctcagcgccgttcgaacgaggtcacctacacccagcagggaacgtttaacccctacgccctgcccgtcgctcgcatggatgcccatggcggctggatcgccaacccgaccgacctcttgcgcatcgcgctccggttcgacggcttcccgtcgaggccggacctgctccagtctacgaccgtcgccaccatggcgaccgccaccactgcgccggctgcaggcggcggagccgccaactacgccaagggctgggccgtgaacagcgcgggcaactggtggcatctcggcgacttcgccggcaccatcagcgaactggtccggacctccgacggcttctgctgggcgatcctcgccaacacccgcaacgacgcccagctcaacgccatgcgagcggcgatcgacaatctcggatggacgatcaagaacggcatcaccgactggccggcgggcgacgcgatttga

SEQ ID NO: 4730 - DNA, 141 bp, BradyrhizobiumColbertium
atgatgaagtgcgccgacatcatgagcaacaggccgaggatagccaagcacgatctcaaggtgaacgtcccggatggcactgacatcgacgcgacacttgatgacggtgctccgcaatgggaagaccgctgggaagaatag

SEQ ID NO: 4731 - DNA, 393 bp, BradyrhizobiumColbertium
atgcttgcaatcgccatcgtgaaccttgcgccggccatcgccgcgacgccgaagggccccgtcgcttctcctgccttacagaaggaattcgatggcttcatggagaagtttcgcgcggcgctgagcgcaaacgactccgccgccgttgccggtatgacgcaattgcccttcatgaatgacaacgcaattcgcgacgccgcgcaattccgtaccaagatctatccgacttcgttcacggcgaagaatcgcgcgtgtatccagcgcggcaaggccttctacgatcgcgatcaacagaacaatgactattactcagtcttctgcggccagctcatcttcctcttcactaagacgccggcgggcttccttttcacggatatcggcgcgaatgactga

SEQ ID NO: 4732 - DNA, 138 bp, BradyrhizobiumColbertium
ttggccgatcgcggcgcgcggcgcggtcacctgagatcggcgcgtgatggcgcgtcgatctccaccgtcgtcgcggacaacgaagtgcagatccgagacccatatgccacagcattggttgggcgagacgcggagtga

SEQ ID NO: 4733 - DNA, 1137 bp, BradyrhizobiumColbertium
atgtcccttccacccgcccaaatcggcgcgccgctctccgagatcgatacaccggcgctgatcatcgacctcgacgccttcgagcgcaacctcgagacgatggcggcggcggtcggcaagctcggcgtccggttgcggccgcatgcgaagacccacaagtcgccgatcatcgcggccaagcagatcgcgcgcggcgcggtcggcatgtgctgccagaaggtcgccgaggccgaggtcctggttgcgggcggggtgagcgacgtgcttgtcagcaacgaggtggtaggcctgcggaagctggaacggctcgctgcgctggcgcgccacgcgcgcatcagcgtttgcgtcgacgatgcgatcatggtcgagcaattgtcgcacgccgcggagcgggcaggatcgcaaatcgaagtcctggtcgaaatcgacgtcggcgccggtcgctgcggcgtcaggccggggccggcggcggccaccctggcgcggcaggtggcggcatcacgcttcctgtcgttcggcggcttgcaggcctatcacggctctgcccagcatttgcgcacgccggaggagcgccgcgcggccatcgccggtgccgcgaacgcgaccgcggagacactgcgcgtcctcaaggacgcgggctttcagtgccggacgattggaggtgcgggaaccggcacattcgagctcgaaggcgcgagcggcatctggaacgaattgcaggcgggctcctatatcttcatggacgccgactacgccaagaacctcgccgacggggcgcacaacgccaatctgttcgagcatgcgctgttcgtgatcgcgacggtgatgagcaccggcgccggcgaacgcgcggtcatcgatgccggccacaaggcgctgtcgaacgacagcggatttccggtcgtgctcggccggcccgacctgcgctatcatcggccctccgacgagcatggcctgctcgatttcgacagcgcttcgtcgcggctcgcgctaggcgacaaggtgacgctgatccccggccattgcgaaccgaccgtcaatctctacgactggtatgtcggcgtgcgcggcttccatacgccgaatgcccgcgtggaagcgctttggccgatcgcggcgcgcggcgcggtcacctga

SEQ ID NO: 4734 - DNA, 1401 bp, BradyrhizobiumColbertium
atggacaccggatcgaaccggacgctcgccgagcgactgatcgaccagctcgccgaccgcatcggcggtctcggcgtggagctcgccgacatcgccggtaacgtccaggaagtcgcaaaccgcgtcgcgaaccagtcggaacggttccatcatctgcagaagacggccgagacgatggtgtcggccaaccatgacatcgccaatgcctcgcaggcggtgcagacgaccacgtccgccgcggtcggcgagatcgcccagtcgcgcagcgccgtcgataacgcggtcagccacatctcggagctcgtcgcagccgtggagcggatcgaggcgcgcctgagcgccgtcggctcggcgctggcacaggtggcgaaggtgtccggctcgatcgaggcgatcgccaagcagaccaacctgctggcgctgaacgccaccatcgaagccgcgcgcgccggcaatgccggccgcggcttcgcggtggtcgcgagcgaagtgaagaacctggccgaagccacgcgccaggccacgcaccagatctccgacaccgtgcgcgatctcgacggccagatcgaaggcctgatcggcgagagcagcgacgcctcgcagcgcgccaagaccgccggcgaaggcgcgcaagcgatctccggcatcatctcgcgcgtccagcagggctttgcctccgtggaagcggagatcgacagcgtcgcgcgcgcggcaacctccaacctcgggcattgcgacaccgtcatcagcgagctcaacgagctcgccaagggcgtcgacctgtcttcgcgcgacctcaagcacgccgatgagcgggtggcgaagctgctcgacacgtccgagggcctgatcgcgctgatcgccgacagcggcgtggagacatccgacacaccgctgatccgcaccgtcgtcgagaccgcgaaacggatctcgacggagttcgaggccgcgatcgatcgcggcgagatcactctcgaccagctcatggacgagacctaccgcgagattcccggcaccgatccgaagcagtacctgaccagctatgtcgagttcaccgaccgcgtgctgcccgcgatccaggatccgatccagaaatcggatccgcgcatcgtctactgcgtcgcgtgggcgaggagcggctatctgccgacccacaatccgaactaccgcctgccgcagggcaaggacccggtctggaacaacgccaattgccgcaaccgccgcctgttcaccgaccgcacggtgaagaaggtcgcaggcagcacgaagcccttcctgctgcagacctaccgccgcgacatgggcggcgggcagttcgtgctgatgaaggacctgtcctcgccgatcatgatccgcggcaggcactggggcgccttccggatgggctttcggcaggggtga

SEQ ID NO: 4735 - DNA, 1746 bp, BradyrhizobiumColbertium
atggcgttcggactgtttcggaagcgtctgccggaaatgcccgcgcccttggcagcccctgaggctgcgctttcggcgccccattccgaacccgcccccaccgaaggcgattcggcccgggagatcctggaactgcttgagctcgagctcggcggcatgatccgccagctggagcgcgccgccaattcggtggccggcggagccgaggcgaccgcggcgacgctggccgccattcgcgaccgcaccgacgctctgaccggccggaccaacgcggcgcaatcgaccgcatccaccttcgccgatgccgccgacaaattcacccagtccgcgcaaggcatcggcgcgcaggtccggcaagccggcaagctcgccgacgaggccagcaccgcggcgcaggaagcgcgcgccaatgtcgaccgcttgcgcgagtcgtccgctgccatcggcaacgtcgtgaacctcatcgcgcagatcgcgcggcaaacgacgctgctcgcgctcaactcgaccatcgaggccgcgcgcgccggcgccgcgggaaagggttttgcggtcgtcgccaccgaggtcaaggcactcgcggtgcagacccagagcgcgacggaagagatcaccaagaagatcgatgcgctgcaacgcgatgcggccggatcggcggacgcggtgcatcgcatctcgcaggcaatcgaagcgatccgtccggtgttcgacaccgtcaacggcgcggtcgccgagcagaacgccaccaccagcgaagtctccggcaatgccgccagcgcttcggaattcatcatctcggtcggcgagagcgcggcggagatcgacgcggcaaccaaggcggccgaaacccacggcgagaacgtcgccagtgccggcaaagcggtcaccacgtttgcacaaaagctgaaatcgcgctgcgccgtgctgctgcgccagagcgagcatgccgaccggcgcaagaccgaacggctgccatgccacctcaaattcgagaccacgcgcggcgtgatgccggtctatgagatcgcgatggacggcgtgctgatcggcggcgccgatgccggccggctcgccccgcaagcgacgatcgaaggcagcctcgaagacatcggcacctgccgcctgcgggtggtcgagcaatcgaaggccggcgcccgcgcgcaattcgtcaatgccaatgccgcgctcagcgagaagatcgaggacaagctctggtcgatccatgaggagaacacggagttcgtcacccgcgccatggaggccggcaatgcgctgacgaagatattcgagcaggcggttgcacgcggcgaggtcaagatggaggatctcttcgacgtcgactacgtggaaattgcaggcaccaatccgcagcaatatcgcacgaaatatctggactgggccgaccgtgcgctgccgcccttccaggagacgttcctcgccaaggacccgcgcatggcgttctgcgccatggtcgaccgcaacggcttcctgcccgtgcacaacaggatctattcgcacccgcagcggccgggcgacgtcgcctggaacacggcgaacagccgcaaccggcgcatgttcaacgatccggcggggctggctgccgcccgcaacctgcgctcgtacctggtccagagctatgcgcgcgacatgggcaacgggaacacggtgatgatgcgcgagatcgacgtcccgatccgcgtccagggccggcactggggcggatttcgcaccgcctacaaactgtag

SEQ ID NO: 4736 - DNA, 747 bp, BradyrhizobiumColbertium
atggccggacattcccaattcaagaacatcatgcaccgcaaggggcggcaggatgcccagaagtcgaagatcttcggcaagctggcgcgggaaatcaccgtcgcggccaagctggggacgcccgaccccgccatgaacccgcgcctgcgcgccgccgtgatcgcagcgcggcaggagaacatgccgaaggacaacatcgagcgcgccatcaagaaggcgatcggcagcgacggcgagaactatgacgaaatccgttacgagggctacggccccggcggcgtcgccgtcatcgtcgaggcactgaccgacaaccgcaaccgcgcggcgtcggatatccgctccttcttcaccaaatcgggcggcaatctcggcgaaaccggctcggtgtcgttcatgttcgaccgcaccggcatcatcgaatacgaccgcagcgtcgcctccgacgacgcgatgctggatgccgcgatcgaggcaggcgccgacgacgtggtctcgggcgagagcggtcacgagatctacgcctcgaccgaaggctatcgcgacgtcgccaaggcgctggaagccaagttcggcgagccgcgcaaggccgcgctgatctggaaaccgcagaacaccgtcgcagtcgacgatgagaccggcgagaagctgctcaagctgatggacctgctcaacgagcacgacgacgtccagaacgtctacgccaatttcgaggtgtcggacgcgctgatggcgaaaatgggcggctag

SEQ ID NO: 4737 - DNA, 528 bp, BradyrhizobiumColbertium
atgaccgcgctcccgattcgtggccctgttcgcatcatcggcatcgaccccggcttgcgccgcaccggctggggcgtgatcgaggccgagggcaaccgcctgatctacgtcgcctgcggctcggtggagccgccggatgatctgccgctggcgagccggctgcttgccatccatgaaggactcgcggccgtcctgtccagccacgagccgatggaagcggcggtcgagcagaccttcgtcaacaaggacggcgttgcaacgctgaagctcggccaggcccgcggcgtcgccatgctggcgcctgcaatgttcggcatctcggtcgccgaatatgcgccgaaccaggtcaagaagacggttgtcggcgccggtcacgccgacaagcaacagatcgcgatgatgctgaagatattgctgcccaaagccgagccgccgtcagcagacgccgccgacgcgctcgccatcgccatcacccatgcccatcaccgccagagcaccgcgctccggctgaaggtggcggggatatga

SEQ ID NO: 4738 - DNA, 642 bp, BradyrhizobiumColbertium
gtgtattgcgaccggggacctgagatgatcggcaagctcaagggcctgatcgattcctacggcgaggatttcgtcatcctcgacgtcggcggcgttggctatcaggtgcattgctcgtcgcggacgctgcagcatctgccgtcgccgggtgaggccgccgtgctgtcgatcgagacctatgtccgcgaggaccagatcaagctgttcggcttccgcaccgaccatgagcgcgaatggtttcgcctgctccagaccgtgcagggcgtcggcgccaaggttgcgctcgccgtgctcggcacgctggcaccggccgacctcgccaatgccatcgcgttgcgcgacaaggccgctgtggcgcgcacgcccggcgtcggccccaaggtcgccgagcgcatcgtcaccgagttgaaggacaaggcgccggccttcgccaatgtcgatcccgccgtggtgcatctcgccggtgccgtcgacgaccagcgcgcgccgcgcccggtggcggatgcaatttccgcgctggtcaatctcggctacggccagccgcaggcggctgctgcgattgcatcggcctcgcgtagcgccggtgagaatgccgagacggcgcagctcattcgcctcgggctgaaggaactcgcgaagtga

SEQ ID NO: 4739 - DNA, 1059 bp, BradyrhizobiumColbertium
gtgagcgaccccaaagccagccgcatggtttcgcccgagcgccgcagcgacgatgtcggcgataccgcgctgcgtccgcaatcgctgtcggactttgtcggccagcagcaggcgcgcaagaatctctcgatcttcatcgaggcggcgcgcaagcgcggcgaggcgctggatcacgtgctgttcgtcggcccgcccggcctcggcaagaccaccctggcgcagatcgtggccaaggaactcggcgtcggcttccgcgccacgtcggggccggtgattgccaaggccggcgatctcgccgcgctcctcaccaatctcgaagagcgcgacgtgcttttcatcgacgagattcatcgcctcagccccgcggtggaggaggtgctctatcccgcgatggaggatttccagctcgacctcatcatcggcgagggaccggcggcgcgctcggtgaagatcgagctgtcgaaattcacgcttgtcggcgccaccacgcgcgccggccttctcaccaaccccctgcgcgatcgcttcggcatcccggtccggctgaatttctacaccatcgaggaattggagagcatcgtcagccgcggcgcgcgcgtgctcaatgttggcatgagcgccgatggcgccaacgagatcgcgcgccgcgcccgtggcacgccgcgcatcgccggccgcctgctcaggcgtgtgcgcgatttcgcctcggcggccaatgccgacacgatcgatcgcacgatcgccgaccacgcgctgagcgcgctcgaggtcgacgcggcaggtctcgacgccatggaccgccgctatctcacgaccatcgcgctcaattatggcggcggcccggtcggcgtcgagaccatggcggcggcgttgtcggagccgcgcgatgccatcgaggatatcatcgagccctacctgatccagtgcggctatctgcagcgcaccccgcgcggccggctgctgacgtcgcacgccttccggcatctcggtctcgccgaacccaaccgcgaccccgcccagttcggcctgttcggcacggatcaggccgacgaagactga

SEQ ID NO: 4740 - DNA, 870 bp, BradyrhizobiumColbertium
atggggctgacggacgacacaggagtgctcgaactcatcgcggccgcgccgcagcttcgcacgcccgatgagaccgaggcgtttctggacccaatgccgatcagtgagctggcgtcgatgtggtgcgcgctccagcgcgtcagccggcgcgaccaggccggcagcatctgggccctgaagctctatttcgatcatctgccccaccgccggcctcaacaggcgctcgatctcgtgctggaagtgctcaagaccgaggctgacaagccgacagtgatgcagctcaacgacaagttcctgctgtcgctgctctatgcgcatggcgaagtcgtgatcgcgcgcatagagcacgaggctgcgcacaatgaccggctgcgctggctgctcggcggcgtgcatgttgcgcccgacgatcccttgatgtcgcgtattgcagaacttgccgacagcgaggcctggcaggccgactatgcggcccagcgcacgccgcgcgagccgctcgattgcgccagcatgccgaccgcagcgctcgcccgcgcttgggtcgagcagtattccaagtccgatcgtgatcaggacgacaatctgttcgcgatcatggatttcgagcgcgatctgcgcgaggacgatcccgaccggatgatcgacctgatcctcgagatactaaaaatcgaggcaaatccggtgttgctgtcgctgctggccgccggtcccctcgaagatgtgatcagtgccgggacgatcgaccgcatcgagcgcgaggcgcgtgtcaatgaacggtttcgcgatctgctcggcggcgtctggtactaccgcgcgcccgaggaattgaagacgcggctggatgcgctgatcggcgagagccgctggtga

SEQ ID NO: 4741 - DNA, 1023 bp, BradyrhizobiumColbertium
ttgtgcaggcctctgcacgcagatgcagacggtctgcacgggcgcaccccaattccgcttcaatcggatcgcatcgagacgctgcatcagaaacgggcttccatgatcacgcgtcgtcacctcatccgttccatcgggggcttgtccgccctcggaatctcgaccgctgcctatggcgtcggcgtcgagccgatgctgcggctccgcgtcacccgctatcatccgacgccgcggcaatggccggcggatcttccgctcaagatcgccgtcatcgccgatctccatgcctgcgatccctggatgccgctggaccgggtcgaggccatcgtcgaccgcaccaacgccctcagggccgatctcatcgtgctgctcggcgactacgtcgccggcctgcatcaggtcacgcggctcattccatgcagcgaatgggcacgcgtgctggccggcctcaaggcgccgctgggcgttcatgccgtcatgggcaaccatgattattgggacgacagggccgtgcagcgggcggggcaggggacgaccatcgcgcatcgtgcgctggaggccgccggcatccccgtctacgagaacgacgtcgtgcgcctcacgaagaacggtcgcccgttctggctcgccggcctcggcgatcaactcgcgttcctcccggcgcgccggttccggaccatggcgcgcttcggtgccgacgatctcactgcgaccctcgccaaggtcacggacgatgcgccgatcatcctgctcgcgcatgagccccacatcgccccacgggtgccatcgcgcgtcgcgctgcaattgtccggccatacccatggcggccaagtccgcctgctcggctggtctcccgccgtgccgccgcagcatggcgtccgcctcgcctatggtcatgtcaggctgaaatgcgacgtcatcatctccggcggcctcggttgcagcatcttgccgctccgctttggcgtgccgccggagatcgtcgaggtgacgctgggtcgggcgggacacctcgtgtcctga

SEQ ID NO: 4742 - DNA, 450 bp, BradyrhizobiumColbertium
gtgactgcccatctcgatggcgagatccgcgacggccgccaccacatgcaggtccgcgtctactacgaggacacggatttttccggcatcgtctatcacgccaattacctgcgctacatggagcgcgggcggaccaatcatctcaggctgatgggcgccgagcagcaggcgctgttcgagcagaccgagacggaaggcgccggcttcgcctttgtcgtgcggtcgatgcatcttgatttcctcaagcccgcgcgaatggacgacgtcctcgacatcgtgacctggcccgtcgcggtgaagggcgcctccatcatgctggcccaggaggtacggcgcggcggcgacgtgctggtgaaggccgaagtgcgcgtcgccttcatcagtggcgggcgtgcccagccgattccgaagtccatccgcatgctgatgaaggccgatctgatttcgtga

SEQ ID NO: 4743 - DNA, 468 bp, BradyrhizobiumColbertium
atgtcccgcccgccgcttccgcccttcacgaaagagactgctgcgcaaaaggcccgcatggccgaggacgcctggaattcacgcgatcccgtccgcgtgtccctcgcctataccgaggacagccgctggcgcaatcgttcggaggtgtttcagggtcgcgaggccatcgtcgcgtttctcacccgcaaatgggaaaaggaacaggactatcgcctcatcaaagacctctgggccttcgacggaaaccgtatcgcggtgcgctttcagtacgaatggcatgatgccggcggccagtggtatcgttcctacggcaacgagcagtgggagttcgacgagcacggtctgatgaggcggcgcgaggcatcgatcaacgatatcgcgattgcggagaacgatcgccggtttcactggcccacgccggggccgcggccggcggatgtgccgggactgggggccgatccgttctga

SEQ ID NO: 4744 - DNA, 720 bp, BradyrhizobiumColbertium
atggcacgcatcacgatcatcgagacagggctcgttcctcgagagcatcgcgaacgccacggctcatttccggacatgttcgcgcgcatgatccgtgcggaggaccccacagccacggtcgacgtcgtcagcatcccgaatggggatgcgcttcccgatccccgcgagcttgaggcgatcctgatcaccggcgcggccgccggcgtctatgacgggctggactggatcgcgccgctggaagatttcgtccgcagggcttacgccgacaagacgccgatggttggcgtctgcttcggccatcagctgatcgcgcaggcgctcggcggcaccgtgcgcaagtcggacaagggctggggcatcggccggcacgtctatcaggtgctgccggaaaacggagtcctcgacggcgagacggtcgcaattccctgctcgcatcaggatcaggtgatcgaaccgccgaacgatgcgctcacgatcctccggtccgacttcaccccgcatgccggcctgctctacgccaacggcaccaccctcaccgtgcagccgcatccggaattcgacgtggaattcgcgcaagtgtgctgcgatatgcgtgacggcaaggcgccggaggacgtcgttgcgacggcgcggcagtcgctgcagcagccgatggaaagcgcgaagctgggtggagcgattacgcggtttctggcacgcaaatccatcccctcatcctga

SEQ ID NO: 4745 - DNA, 942 bp, BradyrhizobiumColbertium
atgattggatcggagatggtgcggatcaattcgcggcaggtggaagccttccgcgcgacgatgctgaccggcagtgtcacggaggcggccaagctgatggtggtgacgcagcccgccgtcagccggctgctgcgcgacttccaggcgctgctcaagatggagctgttcgagcggcgcggcaccggtctggtcccgaccgcagcggcgatggcgctctacaccgaggtcgagcgctctttcgtcggtctcgagcgcatctccgcggcggccgaggagatccgcggccgtcgcaccggctcgttgcgcatcgctgcgttgcccgcgctggcgaacggctatctgccacggcttgccggacatttcttgatggagcgccccaacctcaatcttgctttcttcggcgtgatctcgccgatcgtggtcgactgggtcctgaacaaccaatgcgacatcggttttgccgaggtgccgatcgcccattccggcctgccgagcctgcggctgccggcgctggcgcgtgttgccgtgatgccggcggggcatcgcctcgcggagaaggacgtgctggagccgcgcgacttcgagggcgagaccttcatctcgctgtcggcgggctcgtccagccggcatctcgtcgaccaggtctttcaccgcaacgacgtccgccgcgtgctcagggtcgagacgacgctgtcggagatcatgtgcggcatggtgtcgtcaggactcggcgtttcgatctgcgatcccttcaccgcgcaggagtttgccacgcgcggcgtcgtggtccgacggttcctgccgcgcatcgatttcgaattctcggcggtgttcccggcccagcgcagtccgtcgcccgtggcgctggacctggtcgagaccatgcgcaaggcgctgctggaattcgaggacaaccccgcacgggattttgcgcatggttga

SEQ ID NO: 4746 - DNA, 486 bp, BradyrhizobiumColbertium
atgaagacacttcgccttctgacagcggtcagcatcgctgcgctcgttgccgttccgtcggtcgcttcggcccagcagaaaacgctgtacgtcgcaggttacggcggctcgttcgagaagacgatccgcgacgaggtgatcccggccttcgagaaggagaacggagtcaaggtcgagtatgtcgccggcaactctaccgacacgctggcaaagcttcaggcgcagaagggcaatcagcagatcgacgtggccatcgtcgatgacggcccgatgtaccaggccattcagctcggcttctgcggcaagctcgacggcctgccggccgatctctacgacactgcgcggttcaaggacgaccgcgcggttgcgatcggcatcgtcgcgacaggtctgatgtacaacaccaaggtgttcaaggagaaaggctgggcgccgccgacctcgtggaacgacctgaaggacacgaaatcgccaagcagctcgtga

SEQ ID NO: 4747 - DNA, 591 bp, BradyrhizobiumColbertium
gtggaacgacctgaaggacacgaaatcgccaagcagctcgtgatcccgccgatcaacaacacctacggtcttgaagcgctcgtgatgctgtcgaaaatgaacggcggcggcgagaccaatgtcgatcccggcttcaagatcttcaaggaacagatcaatccgaacgtgctcgcctatgagccgtcgccgggcaagatgaccgaactgttccagtcgggccaggccgtgatcgcggtgtggggcacgggccgcgtgcagagttttgccaacaccggtttccccgtggacttcgtttacccgaaggaaggcgcggcgacgctgctgacgacggcatgtccgatcaacaagccgaacgcctcgccggtcgcggcgagcttcgtcaagatgctgctcgatcccaagattcagctcgtgatgctgaaggactatggctacggtccggtgctgaaatcgttggtgatcccgccggagctcggcaagatggcgccgatcggcgagcgcgcgtccaagctctataatccggactggaccgtcatcaacgagaagcgcgaggagtggacgaagcgctggaatcgcgaggtcgaacgctga

SEQ ID NO: 4748 - DNA, 1041 bp, BradyrhizobiumColbertium
atggcctatctcgagctcgatcgggtcgcaaagcagttcggcgcgcagactgtggtcgatgacttcagcctgtcggtggggaagggggagttcatctccttcctcggcccatccggctgcggcaagaccacgacgctgcagatgatcgcgggcttcctcgatcccacccgcggcgcgatccggctggagggaaaggatctcaccgcgatccctccggccaggcggggccttggcatcgtgttccagagctacgcgctgtttccgcacatgacggcggcggagaacgtcgcgttcggcctcgagatgcgcaaggtgccgcgcaacgaacgggccgagcgcgtccgtgccgcactcgcgatggtcggccttgccggctacgaagaccgccatccccgccgcatgtccggcggccagcagcaacgcgtggccctggcccgcgcgctggtgatcaagccgagcgtgctgctgctcgacgagccgctgtcgaacctcgatgcgaagctgcgcgaggagatgcagatcgagctgcgtcagatccagcgcaccgtcgggaccaccacgatcctcgttacccacgaccagaacgaggcgatgtcgctgtccgatcgcatcgtggtgatgagccagggaaagatcgagcagatcggcacgccgcaggagacctacgaaaagccggcttccgccttcgtctcgcaattcctcggcaagaccaacgacttcgccgcgacgatcgatcggacagcggcaccggcgcgtctcgtggtcggctcctgggccgtgccggcgccggccggcttcaacggtgccgtcaccgtcagcgttcgtcctgaaagaatcggctttggcgatgcgggcctcacggccaggatcgtcacccgcatcttccagggcaatcactggctctttcagtgcgacagcgagtgcggcccggcgatcgtgattcgccagaacgacggcaaagcgcagccggccgaaggggacgcggttcgcctcacctggcgacccgaggacatgagtgcgcgcgcgagggaaagcgcatga

SEQ ID NO: 4749 - DNA, 876 bp, BradyrhizobiumColbertium
atgagcggggttgcggaggaacgcggcgcacgtgcgccgtgggcgctgacggcgcccgccttgatgctcttcgtcggcgtgctgctcattccgctcgcgatgaccgtgatgctgtcgttccacgattggggccaatacaagggcatcgagccggttttcatcctcaagaactggtacgagatcgcggccgatccgtactacgccgagatgttctggcggacgtttcgcatcgcgatcctgaccaccttgctcacggccttgctgggcgcgccggaagcctacatcctcaaccgcatgagcggccgctggaagagcttcttcctgctcgtcattcttggtccgctgctgatctccgtcgtcgcgcgcacgcttggctgggcgctgttattcggcggcaacaacgggctcgtcaacaagctgctgatgtcgctcggggtcatgcgttcccccattccattcatgttcacggaaacaggcatggtcgttgcgctcgcgcatgtgatgatgccgttcatggtgctttccgtatgggcggcgctgcagcggcttgatccgcagatcgagaacgccgcgatgtcgctaggcgccggccccgtcaccatcatccgtcgcatcatcatgccgcagatcatgccgggcgtgctgtcgggcgcgatcatcgtgttctcgttgtcggcaagcgccttcgcgacgcccgcgatcatcggaggccgccggctcaaggttgcggcgacgctcgcctacgatgaattcctcaacacgctgaactggccgctcggtgcggcggtcgcaacgttgctgctgttcgcgctggtcctgatcgttgtcggcagcaacgcgctgatcgagcggcgctatgcggaggtgttccgatga

SEQ ID NO: 4750 - DNA, 807 bp, BradyrhizobiumColbertium
atgagacggaacggtccactcgcgctgatcttccatacgatcttcgtcatcatcatgttggcgccgatcctggtggtgtgcctcgtcgcgttcacgcccgagggatacttgtcgctgccgaccaacggcttctcgctgcgctggttcagggctatcgcgaactatcccgaattcattcatgccttctgggtcagtcttggccttggcgcgctgtcgtctctggtggcgctgctgtttgcggtgccagcggcgctcgcgatcgcgcgctatcgtttccgcggccgcgatgcgctggcggcgctgttcctgtcgcctctgatgatcccgcacgtcgtgctcggtatcgccttcctgcgcttctttacgtcggccgggctgggcggaagctttgccgcgctgatcatcgctcatgtgatcatcgtgtttccgttcgcgctgcggctgacgctcgccgcggcgaccggcatggaccgcaccgtcgagatggcggcggtctcgctgggcgccggcggctggacgctgttccgccgggtgaccttgccgctgatcctgcccggcgtcatcagcggctgggcgctcgccttcatccagtccttcgacgatctcaccatgaccgtctttctcgccgcgcccggtaccgaaacgctgccggttcgcatgttcctctacatccaggacaacatcgatccgctggtgacgtcggtctcggcctgcgtgatcgcgatcaccatgagcgccctcattctgctcgatcgcttctacgggctcgaccgcgtgctcgccggcaagggcgatacgggacgatag

SEQ ID NO: 4751 - DNA, 1137 bp, BradyrhizobiumColbertium
atgtcaggagaatacgacgtcgccgtggtcggcggcggcttgctcggctccgccatcgcctggggcctcggccggctcggcaagaaagtcgccgtgctcgacgagggcgacatcaccaagcgcgcctcgcgcgcgaccttcgcgctggtctgggtgcagagcaagggccttggtatgcccgcctataccgtctggaccgtgcgggcggcggaagcctggagccggctcgcctcggagctgaagcagcagaccggcctggacgtctgccttcaacagaatggcggcttccatctcacgctcggcgaggaggagttcggccagcgctccgagctggtcaggcgcatgcacaaccaggtcggcgccgccgattacaagatggagatgctctccgcctccgaggtgaagaagtcgctgccgctgattggccctgaggtctccggcggcagctattgtccgctcgacggccatgtcaattcgctgcgcacgtttcgcgcgttccacaccggattcaaggcgttcgggatcgactaccttccggaacggccggtttcggccatcagcaggagcggcggtgaatttcgcctgaccacgccgaaaggcgagctgcgcgccgccaggatcgtgctcgccgccggcaacgccaaccaggcgctggcgccaatggtcggcctctttgctccgatggggccgacccgcggccagatcgtcgtgaccgagcgcaccatgccctttctgccgcatccgctgaccacgatccgccagaccgacgagggcacggtgatgatcggcgacagcaaggaggacgaactcgacgaccgcgcgctgaagcattcgatcagcgccgtgatgacggaccgcgcgcagcgcatgttcccgcatctgtcgcggctcaacgtggtcaggagctgggccggcattcgcgtcatgccgcaggacggctttccgatctacgaccagtcggagacgcatcccggcgccttcgtcgcttgttgccattccggcgtgacgctcgcctcgaaccatgccttcgaggtcgcacgcatggtggcgcagggcgcgctcgagcccgaactggtcggcgcgttctcggccagccgtttcggcggcgcgggcgcggcgaacaacagcggctactag

SEQ ID NO: 4752 - DNA, 297 bp, BradyrhizobiumColbertium
atgttcaggcgatccgaacacgaccagcgtccgccggtccagatcttcgtcgacggcgtcgctgtcgcggcgcgtcagggcgacacagtctccgcggcgctcttggcctccgacgttgacgcacggcgttccaccgcagtcagcggcgcgccgcgtctgccctattgcatgatgggcgtgtgcttcgactgcctcgtcacgatcgacggtgtcggcaatcgccagggctgcctcgtgcccgtcgccgacgggatgcaggtcgaaatccagaagggcaagcgggagatcggaaaatga

SEQ ID NO: 4753 - DNA, 1419 bp, BradyrhizobiumColbertium
atgactttggctcccaagcgcgaggattacgacgtcgtggtgatcggcgccgggcccgccggcctcgctgccgctgcaacggccgccgaagccggcttgtcgacgttgctgctcgacgagaacatgggccccggcggccaggtgttccgcgcgatctcatccacgccggtgaccgaccgcaaccagctcggcgccgattattgggtcggtgccgatctcgtgcaggtgctgcgcgcgagcagcgccgaggtgattcatcgtgccaccgtctggagcctcgaccgtaatctcgagatcgcagcctcgatcggcggtgcgtccgccttcgtcaaggccaaccgcgtgatcattgcgagcggcgcgctggagcggccgttcccgattgcggggtggacgctgcccggtgtgatgacggctggcgcagcgcagaccatgctgaagtcttcggcgctggtgccgaacggccgtaccgtgatcgcagggcaggggccgctgctctggctgctcgccgcgcagattctgcgcctcggcggccgtatcgaccgcattctcgataccaccgagcgcggcaattacttggccgcgctgccgcacgccttcgccttcctgacctcgccttatttcgccaagggtctcgccatgatgcgcgaggtgaaggcgaaggtgcaggtcgtctccggcgttactgagctctcggcctccggcgatggccagctcgccagcgtgagctatgtcgccggccgcaggcgcgagaccgttcccgccgatcttcttctgctgcaccagggcgtcgtgcccaacgtcaatctggcgatggcggccggggtcgagcatcgctgggacgatctgcaattgtgctggtcgccggtgctcgatgcgaacgggaattcgtcggtcgcgggcatcgcgatcgcgggcgacggagcaggcatcggcggcgcaaatgcagccgttgtgcgcggccgcatcgcggcgcgcgcggcagtggaggcgctggcccccgcttctgccgcgaagctcgtgccgatggcacagctgcgcaccgatctcgccaaggccgagcgcggccgcgtctttctcgacacgctgttccgccccgcgcggcagttccgcattccctcgggcgataccgttgtctgccgatgcgaagaggtgacggcaaaggacattctcgatgcggtcgcgatcggcgcgaccgggccgaaccagctcaaggcctaccgccgcaccggcatgggcccgtgccagggccggctctgcggcctcaccgtgaccgaactgatggcgcaggcgcggggcaagaccccgcaggagatcggctattaccggctgcgcgcgccggtgaagccgatcacgctggcagagctcgccgccgttccgaagaccgaggccgacgtcaaggcggtggtccgcggatga

SEQ ID NO: 4754 - DNA, 1128 bp, BradyrhizobiumColbertium
gtggatgcgatcgtcgttggcggcggcatccacggatgctcgacggctctgcacctgtgccttgccgggatgaagccgatgctgatcgagaaggactatgcgggacgccacgcctcgggcgtgaacgccggcggcgtgcgccagctcgcgcggcacatccccgagattccgctctcgatccgctccatggggatctgggagaaggttgcggagctcgtcgacgacgattgcagtttcgaaagccacggccaggtgctggtcgccgagaacgaggaagagctcgcggtctgccgcgcccgcgtcgccgagctcaacggactcggctttactcacgaagagctgatcgacgcggctgaactccggcgcctcgtgcctgccgttgcggagacctgtcccggcggcgtcgtctcgcgccgcgacggcgcggccaatccggcgcagacgaccactgcattccgccgcaaggcggagcggcttggcgccaccgtgcgcgagggcgtggccgccaacaacatccggtaccgcgacggcctttggcatgttgaagtcggctccgacaccttcgccgcgcccgtgctggtgaatgccgccggcgcctgggccggcaagatcgccgctgatctcggcgagcccgttccggtcgaaaccgtcgcgccgatgctgatgatcacctcgcgtgtgccccacttcatcgatcccgtcgtgatcctgcgcggccgcaaattgtccttcaagcaattcgtcaacggcaccgtgctgatcggcggcggtcatctcgcgacgccatatcaggatcgcaacgagacggtgctggattggaaaagtcttgcgaccagcgcacagaccgtgttcgaactgtttccggtgatgcgcagtgccaccatcgtgcgcgcctgggccggcatcgaagccaagatgaaggacgacatccccgtgttcgggccgagcagccgtcaccagggtctctatcaccagttcggcttctcgctgcatggcttccagctcggccccggcgccggagccgtcatggcggagctgatcgtgaatggcggcacccagacccgcgtcagcgatctcggcattgaccgcttccatccctccacgctccagaacaagaggacatcatga

SEQ ID NO: 4755 - DNA, 348 bp, BradyrhizobiumColbertium
atgagcattacccgcagcattcgcacacccatcatgcaccgcgccgtcgaggcgaatggcttcgtcttcctcggcggcaccatcgccgacgacacgtcggtgtccatgggagagcagacccgcaacatcctcggcaagatctccggttatcttcaggaagcgggaaccgacaagagccgcgtcgtcagtgcatcgatcttcgttacggatctctccaagaagaaggagatggacgcagcctggaccgagttcttcggcgacaatctgccgacccgcgccaccgtcggcgtcgccgatctcggcggcggtgcgctgatcgaggtggtggtgaccgcgctcaagggctga

SEQ ID NO: 4756 - DNA, 1614 bp, BradyrhizobiumColbertium
atgcctgcttccatcatcctgtcgaacctctcgctgtccacgcctgacggccgttctcttctcgccggcatcgatctgacattcggggccgagcgcaccggtctcgtcggccgtaacggggtcgggaagacgacgctgcttgcggcaatctcaggagaccatcttccccagtccggacgcgttctgatcaacggcaccatcggcctgttgcgccaggacgtgcaattgcctgcaggagcgaccgtagccgatctgttcggcgtgcggtcggcagtggaattgctgcgtcgtgccgagcgcggcgacgcatcaatcgacgatatggccgcgatcgactggactctcgaagggcggctggagatcgccctggcgcgcctcggattcgatctgtcgcccgatacggagctctcgtgcctgtccggcggccagatcacgcgggtgcggctcgcggcgctgctctttgcccagcccgatttcctgttgctggacgagcccaccaacaatctcgatctggatggacgcaaggcggtgatcgatttccttgcgacttggcgcgggggtgcgatcgtcgtgagccacgaccgcaacctgcttgaagcgatgaatgcaatcgttgaactgacgtcgctcggagcaacacgatacggtggcaattggagccattaccaggtgcaaaaggccctcgaactcgccgccgtcaggcaggacctcgcgcacgccgagaagagcctgtccgagatcgacgagaaggcacaggaggctgcagagaggaaggcgcgcaaggacgtcggcggcaggaagaagcgcgccaagggcgacatgccgcggatcctggcgggggcccgcaaggaccgcagcgaggacagcggcggcaagaccgtgcaaatcggcgaacggcgacgagcccaggccctcgagtcagtcgatgctgcgcgccgacgcgtcgagattctgcagccgctctccatcaggctggccgcgaccggtctgccggcagccagggaagtggtttggctcgacagcgtcagcgccggttatcggacggagcagccggtgctgcgcggtctatcgttcaccatggtcgggcccgagcgcgtggcgctgaccgggcccaacggctccggcaagaccacgctgctgaaggtcattgcgggtgagttgccgccgattgcgggaacggttcgggtcaggcctgacttcgccttcttcgaccagaaggtcagcctgctcgatcccgctctctcgatcctggagaactttggccgcctcaatccagcggcaggtgacaatgcgtgccatgccgcgctggcgcgcttcatgtttcgtgcaaacgcagctctacagccggctggaagcttgagcggcgggcagatgttccgtgcaggccttgcctgcgtgttgggcggggcggcgccgccatcattgctgattctggacgagccgaccaatcatcttgacatcgagtcggtcgaagctgtcgaagcgggcttgagggcctatgacggcgcgctgctcgtggtcagccacgatgaggcattcctgcaggcgatcggaatcacgcggcggctagatcttatcgccagcatgccgcgcgccaatggcaggatcacgtga

SEQ ID NO: 4757 - DNA, 360 bp, BradyrhizobiumColbertium
atgatgcgaatgatgccgaagaacatctttgcgccgtgtcgaagtaaatcagcggcttcagcccgggcgcggcagacacggttgagatttcccatcgaggagatgccgcaccagggtgcagaagatcaccgcgggatcatcatcttaatcagcgcgatgaagccgtcgccgatcggctttacggctaccgcgctcgggataggcatagccaatgaggaggtcgagcgtgaccgcgatcaggacctggatgcagaggatcttgtaccagggctgatgctggcggaggacggctggctggatcgcgacgcatgtcgtattgtcggctctgaaacgtatcgttgcttgatttgcatgatgtga

SEQ ID NO: 4758 - DNA, 1401 bp, BradyrhizobiumColbertium
gtgatggtcgtcgcggaagcgacaatcacatttttgcctgttagcaccaagatcgaacactgggccgcaatcgggggaaacatgtcgaaagcaacaggctccgacgagcacgtgcaaggttattttccgcgttggaaactgaagacctcgggcgtgatcatgccggaggagcggttgtcctggggccagacgatcgtctccagcctccagcattgcgttgcgatgtcgggctcgacgatcatcgcgccgctgctgatggggttcgatcccaatattgcagtcctgttctccggcatcggcaccttgatcttcttcgtcatcgtcgccggacgcgtaccgagctatctcggctcgagcttcgcgttcatcgccgttgttatcgccgccaccggctatgccggacaagggccgaacccgaacctatcggttgcgctcggcggaatcgtgggcgctggggtgctgtacggcgtgatttcgctgatcgtcatgtggtccggcgtcggctggatcgaaaggctgctaccgccggccgtcaccggcgccgttgttgccgcgatcggcctcaacctcgcgcccgtggcggtcaaggcggtgagcgccggcgcattcgacacctggatcgggctcgccaccgtcctgatcatcggcgtggtcgccgttgccgcgcagggcctttggcgccgcctcccgatcattgtcggcgcaatcggcgggtatctcttgtattggctgttcacgaacggcctcggtctcggcaagccgatcgacttcgcacaagtctcggccgcgccatggttcggcctgccgaatttcaccacgccgacgttccaggctgatgcaatcttcctgatcgcgcctgttgcggtcattctcgtcgccgagaatctcgggcacatcaaggccgtcggcgctatgacaggccgcagtcttgacgcctatctcggccgcgccctgttcgcagatagcctcgcgaccatcgtagcggcctttggcggcggcaccggtgtcacgacctatgccgaaaacatcggagtcatggcagcgacgaaggtttattccaccttgttgttcgccttcgccgccgttgtgtcgatcctgctcggtttctccccgaagttcggcgcgctgatcctgtcgatcccgggtcccgtcatcggtggactctcgatcgtgctgttcgggttgatcgcagcgatggcaggacgaatctgggtcgagaacagggtcgactttgccgatcctgcaaatctgatcaccgtcgccgtggcgctgatcgcaggcgccggcgacctcacgctcagattcggcgcgttcacgatcggcgggattggtaccgcgaccttcggggccatcatcctctatcaggtcctgacttccccaatggcgcgccgcctgggatga

SEQ ID NO: 4759 - DNA, 837 bp, BradyrhizobiumColbertium
atgcagcagaccgaccgccgaacctcgttcccctcccgcctcgtcggtcaacacgccctggtgaccggcgcctcacaaggcatcggccgcgccgtcgcggtccggctcgcccaggaaggggcagccgttgccatcaactatttcggcagccccgagggggccgatgagacgctggcgcttgcgcgagcgggatccgccgctcgcggccatgaggggctcgatcacgtcatcgtcaaggccgacgtcggcagtgagcaggagatcgccgcaatgttcgagacgatcctggcgcgctggaagcgcctcgattgtctcgtcaacaatgccggcttccagcgggaatcgccgagcgaggcgctcgacgtcgaaacgtatcgccgcatcatcgacgtcaatctcaacggcgccgtgctgtgcgcgcagaaggcgctcgcccatttcgtcgcacgcggcggaggcggcagcatcatcaactgctccagcgtccacgagatcatcccaaagcccggctatctcgcatattcgatcagcaagggcggcatggccaatctgacgcgcacgttggcgctcgaatttgccggccgcggcatccgcgtcaacgcagtcggtccgggcgcaatcgacacgccaatcaatgcggcctggaccggcgatccccagaagcgcgaggtggtcaccagccacattccgatggggcgcgtcggcacgccggaagagatcgccgccgtgttcgccttccttgcctccgatgatgcgagctacatcaccgggcaaaccatcaatgcctgcgggggcctgacgctgtttccggaattccgggagaattgggcgagctga

SEQ ID NO: 4760 - DNA, 1800 bp, BradyrhizobiumColbertium
gtgagcacaaccatcaacatcaatgcctatagcgacgcgctggtggtcctcgggacggccggcgtcgtggtgccgatcgtccgccattggggcatcaatcccgtgctgggttatctcggtgccggcgccattctcggtccgctcgggctcggctcgctcgtgcagcaaatgccgttcctgtattggttcacggtgacggacgcgcacaatgtcgagggtatcgcgaatctgggcatcgtcttcctgctgttcctgatcgggctcgagctgtctttcagacggctattgacgatgcgacgtctggtgttcgggctcggcggcctgcaggtggtcgtgacgtccgccttgatattcggcgccgcgcttctctccgggcaaaattccgataccgccgtcatccttggtgcgagccttgcgctgtcctcgacggcgatcgtgcttgagcttttgtccagcgaaaggcggcttgcgaccacggccgggcgcgccagcttctccgtgctgctggcccaggaccttgccgtggttcccattctcgtcttcgtgtccttgctcgctgcagacagtggcggctcggtcgtggcgcacatttccagcgcgatcctcaaggcgacggtcgcggtcgtttccctgattctgatcgggcggctgctgatgcgtccgctgttccagatggttgcgggcactcattcaacggagttgttcgtcgcggcgaccctgttcgtcatcgtcggcgcagggcttgccgcgcaccaggctggcctgtcgatggcgctcggagcgttcgttgcaggactgatgctggcggagaccgagtatggcaaggccatcgaggccaccgtcgagccgttcaagggtctgctgctgggcatcttcttcttcacagtcggcatggccatcgacttccgcgtgttcatgcgcgagcccggctggctgctcgccgctgtcatcggcatcctcgtcggcaaggcgatcgtgctcatcgtcctggggcgcctcttcaggctgtcatggccggccgcgatcgagatggcattcttgctgggtcctgtcggcgaattcgccttcgtcagccttggaatggcggcggccggcggcatgatcgagccgagcgtgtcgggctttgccgtggccgtcaccgccgtgacgatggcgttgataccgcttatgggcatgctcgggcgacgactggcggcgaagctgagcagcgaacgcgcgcccgatcctgaactcgcggttcggccgcccgccgaccgggcgcaagccatcgtggtcggctatggccgcgttggcaaggtcgtctgctcgctgctgaccagccatggcctgaactatatcgcggtcgatcacgaggctgtcgccgtggcgcgcgaccgccgcgacggtcacaaggtctattttggcgacgcgacggagccgggcttcctcgaggcgtgcggcctgatgcagacgaccggcgtgatcatcaccatccagtcgcgaccagcgatcgatgctgtcgtcgagcggatccgcgcggtgcggcccgatgtgctgatcgtttcgcgggcgcgggacgccgatcatgcccgtcacctctatgcgatcggcgcaaccgatgcggtgccggagacgatcgaggcaagcctgcagctctccgaagccgcgctggtcggcctcggggttgcggttgggcatgcgatcgcctcggtgcacgagaagcgggacgagttccggctgacgctgcagcaggcggcccgtgttgcgggacacgagaaagctcgtccgctcgatcttgcagggcgcgggcccccgcgatga

SEQ ID NO: 4761 - DNA, 822 bp, BradyrhizobiumColbertium
atgacaaaggcctcgcttgcagactcaccgctccaggatttcatcggccggcacgaacgcctgttcgtgctgaccggcgctggctgcagcaccaattcaggcattcccgactaccgcgacgtccacggcaactggaaacggacccagcccgtgaacttccagtccttcatgtcggacgagcccacgcggcggcgctattgggcgcgcagcctgatcggctggcggcggttcggccaagcccggccgaatgatgcgcatcatgcgctggcgcggctggaggcgaacggccggtgcggcatgctgctgacgcagaacgtcgaccggctgcatcagtctgccggccaccggcaggtgatcgacctgcatggcaggcttgatctggtccgctgcatgggttgcggtcgcaagatgcagcgtgaagagtttcagcatgcgcttggccgcgcgaatgctgcttggctgacgctcgatgccgccgatgcgcctgatggcgacgcggatctggagcacgaggatttctcgtccttcgaagtgcccgcatgcgacgcctgcggcggcatcctcaagcccgacgtcgtgttcttcggcgagaacgtcccgcgcgacatcgtcgccaccgcgaaggatcatctggcgcgagccgacgccatgctcgtcgtcggctcatcgctgatggtctattccggattccgcttcgtgcaggctgccgcgcagcgcaacattccgattgctgcggtcaatctgggccgcacccgcgccgatgatctcctgacgctgaaggtcgaggagcgttgcgaggcagcgcttgcattcctgctttga

SEQ ID NO: 4762 - DNA, 2085 bp, BradyrhizobiumColbertium
atgcttgagggagccgaggtgcggcttgccgtcgatatcggtgggacgttcaccgatatcgtgctggacgttggtcaagaccgcaagacacgcaaggtgctgacgacgccgcagcggcccgagcaggcagtgctggatggcatgcgcctcatccttgctgacgcgcgcgcacatatcagcgacatcgacgtcttcattcacggcacgacgctcgcgaccaatgccatcatcgagcggcgaggggccaagaccgcgctgatcgcgaccgagggcttccgcgacgtgctcgatatcggcaccgaaagccgctacgaccagtatgatctcagcatcgagaagccgaagccgctggcgccgcgcagcctgcgcttcaccgtgccggagcgtatcgatgcgcacggtgccgttcgcctgcctctggacgaggcagcggtgcgcgcgctcgcgccgaagctgggtgagctcggggtcgagagcgtcgcaatcgcctttctgcactcctatgccaatcccgagcatgagcgccgggccgcagcgatcatcggtgatgagatacccggcatatccgtgacgctctcatcggccgtgtgccctgagatccgcgaatatgaacgcacctccacggcggtcgccaacgcgtatgtgcaaccgctgatcgacggctatctcgcccgcatggccgaggccctgcaggtcgagcagttccgtggcgcgatctatctcgtcacgtcgggcggcggtgtcacgtcgatcgagacggcgcggcgctttcctgtgcgcctcgtcgaatccggcccggccggcggcgcgatcttcgcggcgcagatcgcggcacgtcttggcgagagcaaggtgctgtccttcgacatgggcggcaccaccgcaaagatctgcctgatcgagaagtaccagcccgagacctcgcgcgtgttcgaggtcgatcgcgccgcacgcttcctcaaaggctccggcctgccggtgcgcattcccgtgatcgagatggtcgagatcggcgccggcggcggctcgatcgctcatgtcgacgcgatgaagcgcgtcaccgtcggtcccgagagcgcctcctcggagccgggacccgcctgctacggccgtggcggccagcgcccggccgtgacggatgcggacgtcgcgctcgggatgatcgatcccgacgcgttcgcggccggcacgatcaagctcgatccggagctgtcgaagcaggcgctgctgcgcgatgtcggtgagccgctcggcctgtcggcggaaaccgcagcctatgcggtgcatgaggtcgtctgcgagaacatggcgagcgcggcgcgcgtgcatgcggtcgagcgcggcgcggtggtcggccagcatacgctgatcgccttcggcggcgctgcgccgctgcatgcggcgcgcgtcgccgagaagatcggcgtctcccgcgtgatcgtgccgtcgaatgccggggtcggctcggcggtcggctttcttgccgcgcccatcgcctatgagctggtgcgcagccgccatgtccgcctcgacgatttcgacaccgaggcggtctccgacctcctgcaggaaatggtgaccgaggcgcgcgcgctggtcgagccgggtgccgccggtgcgccggtgcgcgagcgccgcgccgctttcatgcgctatgtcggccagggccacgagatctcggtcgagttgccgaaccggcggctgacttcggctgatctcgccggcctgcgccggaacttcgaggcggattactccgcgatgttcgagcgtccgattcccggtgcggcgatcgaagtcttgagctggtcggtgctcgccaccaccgaggcgcgcaatccgcctgcgatcgcctccgtcgcacgcaagcccgcggccaaggcctccgggagccgcaagttcttcgacggccgcgcaggagaggtgatcgagattccgctctatcgccgcgaggacatggtgccgggtgcgaccattgcgggccccgccgtgatcgcggaggacgagacctccaccttcgtgtccaccagcttcgacgctcatatcgacggtgccggcagcatcgtcatggaacgaaaggcggcctga

SEQ ID NO: 4763 - DNA, 1659 bp, BradyrhizobiumColbertium
atgagcaaggcaagcggcgcgagcctgatcgaccttcagatcatgtggcaccggctgatcgccgtggtcgaggagcaggcgcaggtgctgctccgcaccgcgttcagcccgattgtgcgcgaatgcggcgacctctccgccggcgtgttcgacctcaagggccgcatgctggcgcaggcggtgaccggcacgcccggtcacgtcaattcgatggccgaatcggtcaagcacttcatcgcccacttcccgcttcagacgatgaaggagggcgatgcctacatcaccaacgatccctggatgggcaccggtcatctcaacgacttcgtcgtcaccacgccctgcttcaaggacggcaagccggtcgcgctgttctcctgcaccagccatctcatggacatcggcggcatcggcttcgggcccgacgccaccgacgtgttcatggaggggctctacatccccatgctgaagctgatcgacgagggcgtcgtcaacgagacgctgatggcgatgatccggactaatacgcggctgcccatcgacaccgagggcgacacctattcgctcgccggctgcaacgatgtcggatgcgagcgcctcgtcgagatgatgaccgagttcggcatcgacacgctcgacgagctcggcgaccacatctgcgagcgctcgcgcgaggcggtgctcgccgaaatcgccaagctgccgaagggcagctggcgcaacaccatggtggtcgacggctacgacgcgccggtcacgctggccgcgacgctgacgatctcggatgaaggcattcacgtcgatttcgacggcacctcggctgcctcgaagttcggcatcaacgtgccgctgtcctacaccacggcatataccgtgttcggcctcggctgcgtcgtcgcctcgcagatcccgaacaatgccggctcgctctcgccgctgacggtgtcggcgccggcgggcgcgatcctcaatgcgccgaagccggccccggtcgcctcgcgccacgtcatcgggcagatgctgcccgacgtcgtgttcggctgcctgcgccagatcatccccgagcgtgtgcctgcggaaggcacttcgtgcctgtggaatctcaacgtccgtggccagacccgctcgggcgccggtggcaattacgggttctcgatggcggtcacctcgaatggcggtaccggcgcgcgcttcggcaaggacggcctgtcggccaccgcctatcccagcggtgtgcgcggcacgccggtcgagatcgcggagacgcagacacccttgatcttctggcgcaaggaactgcgaccggattccggcggggcagggcgcacccgcggcggcctcggccagatcatcgaagtggccagcggcgtcgatgcgccgttcgacatcctcgcggcgttcgaccgcatcgatcatccgccgcgtgggcgggatggcggcggggacggcgaggccggctatgtcgggctgaagtccggcaagaagctgcgcggcaagggctttcagcaggtcccgccggatgaccgcctggtcgtgctgacgcccggcggcgctggcatcggcgatcccagagagcgcgatcgtgcggccgtcaacgaggacgtcgcgagcggtctcgtgtcctcggagaacgcagtcaaggtctatgggtacgcgcgttga

SEQ ID NO: 4764 - DNA, 1002 bp, BradyrhizobiumColbertium
atgatcacgcgacgaaacttcaccgcgggcgcagcgacgctgcttgccgcaagtcacatgtccactcgcgcaccggcggcgagcgtgagctgggacatgtcgacggtatggcccgacggcaatttccatacccagaacgcgatggcgttcgcggaggaagtgaagaagcagagcggcggtgcggtcgccatcgtggtgaaggcaggcggccagctcggcttcaagggccccgagcacttgcgcgccgtgcgcgatggcctcgtgccgctcgccgacgtcctcaatatccagcaggtcggcgacgaacccttcatgggcgtcgagagcattcccttcctttgcggctccgtggaggagctgaaggtgctgcacaaatatgtgcggcccgaatacgagaagatcgccgcgcgcaacaaccagaagatcctctacatcgtgccgtggccgacgcagtatctgcatctgaaggcgaaggtggcagacgtcgagggtctgaagaacatcaagatccgcgtgcctgacaagaacgcggtcgagatgctgaatgcgatcggcatggcagcggtgatgatcccctggggcgagacgattcccgcgctcgcctccggcgcggtggccggcgtctccacctcgtcggtgtcgggcgtcgacggcaagttctgggagttcctgaaatacgtctacccgaccaaccacgtctggtcgtcgcagatgctcaccgtcaacctcgatgcctggaaggcactctccggcgatcagcagaagctcgttgcggatatagcggcaaagatggagccgggcttctgggccaactcgctcaaggccgatgtcgacagcctcaaccgcctcaaggaaggcggcatggaggtggtgcctgtctcgcaagccatgatggcggacatccgcgccaagacggcgccgcagctcgacgctttcctcaagcgcgtgccggcggccgacaagccggtgcgggcctatctggccgaaatgaagcgtggctga

SEQ ID NO: 4765 - DNA, 594 bp, BradyrhizobiumColbertium
gtggcgagcgtctcgaccgaagctccgcaaagtctcaacgcagcggcgcccgcgccgctgcgtatcctgctcgacggcatcgaccggctcggccggctcgacggctggatcggcggcttctgtctcttgatgctgacgctgctgatgctgtgcgaggtcgcaacgcgattcctctcgaacttcctgccgttctttccgccgagcatctcgatcgcctgggaatactcgtcctacctgatggcggcgtccttcaccttcggcgccgccatgacattgcgcgtcggcggccatatccgcgtcgtgctgctggtgaagaacgcgccggcgccggtgcagcgcgcgctcgagattctcgctgcagcagccggctttgccttcatggcgttcctgacctacgcgatggccaggttcgcctttgctgcgtacacgcgcggccaggtctcgacctcgagcgacacgccgttgtggtttccacaagccgtcgtcaccttcggcatgctgctgctgacgctccagttcctggcgcgcgcgatccaggccgcgctcggcctgccgctggaggatcaccgcatgaaggcctctcccgtcgaatga

SEQ ID NO: 4766 - DNA, 1305 bp, BradyrhizobiumColbertium
atgaccatcgaagtcctcgccttgttcgcgatcctgtttgcgctgctggcctgcggcgtgtggatcggcctcacgcttgcgctcaccgcgacgctcttgctcgcgatgttccgctcgatcccgctcgaaaaactgctgcctcaatatgcctggaacatcctcacaactcaggagctgcttgcgctgccgctgttcatcctgatgggcgagctgttgtttcgaacccggctgtcgcgctcgttgttccagggcctcgcgccctgggcggggctgctgccaggtcgtctgctgcatgtgaacgtgatcggctgcaccatctttgcggcgatctcgggctcgtcggcggcgaccacgcaggtgatcggccgcatgtcgctcaacgagctgctgcgccgcggctattcccgcgacatcgcgatcggctcgctggccggcgccgggacgctcggctttttgatcccgccgtccaacatcatgatcatctacggcgtgctcggcgacgtctcgatcctcaagctgttcacggccggcgtgctgccgggctttctgctcgccgccaccttcatggcctgggtgatgctgcattcgagcctcaatcccgcgatggtgccggaggcggaggccaggctttcgcaggtgccgtggggcgaacgattcgtcgcgctgaaggacctcgccccggcgctgttcctgatcgcctgcgtgctcggctcgatgtatggcgggctcgcgacgccttcggaggccgccgccgtcggcgtgctcggcgccgggctggtggcctgggcgcaaggggcgatgtcgcaacaggtgatccgcgatgtcctgatcggttcggtcgtgacctgctcgatgatcgcgctgatcgtgctcggcgcttccatcctcggcaatgccgccgcctttctcggcatcccgcagtcggtcgctgccttcgtcaaggccctcggcctgtcgccattcatgctgatcgtggcgttgatcgtcttctatctcgtgctcggctgctttctcgacggcttctcgatgatcgtgatgaccctgccgatcgtgctgccgatcgtgaagggggccggcttcgacgaggtctggttcggcgtcttcctcgtgctcgcagtcgaaatggcgcagatcacgccaccggtcggcttcaacctgttcgtcatccagggccttaccgacaacagccttgcctacatcgcccgcgtgacgatgccttttctcatcatcatggttggattcgtgctgctgatgacgctctggcccggcatcgtcaccgtcctgccgcgtgtgctgtacggatag

SEQ ID NO: 4767 - DNA, 645 bp, BradyrhizobiumColbertium
atggatctttatttctcgccactcgcctgctcgatggcgactcgcgttgcgctgtatgaagccggcgccgaagcgaattatctcgaagtcgatccgccgaccaagacggtgctgagcaacgggtccgacttccgcgccgtcaatccgatcggcttggtgccgacactgcgtaccgacgatggcttggtgctgaccgaaaacgcggcgatcctgcaatatgtcgcagatcgcttcccacaatcggggctcggcgccgcggttggcctcgagcgcacgcgtctgcatcaatggctttgcttcatcggcaccgagctgcacaagggccttttcgtccccttgctcgacagcaaggcgccgcatgaggccaaggcctatgcgctggagaagaacctgtcgcggctcgactatctcgacaagtatctgaaaggccgcgaattcctgctagaccatttcagcgtggcggacgcctatctcgtcacggtcatcaactggacggtggccacgccgccgatcgagcttgcgaaatggccgaacctgaaggcctatcacgagcgtctgcgccagcggccctcgatcgcacgcgcgatcgcggaggagttcgagatgtacaaggccgagctcgcgcgaaagaaggcggcggcgtga

SEQ ID NO: 4768 - DNA, 645 bp, BradyrhizobiumColbertium
atggtacaaaaatcgaagccgccagctgctgccagccagcccaagcgtcgtggccgcccgcgcagctacgagcccgacaccgcgctcggaaaggcgcttgacctgttccgcaagcaaggcttcacagccacctcgctcgacgatctcagcgcagcaaccggcatgaaccggccgagcctctacggcgccttcggcgacaagcgtgagctctacatcaagagctatcagcgctatcgcgacgaggcgggcgcggccatcggtgcgatcttccgcgaggagatgccgctgcgtcagcggctggagcgcatctatgctgccgcgctcgacatctatttgtccggcgacaccggaccgcgcggttgcttcacagtcgtgactgcggcgtccgaagccgtcggcgatcccgagattcgcgccatggtgctggacggcctcaccgggctcgataaagcctttgccagttgcttccgccgcgccaaggacaagggagagttgccggagagcgcagatccattcgcgctggcgcagatcgcatccgccaccattcacaccattgcgatccgctcgcgcgcccgcgtgccgcgcaaggagctggaggcgatcgtgaagggtgcgatcgatgtgatgatcgggaccaaagggtag

SEQ ID NO: 4769 - DNA, 966 bp, BradyrhizobiumColbertium
atgaccccgggcacactggccgtcctgatcaacagcacgcagcagaactggctgccggagcgatggaaggcccggttcgaaacggtctgcggggaccgccgagtggtgctgctgcccgatgccgggctcgatccggcggaggtgcactacgccgcggtgtggaagccggcgccgggcgctctcggcgcgttccccaatctgcgtgcgatcttcaatctgggcgccggcgtcgacgcgctgatggccgacaagagcctgcccgaagtgccgctggtgcgcgtcgccgtgcccgatctcaccaatcgcatgaccgaatatgtcgtgctgcacgtgttgatgcaccaccgccaggagctgtacttgcgggagtgccagcgcgcgagacgttgggagcccagatatcagtggtcggcgagcgcgatcacggtcggcgtcatggggttgggcacgctgggagccgatgcggccgatgtgctgcggcggctcggcttccgtgtcgccggctggagccgcagcccgcggacgatcgacggcatcgaatgcttccatggcgccgccgggatggacgcgttcctgcgcacgaccgacatcctggtctgcctgttgccgctgacgcccgacacgcacggcatcctcaaccgcgacgtctttgcaaagctcaaccgcaacagcccgctcggcgcgcccgtgctgatcaatgccggccgcggcggcctgcagaatgaagccgatcttctcgcctgcctcgacgacggcacgctgggcgccgcctcgctcgacgtcttcgtgcaggaaccgcagccggtggacagccggttttggacccacccaaaggtggtgctgaccccgcacaacgcagccgataccgatgccgacgcaatatcagcctatgtcgcggagcagatcgcgcggttcgaggccggcggggcgctggagaatgtggtggatcgagcaaggggatattga

SEQ ID NO: 4770 - DNA, 369 bp, BradyrhizobiumColbertium
atgctctacgccattctttgctaccacgatgaggatttcgtcggctcctggagcaaggaccaggacgaggccgtgatgaagaagctcgccgttgtgcaggagaagctcaccaagcagggacggctcggtccggtggcgcggctgctgccgaccaccgcggcggcgacgctgcgcaaggaggacccgcccctggtgctcgacggcccctatgccgagaccaaggagcagctgctcggcttctacatcgtcgattgcaagaacctcgatgatgcgctcgacgtcgctcgcgagctgggcgcagccaatcccggcggtgcctatgaggtgcgtccggtgggcgtattccggcccggaggaaatctaacgtga

SEQ ID NO: 4771 - DNA, 1284 bp, BradyrhizobiumColbertium
gtgagcgaggccgacaccgcctggatcgagactgcgctgacctcggcgcgaccgcaggcggtgggcgcgctgctgcgctattttcgcgatctcgacaccgcagaggaggcttttcagaacgcctgcctgcgcgcgctgaagacctggccgcagaacggtccgccgcgcgatcccgcggcctggctgatcatggtgggccgcaacgtcgccatcgacgaggtgcgccgcgcccgcaagcagcagccgctgccggaggacgaccaggccatctccgatctcgacgatgccgagggtgcgctggccgagcgcctcgacggctcgcactatcgcgacgatattctgcggttgatgttcatctgctgccacccgcaactgccggcgacgcagcagatcgcgctggccttgcgcatcgtctcgggcctcaccgtgaagcagattgctcgcgccttcctggtctcggaagccgcgatggagcagcgcattacgcgggccaaggcgaaggtcgccgaggctgggacaccgttcgagacgcccggcgcggtcgagcgttccgagcggctcgccggcgtcgcggcgatgatttacctgattttcaacgaaggctattcggcgggtggcgacaccgcggagatcaggaagccgctctgcgaggaagcgatccggctggcgcggctgctgctgcggctgtttccgagcgagccggagatcatgggcttgacggcgctgatcctgttgcagcacgcccgcagcgccgcgcgctttgccgcggacggttcgctgatcctgctcgacgatcaggatcgttccttgtggaacggcacgatgatcgccgaaggtctcgcgctgatcgacaaggcgatgcgccaccaccgcagcgggccctatcagatccaggccgcgatcgcggcgctgcatgcgcgcgcatcgacgccggaagagaccgactgggcgcagatcgatctgctctacggcgcgctggaagtggtgcagccctcgccggtggtgacgctcaatcgcgcggttgcggtctccaaggtgcgcggggcgcaggctgcgctcgatctgatcgagccgctggcaacgaagctcgccaactatttccatttctacggcgtgcgcggcgccttcctgatgcagctcggccgcaacgctgaagcccgcgtcgccttcgaccgggccatcgcgctcgcgaatacctccgccgaagccgctcacattcgtatgcatctcgatcgcctgatccgggacagccagtcgaagaaggaaagcgccaaggccaagtga

SEQ ID NO: 4772 - DNA, 540 bp, BradyrhizobiumColbertium
atgctgaaagtcttttccatcatcgctatcgtcctcgccgtcggagtcgctgccgtcctcgtcttcgccctgaccaaacccgacacgttccgcgtcgagcgaagcctggcagtgaaggcgccggccgatgcgatctatccgcaggtcgccgattttcaccgttggaccgcctggtcaccgtatgagagccgcgatcccgccatgaagcggacgttcggcggacctgccggtggcaagggcgcgacctatgcctgggacggcaacaacaatgtcggcgccggccggatggagatcctcgaggcgagcggaccttcgaagctccgcatcaagctcgatttcgagcggcctttcgaaggccacaacaccgccgagttcacctttgtgccgcaaggcgatgccacactcgtcacgtgggcgatgtacggtccggccccgttcctgtccaagctgatgcaggtgttcatcaacatggacagcatgatcggcaaggatttcgaggctggtctcgccagcctgaagaagctcaccgagaagcactaa

SEQ ID NO: 4773 - DNA, 414 bp, BradyrhizobiumColbertium
atgctcaatccctatctgttctaccaggacacctgcgaagcggcgttcacctattacgccaaggttctcggcggcaagatcgaagcgatgatgcgctcatcggaggcgccgccggaggtgccggccgcgcccggccgtgagaagatgatcatgcatgcgcggatgtcactccccgacggcggcgtgctgatggcctccgacgcgcccgcggagcactttcagaagccgcagggtttctcgatctcgctcacggtcacggaccccgcggatggcgagcgaaagttcaatgcccttgccgacggcggctcggtcaccatgccgttcagcaagaccttctgggccaggggctttggcatgtgcgtcgacaaattcggcattccctggatggtgaactgcccggcggagggaatgtga

SEQ ID NO: 4774 - DNA, 159 bp, BradyrhizobiumColbertium
gtgctcggcacattgcgcccatattccgaagcatggtgggcggtccatgacgaaatacaggcggagaatgaccggcagctcggcagcaagctcgtgatctgtcctcgctgcgtgcactcgtcgccgctgcgcgaggacgtcaccggttcagtccgttga

SEQ ID NO: 4775 - DNA, 489 bp, BradyrhizobiumColbertium
atggtggagttgcgcctgcggctgacccatctacaagagcgagctggtggcttcatgcgacgtatcacctgccttaaggccctgatgctcgcatcggcaatcgccgccacgccggccgccgccgagatccgcatcatccagtctccgggcgggcaggtcggcccattcctcgacttgttcgagaaggtgcgtgatagcggcgagcgcgtggtgatcgacggtccctgcctgtccgcctgcacgctggtgctgagcatcgtgccgggcgagcgcatctgcgtcaccaagcgcgccgtgctgggcttccacgccgcgcgctcggtagatcggcgcggacgtttctatgccgagccggaggcatcggttgcggtgcttgctgcctatcccggcccggtgcgcgactggatcagccgccgcggcggcctgagctcacggctgttgctgttgaaggggcgcgatctcgccgcgatctatccgcggtgccggtga

SEQ ID NO: 4776 - DNA, 789 bp, BradyrhizobiumColbertium
atgccgcaagccccgcacaaagtcgccctcgtcaccggagccgcccgcggcatcgggcttgcgaccgcgaagaaattcctggccgagggctggcgtgtggcgctgctcgacatcgagggtgaactgctcagccgcgccgtcgccgagatcggtcaaggtgaggcgacgctggcgctgacctgcgatgtctcggacgcagccgcattgagcgatgcgatgggggagatcgagggccggttcggccggctcgatgcgctcgtcaacaatgccggcatcgcggtgttcgcaccgctgatggagacatcggaggccgattggcggagcgtgctggacgtcaacctcaccggcccgtttctctgcaccaaggccgcggtgcccctgatgcgcgagggccatggcggcgccatcgtcaacgtcacctcgatctcggcggtgcgcgcctcgacgctgcgctcggcctacggcaccagcaaggcggggcttgcgcacctcaccaaacagctcgccgtggagctcgcctcactcaacattcgggtcaacgcggtcgcaccgggaccggtcgataccgcgatggcaaagcaggtgcacaccaaggagatccgcgccgactatcacgacgccattccgctcaaccgctacgggctggaagaggaactcgcggaagcgatctattttctgtcctcggcaagcgcgagctacatcaccggccaaattttggccgttgatggcggcttcgatgcggcgggcatcggcctgccgacgctgcgtggccagcgacggaatgggtag

SEQ ID NO: 4777 - DNA, 1665 bp, BradyrhizobiumColbertium
gtgttcaatttccagagcaagaaggtcaggcacgctatcgcagaggtcgaggcgctcaaccgttcgcaggccgtgatcgaattcgacctcgacggcaccatactcgacgccaatgagaacctgctgaaaatgagcggctacacgctggccgagatcaagggcaagcatcacagcatgttcgtcagcccggccgagcgcgagagtgcctgctatcgcgacttctgggccagcctcaaccgcggcgagttccagaccactcaatacaagcgcttcggcaagggcgggaaggaagtctgggtccacgcctcctacgcgccgctccgcgatgaaagcggcaaggtcgtcagcttcatcaaattcgcgacggacattacggcgtacaagatcaagaccatggaggattccggcaagatcgccgccatcaatcgcgcgcaggcggtgatcgagttcaacatggacggcaccatcatcaccgcaaacgagaacttcctgaacgccatgggttactcgctcgacgagatcaagggcaagcatcacagcgtgttcgtaacgccggaagaccgcgccagccccgcctatgccgctttctgggccaagctgaaccgcggggagtacgaggcggccgaatacaagcggctgggcaagggcggcaaagaaatctggatcatcgccacctacaatccaatcctcgacgagaacggcaagccattcaaggtggtgaagttcgccaccgacgtcaccgcccaaaagatgagggccgccgacaatgacggtcaactcgccgccatccagaaatcgcaagccgtgatcgaattcaacatggacggcacgatccgcaccgccaacgagaatttcttgaaggcgatcggctattcgctggccgagatcaagggccagcaccactcgatgttcgtcgagccgaatgagaggacttcggcggcctatcgccagttctgggagaccctcaatcgcggcgaataccaggccgccgaatacaagcggatcgccaagggcgggcgagaggtctggatccaggcatcctacaacccgattctcgatctcaacggcaggccctacaaggtggtgaaatacgccaccgacatcaccgcccaggcgatcggccgcaagaaggccgacaatgcgcgcgggctgatcgacgcggttgcggccggcagcgaacagatgagcgcctcgatccgcgagatttccgaaaccatggcgaaatcgcgcgagacctccaaggtcgcgacagcgcgggtcgagtccgcggacagtcaggcccagaagctggccacggcagcacaagcaatgagcggcatcgtggagatgatttccggcatcaccagccagatcaacctgctcgcactcaacgccacgatcgaatccgcccgcgcgggcgaggccggccggggcttcgcggtggtcgcctccgaggtgaagaacctcgcgagccaggccaagcaggcgaccgacacgatcacctcggagatcgatgccctgaacgtcatctctggcgacgtcgccggatcgctcacggcgatcaaggccgcgatcgccggcgtgaacgagttcatcgcgtccaccgccgccgcagtcgaggagcagagcatcgtgacggctgacatgtcagccaacatgcagcgcgcctcggcggagctggcatag

SEQ ID NO: 4778 - DNA, 405 bp, BradyrhizobiumColbertium
atgcgattcatgatgctgatgatcccgctcggctacgagagcgcaccgccggacgtgcagctcgatccagaacgcgttgccgcgatgatgcgatacaacgaggcgctgaaggatgccggcgtgctgatcacgctcgacggcctgcatccgccttcgatgggcgcgcgcgtctcgtttgcgaccggagtgcccgtcgtcaccgacgggccgttcgctgaggccaaggaagtgctgggcggttactggatgatcgaggtcgcctcgcgcgaggaagcgatcgcctgggcgacgaagtgcccggctacgccgaacgaaatcatcgagatccggcaggtgcaggagatgagcgactttccgcctgacgtgcaggcggccgccgcgggtctcgacggcctgaaggcatag

SEQ ID NO: 4779 - DNA, 366 bp, BradyrhizobiumColbertium
atgagcaccggacatacattccttgccgtctacctcggcagcatgagcggcgaaaagatgaaggcctggcatgcgaggcccgaggcggaacggaaggcaatggagcgcgagggcatggccgcttggcaccgctgggtcgagaagcacaaggacgtcatcgtcgagatgggcggcccgctcggcaagacacgcaggatcgacgcgaatggcatcacggaggtcagcaacgccctgacggggttcaccgtggtgcgcgccgcctcgcaggaggaagctgcaagactgttcgagaaccatccgcattttgcgatctttcccggcgaggcgatcgagatcatgcccgtgctgccggttcctcagatgtag

SEQ ID NO: 4780 - DNA, 741 bp, BradyrhizobiumColbertium
atgagctggcgcaaggagcagcgccgcgccgagcgcggctatcaccacggcaatctgaaggaggccctgttgcaggccgctctcggcctgatcgccgagaaaggcgcagcgggcttcacctttgccgatgccgcccggatggccggcgtcagcgcggcggcgccataccggcatttccgcgaccgagacgaactgttgtcatcgatcgcccagcgcggctttgagcagttcgaggcgcgccttggcgcggcctgggacgacggtcgccccgatacggtcaccgcgttcgaacgcgtcggcaaggcctatctcgcctttgcccgcgaggagcccgccttctacaacgcgatgttcgaatcgggcgtgccggtggatgtgaatcccgcactccaggcggctagcgaacgggccttcaacatcattcgcgctgcggccgagcggctcgcggccctgacgccgccgggcacgcctcggccgccggcgatgatgatggcgcttcacatctggtccatggcgcatggcgtcgcctcgctattttcccgcggcgacgccgcccgacgaaagctgccgatgtcgcccgacgagctgttggaggccgaggtgctgatctatctgcgcggcctcggttttccgaccgaccgtcgtccggcaggcaagagcgccgagccgccgcccgtgccacctgaggcatcctccggatcgggcctgccgccgggcggtccctggggcaagccgaaataa

SEQ ID NO: 4781 - DNA, 492 bp, BradyrhizobiumColbertium
atggcctacaccgctgatgtcaatcgatggcgcggcccttcggaccaataccaacgctacgatcgtccccgcatgctcgatacgccctggcatccgggctggatcgccgtgaccattctcgggttcatcatctggtggccgatcgggcttgcccttctctttttcacactcgggagcagaagaatgtcgtgctggagccatccggatcgttggcagaacaagatggaaaagatgcagtacaagatggaccgcatgcgcgaccgcatggagcgtcgcggcttcgggtttggcttcggcccgccgtcctccggcaaccgcgccttcgacgaataccgcgccgagacgctgcagcgcctcgaggaagagcagcgtgagttcaaggactttctgacccgtctgcgtcacgccaaggacaaggaagagttcgaccagttcatggcgcagcacaagacgcgtccgaccccgccgccgaccgaccagcagcagggctga

SEQ ID NO: 4782 - DNA, 768 bp, BradyrhizobiumColbertium
atggcgcaagttgcgacactggcgagcgacgccgtctggcaggcgatccgtggcgaggctcagcgcgcgacgattgccgatcctgtcttcggccgggctcttgcgggcgccatcctcacccataacgatttcgccgccgccctggccgatctgatcgggcagcggctcggcggcgccggcgccgaacgcacgcgcttcacatcctttgccagcgatgcctttcgcggcgaggcggacctgatcgaagccgccggacgagacttgcaggccgtctcgcgcagcgaccccgctgcggcgggcctgctgcagccgctgctgcattacaagggttacctcgcgctgcaggcctggcgcgtctcgaactggctctggcggcatgaccatcgtgacgcggcgctgctgtttcagaacgaggcgtcgaacgtgctccaggtcagcattcatccggccgccagcatcggatccgccgtttatctcgaccacgccaccggcatcgtgatcggcgccggcgccgtcatcggcgatgacgtcaccattctccagaacgtcagcatcggccgcagcagcgaactgccggcgcgctcgccccgcatcggctgtggcgtctatatcggtgcgggcgccagcatcctcggcgacatcagcatcggcgctcatgcgaaaatcggcgccggcacccttgtgagcaaggacgtccccgccggctgcacggcggtcggcaatcctgcgcggctgaccaactgccccgagcccgcctcggcggcctga

SEQ ID NO: 4783 - DNA, 519 bp, BradyrhizobiumColbertium
atgagcatcaaccccaagacgaccgccgcggtcggcgatcatcccctgcatcccatgctgattccgttccccgttgcatgcctggtcggcgcacccatcaccgatctcgccttcattggaaccgacgacgctttctgggcccgcgccgcgatgtggctgatcggcgccggcatcgtcatggcgctggttgccgccgccgccggctttgtggacttcttcggcgaaccccgcatccgcagtctcaacgatgcctggtaccacatggtcggtaaccttgcggcagttgtgctggccctcgtcaatttctacctccgttacgcacaaggtgcggaagctgcgatcaagccatggggcgtggtgctgtccctgatcgtggtcggcatcctgctgttcacggggtggaagggctgggaaatggtgtatcggcatcacgtcgcggtgctggatgcgccgggccagaccagctcggagcccgtcacgccgcatcatggcggcgaaggtcgccgccgcgcggcctga

SEQ ID NO: 4784 - DNA, 717 bp, BradyrhizobiumColbertium
atgaatccggccgacgtggctcagtcagccctcccggttgctgcctccgccgacgtatcgctgattgcgctgttttggcaggctcactggatcgtgaaagcggtgatgctggggcttctggcctgctcggtctgggtctgggccatcgcgatcgacaagatctttctttatgcgcgcacccggcgctcgatggaccggttcgagcaggcgttctggtccggcgagtcgatcgaggagctctatcgaacgctctcggccaagcccacgcattccatggcagcctgcttcgtggccgcgatgcgcgagtggaagcgttctttcgagagccatgcccgctcggtcgcgggcctgcagatgcgtatcgacaaggtgatgaacgtctcgatcgcacgcgaggtcgaacggctggagcggcgcctgctggtgctggcgaccgtcggctccgccggccccttcgtcggcctgttcggcacggtctggggcatcatgtcgagcttccagtcgatcgcggcgtcgaaaaatacctctttggcggtggtcgctcccggtatcgcggaagcgttgtttgcgaccgccgtcggccttatcgccgccattcctgccactattttctacaataagttcacctccgaggtgaaccggcaggcccagcgcctggagggtttcgccgatgaattttcagccatcctgtcccgtcagatcgacgagcgtggctga

SEQ ID NO: 4785 - DNA, 453 bp, BradyrhizobiumColbertium
atgggcatgaacgtcgcaagttcatccggaggcggcggacgccgcggccggcgcaagcccgtcgtggccgaaatcaacgtcacgcccatggtcgacgtcatgctggtgctgctcatcatcttcatggtgtcggcgccgatgttgacggtcggcgtgccgctcgatctgccgcagacccaggccaagagcatcgagaacagtgatcagaagccgatccagctctcggtcgacatcaagggcaaggtgttcatcaacgactccgagatcgccatcaacgagctggtccccaagctgaaggcgatcaccgacgcgcgcggcgggctcgaggaacgcatctatctgcgcgccgacaagaaggcggattacggcaccgtggccaaggtgatgggccagctctcgggcgccggcttcaagaagctcgccctcgtcacagaagcggatcaggggtcctag

SEQ ID NO: 4786 - DNA, 960 bp, BradyrhizobiumColbertium
gtgaaggtgaacgtcgacaagacactcgttgcgtcgattgctctccacgtcctcgtgctgggatggggtctgctgacctttagcagcaaggcctatatcgcgccggaggagtcgcttcccgtcgatatcatttccaccgatcagctggcgcagatgatggcggggcagaagaccggaaagaaggaagagccgaagccgaaggtcgagaagatcgcggaagcgaagcccgaagaggacgccgtcggcaaggtcaccgagaagaaggagctgatcaagaccaactcgcaaccggagccgccgccgaagcctgccgagaagccggtggagaagaagcccgagccccccaagccggtcgccgaggcgaagccgaaggaagagccgaagccgcaggaaaagaagcctgatccggccaaggaagatccgatcgctgagctccagaagaagcttgagaccaagaagccgccgcccaagcccgtggagcaaaaggttgcggcggtgcaccctcagcagcagcccaagccgaaggagcgcaccttcgatcccgcccagatccagcgcgacctcgacaagcgcgccgcgacccggcacgagctcgccggctccgcgctgaatgcgtctgcctcgctgggagcggccaccggaactgccgccagcaatgtcgcgacctggcgcggtgctttccagggcgcggtcaagcgctgcttcacacccacatacaacgggcaggacgccgaccagtacgaagccgatatcgacattcccatgaagatcgatggatcgctggcttcggagccgattgtcgtcgcagtgcgtggaccgtcgcgctcgattgctcaggccattgccgagagtgccaagcgcgccatcgtgcagtgtcaggtctattcgttcatgccgaagcagcaatacgagagctggaagctcatcccgatgactttcggcctgaaagacatgttgtga

SEQ ID NO: 4787 - DNA, 1392 bp, BradyrhizobiumColbertium
gtgacatccgaacaaaagaattttgcaatgaatgacgtccgatcgatcaaccgccgccgcttcatgaccctggctggatcggggcttgcaatgctcggaggcgggcgggtcttcgctcaaggccaggacggccgcatccgcatcgatcctacggcgttccagccgatcccgatcgcgatcaccaattttctgccgggatcgccttccgatggcgaagtcggcaacggcgtcacccaagtcatcaccaacaatctgaagcgctcgggcctgttcgctccgatcgaccaggccgccttcatcgagcgcatcagcaacatggacgttgcgccgcaattccagaactggaaaaccatcaacgctcaggccctcgtcactggtcgcatgacgcggcagccggacggccgcctcaaggccgaattccgcctgtgggacgtggtctccggccagcagctcaccggacagcaatatttcacctcgccggaatactggcggcgtatcgcccacatcatctccgaccagatctacgagcggatgaccggcgagaaggggtatttcgacagccgcgtcgtgttcgtggacgagaccggacccaaggagcgccgggtcaagcggctcgcgatgatggaccaggacggcgccaatgtgcgctacctgacccgcggctccgacctcgtgctgacgccgcgcttctcgccgaattcgcaagagatcacctacatggagttcggccagggtgatccgaaggtttatctctacaacatcgagaccggccaacgcgagatcgtcggcaatttccccggcatgacctttgcgccgcgcttttcgccggacggccaacgcgtcatcatgagcctgcagcagggcggcaattccaacctgttcgtgatggatctgcgctcgcgctcgaccacgcgcctcaccgacacgccggcgatcgacacgtcgccgtcctactcgccggacgggacccgcatctgcttcgaatccgatcgtggcggccggtcgcagatctacgtgatggcggcgggcggcgggcaggcgcagcgcatctccttctccaaggacgacaccaatgccagctattcgacgccggtgtggtcgccgaagggcgattacatcgccttcaccaggcagggcggcgggcagttcgcgatcggcgtcatgaagccggacggttccggcgagcggctgctcacctccggcttccacaacgagggcccgaccttctcgccgaacggccgcgtgctgatgttcttccgcgatcccggcggcaacggcggaccgtcgctgtacaccgtcgacatttcgggacgcaacgagctgaaggtgccgacgcctggcttcgcctcggatcccgcatggtcgccgctattgtcctcgacgtcgggctga

SEQ ID NO: 4788 - DNA, 2331 bp, BradyrhizobiumColbertium
atgcagttcgcaagccagagcggagagcaggggcaggcctcgccgacgatttcggcggcgctgaccgattcgctgttcgaggctcccggcacggtgcttaccggcattgtcttctcggcgttctcggcctccctgacggcgctcaagaccggacagatgctgctctggggctttgtcccgctcctcattcttgcgggcgccatacgcgccttcgatctgagccggtaccaggcccagaaatcggttctgagcgcggaacaggccgcgcgttggcagaagcgctatcagatcggagcgctcatccaggccgctgtgatcggtctgtggtgttccacgacgctgatgagcaacgatgatgccatcgctcacatgattgcgctctcggtcacaacgggaatcgtggcgggaggcgccggaagagcttatggacgacagtcgatatttcgtctgcaagccactttgatatttggaccggccgtgatcgcgctggcgctgcaccgcacgccttactacgtcgcgatgtccgtcgtgtgcgccgcgttcctcttctcggtcatgcgcctctccggcaatctgcacaagattttcttgcgcgccgttgtcgcacgcgaacgcgaggccgcactcgccggccagttcgacacggcgctcaacaacatgccgcacgggctctgcatgtttcgcatcgacggtcagctcgcggtgatgaaccaccgcttcgccgccatgatgagcctgccagacgatctcgcccaaaacggcacgactgcgcgcgatgtcgtcgccgcatgcgtcgaagcgcgatcgatctcggccgcgagcggccaggcgataattgccgacatcgaaaacgcgcacgcgaaggagatcattaccaccgaccccgatccacaaaggaaccgttcgctgtcttggaccgtccaaccgatggctgatggcggtgcggtggtgctgctcgaggacattacggagcggcgcacggcagaggccaggatcagccatatggcccgcttcgacgatctcacggcgctgccgaaccgcgtcagcttccgcgacgagatcgagcacctgttggccgtctcacacgacgcggagcagctctccgcgctgctgttcatcgacctcgaccagttcaagcaggtcaacgatacgctcggccatccctgcggcgaccagctcctgtgcgccgtcgccaaccgcctgcgcgagatgcttcggccggaggatttcgtcgcccggttcggcggcgacgagttcgtcgtgttccagcagaacctcaatgcccccgaggacgccgcagcgctcgcccgccgcatcgtcgagcgcctgagcgagcgctatcgcatcgacaatcacctggttgagatcggcgccagcgtcggcatcgcactgacctcgccggaaggcaccagcgccgacaccctgctcaagaatgctgacatggcgctgtaccgggccaaggccgacggccgcggcacctattgcttcttccgcgacgagatggcggcgaccgtcgaggcacggcgcattctcgagctcgacctgcgcaaggcgctcgccaacgaggaattcgagctgttctatcagccgctggtcaatctgaaatccggcaagatcaccacctgcgaggccctgctgcgctggaatcatccggtgcgcggcacggtctcgcccgtcgacatcataccggtcgccgaggacatgggcctcatcgtcgatctcggccgctggatcctgcgccgcgcctgcatggaatgcatgaaatggccggagggcgtcagcgtcgccgtcaacttctcgccgcagcaattccatcagcgcgacgtgctgagcgagatccgctatgcactcgaagtgtcgggcctgccggcgcatcgactggagatcgagatcacagagtcctcgctgctgcgcaacacccagctcacccacgacatcctgtcgcaattgcatgcgctcggcgttcgcatctcgctcgacgatttcggcaccggctattccagcctcagctacttgcacaacttcccgatgcagaaggtgaagatcgaccgctccttccttgaaggcatcgactcggaccgtccgctcacactgctccgaggtgtggcgcggctgtccgccgacctgggcatgtcggtggtggtggaaggaatcgagaccaacgagcaactcgaactcatcaatgccgacgggacggtgaccgaagctcagggttatctgttcagccggcctgtcccggccgtgcgcattcgtcagctactcaatgcctcctacggcgttcgcggcggcaacgatcaggccgtcgcagcctcggcgcgatcgatcgcctga

SEQ ID NO: 4789 - DNA, 732 bp, BradyrhizobiumColbertium
atgaagtccggggccgaaccgcagacggcgcttcttccacgcggagccgcgctgtttgagcgtctcgattatcggctcatcgaaacgccggaagacaaggatcgcctccatctgatgcgttaccgggcctatttgcaggccgggctgattccgccgtcggaatcgcagcgggtgaccgaccgtttcgacgacgcgcccaacgtctggaatttcggagtctacgtcgacaacgaactctgcagttccgtccgcatccacgttctgacatccgaatggcggatgtcctacacgaccgaggtgttcggcgacgtgctgcatccccgcctggaccgaggcgaggtctttatcgacccatgtcgattcgttgctgatccggaaatgcagcagcgtttccccgaactgccttatctgacggtgcggcttcccttcgtggcctgcgaacacttcaacgccgatgtcgggctctcgatggtgcgaaccgatcatcaggcgttctaccgccgcgtgttcctgtccgagacgctcaccgaaccgcgttcctttccaggctggccgacgaagaaggcggtcctgatggcctcggattaccctaaggtccgggacaggatcctgacgcgtttccccatcatgcgatcgagtgcgtttgagcggcggatgctgtttgaacgcagcacgcagcggatcgcccctgcgcgaccgattcgccttgccggcgcagccgcgcaggcctga

SEQ ID NO: 4790 - DNA, 477 bp, BradyrhizobiumColbertium
atgcgtatcctccagggattgaagttggccgcggtgctcgccgtcgcgctgtcgatgggcgcctgcgccaacaagaatgccgcgacggatgcgatggccaatgcggcgacgccgggcagccagcaggatttcgtcgtcaacgtgggtgaccgcgtcttcttcgaaagcgaccagaccgatctgaccccgcaggcgatcgtgaccctggagaagcaggcacagtggctccagagttatccgcgctacagcttcaccattgaaggtcatgccgacgagcgcggcacccgcgaatacaacatcgcgctcggcgcccggagagcccagtcggtgcgctcgttcctcgcctcgcgcggcatcgatccgaaccgcatgcgcacgatctcctatggcaaggagcggccggttgccgtctgtaacgatatctcctgctggtcgcagaaccgtcgcgccgtcaccgtcttgaacgcgagctcctga

SEQ ID NO: 4791 - DNA, 1044 bp, BradyrhizobiumColbertium
gtggcgaccgtcgcgctgctctccttgtgctcgcccgcgtttgcgcagtcgatctttgcgcagtcggacgatggcgacgccgagttgcggatcgagcggctggagaatcggctgcgccagctcaccggccagaacgaggagctgcaataccgcaaccggcaactcgaggagcggctgcgggcgctcgaaggcggcgcgcaggccgcccccggacaggcgcccaacgtcgcggcgatgccgcccgcgcagatcgcgccgggccagattgcaccggggcaagccgcgccgggccatcggcagccgccggtgcagccgaactacgagcagccgcagatcgcatctcccgccccgatcattcaggagcagccggcgcccggcgctcccggcacgcgccgccgtggcgatgcgttcgacccgaaccagaatccaaatgcgcccggtgcgccccgcgcgctcggcggcgggcagcagccgatgccggcaggagctccgagcgggacgcccggcggccgcaatgccggcgagccgctcgatctcgccaacaccagcccccgctaccagcaaggtgtgccgtcagcagcgcagcccggctacccgccggcgcaatccggctatccggcgccggccggcggcgccggcttgaccaccttgccgccgtcggcaacgccgcgcgacgagttcgacctcggcatcggctacatgcagcgcaaggactatgccctggccgagcagaccatgaagaacttcacgcagagatttccgagcgacccgcttatcggagacgcgcaatattggctgggcgagagctatttccagcgccagcaatatcgcgattccgcggaagccttcctcgccgtcaccaccaaatacgagaaatcggccaaggcgccggatgcgctgctgcggctcggccagtcgcttgccgcgctgaaggagaaggaggccgcctgcgccgccttcggcgaagtcggccgcaaatatccgcgcgcctccgccggcgtcaaagccgcggtcgatcgcgagcagaagcgggtgaagtgctga

SEQ ID NO: 4792 - DNA, 1056 bp, BradyrhizobiumColbertium
atgtcagacgacgacaattcaccgatctcagcgcgcgaggcgaggcggcttttcgccggcctgaaagctgcgccggcgctggtgctcgccgtctccggcggccccgactccgtcgcgctgatgtggcttgctgcgcgctggcagcgcagccttgcgcggggtccacaactcaccgtcgtcacggtcgatcacggcctgcgcccggaagcggcccgcgaggcgcgcgaggtcaagcggctcgccgccgagctcggattgccgcaccggaccgcgcgctggcgcggtgcgaaaccgaagaccgggctgcctgcggcagcgcgcgaggcccgctaccgcctgctcgctgaggccgcgcgtgccgcgggtgcgagccatgtgctgacggcccacacccgcgacgaccaggcggagaccctgttgatgcgcctcctgcgcggcagcggccttgccgggttgtcggccatggcgcccctcagcgagcgcgacggcatcgtcctggcgcgcccgctgctcgatgttccgaaatcgcagctgatcgcaaccttgaggcgggcgaaggtcggcttcgtcgacgaccccaccaaccgggacaccgccttcacccggccgcggctgcgcgcgctgctgccgcttctcgccgccgagggcggcgacagcagaaatctggcgcggctcgcggcaaggctggcgcgcgccaatgcggcagtcgaggtgctggccgacggcgccgagcgctttctccgtttgcgggatcgcggcgatgcgccgcaggcgggcgtccggagcttcgaggcttcggcctttgccgccctcccggaggaggtccggctgcggcttctgctgcgggccatcgacgcgctcggacatgagggaccggcggaactcggcaaggtcgaaaccctggtgtccgcactggacgaggccatggccgcaagtctgcgcgcccgcgccggccggccggccctgaagcagacccttgcaggagccttgatcagccttgccggcgggcgtatccacatcgcgccggcgccggcccggcggcgcaccgggcgatga

SEQ ID NO: 4793 - DNA, 159 bp, BradyrhizobiumColbertium
atgcgaggaaatcccaaggaatcctcatcgttagacggatacaatttaggtgccgtcccggtcgctgccaagagaacgagatgggactatttatcccatcctagagcgattcccgcggaaataatggcgccctatggcgggtttttccggcctggttaa

SEQ ID NO: 4794 - DNA, 1923 bp, BradyrhizobiumColbertium
atgaacgccaatctgcgcaatttcgccctctgggtcatcattgtcttgctgctgttggcgttgttcacgctctttcagaatccgggtcagcgggcgtcctcgcaggacatcgccttctcccagctcctgagcgaggttgaccgcggcaatgtgcgcgacgtcgtgatccaggggccggacatccacggcaccttcaccaacggctcgagcttccagacctatgcgccgaacgatccgacgctggtgaagcgcctctacgacagcaaggtgcagatcactgcgaagccgccgggcgacaacgtgccctggttcgtctcgctcctggtctcctggctgcccttcatcgcgctgatcggcgtgtggatcttcctgtcgcggcagatgcagggcggcgccggcaaggcgatgggcttcggcaagtcgcgcgccaagatgctcaccgaagcgcatggccgcgtcaccttcgaggacgtcgccggcgtcgacgaagccaagcaggacctgcaggagatcgtcgaatttctgcgcgaccccggcaaattccagcgtctcggcggccgcattccgcgcggcgtgctgctggtcggccctcccggcaccggcaagaccctgatcgcgcgtgcggtcgcgggtgaggccaacgtgccgttcttcaccatctccggttcggacttcgtcgaaatgttcgtcggcgtcggcgcgagccgcgtccgcgacatgttcgagcaggccaagaagaacgcgccctgcatcatcttcatcgacgaaatcgacgccgtcggtcgtcaccgcggcgccggactcggcggcggcaatgacgagcgcgagcagacgctgaaccagctgctggtcgagatggacggcttcgaggccaacgagggcgtgatcctgatcgccgcgaccaaccgtcccgacgtgctcgatcccgcgctgctgcgtccgggtcgcttcgaccgtcaggtcgtggtgcccaatcccgacgtcgtcggccgcgagcagatcctcaaggttcacgtccgcaaggtgccgctggcgccggatatcaacctcaagaccatcgcgcgcggcacgccgggcttctcaggcgccgacctgatgaacctcgtcaacgaagctgcgctcaccgccgcccgccgcaacaagcggatggtgacgcaggccgagttcgaggaagccaaggacaaggtcatgatgggtgccgagcgcaagtcgctcgtcatgaccgaggaagagaagctcttgacggcctaccacgaaggcggtcacgccatcgtcggcctcaacgttcccgcgaccgatccgatccacaaggcgaccatcatcccgcgtggccgtgcgctcggcatggtcatgcagctgccggagcgcgacaagttgtcgatgtcgctggagcagatgacttcgcgcctcgccatcatgatgggcggccgcgtcgccgaagagctgatattcggccgcgagaaggtgacctcgggcgctgcttccgacatcgagcaggcgacgcgcctggcccgcatgatggtgacgcgctggggcctgtcggaagagctcggcacggtctcctacggcgagaaccaggacgaggtgttcctggggatgtcggtgtcgcggacgcagaacgcctccgaggcgaccgtccagaagatcgactccgagatcaagcgtctggtcgaggagggctacaaggaagcgacccgcattctcaccgagaagcgcgccgacctcgaagcactcgccaagggcctgctcgaattcgaaacgctgaccggcgaggagatcgtcgatctgctcaagggcaagaagccgaaccgcgagtccgtgctcgagcccaccgcgccgcgcgcctccgccgtgcccccggccggcaagtcgcgcccgcggcccgatccggatcccggcctggagccgcagccgcaggcgtaa

SEQ ID NO: 4795 - DNA, 138 bp, BradyrhizobiumColbertium
ttgaaaaacgcggcgggaacgccgcgttttttgttatgcgagcgcgcgtttgcgccggcatcgggatggctgcttccggcaatgcgagcaccgccgaagcagagcgcttctgttccggccgtcgccgttcgggcctag

SEQ ID NO: 4796 - DNA, 840 bp, BradyrhizobiumColbertium
atggctttcaaggatattctgttgaccctggcgagctatccggaaccgacgccggtttcggtgatcgacgatgccgtttcggtcgccgccgtcctggacgcgcacatcgcggccatttcgtgcgaagtccatgcggaagtgcgcgcaagcctgctcggggatgccatcctggacatacccgcactcgttgcgcgcgaggccgccaagagccgcgagaatgcgaaggcgctgcttgcggcgttcgaagcctcggccgcgaaatccggcgtccggcacgagaccatcttcgagcaatgtgcaaccgccaccgaggccgcgctgctggcagactatgcaaggcttcgcgatctcacgatcatggcggtgccggactcccatgatcgatggtacgcagaagaggtgatcttcgaatccggcaggccgacgctgatcctgcccgccgctccccgatcgcgtccattccagctcgatgctgtttgcgtggcctgggacttcagccgcaccgctgcgcgagcggtttccgatgcgcttcctttgctcgaaagcgcaggaagcgtgcgggtcgtaacggtcacgaacgaaaaggccctggattccaagcattccggcgaagagctggcgaagaacctcgctcgtcacggcatcgaggttgtgtgcgacgagatcgacgccgcgggcaaggggatcgacgaggtcctgacatcttacgtgttctcccatggcatcgacgtcctcgtgatgggcgcgtacggaacgccgaggtggcgggaattcgtgcttggcggcgcgaccagggggctgctgtccaagccgccggtcccgattctgttctcgcattga

SEQ ID NO: 4797 - DNA, 1233 bp, BradyrhizobiumColbertium
atgcaggaggccgcgtcgctcgggtccaccaggctgatcaggtcgctcacgctgacgcacgccgtgctgtacgggctcggcgtgacgatcggcgccggaatctacgtcctggtgggagcggccgctgcgcgaagcgggatgcatgcgcccctggcgttcctcgctgccgcggtcgtgatgggcgtgacggccgggagctttgccgaactgggcacgcgatggccggttgcggcgagcgaggctgcctacgtccaggccgcgtttcatcgaaaatggctcagcggtgccacggggctgctcgtggtggccgcagcgacgatttccggcgcgaccatcaccgtggggagcgccggctacatcggcgtgttcctgccgctgcccgccacctggatcatcgccggcgtcgtgcttgcgatgggagcggtcgcctgcctgtccgcggttcagtccatcggcttcgccggcctgatgacggtcgtggagatcggcggattggtcctcattgtcggggccgggctgtttcagggcgacgccctggtctcccggctgcccgaactgctagctcccctgagcgacaaggcggcgtggaccgggatcgcacagacgtcgctgctcgccgtgttcgcattcatcgggttcgagcacctcgtgaacatctccgaggaaatgaagaatccgtcccggacgctgccatgggcgctcttcatcaccctcggcgtgacggcgttcctctacatgactgtcgtctgggttgcggtggtcgcggtgcccccggccgagctcgcgcactcctcggctccgcttgcactggtctttcagcggttgaccggtcttccgctctcggtgttgagcgtcatcgcgatcgttgcgacggtcaatggaatcatcgttcacatgctgatgatcggacgtgtgctgtacgggcttgcggaccaaggcagccttccggcctttctcgcaagggtgaacgcgagaagcggcgcgccgatggttgcaaccctcttcggcgtgggcgccatcctgatcctcgcccttggcattcccttgaccggattggccgaatggacctcacgcctgacgctcggggccttcgtcctggtcaacctggcgcttcttcgcatcaagacgagagaatccgaacctcccgccggcgtgttcgtcgtgcccatctgggtgcctattgcaggactgctcacaagcgccgccttgctcctgatcgacctcctcggatag

SEQ ID NO: 4798 - DNA, 1806 bp, BradyrhizobiumColbertium
atgtcgtccctcgtgctaccgaccgaacaaggatccgatgctgcgcccaaccctgcgatcgtgctgaccaccgcctgggcggcgattgtgatggcgctcggatttcccgcgatcaagacgggcgttctcgacagcctgtcgaccgacgacctgatgcggctggtcgaggtgcgcgatctcctggctggccaaggttggttcgacctgattcagtaccggctcgacccgccgggacttgcgatgcactggtcacgcgtcgtcgatgcgcccttggccctgctgattgcgttgtttcgtcctctcctcggccaacacgcttcggaagcgctcgtgctggtcgcgtggccgtcgatgctgatggccgtggcgctctggctctcagcgaccatcgcaagtcaggcaagcactccggccgatcgcccatggctacatttcgccgcggttctggtcacggccctgtcgatacccgccctgatccactttcgcgctggcgcgatcgatcatcatagcgtccagatcgtgctgctgctcggcttcatgctctccatcaccaatctcgaacactctgcagccagggcggctctggccggaggtctcgcggcgctgtcgctggcaatcggactggaaatgctgcctgcgatcgccgtggcgagcgcggcggtgatggggctgctgatctggaagggcgccgaggcccggcgctccgcctgcgccttcggagccggcctctctgcgtcgtcgctgctgctggcactgctgctgcttccgataaacagtctcacgcggcccgtctgcgacgccttcggcggccccgtccttctcttgtcggcgggcggcggcgccgcgctgctcgcggtagccggcgtcagccatctcggccgctccatctggacgcggctcggttcggccgcgtttgccggtgcgctcctcctgggtgcgttctccagatcctatccgaactgcgtggcctcgccatatgcgcaagtcgatcccctgcttgtaagcttctggctcgatcgggtcagcgagaccatgccagtgacggagctggcgcgggtgcaaccgcagaagctgctcggatactatgcgtttccattcctgacgctcggcctgtgcctcgcggcgacgattaggaacagaccgcagacgcgctttctctggatcgtttcgaccttcacgctcgcagcgctgttcggtgtcagcctgtgggaactgcgcggcgccgccgctgccaacatcgttgcggctccgctcagcgtcatggcaatctcggtcttgcgcacgcgtgccgcgaccgattgggggctggtgcgtgccgcactgcttgtatcgccagccactctcggcggcgtcggctttgcagtttggcctgtactcgccggcgggacgagtagccatgagatcgcgacgcctgagcgcaacgtgtcctgccagaccatctccaacgccgcgccgctcgctgctctgacgcccggtcgggtgatggcgccgatcgactcgggtccttcgatcctggcagcgaccggtcatttcgtgttcgccggcccctaccatcgcaacaacgacggcaaccttgccatggtgcatgcgatgacggcgacaccgcaagccgcgcgcgcaatactcacctcgcggaaggtcgattacatcatcacgtgcaacggctctgccgatcaggaggatctggtccgcatcgcgcccgagggcctcgccgcaaggctcggccgcgatgaggcgccagattatctggagcgagtcgagaccgtgtctcgagccggcatgactgtctggcgcgtgcgcaagtga

SEQ ID NO: 4799 - DNA, 1503 bp, BradyrhizobiumColbertium
atgtctttatcccttgccaacagcatcgcggtgcaggaccgcgcgcgggccctcgtgccattgtgcgccggcgccggcgcctacctgttcttccttttcctcggcgacacgctgctaagtgactccgactcgttctggcagatcaagatcgggcaatggatcctcgaccacagcgccatgcccaccaacgacttctattcgttcacgcgagcgggcgcgccctggatctcgacgtcttggctgtcgcaggtcgcattcgccttctcccaagcgcaatggggctgggccggccccgtcattctgacggccgtcgccttcgcgctcgcaatcgcgatcttcgtctatctgctcgacgtgcagatcgaggcgccgcgcgcggtgctgttcgcgatgcttgcagtgctgctgtcgctgcatcacgtgctggcgcgtccccatattctcgcgctgccggtcatggtggcgtgggtcgggctgctcatggcgaccgctgaccgcaggggcgccccctcctggcatctgctgccgttgatggcgctgtgggcgaacctccacggcggcttcgtgctgggccttgcgctgatcggcccgatctcgctggaggcggtcgagcatgccgagaagggacggcggcttgccctgttcatgcgctgggtgctgttcggaatcgccgcgctgatcgcgagctgcttcacgccgtacggctggcgaacgttgcagggtgcgaccaacatcctcagcctcggcgagttgctgtcgctgatcttcgaatggatgccggcgaacttcgccacgttcaccccgttcgagggcgccctgctcgccttgatcgcattcggctattatcgcggcctggtgctgtcggccccccggatcttcctgatcctgttcctgacctggagcgcgctgacccacgtcagaagcatcgaagcctttgcgttcctcataccgctggtgctggcaaagccgctcggcgcgatgtttccgcgcgcggtccccgaggcggtcggcgccgaccgctggccggctcactacgtcaccgcgctcggcgcgctgatgatcgtggcggcaagctggacctcgacgtcgctctacatgggacaccaccgcttcaccttcacgatgacgcagacgccggttgcggcagtcgacctgctcgagcaacgcaaggcacagcgcatcttcaacgcctaccagttcggcggctatctgatctcgcgcaatattcccgttttcgtcgacggccgcgccgagctctatggcgagaagttcgtgatggacttcttcaaggccaccgagggcaagaagcccgagctgctgccgcgcctcttggacgaatacaagatcgacgcgacgctcctggtcgcggacgcgccggggccgcagatcctcgaccaactcaagggctggaagcggatctatgcggacgacatcgccgtggtccatgtgcgcgaggacgggcagagcgcgggcggcaggtcaatgcccgctgcctcgaattga

SEQ ID NO: 4800 - DNA, 165 bp, BradyrhizobiumColbertium
atgaagaacctcgttgcgcgtttcttgaaggatgaatccggcgccaccgccattgaatacggcctgatcgccgccggcatcgcgctggcgatcatcaccgtcgtgaacaacctcggcaccacgctgaacaccaagttcacctcgatctcgaccagcctgaagtaa

SEQ ID NO: 4801 - DNA, 987 bp, BradyrhizobiumColbertium
atgcaattccacgcgcttacacccatgctcgacacggactcccggaccgcctggcagctttttcacctcaattggcttccgatcctcggcatgggaatcctgctcgcgctcggccttcgcgccacgggactgaggctcgagccggtcgcctacggcgtcgccctggcgatcgccacgctgctgcttgtgctcgcctatggctaccgaatcgcgaaaggcgagcttgcggatccgaagctggtgttttcgcttggcaccatcggacaggtcattctcacctgcgcaatcgtcgggccgctgagctacgtcgcgggcaagctgaactggccgctcgaggatcaagcattgctggcgatcgaccgcacgttggggctcgatccggaaccgatcgcacgctacgtcaacaaccatccatggctcgcgagaaccctcgcgagcggctacggactgatcaagtttccgctgctcggcgttcccatcgtgctggcactgacggcacggtatgtgcggctgcaattgttcatgctagcgatgagcctcgcgctcgcagtcacgatcgcggagatcgcgatcgtgccggcgatcggcacctattacgcactgcagctgccggccgcccatctgccggagatcaacaccacggtctacgccggacagctgcgggacatcctcgcgcttcgggacggcagcctgcgtgaactccggctgttctctctgtcaggcatcgtttcgttcccgagctttcacgcggcatcggccgtgctctacatctgggccttgtggccggtacgcggcatcggcggcatcgcagccgcactcagcctgctgatgatcgcagcaaccccggtgatgggcgcgcactacatcgtcgacgtccttgccggcatcgcgctcgctatggcctcgatctgggccgcgaagctttatctcggccggagccgtgcggtgcgcgggtctgccacgccggcttcgtcagcagcgtgctga

SEQ ID NO: 4802 - DNA, 681 bp, BradyrhizobiumColbertium
atggtttatcggcggacgcatcaagtggttaagcgccttgcggcgcggcgcagcgcgattctggcggcggcgcgggaggcggcggcagaaggcggcatggccgcggtgcagatcgcgccggtcgcagtccgggccaatgtcgcggccggcacggtctaccgctatttcccatccaaggcagacctgatctccgagctcattgccgaggtgtcccgcgacgagctcgcggcgatccggcgggcggccgatgccgcgccgggcccttcctcggcgctggcggccgccgtgacgaccgtggcggtccatacgctgtcgcagcgccggctggcctggggcatcctggccgagcccgtcgatgtcgatgtcagcgcctccaggctggccagcaggcgcgagatcgccggcgaaatcgctggccggatcgacgcggccgtgcgtgccggccatttgccggcccaggacaccgcgctcgccgccaccgccttgctcggcgccctgcatgaggctctcgtcggcccgctcgcgcccgacaatctcgatgatcccgtcaagatgcgcgatgcggtgcagacggtgactctgctggcgttgcgcgcggtcggcgtcatggatgcccgtgcccgcggcttggtggtgcagcagacgctgctgccgacgaccaaggctttggttggagcgtaa

SEQ ID NO: 4803 - DNA, 1374 bp, BradyrhizobiumColbertium
atgatccgccgcctgttcgaggccggcgccgacctgttccgcatcaacatgagccacacctcgcacgacaagatgcgggagctggtggcgacgatccgcaacgtcgagagcagctatggccggccgatcggcatcctggtcgaccttcagggtcccaagctccggctcggcgctttcgccgagggcgcggtgcagctccagaacggccagaccttcacgctcgattccgacaagacgccgggcgatgccacgcgcgtccatctccctcatccggaaatcctggccgcgctgcggccaggccatgctctgctgctcgacgatggcaaggtgcggctgatcgcggaggagacctcgaaggagcacgcggtgacgcgggtcgtggtcggcggcaggatgagcgatcgcaagggcgtcagcctgcccgacacggacctgccggtctcggcgatgacgccgaaggaccgtgccgacctcgaagccgcgctcgtcaccggcgtcgactggatcgcgctatcgttcgtccagcgcgccgacgacgtgctcgaagccaagaagatgatccgcggccgcgccgcggtgatggccaagatcgagaagccgcaggcgatcgatcgcctcgcagacatcatcgaggcgtccgacgcgctgatggtggcgcgcggcgacctcggcgtcgagctgccgctggagcgcgtgccgagcctgcagaagcagatgacgcggatggcgcgccgcgccggcaagcccgtggtggtcgcgacccagatgctggaatccatgatccagtctccggtgccgacccgcgccgaggtctccgacgtcgccaccgccgtctatgagggcgccgacgccatcatgctgtcggcggaatcggcggccggcaaattcccggtcgaggcggtctcgaccatgaaccgcatcggcgaggaggtcgagcgcgaccccacctaccggtcggtgatcacagcccagcgcccggcgccggaatccaccgcaggcgacgccatcgccgatgccgcgcggcagatcgccgagacgctcgatttgccggccttgatctgctggacctcgtcgggctcgaccgccgtgcgcgtggcgcgcgaacggccgaagccgccgatcgtggcgatcaccccgaacatcaccgccggccgcaggctggccgtcgtctggggcgtgcattgcgtcgtcgccgaagatgcccgcgaccaggacgacatggtcggccgcgccggccagatcgcgttccgcgacggcttcgtccgcgccggtcagcgcgtcatcatcgtcgccggcgtgccgctcggcatccccggcaccaccaacatggtacgcatcgcctcggtcggccccgagggcgatgcaaacatgtag

SEQ ID NO: 4804 - DNA, 675 bp, BradyrhizobiumColbertium
gtgggttttttcgagcgtctcaagacagccgcgtccgctgagtggcgggcctacactgagcatcccttcacgaatggattggcggacggctcgctcccggaagctgcgtttcgtcactacctcgttcaggactatctgttcctcatcgagtttgctcgcgcctacgcgctcgcggtctacaagtcccccaggcttgccgacatgcgtgaagcagctagcggcctctcggccatccttgatgtcgagatgaacctgcatgtgaagctctgtgccgaatggggcctgtccccgagcgaccttgaacaggcccctccggcggccgagatgctggcctatacgcgctacgtgctggatgcgggaatgcgcggcgatctgctggcgctcaaggtcgcgcttgcgccttgcgtgatcgggtacgcggagatcgcgacgcggctcgcctcgcaccccgctgccgacgcgctgagcaacggctatcgcgtctggatcgccgaatatgccggcgcgccgtaccaggaggtcgctgccagggcgcgggcgcatatggagcatctcgccgatctctacgccacgccggcccgcgaggccgagctgattgcgatcttcaaggaagccacccgtctcgaggcagacttctgggagatggcctggcgcgcgggccaggctgtcgcatag

SEQ ID NO: 4805 - DNA, 945 bp, BradyrhizobiumColbertium
atggccaccttgctgatcgtcgcgccggtgttcgcgctgatcgcggccggctatgcctcggtgctgtttcgcttcgtctcggagagcgcgcacaagggcatcagcgaattcgccttcagcatcgcgatccctgcgcttctgttccgcaccatcgtcgtctcggaattccccgatgtcagtccttaccggatgtggggcgcctattacggcgcgctcgccatcacctggatcgcggcgatggcggtctcggcgctgctgcgccgccagcgcggcggcagcgaggacggcgtcgtgtgcgcgatcggctcggtctacggcaacatcgtgatgctcggcattccgctcgtgctctccgcgctcggcaacgaggcggcgggcccgatggcgctgatcctgtcggtgaacacgccgctgctctggctgtgcggcacgctgcagatggagttcgtcagccgcaggcaggcgggctcgccgctcgcgatcgtctggcccgtgatcgcagacctcgcgcgcaaccccttgatgctggcgatcggcttcggcgtgatctggcgcttcaccggcctcggcctcaccccggtcgtcgaccgcaccatcgagctgctggcgcaggcgggcgcgccgacggcgctgatcgcgctcggcatcaacctgttccgcttcgaggtgaagggcgagaagccgagcattctggtgatgtgcgcgctgaagctggcggccatgccggtggcggcgttcgtgctggccagactgctcgacctgccgccgatcgccgccggcgtcatcgtgctgttcgcggcgatgccgaccggcgcgaatgcgtacatttttgccgtgcagtatcagcggctggtaaatccggtgtcgggcgcggtggcgctcgggacgctgctggcggcggtgacattgccggtggtggtgtgggtggtgacgggggtgaggtag

SEQ ID NO: 4806 - DNA, 924 bp, BradyrhizobiumColbertium
gtggctgtgctgcggccgagccgggcctatctggctgttcccgcccatcgcgcccgcctcgtcgccaaggcggcggcgtcaagcgcggatgcggtgttcatggatctcgaggatgccgtgccgcccgccgagaagggcgctgcgcttgcggaagccgccggcgcgctgtcctcgctcgactggggcagcaagcacgttacggtcaggctcaacgtggtcgacagcccgttcatcgcaaacgagatccgcgcgctggcggcgctgccgcggctggatgcggtgatcgtgccgaaggcggagcgcgccggcgacatcgccgccatcgccggccagttgcgcgcggcggcgccggatcgcgccgaacccgtcgcgctggaattgctgatcgagaccgcgctcggcctcgtcaatgtcgacgcgctcgccgccgcgcactcgagcgtggcgtcactgcatctcggcgtcggcgacttcgcggcctcgctcggcgcccgcacctccgacgtcggcatctcgccggacggctatcgccacgtcgggtcggcgcaaagcggctacgcctccgcgccgctcgacctgttcgcctatcccatgatgcgcctcttggtggccgcgcgcgccttcggcctgcgcgccatcgacggcccctgcggcgcgttccgcgataccaggctgaccgaggccagcgcgcagaaggccgctgcgatgggcttcgacggcaagcaggtgatccaccccgaccagatcgcgccgacgctgcgcgcgttcacgccgtcggccgaggagctggcccaggcgcggcgggtggtcgaggcgatggagagcgcggaggcgaacggccagggcgcggtgacgctcgacggcaagatgatcgactatgccaatgtgcggatggcgcgacggatcatcgcgctggggtcttga

SEQ ID NO: 4807 - DNA, 1167 bp, BradyrhizobiumColbertium
atggatgggaatgaggcggagctgccgctcgcgggcgtgacggtggtgtcgctggagcaggcgatcgcggcgccgctggccagccggcacctggcggattggggcgcgcgggtgatcaagatcgagcggcccggcagcggcgacttctgccgcgactacgatcacgtgatgaacggcatgtcgagccagttcgtctggaccaaccgctccaaggaaagcctcgccatcgacatcaagagccccgaggggcgcaaggtcctcgacgccctgctgccgcgggccgacgtgttcatccagaaccttgcgccgggagcggcggagcggctcggcctcgatgcggcatcgctgctgcgcaggcatccgcgcctgatcgcctgcgacgtctcgggctatggcaccggcggtccctacagcgacaagaaggcctatgacctgctggtgcagtgcgaggccggcgtgctcgccatcaacggcaccgaggcggagcctgcgaaggtcgggctctccgtggtcgacatcgccaccggcatgtacatcctcaacggcgtgctgatggcgctcttccgccgcgagcgcaccggcaagggcaccgccttccaggcctcgctgttcgattccatcacggactggatgagctatcccgcgttctacaccgagagcaccggccggccgctgccgcgcaccggggcgaagcatgcgacgatcgcgccctacggcccgttccgcgtcggcgacggcaacaccatcttcttcggcatccagaacgaccgggaatggcgctcgttgtgccgcatcgtgcttggcgatgccgcacttgccgacgacccgcgcttccgcatcaatccgctgcgcatgcagaaccgcgacgaattgcaggcgcatatcgagcagcgcttcgcgtcgatgacgagcgaagaggtgctgcggctgctggacgaagccgcgatcgcgaatgcgcatctcaactcggtcgaggccttcctgaagcacgagcagttgcacgcgcgcgggcgcgtgagaagcgtcggctctcccaacggccccctgatgagcttcctgcccgcgctcacccttcccggcgtgacgccgcggatggacccggtgcccgatgtcggcgagcacaacgcggccatcctcgctgaactcggcctggccagggagacgtga

SEQ ID NO: 4808 - DNA, 120 bp, BradyrhizobiumColbertium
atgcccgctcagcttttgacccagcgcaggagaacgagccgaccacccacgcgatttttgatggtgccatcatgcccctgttttgcccgacaagtcaaattcggcttcgaaaaatcctaa

SEQ ID NO: 4809 - DNA, 342 bp, BradyrhizobiumColbertium
atgccggcgtttcgcttcaagacctccttggccgtcgcaagcttctcgcttgccctggccgtcctggccctgccgcgcgccggcttcgcctacacccaggaggagcagcaggcctgcacgccggatgcgatgcggctgtgcaacgagttcattccgaacgtcgatgccatcaccgcctgcatgatcaagaagaaggcgcagctgtcgccgcaatgccgggtgttcttccgcccgggccccgagccgcgccagctccgcgccggcaagccgacccagatcgcgcccaaggccgcgaagaagagcgccaagccggcgccgaagaagaaagccagccagggctga

SEQ ID NO: 4810 - DNA, 678 bp, BradyrhizobiumColbertium
atgaacgttattgtttttgcatcgcgtaagggcggctcgggcaagagtaccctggctgcacatcttgccgcgcagatcaaggcaagcaagcaggtcatgctcgtggatgccgatccgcagggctcgctcacgctgtggcacaagctgcgtggcaccaacgagccgccgatcaaggctgccgtgaactccgtcagcggcatcgtctccgctgccaagcgcgacggtttcgaatgggtgttgatcgacacgccgccgaacctgtcggccgtcgtcgacgacgcgatccgcaatgccacgatggtgatcattccggcgcgtcccggcgtgttcgacgtcaacgcggtgcaggaaaccatccagatgtgccgcgccgcgcgcaaaccctacgcggtcgtgctcaacggagctccggccaagcgtgacgacgccgaaagcccgatcgtcaccatcgcccgcgaggcgctggcgaaattccgtgcgccggtgtggggcggccagatcaccaatcgttccgacctgctgatggcgctgagccacggcgaaggcgcgcgcgagtatcaggccgagagccgtgcggcccaggagattgcaaggctgtgggcggcgatcgagcgttcggtgaaggctattcgcggcacggcgtcggcttccggcgcaatgcacaagcaggctgcttaa

SEQ ID NO: 4811 - DNA, 129 bp, BradyrhizobiumColbertium
atggcgtcgcattacgacgccggacagcagggcttcaccaccgaggacattctctgggccaccggcatctggtcggtgatcctcacgttgtcgccggtcatcgtgttctacatgctgatggtggcgtag

SEQ ID NO: 4812 - DNA, 150 bp, BradyrhizobiumColbertium
atgaggcatcgcatccagcctacggctgcgcggcaattcgcgccggccgatctcctgcagggaattctggtggtgtcgtcgttcgggttctgggcggtgatgctcggcctgatcccggtgctgctgtttcgagtctggcaagtcggctga

SEQ ID NO: 4813 - DNA, 909 bp, BradyrhizobiumColbertium
atgaccggtcttgaagatcatttgcacgggctttggctgccgctggtgacgccgtttcagggcggcgcgctcgacgaaagatcgctgcggcggctgacgcggcactacagcgcgcaggcggtcgacggcttcatcctcggcgcgacctccggcgagggcatgacacttcgcgaggccgagttcgaacgtctagtcgccaccgtgcgcgaggagatggcggcaagcggccgcaccttgccggtctgcctcgggctgtcgggggcggatacttcgcggctgaaagagcgcctcgacgagaccgcggactggccgatcgacggctacctgatcgcaagcccctattatgtgcggccgtcgcagcgcgggctgcttgcgcatttcgaggcgctcgccgatcacgccgcctggccgatcgcgctctacaacatcccatatcgctgcgcggtcagcatcaccaaccagacgctgctgcggctggccgagcacaggaacatcgtcgggctgaaggattgcggcgcgagccgcgagcaatcgatcgcgcttctgcgcgaccggccgaaggatttccgcgtcctcaccggcgaggacgcgaattatttcgaggcgctctgtgacggcgccgacggcggcatcgtgctctcggcgcatgtcgagaccgcgacgttcgcgtccatcgatgccgagctgaagcgcggcgaccatgacgccgcgcaggcgcgctggcaggaggtcgccgagctgacgcggctgttgttcgccgagccgagccctgccccggcaaagtactggctgtggcgatgcggcctgatcgacagccccgaagtgcgcctgccgatggtggaggtgagcagcgagctcgcggcgtcgatcgaccgcgagatcgagcggcggacgaaggtcgcggcgtaa

SEQ ID NO: 4814 - DNA, 894 bp, BradyrhizobiumColbertium
atggactgggacaagctgaaggtgtttcacgcggcggcggaggcgggcagcttcacgcatgcgggagagcagctcggcctgtcgcaatctgcggtgtcgcgccaggtctcggcgctggagcaggagctctcggtctcgctgttccaccgccacgcccgcggcctgatcctcaccgagcagggcgacctgctcttccgcaccgcgcacgacgtgttcatgcagttgcaggcggcgcgcgcgaaactcaccgacagccgcgagcggccgagcggtgacctcaagatcaccaccacgcctggcgtcggcatcaactggctgatcccgcggctcggcgagttcaccgggctctatcccgagatccgcatctcgctgatcgtcaccgacgaggagctcgatctgtcgatgcgcgaggccgacgtcgcgatccgcacccgcaagccgacgcagccggacctgatccagcgcaagctgttcgcgatgggcttccacgcctattgctcgccggaatacatcaagcgcttcggcacgccgcggacgctcgaggagctcgactcccatcgcatcatcacgctcagcgacggcaacttcgcgccgcatctgcagaaccgcaactggctggttgaagcgggccgcaatggctcgggtccgcgcgaggcctatttcagggtgaacaacatcctcggtctcgtgcgcgcgtgtcagcagggcctcggcatcgccgcgctgccggactatctggtcgaggaacagagcaaactcgtgcagctgttcggcgagtcggattcgatccagctcgacacctactttgtctatcccgaggaattgaagacggtcgcacgcgtgcaggtgttccgcgatttcgtggtgagcaaggcacagcgctggccgtcgtga

SEQ ID NO: 4815 - DNA, 966 bp, BradyrhizobiumColbertium
atgtccgctcctgttcatgcaaaggtcgtcattatcggctcgggccccgccggctatacggcggcgatctacgcggcgcgtgcgatgctcgagccggtcctgatccagggtctccagacgggcggtcagctcaccatcaccaccgacgtcgagaactatccaggcttcgccgacgtgatccagggcccctggctgatggagcagatggagaagcaggcactccatgtcggcaccaggatcgtctccgacctcgttaccaggctggagacggcacagcgaccgttccgcctcacctgcgacagcggcgacgtctatctcgccgacgccgtgatcctcgccaccggcgcgcaagcgcgctggctcgggctgccgtccgaggcgaagttccagggtggcggcgtatcggcttgcgccacctgcgacggcttcttctatcgtggcaaggaagtcatcgtggtgggcggcggcaacaccgcggtcgaggaagccctttatctgaccaaccatgcctcgcaggtcaccatcgtgcaccgtcgcgaccatttccgcgccgagcgcatcctgcaggagcggctgttcaagcatcccaagatcaaggttatctgggactcggccgtcgacgagatctgcggcactgagaaccccaacaaagtcacccatgtccggctcaagaacgtcaagaccggcgcgctgactgacgtgaaggccgacggcgtcttcatcgccatcggccacgctccggcgaccgaactcgtcaaggatcaggtcaagctcaaaccgtcgggctatgtcgaggtcgccccgaactcgactgccacctcggtgcccggcctgttcgccgccggcgacgtcgccgacgagacttatcgccaggccgtgacggccgccggcctcggctgcatggccgcactcgaagccgaacgtttcttggccctgcgcgccagcgagcgcgcggcagcggaatag

SEQ ID NO: 4816 - DNA, 537 bp, BradyrhizobiumColbertium
atgaggatttcgacaaatccacccgatacctccgcaaatgccaggagttccaatcacgtgtcgcggaacctagacgagatcgaccttaaaattctcgccgagattcaggctgacggtcgaatcacgaatgtcgagctggccaagcgcgtcggcatctcgccgccgccctgcctgcgccgcgtccgggcgctggaggaggagggctacatccacggctatcgcggcctcctggacgcccgcaagctgggcttcgacgtcaccgtgttcgccgccgtgcatctgtccagccaggcggaagctgatttgcgcgccttcgaggacttcgtccgcgccgagcccttggtgcgcgaatgctggatgctatcgggcgaggtcgatttcatcctgaaatgtgtcgcacccgacatggctaccttccaggatttcgtcacgcatctgacagcggcgccccacgtgcgcaacgtgcgcacgtcattggtgctgcacaattcgaagtacgaggcggccgtgccgctggaggtgaagcgacggcggtga

SEQ ID NO: 4817 - DNA, 474 bp, BradyrhizobiumColbertium
atggaaaaggttccgatgacccaggccggctttgtcgcgctcggggaagaattgaagaggcgtcagtcggaggaccgtccgcggatcatcgagcatatcgcggaggcgcgctcgcacggagacctgtcggagaacgcggagtatcatgccgcgaaagaagagcagtcccataatgaaggccgcatcgccgagctcgaggacaagcttgcgcgcgccgacatcatagacatctccaagctttccggagacaccatcaagttcggcgccaccgtgacgctggtcgacgaggacaccgagaagaagacggtgtggcagatcgtcggcgaggtcgaggccgacgccaagaagggccgcatctccatcacctcgccgctcgcgcgcgcgctgatcggcaagaagaagggcgcctcggtcgaggtcaacacgcccggcggtgccaaggcgtatgagatcaccaaggtggagtggcggtag

SEQ ID NO: 4818 - DNA, 3465 bp, BradyrhizobiumColbertium
atgcccaaacgaaccgacatctcgaccatcctgatcatcggcgccggtcccatcgtgatcggccaggcctgcgagttcgattattcgggcacgcaggcggtgaagacgctgaaggaagagggctatcgcatcgtcctcgtcaattcgaacccggccaccatcatgaccgatcccgaattggccgatgcgacctatatcgagccgatcacgcccgagatcgtcgccaagatcatcgagaaggaacgtcacgtcattcccggcggcttcgcgttgctgccgaccatgggcggtcagaccgcgctgaactgcgcgctgtcgctgcgcagacagggtactctggaaaagttcgacgtcgagatgatcggcgcgaccgctgatgcgatcgacaaggcggaggaccgccagctgttccgcgaggccatgaccaaaatcgggctcgagacgccgaaatcgcggctcgccaatgcctccgagctgaagaagtcgttccgcgacaagtatcaggccgcgcgcgcaaaagcttcgggcgccgagctcgaagagctcgaccggcaatgggtgctgggcgagagcgagcgccgcaaacgctaccaggaatatgcactcggacaggcgatgatggcgctgtccgagatcggcctgcccgcgatcatccgcccctccttcacgatgggcggcaccggcggcggcatcgcctacaacaaggaggaattcctcgacatcatcgagcgcgggctcgatgcatctcccaccaacgaagtgctgatcgaagaatccgtgctcggctggaaagagtacgagatggaggtggtgcgcgacaagaacgacaattgcatcatcgtctgttcaatcgagaacctcgacccgatgggcgtgcacacgggcgattccatcacggtggcgccggcgctgacgctgacggacaaggaataccagatcatgcgcgacgcctcgctggcggtgttgcgcgagatcggcgtcgagaccggcggctccaacgtgcagttcggcgtcaatcccgaggacggccgcatggtcgtcatcgagatgaatccgcgcgtgtcgcgctcctcggcgctggcctcgaaggccaccggctttccgatcgccaaggtcgccgccaagctcgccgtcggctacaccctggacgagatcgccaacgacatcacgggcggcgccacgcctgcctcgttcgagccgaccatcgactacgtcgtcaccaaggtgccgcgttttgccttcgagaaattcccgggcgcctcgaccacgctgaccacgtcgatgaagtcggtcggcgaagtcatggcgatcggccgtaccttccaggagagcctgcagaaggcgctgcgcgggctcgaaaccggattgaccggcctcgacgagatcgagatcgagggcctcggtcgcgacgacgacaagaacgcgatccgcgccgcgctcggcacgccgacgccgaaccgcattctccaggtcgcccaggccatgcggctcggctggtcgaacgaggacatcttcaagtcctgcaagatcgatccgtggttcctcggcgagatgcgcggcatcgtggacatggaggagaaggtcaggaagaagggcctgcccaacaacgccttcgggatgcgcacgctcaaggccatgggtttttccgacgcgcgactcgcagtgctcgccgagaccacggaagccgaggtgacggcgaagcgccacgcgctcggcgttcgcccggtctacaagcgcatcgacacctgcgcggccgagttcgcctcgccgaccgcctacatgtattcgacttacgaagcgccgttcgcgggtgcgctggcggacgaaagcaccccgtcggacaagaagaaggtcatcattctcggcggcggaccgaaccgcatcggccagggcatcgagttcgactattgctgctgtcacgcctgctttgcactgcacgacgcgggctacgaatcgatcatggtgaactgcaatccggagacggtgtcgaccgactacgacaccgccgaccggctctatttcgagccgctcaccgctgaggacgtgctggagatcatcgccaaggagcgcagcaagggcacgctgcacggcgtgatcgtgcagtttggcggccagacgccgctgaagctggcacgcgcgctggaagccgctgaagtgccgatcctcggcacatcgccggatgccatcgatcttgccgaggaccgcgaccgattcaagcgcgtgctcgacaagctccgcctcaagcagccgaagaacggcattgcttattcggtcgaacaggcacggctggtttcagccgatctcggcctgccgctggtggtgcgcccatcctacgtgctcggcggccgcgccatgcagatcatccgcgaggagaaccagctcaacgactatctgctcggcacgctgccggagctggtgccggccgacgtcaaggcgcgctatccgaacgacaagacggggcagatcaacaccgtgcttggcaagaacccgctgctgttcgaccgttatctgtcagacgcgaccgagatcgacgtcgactgcctctgcgacggcaaggataccttcatcgtcggcatcatggagcacatcgaggaagccggcatccattccggcgacagcgcctgctcgctgccgccgcactcgctcgagcctgacatgatcgaggagctggagcggcagacccgcgagctcgcactcggcctcgacgtcgtcggcttgatgaacgtgcaatacgccatcaaagacggcgagatctacgtgctcgaggtcaatccgcgcgcttcgcgcaccgtgccgttcgttgccaaggtgatcggtacgccagtcgccaagatcgccgcgcgcatcatggcgggcgagaagctcgccgacttcaagctgaagaaggcgaagctcaatcacgtcggcgtcaaggaatcggtgtttccgttcgcgcgcttccccggggtcgacacggtgcttgggcccgagatgcgctcgaccggcgaggtcatgggcatcgaccgctcgttcgcggtggccttcgccaagagccagctcggcggcggcacgcgggtcccgcgcaagggcacggtgttcgtctcggtgcgcgaaagcgacaagacgcgcattgccgaggcagttcgcgaattgcattcgctcggcttcaaggtgctggcgacctcgggcactcagcgcttcctgaccgaccagggcatcccgaccgagaaggtgaacaaggtgctggaagggcggccgcacatcgtcgatgccattaccaatggcgacgtccagctcgtcttcaacaccaccgaaggcccgcaggcactggccgacagccgttcgctgcggcgcgcggccctcttgcataaagtgccgtattacaccactctttccggggccgtggcggccgcgcagggcatccgcgcctatctgggcggggaccttgaggttcgtaccctgcagagctacttttcggaaacctga

SEQ ID NO: 4819 - DNA, 73 bp, BradyrhizobiumColbertium
ggcccggtggcggaaatgtctacgcgggggcggtgcatcgctcttcatcctggttcaaatccaggccgggtct

SEQ ID NO: 4820 - DNA, 702 bp, BradyrhizobiumColbertium
atggacgattggatcgattattacgactccacgcatacgatctatgtcagcaagctgcatcgcgacttgcatttccagatcattgcgcgggacatcatcggctatatcccctcgcccgaggcggtcgtgctggactatgcctgcggggaagcgctctcggcgagccaggtggcagccgcctgcggccagctgatcctggcagagcccgcgccgggcgtgcgcgggcggctgatagcgcggttcgccccgaacaccaagatccgcgtccgctcgctcgacgacgtccgcaagatgccggaccagtcgatcgacctcgtcgtgatgaactcggtcgcgcaatacatgacgccggccgaactcgatgccgcgctgctgaacattcgccgcatcctgaagccctcgggcaagctggtcctcggcgacatcctccagcccaatgtcggcatggtcagggacgtcgcggcgctgctcggcttcggcctgcgccacggtttcctgaaggatgcgctgatcgggctgatcagcaccgcgctgtcggattaccggcagttgcgctcgaagatcgggctgcaacgctacagcgaggacgagatcaccgccaagctgaaagcagcaggcttcgcgacccagcgcgcccacagcaacatcggccataatcgctggcgcatgaccttcatcgcgcggccgcctctggtccgttaa

SEQ ID NO: 4821 - DNA, 474 bp, BradyrhizobiumColbertium
gtgctgtccgcctttgcgttaggggtgcgacgctgcgccgtcaatctcccgcgtcctaacaggaaggtttcccgtgagcaaaaccagcaacaagatctcgcccgatctcgatacccccaccgatctgtcgtccgacggtgccaaaaaggtttcggaggcgctcaacgtgcttctggccgacgcgttcgcgctgtatctgaagaccaagaatttccactggcacgtcagcggccggcatttccgcgattaccatctgctgctggacgagcagtccgaccagatcttcgccaccaccgacgagcttgccgagcgcgtccgcaagatcggcggcaccacgctgaagtcgatcggccagatcgcaaagctccagaccatcaaggacaacaacgaggactacgtcccgccgcgcgagatgctgcgcgaactgatgcaggacaacaagcagatggcagcggcgatgcgcaaagcgcatga

SEQ ID NO: 4822 - DNA, 1038 bp, BradyrhizobiumColbertium
gtgcgcggcttccgcgacatcacggccgacgccaatgatctcggcggtgctgccgcgcaggcgagccgcgccgcgcgccgcacctatgccaacgtcccctcgccctcgccggaattcgaccggctggagccgagcctggaaagccgcgccggcgagtccgaggcgccctattcctacgacgaatcgatcgaggaagccgagcgctacgcgccgcagccgccctcgccccgtgcgcgcgtcgcccccgagcgcgacgtcaagaagcgcgtccgcaccagctcggcgttcccgttcaagagcgcgattgccgtcggcatcgtgctgatcctggtcggggccggcatcctctggggcaggcagctggtccaggtcgtcaacggcttcttcaagccatccgcaacgcaggtggtggaggcgccgactccggcgcagccgcagagcaagccgaagatccccgatcgcgtcggccagccttcggcggatcagccggtcgcgcccgtggcgcagaaggtcgtgctctacgacgaggatccgtccgacccgaagggcaagcaatatgtcggctcggtggtgtggcggctcgagccgatcaaggcgtccggcaaccagaagcccgacgtcgccgtgcgcgccgacatcgagatccccgaccgcaagttcaagatgaccatgtcgttccgccgcaacaccgattcctcgctgccggcgagccacaccgcggagctgaccttcatcctgccgccggattttcctggcggcagcgtctccaacgtgccgggcattctgatgaagtcgaacgagcaggcgcgcggcacgccgctcgcaggcctcgcggtcaaggtcaccgacggcttcttcctggtcggcctctccaatgtcgacgccgaccgcgcccgcaacatccagctcctgaaggagcgctcctggttcgacgtgccgctggtctactccaaccagcgccgcgccatcatcgccatcgagaagggcgctcccggcgaacgcgccttcaacgacgcgttcgcgcagtggggcgattga

SEQ ID NO: 4823 - DNA, 276 bp, BradyrhizobiumColbertium
atgacacgcaatcagacgatcgcttcgctcttcgctttcgccgtcaccagcctggcactccagacctcacccggcctcgccttcacgtccgaagcacagcagatgtgctcgggcgatgcgatgcggctgtgctccagtgaaattccggatattccgcgaatcaccgcctgcatggtgcggaacaagtcgcaggtcagccccggctgccgcgccgtgatggaccgcgagcacgcagccgccgcggcatcccgcaagcgggaagcttcggcgcggtag

SEQ ID NO: 4824 - DNA, 228 bp, BradyrhizobiumColbertium
atgttgcacgacgaagaactctcaatcctgcgggacatcagccaatccattgcgtttgcggacgatcggcaaggcaagatggggcaattgatcgccgacggctacgtcatgaaggacggcgatctgttcgagctcacggccaagggcgtcaccgccgtcgaggagcacgccgctctcggcatgagcgatgcggaacaagcgaacgcatcctccgaccgactgatctga

SEQ ID NO: 4825 - DNA, 240 bp, BradyrhizobiumColbertium
atggcccgcaaacttctcctggcgacgatcgcgctggcagcccttggcctgtccgacgcgcctgctttcgctcaaggccacatgggcacgccgcaggagcagaaggcctgctcgcgcgacgcgcaacgtttctgccgcaagaacctcggcaacgacctggcggtgcaaggctgcctgcaagccaatcgggccaagttgtcgaagtcgtgcagcaaggtgtttcagagccacggcatgtga

SEQ ID NO: 4826 - DNA, 426 bp, BradyrhizobiumColbertium
atgaaacgctatctggtgtttgcgctggtcggcccgttcgtcggcgggttcctgctgctgctgacgaccacctaccagtccggctattggacccagaccaatcttggcgaggtcggcaaactgttcgccgtgttcttcaagaccctgcaatacagctacctgttcgggttcctgcccgcgctgatgatcggcgcaatcgatgacatcctgatccacatccgccggatcggcccggttttgcggatgctcctggtcggcctgttcgccttcgctctggcctcgttcacctacagctcgcgcgggccggattcgggcgcggtgcagttcatcctgtatgggctcgtcggcttcgtgccggcagtgatctcatcctggctcgtgcatcgttatgtcgaggagccggaagccgcggcggcgccgacctga

SEQ ID NO: 4827 - DNA, 552 bp, BradyrhizobiumColbertium
gtggaggccatgaccatgtccgacgacgacatccttgcgccgcgccgagctccttcggggagcagttcgcgtacgacctccttcggcaaggaggcgcgcgggccgatcatcgatcaggaggggcacgaaatcaggcccgaaacgctggagcagggatttcgcgagtttcggttcgagttcgggcaaggcaatccgttcggcaatctgacgcgcgagcagcggatcgcgcggctcgaggccatcgccaagctgctcgacgtcgccttcatcctgcccggcaccaacatccgctacggcatcgacgggctgatcgggctgatccccgtcgtcggcgacatcatcacgactgcgatctcgctatggcttgtgcgcgaggctcgcgcgctgggcgcgccctggcacatcacggcgcgcatgctcggcaatgtcgcgctcgatggcgcggtcggcctgatcccattcgccggcgacgccttcgacgtgatgttccgagccaacatgcgcaacgtgcgcctcctccagcgctggctggagaagcagccgcggatgtag

SEQ ID NO: 4828 - DNA, 294 bp, BradyrhizobiumColbertium
atgcgtccactgcgtccgttcaacttcaacacctccgccgaactcttccccgccgcgattcgcaagaagaagcgcgccggcttcacctatcgccggttcggcaccgcagccgaggccgtgcagttcgcgatggagcagttgccgacggattcgctgaacggcgcctatctccaggtcgaggaagcacgcttcgaccagaacggcatccgctcgctgtacgaaagcgatgccttcccgctgccccgtcggcccaagccggccccggccgctgagaccgacgccgacgcggcatag

SEQ ID NO: 4829 - DNA, 165 bp, BradyrhizobiumColbertium
atgacgcttgggaccatcctgatcatcctggtcatcatctatctgatcggcgggctctccggccggttcggcggctacggctatggcctgggccattccggcatggggatcggcggggtggtgctggtcgtgctgatcgtgctgctgcttcttggcaagttatga

SEQ ID NO: 4830 - DNA, 420 bp, BradyrhizobiumColbertium
atgcccgacaccaagacgaagatcacggatgacaaagtcatcaagagcgaggagcagtggcggcgcgaactgacgccgatgcagtacgccgtgctgcgcgagaaggcgaccgagcggccgttctccggcgagtatgagcacgagcaccgtgccggcacttatgtgtgcgccggctgcggcaatgtgctgtttgaatccgacgccaagttcgactccggctgcggttggccgagcttcacccagccggcggtcgagagccatatcgacgaggagcgggatacgagccacggcatgatccgcaccgaggtgctctgctccaagtgcagcggccatctcggccatgtcttccccgacgggcccgggccgaccggcctgcgctactgcatcaactcggcagcgctgaagctggagccgaaatga

SEQ ID NO: 4831 - DNA, 705 bp, BradyrhizobiumColbertium
atgcgccgacccgccctcgccttcctgctcgccgcaaccaccgccctgacgctggcccttgccgtgccgtcacgcgccgcggaggaggcggtcgtgatccctcctcccgcaatggacgcggcgcctgcgagcggcatccagaccgccgtgctcgccggcggctgcttctggggcgtgcagggcgtcttccagcacaccgcgggcgtcctcaacgcaatctccggctatgccggcggcaccaaggcgaccgccgactaccagagcgtatcgagcggccgcaccggccatgccgaggcggtcgagatcaagtatgacccgaagaagatctcctacggcaagatcctccagatctacttctccgtggtgcacgacccgacccagctcaatcggcagggccccgatgtcggcccgcaatatcgctcggccatcttcgtgtcatccgacgaacagaagaaggtagcggaggcctatatcgcccagctcaacggcgcgaaggtcttcaagaagccgatcgtgaccaaggtcggtgcgctggaggcgttctacccggcggaggcttaccaccaggattatctgacgctgcacccgaaccagccctacattgcctataacgacatcccgaaggtcgagaacctgaaaaagctgttcgcggataactatatcgagaagccgacgctggtgaatgccggcaaggccaccaactga

SEQ ID NO: 4832 - DNA, 1200 bp, BradyrhizobiumColbertium
gtgcgcgtctcgaaggaacggctcgataagctggccgcgacgttctatgccgtcttcaacgagggcaatattctgccggcgcccttcccggacaaattcgccgcgcgcaacgacgtcgagctgaggcgcatcgtcactttcacgcgcatccccgagacgggagaacgcgttgaggtcagcggcctgcttgccgtgccggccggcgcgcgcggcgccttgccgctggtgtcgtggcagcacggcacgatcctgtcgttcgacgaggtcccctcgaatcttctgcgcctggacgaccagaaatatgagctgcgcgacaatgtcgactcgatcgagaccctgttcaacatccagcgcttcgccggcaacggctatgcggtcgtcgcggccgactatgtcggcaagggcccctatcgccgcggccggagcgaagcctacgcggtgaagggcgcgaccgtgcaatgctgcctcgacgttctgagcgccgggcagcgcgaactgcggacgctgggcctgcgccaatcctccctgttcctgaacgggtggtcgcaaggcgcgctgaacacgcagtggctcaaacaagagatgcagcgccgagacatcaaggtgcgggcggccgcggctgagagtccgttcaacaatctcgccgagagcttccactattggtcgaaccccgccgcctatattccggcctcggaaagctcgtatccgatgccgccggcctggatcacgccttgcatcatcgtcctgctcggcagctatcggcgctattacgggctgaacgatttgttcaagacggcgatcaagccgcaatatcgggccttcgcggaaaagtactggaccgattacagcctcgatggagagatcgcgaagagcattcctcctgcgggcgatttcctgaccgacggcttcttcgatcgtttcaccaacgacacgaacagcaagttcatgcgccggctgggcgacaacggcacgacgttctgggactacgattccccgatcaagttctactacggaatggccgacgaggccttgccgccgcgcctggtgcagccggccatcgtcgccggcgggcacttcgccgacggcgttccggtcaagggcgcgagccaccgcggcacgttcctggcgagcctctatggcgaaagtaccgtcctgaacggatctccgacggcgttcgactggttcaatacgctgctgtga

SEQ ID NO: 4833 - DNA, 234 bp, BradyrhizobiumColbertium
atgagatcttgttgcgcgtgcagtcataacgttccgctccgatgcagatcgcaagctgatacactgaaaagcctagcgcgcggtgaatgtacctcggcgcggctgccctttgcgggcgggttcgcagtcagtatgagcgcagcgacaggcgggtcctttcttccgggatgtcgctacgctcatccgggttgcagcatcacaccaccacgctcagccgcttcgcggcgcgcgtga

SEQ ID NO: 4834 - DNA, 1167 bp, BradyrhizobiumColbertium
atggttagcttccgcgaagcggcgaatcgccggttccttctcaagacggacatgcccaccttcaccccgcatcaggacgccgcgctcaaggccgttggcgactggctcaaggccaagcccggccggggcggcacgccgccggtgttccgcctgttcggctttgccggcaccggcaagaccacgctggcgcggcacatcgccgagggcgtcgatggcgaggtgaagttcgccgccttcaccggcaaggccgcactcgtcatgcgcaacaagggttgcgacgacgcgtccaccatccactcgctgatctaccgcgcccgcgaatccggcgaggagcagccgagcttcgagctgtgggacgatgcgccggcctccaaggccaagctgatcgtcatcgacgaatgctcgatggtcgatgccgaattggggcgcgacttgatgtcgttcgactgccctctcttggtgctgggcgatcccgcgcagctgccgccgatccagggcggcggcttcttcaccaattcggagccggatgcgatgctgaccgaggtgcatcgtcaggcccaggacgatccgatcgtgcggatgtcgatggacgtcagggaaggtcgcgagctcgacatcggccgctacggcgagagcgaggtggtgtcgcggaaggagctcgatcccgaccgcgtgatgggcgccgaccagatcctggtcggtcgcaacaacacgaggcgcgcctacaacatgcgggtgcgtcagcgccagaacatcgaggaccagtttccagtcgccggcgacaagctggtgtgcctgcgcaacaatcgcaagaagggcctgttcaacggcggcctgtggcgcgtgaagtcgcgcaacacatcgcgatcgaagtcacgcatcctcagcatgcggctgatgccggacgaggatttcggtcacaaggtcacgaaggtctcggttcgcgcggattgcttcgagggcggcatcgagcagatcgcgtgggagcaacgcaagccctatgacgagttcgattacggctacgtgctgaccgtgcacaagtcgcagggctcgcaatgggacgatgtcgtgctgttcgacgagagctttgcgttccaggagtccagggcaaggtggctctataccggcatcacgcgcgccgcgaagcggctgagcgtggtggtgtga

SEQ ID NO: 4835 - DNA, 1092 bp, BradyrhizobiumColbertium
atgatgcagcagacgaattccatcatcgacgagctcgaagatgcggtccgtaacggctcctcggccaaacggatcgagacgttgcgacgggtgacagacctgtttctcgaccaggggcagcgcctcagcgacgatcaggtcgaggtcttcgatcatgtgctctcgcatctggtgacgcgggtggaaagtcgtgtcagggccgagcttggcgatcgtctggcgccgctggattatgcacctgccggcgtgctcgaacgcctcgcctgggacgacgagatcgccgtcgcgggcaaggtgctgaccgagtccaatcgcctgagcaccccgacgctggtcgagatcgcgaaagccaagggacaggatcacctgttcgccatttccggccgcgccgacctgccggaggtcgtcaccgacgtcctggtcgagcgcggcgagcgcaaggtcatccgccgccttgccgtcaacacgaccgcccgcttttccgaggacggctatggcggcatgatcgcgcacgcggaagccgacgaaacgctcgccgaatcgctcggcctgcgcatcgatcttcccatcaaatatcttcgcgacctgctgcagcgcgcgaccgaagccgtgcgcgcgcgccttgcgaccattgccccgccggagctccaggccgagatcaagcgcatcctcgccgcgatcaccagcaaggcggccccgccagagccgaagcgggatttcagcctggctgaagcggccgtcaagcggatgaagggcctcaacgaactcaacgatgccgccatcgcccggttcgcggaaaccaggagattcgacgaggttgccgccgcgctcgggcttctcaacaacagcgcgccaaccgagctgatggcgaaggttctggaagggccgcgtgccgatctcgtgctgatcccgtgcaaatcggcaggcctcggctggccgacggtcgaaagaatcctctgcaatcgtccagccaagtaccgcatcgacgaggccaccctgaagctcgcgggcacggatttcgccaagctgtcccccgcgacggccgagcgcacactgcgattctggcagctgcacgaccggatcgacaaatag

SEQ ID NO: 4836 - DNA, 654 bp, BradyrhizobiumColbertium
atgacgacgaccgctgacgatcccaatgccgggctgaacgcaaggcgcagtttcctggcgcgaagccgggactttgcgctcgagctctggcgggtgctgacccggccgagctcggtgttcgcgctcggcaccctggtgctggccggtttcgtcgccggcgtgatcttctggggcggcttcaacaccgcgctggagctcaccaacaccgagaagttctgcaccggctgccacgagatgaaggacaacgtctacgcggagctgaagtcgaccgtccacttcaccaaccgctccggcgtgcgcgcgacctgtccggactgccacgtgccgcacaactggaccgacaagatcgcacgcaagatgcaggcctcgaaggaggtctggggcaagatcttcggcacgatcgacacgcgcgagaaattccaggatcaccggctcgagctcgccgcacatgaatgggcgcgcttcaaggccaacgattcgctggaatgccgcaactgccacagcgccgattccatggacgtcaccaagcaatcgccgcgggcttcggtggcgcaccagcgcttcctgttcaccaaggaaaagacctgcatcgactgccacaagggcatcgcccaccagctgcccgacatgcgcggcgttcccggctggcagtaa

SEQ ID NO: 4837 - DNA, 471 bp, BradyrhizobiumColbertium
atgatgaaacgatccgcaatcatcctgctcgccttcgcgatcgcagcgggcacgagttcgctgacggcgcagaccgtgacgtccggcctgcgcggcccgaccccgctcaacgacgagggcccggcgccgccgatgctgccgaaccgcaacacctccgagaaggaggtccgcaactatccggagcagccgcctgtcatcccgcacacgatcgacggctaccaggtcgatctcaacggcaacaaatgcctgtcctgccatgcgcgggcgcgcaccgcggaatcgcaggcgccgatggtttcgatcacgcacttcatggaccgcgacggccagttcctggcgtcggtctcgccgcgacgtttcttttgcaccgagtgccacgtgccgcagagcaccgccactccgcccgtcagcaacgacttcatcgacatcgacacgctgctgtcgcgcgccaccccaggtggccggcgatga

SEQ ID NO: 4838 - DNA, 2514 bp, BradyrhizobiumColbertium
atgacatcgccaaagctcgaccgccgccagatgctgaagctcgaggccgccgcgatcgccgcggccgccgcaggcatgccggctccggcgctcgccgccaacctcgttgccgagcgcaacgcaagcgaaatgaaatgggacaaggccgcctgccgcttctgcggcaccggctgctccgtgatggtcgccaccaaggataaccgtgtcgtcgccacgcacggcgacaccaaggccgaggtgaaccgcggcctgaactgcgtcaagggctacttcctctccaagatcatgtacggccacgaccgcctgacccagccgatgctgcgcaagacgaacggcaagtacgacaagaacggcgagttcacgcctgtgagctggaccgaagccttcgacatcatggaacagaaatggaaggaggcgatcaagaagcgcggcccgaacggcgtcgccatgttcggctccgggcagtggacgatctgggaaggctacgcggcatcgaagctgttcaaggccggcttccgcaccaacaacatcgatccgaatgcgcggcactgcatggcctccgcagtggccggcatgatgcgcaccttcggcatcgacgaaccgcccggttgctatgacgacatcgaggccaccgacgcgttcgtgctgtggggctccaacatggcggagatgcaccccattctgtggacgcgcctgaccgaccgccggctgtccgctccgcatgtccgcgtcgccgtgctctccaccttcgagcaccgctcgttcgacctcgccgacatcggcatggtgttcaagccgcagaccgacctctacatcctcaacgccatcgccaatcacatcatcaagaccggccgggtcaacaaggacttcgtcgccaagcataccgtgttcaagcgcggccagaccgatatcggttacggcctgcggcccgagcatccgctgcagaagaaggcgacgggtgcggcgaagcccaacgacgctaccgacatgagctatgacgagttcgtcaagttcgtgtccgagtacacgctggagaaggccgccgaaatgtctggcgtgccgctcaaccgcctcacggcactcgccgagctctacgccgatcccaagacaaaagtggtctcgttctggaccatgggcttcaaccagcatacgcgcggcgtctggtgcaacaacctcgtctacaacatccatctgttgaccggaaagatctccgcgcccggaaacagcccgttctcgctgaccggtcaaccgtcggcctgcggcaccgcgcgcgaggtcggcaccttcccgcaccgcctgcccgccgacatggtcgtgaccaacaaggcgcaccgcgatcacgccgagcacatctggcagctgcccgagggcaccattcccgacaagaacggcgcccacgccgtgctgcaaagccggatgctgaaggacggcctgatcaacgcctattgggtgcaggtcaacaacaaccttcaggccggccccaacatcaacgaagagacctatccgggcttccgcaaccccgacaattttatcgtggtctcggatgcctatccgtcggtgaccgcgcttgcggccgacctgatcctgcccaccgcgatgtgggtggagaaggagggagcctacggcaatgccgagcggcgcacccagttctggcaccagctcgtctccgccccgggcgaatcgaagtcggatctctggcagctcatggaattctccaagcgcttcaagatcgcggaggtctggccggaggagctgatcgccaagaagccggaatatcgcggcaagacgctgttcgacgtgctcttcaggaacgggcaggtcgacaaattccccgttagcgacatcgagcccggctacgccaacgacgagtccaaggcgttcggcttctatgtccacaagggcctgttcgaggaatatgcccagttcgggcgcggccacggccacgacctcgcgccgttcgacacctaccaccgcgagcgcggcctgcgctggcccgtcgtcaacggccaggagacgaagtggcgctttcgcgagggcagcgatccctatgtcaagcagggcaccgaggtgcagttctatggccacgccgacggcaaggcccgtatcttcgcgctgccctacgagcctccggcggaatcgcccgacaaggaatatccctactggctctccaccggccgtgtgctggagcactggcattccggcacaatgacgcgccgcgtgcccgagctctacaaggcattccccgaagccgtctgcttcatgcatcccgacgatgcccaggaggccaagctccgccgcggggatgaagtaaaggtcgtctcccgccgcggcttcatccgcgcccgcgtcgaaacccgcggccgcgaccggccgccgcgtggcctcgtgttcgtgccgtggttcgacgaatccaagctgatcaacaaggtgacgctcgacgccaccgacccgatctcgctgcaaaccgacttcaagaaatgcgccgtgcgcatcgagcgggtgaacatgtcatga

SEQ ID NO: 4839 - DNA, 315 bp, BradyrhizobiumColbertium
atggctcacgccacgctcaatcgccgcgccctgatcaccggccgggtgctcagcgccgaccgcgtcatcgcgccgccaggcgccgagatcaccagcatcatcgtgcaggcgcggcccgagcggctcgccgatgtcgaagccgagatcacggcgctgcccgggtgcgagatccatgggcgggacccccgcggcaagctcgtcatcgtcaccgaagcgcccgactccggcagcctcggcacattgctcaacaccatccagtcgctgcaacacgtctattccgcggtgctggttttccacgccatcgaaaccgcctga

SEQ ID NO: 4840 - DNA, 186 bp, BradyrhizobiumColbertium
atgtcggcccctgacgacgcgatgtcgcgcgtgcgccgtaagcgcatggagattttcgccttcctgttcctgaccgcgatcgtgatgcctgtgctcgcggttggaaccgtcggcacttacggccttggcgtctggatctaccagatgatggccggccctccgggcccgccgccctcccctcgttga

SEQ ID NO: 4841 - DNA, 120 bp, BradyrhizobiumColbertium
atgcgtgaagcggtgctgtctacgcattcgcaattccgccccatgggagacgatccatccttcggcgcaggaagacgcagccgactgacgattgatccaaatcaacgcgctgtcggttag

SEQ ID NO: 4842 - DNA, 1194 bp, BradyrhizobiumColbertium
atgaagttcggcattttctatgaactgcaattgccacggccctgggtggcgggcgatgagctccggctctaccagaacgcgctctcgcagatggagcttgccgacaagctcggctatgaccatgcctgggtggtcgagcatcacttcctcgaagaatattcgcactcgccctcgccggagtctttcctggcggcggccagccagcgcaccaggaacatcaggctcggccacggtatccttcagctcaccaccaaccatccggcgcgcgtcgccgagcgcgtcgcggtgctcgatctgctctcgaacggccgctgcgagttcggcatgggcgagagcgcgtccatcacggagctggagcctttcggccgcgacatggagaccaagaaggaggtgttcgaggaggccgtagctgcgatcttcccgatgttcaaggatgccggcagcgagcatcacggcaagtatttcgacatccccttgcgcaacgtcgtgccgaagccggtgcagaagccgcatccgccgctgtggatggcctgctcgcagctgccgaccatcgaacgcgccggccgccacggcttcggcgcgctcggcttccagttcgtcagcgccgacgccgcgcacgcctgggtgcacgcttactacaatgcgatgaccaagcggctgcacaagctcgccgattacgagatcaatccgaacatggcgctggtctcgttcttcatgtgcgccaagacggacgaggaggcgcgcgcccgcgccgacggcgccaccttcttccagttcgcgctccgcttctacggcgccgcgcagaaccgccagcgtcccgcaccctacaccgtcaacatgtgggacgagtacaacaagtggaagcgcgacaatccggaggcgcaggaggcggccttgcgcggcggcctgatcggctcgcccgagaccatccgcaggaagctgaagcgcttccagtcttcgcatatcgaccaggtcatcctgctcaaccaggccggcaagaacagccacgagcacatctgtgaatcgctcgagctgttcggccgcgaggtgatgcccgagttccagaacgatcccgcccaggccgaatggaaacgaggcgtgatgagcggcgagatccagctcgaagagatcgacacgcaggccttcaccgaccgctacggcaggctcgcgatcaacgtggcccgcgcggggtag

SEQ ID NO: 4843 - DNA, 120 bp, BradyrhizobiumColbertium
gtgcacgagatggctccctccaagggcacgaccatcgacgtgccagccgaacgcatttgtgcggccggcctcgcgaacttgcgttgcgttagatcaaacaaaagcatgtcgcgtcgctga

SEQ ID NO: 4844 - DNA, 471 bp, BradyrhizobiumColbertium
gtgcacaaaggcttcatgctcattctggcgagcatcttgattgatgtgctgcccgtttcccatgcggcggcggtcgaaatggagccgggcctctggcagctcacgaccaggatcgagcgcgacggcgtcgggacgacgcggccgcggtccggaagatgcgtcaccgcggaccaggcgcgtgccgcgcgcacagcgtccgctctcgatatcggcaccggcttcaagacggctttgggatcgtcgcccagccaggagagctgcaagctttccgatgcgaagaacgacaagaacctgatgacgtggcggctgctgtgcactggcggcaccagcgccgagagagagttcaccgcccgcttcgacaatccccggcattacgtgacggtcaccacgacgcgtgtcaccaccggcagcaagaccgtcacgatcgtgacgaccaccgaggctcaacacaagggcgagtgtccgcgatga

SEQ ID NO: 4845 - DNA, 2124 bp, BradyrhizobiumColbertium
atgctcccgatcctgttcgccttgacggtgctgctgtccgcatcgccggtccgcgccggctgcaatttcgaagatatggtggccgccttcaagcaggcggtggcgacgacgatcgagtgcgagcccgtctgcaagaaccagtacgaatgctacgcggtcgccgtgctggccgccgcgctcaccttcgacgtcaagcagggcgtggacgtcagcccgatttgcgtcgacatacccgccaaggtcgaggacctcatggccaagctcgcgccgttcctgtcgcaacaggacatggccgatctgtcccaatacgccagctatatttcggacgctttgcagttcgtgcgctgcgcgtgcaagaccaaggacctcaacattgccaacgagtccagcttcgggcagtgcgtcaatgacgtggcggaagccgtcggatgcgagccgatcgtgatcgcgggtttcacggttcactacgactgcttgccgggcaaccccgccgcgagggcgtttgacgcgatcgaggcttggacctgcaagcatctttcactcggttgcgaggacagcgattacgtcgaggcgaactacaattactcctgtccctctgggcaacagtccgacaggaacggcaattgcgtgccttgcgagagcatcgccaatgcgacggtcggcaacaacggggaatgcgcctgcaagtcgggctattcagaggatgccttctggctctatctccccggctattccgatgccaagatgaaggtcttggagtcctgcacattctcgtgcaacgcgccgttcgtctattccggcggcttctgtcaatgcccgttcggcacgcaatcggactatgccggaggctgcaaagcctgcggcgccaccgagagatacgtgcccttcaaggtgcagggcggcgttctgacggagggacggtgcgaggcctgtccactctgtacccagccaagcgcgaacaagctcacctgcaacccaccctgcaacaacgcggcaggtgagatcttcgagaagggcaaatgcgttgcctgcccgtccaacagcaagtcggtctatttctccggcagctgcggtcagtgcgaggcctgcgcgttcggtcagaaggtgtccgccgatcacaagtcctgcattccggcctgcgcaccggggcagatcatgggcgggctgatgctcggcaaggaccaaatgtccgatccgaccgccacgcaatgccagacctgcccggacaacaccgccccaagttatgagagccccgacagcagcaagggcgtctgtctgccgtgcccggacggtacgtactcgaaggccggcgcgacccggtgcttcgatctcaactgtgcgcccggttcctaccaggacccggacaatccgcacgcctgcaagagctgcccgccgacccagatctacattccgaccgaaaagaagagtgtgaccggcccgtcgccgggccagggcggcatgcaggtcgtgccgggtcattgcggttgcggcgagaaccaggtgctgcagggcgaggtgtgcgtctgtgcaaaaggagccaccaaggtcccgttgccgggagctccaggcacggtcttcgcctgtgcctgcccggccggggcgcatttcgacgcggcatccggtgcctgcgcgtgccctgccggggcaacgctcaatgcagccaagaacgcatgcatctgtccgacagggcagcgtctggagggcggcaagtgtgttgcgccgagccttcagcatctgccgctgaaagactgctcgaccttgggcccgaactacatcaatgaccccaagaatccggcggcctgcatgcgctgcccgggagggagcgttgccaatgcggagcgcaatgtctgcattgccgccggtcggcccaccgggcccgcgatcgttccgatgttgcccgggcggaccgcccgaccgccgcttcgatgccggccaggtctggtgccgaacgctgccgggaccgcctgtatccgcttgcctgcgccgccgagggttgcgcctccgggaccgaggtttgctcctccggctgcaaggcctgctcctcctgcgggagtgcgtcggccagcgcctgtgcgcgaagcaccgatgcgactgaggccaggggcggccgctccccggaactag

SEQ ID NO: 4846 - DNA, 828 bp, BradyrhizobiumColbertium
atgcagcgacgagaggtaggaaccgtcatgacgcgatggaaacggatgttggccgtgtggcccgtcctctgtgcagccctgttcggtgcgcctgcggcggccgaaacgacgcgtgcagaaatcgaggccgtcgtgaaggactatctcgatgcgcaccccgaggacgtgcagcgcatcgtcaaggactatctgaaggaccatcccgaaatcctgcgggacgcgctgaccgagctgatcaccaaacgggcgcccgcggcggcgcgccctgcgccggcggatcgaaaggcagcgatcgacggcaacgcggcggcgctgttcaattcgccgcgccaggtggtgctgggcaagcccgatggccgggtgacgctggtggaattcttcgactacaattgcggctattgccggcgcgctctgtccgacacgttggtcctgctgcaggaagatcgagacctgcgcatcgtgctcaaggagcttccaatcctcggtgctgcctcgaccgaggcagcaggcgtcgcagtcgcggtccggatgcaggatcggaccggggagaagtacctcgcgttccaccgccggctgctcggcggccgcggcccggcggaccgtgcgagcgcgctcgccgctgcccgcgaggaagggctcgacatggcgcggctggagcgggacctctcgagcgaggaagtccggctgaccttggaggagaacgccgcgctcgcccgggcggtcggcatcaaaggcacgcccgcttatgtcatcggcgacacggtcgttgcaggcgccatcggcgcggcaggcctgaaggaaaagatcgcggcggagcgatcgagatag

SEQ ID NO: 4847 - DNA, 480 bp, BradyrhizobiumColbertium
atgctctacttcctggtgaagatggcgcacatcatcggcgctgcggtcctgctcggcaccggggccggcatcgccttcttcatgctcgtcgcgcatctgcgcggcgatccgcgcgaaatcgcgggcgtcgctcggacagtggtgctggccgacttcctgttcaccgcgagtgcggtgatcctgcagccgatcaccggcacatggctcgcctggtcgagcgggtactccctcggcgacggttggattgcggcctcgatcgcactgtatctcgtgaccggcgccttctggctgccggtggtgtggatgcagatgcagatgcgcgatctcgccgtcgcggcggtcgcgagcaacagcgaattgccggcccggtatcaccagctcttccgattgtggttcgcattcggcttcccggcctttgcagccgtgctgatcatcttctggctcatgatcgcacgcccggcgattccatactgggattga

SEQ ID NO: 4848 - DNA, 1275 bp, BradyrhizobiumColbertium
atgcgcattcttctcgtcgggggaacgggacttatcgggtcggcaatccacgccaagctgtcagcggaggggcacgattgcatcctggtgtcgcgtcatccggcggcagcgcgcgatcgacgccacatcacgctcgacatcacccaggccaccgatccgtccaaatggaaggggcttctctccggcgtcgatgccgtgatcaatgcggccggtgcgctgcagggtcaggacatgcaaggcgttcatgtcgccggcagcgcggcgctctacgcggcctgtgaaagcgcgggtgtccgccgggtgatcctgttctcggcgatcggcagcaatgtcgatgctccgagcgcgttttcgcgcagcaagcgcgatggcgaagccgccttgatggcgcgggatctcgactgggtcgtgctgcgtccttccgtcgtggtgggccggcccgcctatggcggcagcgcgctgctgcgaggtcttgcggcgctcccggttctgccggtcatgcccgagacggcagccattcaaccggtgcatctggacgatgtcgtcgagacggtgctgttcttcctgcaacccggcgctccctcccgtatcgcgctcgatcttgccggcccacggcagatcgccttcagcgacgccgtcgcgctgtttcgcgcctggctgcgctggaggccggcctaccgcctgcacctgccgtcctggctggcctcggccgcctaccgcgcgggtgacgtcgcgcaggtgctgggctggcgaacgcccatcaacgccaccgcacaggcagaaatgcggcgcggcgcggcgggcgatcccgagccctggcgccagatgaccggtttgaggccgcgcgatctcgaggtcgcgctcgcacgcgaacccgcctcggtgcaggaacgctggtttgcgcgcctctatgcgctcaagccgctgatcttcggcgtcttcggcctgttctggatcgccacgggcatcatttcgctgagcgccgggtggaacatcggcatgtcgttgctgcgggaaggcgggctgcaggagaacgccgcggcgctcaccgtcactgcaggcgcgctagccgacatcgctatcggcctcgccattctctggcgacctctgagccgctacgggttgtgggcggcattgatcatttcgctcagctatgccgtgatcggcacggcgctggtgccgcggctgtgggccgatccgttgggaccgatgctgaagatctggccggtgatcatgctcaacctggtcgccatggcgatccgggaggatcgctga

SEQ ID NO: 4849 - DNA, 204 bp, BradyrhizobiumColbertium
atgctcggaccgaatgttctttcacccgaagaactgtcgttgctcggagcgacctacgatctggtcgttgactcgcttccaagccgaatgcgcacacctcgcaaccggcgccaggtcgcgctcaacctgctctatctcactcggcgcggcgagcgcgacccgctggagctggagcttggcgcggctgctggattgacctgctga

SEQ ID NO: 4850 - DNA, 375 bp, BradyrhizobiumColbertium
atgttcaatcggcaaacaacggcaatgctgcgcctggtcctcgacgaggtctgcgccgaccttggcaagtatgaaaaggcagtgcgggcgcatgtcgctcggccgcttcatcgtcgatcgaatgggccaccgcatcggacagaacaaattcctagtgagaacgtgatcatgcaagaccgaaccaagaaacgccgacgggtcaaacaaacgcagagcttgaccgaacgcctgcttgcgtccgccaccctcgccaaatccagggcacaagggatggcgccgggacacgatcgcgatctcctgctgcaaaaggcccgcgaggcggaagctgccgtcgcacttgaaagctggattcgcggcccgagctcgccccgctga

SEQ ID NO: 4851 - DNA, 822 bp, BradyrhizobiumColbertium
ttgttgctagaatgcgcggcaaagctgaaggaggaagcgatgcggtcgcgcgggagaggctcatgctcggggttggcggaaggggacgtcgcgcccgcggtgctggccatcggtcgccctgatttcccgaaagtcctgatcgacacgctgcgccggcaggccggcgtcggccattgcatggtgttcgcgctgagccgggccggtgcggcgagctgcatgctcgacgcaggcagcatcgcgatcggcggcgatctcggcgcggcctatgccggacagttccatgaattcgatcccaaccgcgatgccctgttcgaaggcgagggcaatgcgccgatcatgcttccggcgtttgcgccgcgcatgtacggcgcgcgctaccggaagatcttcttccaggattccggcatcgtcgacaaatgcgcgaccgcgatctgggtcagcggtacctgcttctatgtcaatttttaccgcatcgcagcgcaggggcgcttcagcgctgcgcagcgcgagcggctcgagacgatggcgccggcgatcgctgcgagtgttgcgcggcattttcagcatagcgcagcacccgagcgctctctcgccgaaatgttcgccacctgcgctccactcgccggtcttacgccgcgcgagcgggatgtctgtcgccgcatcctcgaaggcttcagctccgaggcgatctccaacgagctcggcatcagcctgcattcgaccctgacctaccgcaagcgcgcttatgagaggctcggcatctcctcgcagagcgagctgtttgcgatcgtgcttcgcctgctcgcccctcggctgaactga

SEQ ID NO: 4852 - DNA, 249 bp, BradyrhizobiumColbertium
atgagtgagtttgaagggctttccgaccatttcatcttgcgaatgtacgagttcatccgcaacgaggtgcaagccgacgcgttggccggcacccggctggtcggcctgcctgccaggcgtcgcgcagatcatcttttcagggaaatcgagcgtcgcgggcttttctgcaggccgatcgaatggcccgagcatttggctgacagctcgtgcgagccggccgactggtcgcttcagaggatcgcgaactga

SEQ ID NO: 4853 - DNA, 168 bp, BradyrhizobiumColbertium
atgctcgacaggaccgaccagcacgcgctgctgaaggccgatcgccgcaacgctagcggctatgccctcgcgttggcatttttcggcgccgtgggcatcgtcatgacagcctggattgccgcaatcgtttgggtcagctggcacctgatcgcgtggatatttcagtag

SEQ ID NO: 4854 - DNA, 138 bp, BradyrhizobiumColbertium
atgggagcgaacgagaccaccgacggactgagtgagacagaagaagcggtgcgtgctgcagcagaggacgaagaggagagcctcgacctggaggagccggtgtttgaccgagccgattcgatgccaaagatcatctga

SEQ ID NO: 4855 - DNA, 264 bp, BradyrhizobiumColbertium
atgaccgacgatctggaacagagaatacgtgaccgcgcgcatcgcatgtggtgcgacgaaggccaaccggagggaaaagcagacgtccattgggagctcgcgcgcatggccatcgcattcgaagacgccaaaccggcgatgcagagacccgtcataagtgacaccgtcgagccggtggaagcctgggcgaaccagggcgagtttccaacgctcaccgaccagggcgagcagcacattccgggcgagatggccgatccagactga

SEQ ID NO: 4856 - DNA, 348 bp, BradyrhizobiumColbertium
ttgcaaattctggtagtcgaagacgaagatctgattcgcgacgtggtcgtggacattctggagagccagggccacgaagttctccaggccgagagcggggagcgcgcgctacagctctgcgccgaagtcactccggacctgattttcaccgacgtaaagctgccggggccgctttccggatgggacgtcgccataagatgccgggagagccatcccggcattcccgtcatctactcaacgggacacacccactccgctccgcgaccggtgtcaggaagcatcatgctccacaagccctaccgtctcgagcgacttctggagtctatccagacgctgacaggccggtag

SEQ ID NO: 4857 - DNA, 1167 bp, BradyrhizobiumColbertium
ttgagcaccgcgccgcgcatcgacatcgatcccgccgcattctgggccgatccttatccgatgctcgccaggatgcgcaaggaggcgccgatcgccttcgtgccgcagctcggatcgacactgctgacgagccgcgacgacatctcgatctcggagaagcagatcgatgtgttctcctcgcaccagcccgcaggcctgatgaaccggctgatgggccacaacatgatgcgcaaggacggcgaggcgcatctggtcgagcgccgcgcgatgtttccgacggtgtcgccgaagacggtgaaggcgcactggaccgcgcagttccaggcccacgcggatcgcatcctggatcacctcgagcccgggcgcatcgacttcatgcgcgacttcgcgctgccgttctccggcgaatgcctgaagtcgattacgggcctcaccaacatcggctaccaggacatcgacgcgtggtcgcaaggcatgatcgagggcatcgccaattatgccggcgaccccgaagtcgaggcgcgctgccatgcggcgacatcaggcatcgatgccgcgatcgacgacatcctgcctgtgatgcgcaaacatcccgaccagagcatcctcggcgtcctcctggcctccggcatgccgatggagagcgtgcgcgccaatgtgaagctcgcgatctcgggcgggcagaacgagccgcgcaaggcgatcgccggcacggtctgggcgctgcttacccatcccgagcagctcgatctcgtcctgcgcggtgaagtgtcctggctgcaggccttcgaggaatatgcccgctggatctcgccgatcggcatgtcgccccggcggatcgcaaagccctggatcatccgcgacgtctcgttcgagctggatgagcgcgtcttcctgatgttcggctccgccaatcgcgacgagaagcatttcgagcgcgccgatgcgttcgacgtgcgtcgcgacacctccaagagcgtcgccttcggcgcgggcccgcatttctgcgccggcgcgtttgcctcccgcgccatgattgcggacgtcgcgctgccgacggtgttcgcgcgctccagccggatcgagatcgctgacgacgagccggtgcgaatcggcggctgggccttccgcgggctgcagaatctgccggtgacatggcggcactag

SEQ ID NO: 4858 - DNA, 216 bp, BradyrhizobiumColbertium
atggggttgttttcgcgttcttggttcgggccggcgcttgtcacgttcgacgcgactgcggcgccggcctgctggcgcggccaggacgtggcggtgaaccaggacgtagacgctgccaggattgcagatgtcggcgttcccgcacgcagcctgccgcggcatttgatcgccgcgcgggttggcgaaaggctggcctttttcccatcatcgctctag

SEQ ID NO: 4859 - DNA, 156 bp, BradyrhizobiumColbertium
atgaagcgcgtcgcgacctgggccttctacgccatcggcgcgatcgcgatcgcctatctcgcgctctatgcctatgcgatgttctcaggctcgccgatcgtgccgggcgaccccatccacatcttccgcaagcccgacgcgccgagctattcgtga

SEQ ID NO: 4860 - DNA, 1149 bp, BradyrhizobiumColbertium
atgtctgaagctcaagtaacgaactggctggcgtcgcagcggcaagcgatgatcgatctcttgcgcgatgtcgtgaacatcgattccgggtcctacgacaaggaaggcgtcgatgcggtcggtgcgcggttcgagcggcatttcgccgagcacggcattccgtgccggcgcgagagccacgacaccttcggcgatgcgatccatgccgaggtcgcaaagcccggcagcaacgaaaagccggtgctgttgatggggcaccgcgacaccgtgttcggcaagggcgaggccgggcgccgtccgttcacgatccgggatggccgcgcctatggaccgggtgtcgccgacatgaagtccggcctcgtcatgaacgtgttcgtggccaccgccttccacaagttcggcggcaatccgcatccaatcaaggtgctgatcacctcggacgaggagatcggctcaccctcctcgcggcccgtgatcgagcgcgaggggcgcgccgcgcgcgccgttttcaattccgagccgggacgtccgaccggcaacgtcgtcacgggacgcaagggcggcatcttcatgcacatggccatcaccggcaaggccgcgcattccggcgccaagttcgccgctggcgtcagcgcgatcggcgagctcgcccacaagatcgtgcagatccatgcgctgacagatctcgacaagggcatcacgctcaatgtcggcctcgtctcgggcggccagtccgtcaacaccaccgcgccctatgccgagggccagattgacctgcgctacgtcgatccggcggatcgcgcgaaggtgatggctgcgatcgaaacaatcgtcgcgacgtcctacctgccgggcaccagcgcaacgctcacgatcaagggcgagttcgtgccggtggtgcagagcgcagagtcgaaggcgctgttcgagaattaccaggctgccgcaagagatgtcggcctcaccacgctccagggcgagttctccggcggctgcgcagattccggtttcactgccgccgtgggaacaccgaccatctgcggccttggcccggtcggcggtctcgcgcatacgccggaggaatatctcgaggtcgagagcatcgtgccacgcgcgcaggcgctggcgctggcgatcctgcgggggtag

SEQ ID NO: 4861 - DNA, 1386 bp, BradyrhizobiumColbertium
atgcggcttctcatcgttggcacattgaagggccagctcaccaccgccaccaagatcgcgatggagaacggcgccaccgtgacccatgccgaagataacgagcaggcgatgcgcgtgctgcgcggcggcaagggagccgacctcctgctggtcgacgtcgccctcgacatccgcgacctcgtgctgcggctggaggccgagcacatccacgccccgatcgtcgcctgcggcatcaccaacgatgcccgcgccgcggttgccgcgatccatgccggcgccaaggaatacatcccgctgccgccggatccggagctgatcgcggcggtgctcgccgccgtcgccaacgattcccgcgagctggtctatcgcgacgaagcgatggcaaaggtaatcaagctcgcccagcaaatcgcggggtcggacgcctcggtgatgatcaccggcgaatccggaaccggcaaggaagtgctggcccgctacgtccacacccgctcggcgcgcgccaagcgtccgttcatctcgatcaactgcgccgcgatccccgagcacctcctggaatccgagctgttcggccacgagaagggcgctttcaccggcgcggtcgcgcggcgcatcggcaagttcgaggaggccaccggcggcacgctgctgctcgacgaaatctcggagatggacgtccgcctgcaatccaagctcctgcgcgccatccaggagcgggtgatcgaccgcgtcggcggcaccaggccggtgccggtggacatccgcatcatcgcgacgtcgaatcgcaacctggccgaggccgtgcgcgagggcacgttccgcgaggacctcctgttccgcctcaacgtggtgaacctgaagatcccgccgctgcgcgagcgccccgccgacatcctggagctcgcccagcatttcgtgaagaagtacgccgaggccaatggcgtgccgctgcgcccgatctcggcggaagcccgccgggtgctcaccgccaaccgctggcagggcaacgtccgcgagcttgaaaacaccatgcaccgcgcggtgctgatggcgcagggcgacgagatcggtcctgatgccatcatcacgccggacggcgaccgcctggacctcgccaagacgcccccggccgtggcgcatgccaccatggccgccgagcaggtgacgcgcgcgctcgtgggccgcaccgtggccgatgtggaacgcgacctcatcctggagacgctgaagcactgcctcggcaatcgcacccatgccgcgaacatcctcggcatttcgatccgcaccttgcgcaacaagctcaacgaatatgccgacggcggcatcccgatcccgcctgcgggcacgccgggtgagtatccgcggatgccgatggtgggggcgtag

SEQ ID NO: 4862 - DNA, 351 bp, BradyrhizobiumColbertium
atgagcgataccgagggacaggtcccgctgcccgatctcaacggcccgatgccccctggaggcaccgacgttggctacaacgaggacgaatatgcggcacgcgccgccgccgacctcgaagcggtattcgacgtgccggtacaggtctcggccgtgctcggccgctccaagatggacgtcggcgagctcctcaagctcggaccgggcaccgtgctcgaactcgaccggcgcgtcggcgaggccatcgacatctacgtcaacaacaagctggtcgctcgcggcgaggtcgtcctggtcgaggacaagctcggcgtgaccatgacggaaatcatcaaggccgagcgcggctag

SEQ ID NO: 4863 - DNA, 624 bp, BradyrhizobiumColbertium
atggccgctccggcaaaattcctgttcgataccgatttcgcggctcccgagcggacgacgcgtgagaaggcggcgactgcggccgagatcgcccagaaggtcgccgaagccgaagcgcgcgcctatcaggaaggctttgccgccggccaacgcgaggccaaggccgagagcgaccgccgcgtcgcgctcgccatggaggagatcaacatcggaatccggggcctcgcctccggcatctccaacatcgagaccaagatggagaccgaggcggtcgaggtcgccgtcgcggtggcgcgcaaattgtgcgccgatctggtcgcagccgagccgctcggcgaggtcatcgcgctggtcaaggactgcttctcgcatctggtcgcgacaccgcatctcgtcgtccgcatcaacgatgcgctctacgacgccgcgcgcgagaagatcgagcggctcgccaagcagagcggcttcgagggccggctggtgatcctggccgagccggaaattgccagcggcgactgccggatcgaatgggccgatggcggcgtcgtgctggagcgcggcgccatcatggccaagatcgatgaaatggtcggacgctatatcgcgtcccgcagggggaattaa

SEQ ID NO: 4864 - DNA, 1095 bp, BradyrhizobiumColbertium
atggccgcctccctgcaaaacgccaattccaacgacatcaccagcgtgatctccacgctcggccagcgcgccggcagccgtgcaggcgggcccaggaccgaagggctgaccggaccgaagcgtgccgcgatcctgatgctggcgctcggcgagcaatatggcggcaagatctggagcctgctcgacgacgacgaggtgcgccagctctcgctggagatgtcgacgctcggcaccgtcgaggtcgaaaccgtcgaggacatgctgctcgaattcgtctcgcgcatgtcggcgtcgggcgcgctgatgggcaatttcgacgccaccgagcgcctgctccagcaatacctgccgccggagcgcgtcaacggcatcatggacgagatccgcggcccggcgggccgtaacatgtgggagaagctctccaacgtgcaggaggaggttctcgccaactatctcaagaacgaatacccgcagaccatcgcggtggtgctgtcgaagctgaagtcggagcacgccgcccgcgttctcagcatcctgcccgaggagctcgcgctcgacgtcgtcaaccgcatgctgaagatggaggcggtgcaaaaggaggtgatcgagagcgtggagaagacgctgcgcaccgagttcatgtccaacctgtcacagacccgccgccgcgatgcccacgaggtcatggccgaaatcttcaacaatttcgatcgacagaccgaaacccgcttcatcacctcgctggaagaggacaatcgtgaatcggccgagcgcatcaaggcgctgatgttcaccttcgacgacctcgtgaagctcgattccggctccgcccagaccctgatgcgcaacgtcgacaaggacaagctcggcgtcgcgctcaagagcgccaacgaggacgtccgcaacttcttcttcggcaacatgtcctcgcgcgcggccaagatgctccaggacgacatggcggcgatgggtccggtgcgcctgcgcgacgtcgacgaggcccaggcgcttctggtcaacctcgccaaggacctcgccgccaagggcgagatcatgctgaccaagaaccgcgccgacgacgagctggtgtactga

SEQ ID NO: 4865 - DNA, 1614 bp, BradyrhizobiumColbertium
ttgcaagggcttgcggactttctgaagagtatcggcgccgcccggttcggggcgatgatcgcggtcaccgccgcgctcatcggcttcttcgccttcgtcatcatgcgcgtcaccacgccgcagatgacgacgctgttcacggacctgtccgtcgaggattcctccagcatcatcaaggacctggaacgccaaggcatccagttcgagatccgcaacgagggctccatcatcatggtgcccaaggacaaggtcacgcgcctcaggatgaagctcgccgagggcgggctgcccaagggcggcggcgtcggctacgaggtgttcgacaagtcggacgcgctcggcactacctccttcgtccagaacatcaatcacctccgcgcgctggagggcgagctcgcccgcaccatccgcgccatcgaccgcatccaggccgcccgcgtccatctcgtgctgcccgagcgcccgctattcgcgcgcgaggcgccggagccttcggcctcgatcgtggtgcgcgtccgcggctcgctggaagcccagcagatccgggccgtccgccatctcgtcgcctccgccgtcaacgggttgaagccacagcgggtctcgatcgtcgacgaggccggccagctgctcgcggacggcgcggcgaccgatccggagcaggcggtcggcgacgaacgccgcatctccttcgaaaagcgcatgcgcaagcaggtcgaggacatcgtgtcctccgtcgtcggctccggccgcgcccgcgtgcagctctccgccgatttcgacttcaacaaggtcacccagacctcggacaagttcgaccccgaaggccgcgtgctacgctcgagccagacccgcgaagagcagagcatgaccgccgacaacaacggccaggtcaccgtcaataacgagctgcccggcaaccagcagaacaacggcgtcgcgcccaaggaccagagcaagaagaccgaagagacgaacaactacgagatctcccgcaccaccaagaccgaggtgaccgaagccggccgggtcaaccgcatctcggtcgcggtgctggtcgacggcatctacaccaagaacgacaagggcgagctggcctatcaggaccgcaccaaggagcagctcgaccgcatcgccgccctggtgcgttcggccatcggcttcgaccagaagcgcggcgaccaggtcgaggtcgtcaacctgcgcttcgccgacgccccctccactgcaccgatcggcgaacccggcggccttcttggcatgctgcagttcaccaaggacgacgtcatgtacttcgtcgaactcggggtgatgatgctgctcggcctggtcgtgctgttcctggtgatccggccgctggtcaagcgcatcctcgcctcggacgaggtcgccgccgccatctccggcgtgctgacgggccccgccgcttcggaagaggccgcgccggcggcgggccagccgctgctgccgagcggcgccgccagcgcgatcgacgtcgccacggttcagggccaggtccacgcccagtctgttcatcgcgtcggcgaactggccgagcgcaaccccaacgagaccgtcgccatcgtccgccagtggctgagcgaatccgcaaagtga

SEQ ID NO: 4866 - DNA, 219 bp, BradyrhizobiumColbertium
ttgacgatcgcggatctgcctgcacccggcaccaaacgctgggtcatccgccgcaaggccgaagtcgtcgccgctgtccgtggtggacttctctccctcgaggaggcctgcagccgttataccctgacggtcgacgaattcctctcctggcagttttccatcgaccagcacggtctggcgggtcttcgcaccacccgcatccagcaatatcgccagtaa

SEQ ID NO: 4867 - DNA, 708 bp, BradyrhizobiumColbertium
atgaccaccacgaatgccgccaccgcaccgtcggtcgtctccgggacgaccgacatcccgaaatcctcgtcgaactcgtcgatgagctcgaccaccgggtcgaccctcgccggcaacttccagaccttcctgacgctgctgacgacgcagttgcagaatcagaacccgctggatccgctcgacaccaaccagttcacccagcaattggtgcagttcgccggcgtcgagcagcagctcaagaccaacgagtcgctggcccagctcgtcagcctgcagcagaccacgcaggcaactcaggcgctgggcttcgtcggcaagaccgccttggtcgacggctcgaccgcaaccatgaccaactcgtcggcggtctggcacctcaacgtgccgaccgactccaccgtcgagatctccatcgccaattcgagcggccagaccgtgttcaatggcaaatacaccgccgccgccggcaccgacattcccttcacctggaacggcatgggcaatgacggcacgcaatggcccgacggcaagtacacgatctcggccacggggaaggacgtggcgaacaataatgtcggcatcgccgcgcaggtgcagggcgtggtgtcgtcggtcgacctgacccagtcgccgccgctgctcaccatcgacggtgccagctacacgatgagccaggtcaagagcatcatcgcgacaagcagctattga

SEQ ID NO: 4868 - DNA, 1566 bp, BradyrhizobiumColbertium
gtgcaggtcccgagcgcgcagcaaaagcctgcgcggagccaagggccgaaagacgcgtctgcgaacgactccttcggctcgctggtcgacagcaacactcaggcgatcaacaacaatgcgcaggcgcaggaccccgcgccgcgacggagcgaatccaagtcatcctccccgtcctccgaccggagcgcgcgcgacacctcatcgacggaccagccttcgcagagcaaggcgggcgaggacgtcgacacgactgtgccggcgaagaatgaaaagagcgaggcgaccagcgatccggccaaggatgccggcaaggccaaggacaagtcggagacgtcggacgccaaaccggcggacaaatccgaggagaccgacgctgacaagactgacggcacgcccgtcaccggcgccgatgcgggcgccgccgcgacggccgatgcgacgcagaccgccctgcccgatcccggcatcatcgttgccgcgccggccgtgccggtcgatccgaacgcggcggccaaccaggccagcgatgccgcttcgccactatcgatcgccgcggcaggtcttgccgccagtgcctccactgcggcccagatcgccggcaccaagaccgataccgccaagacgagcgaccagagcgccaaggtcgcaggcgccgaggtcgatgccgacaccacggcgaccctcggcgaggccgcgaccggcacggacgaagccgccacgaccgatgcgaaagccaatggcggattgatcgccgtcagtcagggcacgccgaagacctcgttcaaggatgctgtcgcggcgcaggcccagaccgatgtctccaatatcggccaggacagcggcacggcgaacgccgccacgacgcaggcaccggctgcgagcgccgcacatgcagaaggtgtcaagccgcaggcagatggcggagcgatcgaggcaaaagcgggggcggccgaccgcaccgccgatctggcccacggcgcgccggccacgcacgcgcatgcgggcacacaagcggccgtcactccgaccgatagcggcgcccaggcggcttcggccgtgcaggccccgctgaccaataacacctcggccgccacggcatcgaccgcgacgctcaccgcaaccgcggccaccgcgacggccgtgccgatcagcggcgtgccgatcgagatcgcggccgccatacgcgccggcaggtcccggttcgacatcagcctcgatccggccgagctcgggcgcatcgacgtgcgcatcaacgtcgaccgcaacgggcaggtcacttcgcatctgacggtggagaagccggagacgctgcagatgctgcgtcaggacgcgccgcaattgcagcgcgcgctcgacgatgcgggcttcaagaccggcagtaacgggctgtccttcagcctgcgcgatcagaactcatcgggccagaattccggccagaacaacgaccatggcggcaacgcccgccggctgatcatcagcgaggacgaagccgtcgctgccgcgcccgttgggcgcggttacggtcgcatgctcggatcgagcagcggcgtcgatatcagagtgtga

SEQ ID NO: 4869 - DNA, 1182 bp, BradyrhizobiumColbertium
atgctcaacagtctggatctcgaaggccgtcccgaggacaccagggtcgtcgtcgccatgtcgggcggcgtcgattcctcgacgacggctgcgctgctgaaggcggagggctatgacgtcgtcggcatcacgttgcagctctacgaccatggcgcggcgactcaccgcaagggcgcctgctgcgccggtcaggacatccacgacgcccgcgacgtcgcggccaagctcggcattccccattacgtgctcgactacgaggatcgctttcgcgagtccgtcatcgacaacttcgccgattcctacgcgctgggcgagacgccggtgccgtgcatcgagtgcaaccgcagcgtaaaattccgcgacctcctgaagaccgcgcgtgaactcggggcgcacgcgctcgccaccggccattatgtcgcctcgcgtcgtctggatgacggctcgcgcgcgctggtctgtgcggccgatagcgaccgcgaccagagctacttcctgttcgcgaccacgcgcgagcagctcgacttcctgcgctttccgctcggcgacatgaccaagccgcagacgcgcgagcttgcgcgtcgcttcgggcttgcggtcgccgacaagcacgacagccaagacatctgcttcgtgcctacgggtcgctacaccgacatcatcacgcgcctgcggccaaatgcgatggatcccggcgacatcgtcgatctggacggacgcgtgctcggccggcacaacggcatcgccaatttcaccgtcggccagcgccgcggcctcggcatcgcctccggctcgccgctgttcgtggtgcggctcgacgcggcgcaccgccgcgtcgtcgtcggcccgcgcgatgcgctgaagatgcaccgcatctccttgcgcgacgtcaactggatcggcgacggcgacatcgactgcgccatcggcggcgggttagagatgttcgtgcgcgtgcgctcgacccgcagcccgcagccggcctggctgcgcggcggcaacggccgctacgaggtcgaactcgtcgccggcgaggaaggcgtctcgcccggccaggcctgcgtgttctacgatgcgccctcgggacaggcgcgcgtgctcggcggcggcttcatccagagcgccgccgcgaaggtcggagacgcgacatcgcgcccgctggtggaagcggttcgcggctga

SEQ ID NO: 4870 - DNA, 639 bp, BradyrhizobiumColbertium
atggcagcagacatctcgcgggctggggtcgagaaggcctatggccgctgggcgccagtctatgatctcgtgttcggcaaagtgttcgatgccggacggcagtcgaccatcgcggaggccgaccgcattggcggtcgtgtgctcgacgtcggcgtcggcacgggcctctcgctctccgactatgcgcgcacgacgaaagtctgtggcgtcgacatttccgagccgatgctgcgcaaggcgcaagcgcgcgtgcgcgcgcttcgtctctccaacgtcgaagtgctctcggtgatggacgcgaagaacctcgccttccccgatgatttcttcgacgcggtggtcgcgcaatacgtcatcaccgccgtgcctgatcccgaaggcacgctcgacgagttcgtgcgcgtgctccggcccggcggcgagctgatcctggtcaaccacatcggcgccgagagcggcccgcgaaagctgttcgagctcgccttcgccccgatcgctcgccgcctcggctggcgcccggaattcccctgggcgcgcctcgcgaactgggccgcaagacacggtggcgtcacgctcaccgagcgccgcccgatgcccccgatgggccacttctccctgatccgctaccgcaaagcgtag

SEQ ID NO: 4871 - DNA, 1275 bp, BradyrhizobiumColbertium
gtgacacttgcgttgggctgcatcgccgacgactacaccggggcctccgatctcgccaacacgctgacgcgcgcgggcctgcgcaccgtgcagaccatcggcgtgcccgccgacgatctggcgttgcccgaggtcgatgccgtcgtgatatcgctgaagagccgctcgatcgaggccggccttgccgtctcgcggtcgcgcgcggcggacaaatggctgcgcggccgcggcgccagccatgtcttgttcaagatctgctcgaccttcgattccaccgacgccggcaatatcggcccggtgatggacgccctgcgcgccgattgcggcgaaactgtcgttctggtgacgccggcgttcccggaaaccggccgcaccgtctaccaaggcaatctgttcgtcggcgctgtgccgctcaacgagagcccgctgaaggaccatccgctcaacccgatgcacgattcaaacctggtgcgcgtgctggcgtgccagagcaggacgcagatcggcctcgtcgatctcgccattgtcacgcgcggcgcggaggcggtgcgggcgcggcttgccgcgctcgcgggccagggtatcggtgccgcaatcgtcgacgccgtgttcgaccgcgacctcgagaccatcggtctcgttgccgccggccatcggctgtcggtcggcgcctccgggatcggcctcgggctcgcgcgggcgctggtctcgaccggcaaggtcaaggccacggcgaccagcgatgcaggcgcgccggtcggcggagcggcggtatgccttgccgggagctgctcgcaggcgacccttcagcagatcgcgagcgccgaacgcatcatgccggtgcttcgtctcgatccggaccgtatcatcacgcaagcagatgaagtgcagcacgcgctggactgggcaagaccgcgactggctgaaggtccggtactgatcgcatcgagctcggcaccagatcaggtcgccgccctgcaggctcgccacggccgcgacgctgccggtcacgcgatcgagcaggcgatggccgacatcgcggaaaatctagtgaaatcaggggttcggcggctggtcgtggccggcggtgaaacctccggcgcagtcgtcgaccgccttggtatccccggcttccttgttggcgcggagatcgcggcgggtgtcccggtactgcgggcggtcggcacggaggcaggcgggatgctgctcgcgttgaagtccggaaatttcggtggtcccgacttcttcgccgccgcgcttaggctcatgcgctga

SEQ ID NO: 4872 - DNA, 783 bp, BradyrhizobiumColbertium
atgccccgctttgccgccaatctctcgatgatgttcaccgagctgccgttcctcgatcgcttcgacgccgctgcgcaagccggtttcaccgccgtcgagtttctatttccctatgagcatccggccgaggtcgtcggcgagcgcctcaggcgcaacggcctgacccaggcgctgttcaacctgccgccgggcgactggaatgccggggagaagggctttgcggcgctgccctcgcgattcaatgaccttaaggcgagcctggagacggcgctgccttatgccaaggcaaccggagtcaagcgcctgcacctgatggccggcattgccaatcgcggcgaacgcgtcgcaatcgaggcgttctataaatcggtggcatgggctgccgagttcttcgcgccgcacggcatcgacatcgtgatcgagccgatcaatgcacgcaacgtgcccggctacttcctgaatgatttcggcttcgcccgcgacctcatccaggaattgcggcttcccaacctcaagctccagttcgacatctatcactgccagatcattcatggcgacgtcaccatgcggctgcgcgagatgatgccgatcatcggccacatccagatcgccagcattccctcgcgcaatgagcccgacggcgaggagctgaactatccgttcctgttcgaagagctcgaccgtctcggctatgccggcttcgtcggttgcgaatacaatccgcgcggcaagaccaccgatgggctcggctggttcaagccttacgctggagtgaagccgtga

SEQ ID NO: 4873 - DNA, 918 bp, BradyrhizobiumColbertium
atgtccgcctccacgccacaaaccaagcgcatcgccgttgtcgggctcggctcgatgggctttggcatggcgacctcgcttaagcgcgctggccatgccgtgaccggctgcgacgtctctgctgaggcggtgtcgcgcttcgtcaaggatggcggcgcgggggcaaagacacctgccgaagcggccggcgaggccgacatcgtcgtcagcgtcgtcgtcaatgccgtgcagaccgaaaccatcctgttcggcaaggatggggccgccgagaccatgccgaaggacagcgtcttcgtatcatcggctaccatggatcccgacgtggcgcggcgcttggccaagcagctcgaggcaaccggccggcactatctggatgcaccgatctccggcggggcgcagcgcgccgcgcaaggcgagctgacgatcctcgcctccggcagtcccgctgcctttgccaaggcgcggcccgcgctcgacgccatggccgccaagctctacgagctcggcgatgccgccgggcaaggcgccgcgttcaagatgatcaaccaattgctcgccggcgtgcacatcgcggctgccagcgaggcgatggcgttcgccgccaagcagggccttgacatccgcaaggtctacgaggtgatcacggcatcggccggtaattcctggatgttcgagaaccgcatgccgcacgtgctcgacggcgattacacgccgcgcagcgcggtcgagatcttcgtcaaggacctcggcatcattcaggacatggcacgcagcgcccgattccctgtgccggtctccgccgccgcgctgcagatgtttctgatgacatcagccgccggcatgggccgcgacgacgacgcctccgtggcgcggatgtatgcgcgggtcaccggcgtcaagctgcccggcgacaaatag

SEQ ID NO: 4874 - DNA, 675 bp, BradyrhizobiumColbertium
atgacggccataagcaacgatacacggctgcgcgaagatatatgccgcttcgggcggtccctgttcgagcgcggcctgacgcccggctcgtccggcaatatcagcgtccggctggacagcggcggctggctggtgacgccgaccaacgcctcgctcggctttcttgatcccgcaaagctgtcgcggctggacgatcagggccggctggtgtcgggcgacgcgcccaccaaggaagttccgctgcacaccgcgctctacgacacgcgcggaagcgcccaagcgatcgtgcacctgcactcgacccattcggtcgcgctctcgatgctgcccgagatcaacccgcgcgccgcgctgccaccgatgacagcctactacctgatgaaatgcggcgccaccgcgctcgtgccctattatcgtccgggcgatcccgcagtcgcggatgcgatcaagggactggcgggaaaatattcatccgtgctgctcgccaatcacggcccggtcgtcgccggcgacacgctggaagcggcagtgttcgcgacggaggagctggaggagacggcgaagctgtacctgctgctgcgcgggatgaacccgcgctatctgtcaccagagcaagtgtcggatctggtgaaggtatttggggtggcgctgccggagcatgggcacggacactga

SEQ ID NO: 4875 - DNA, 705 bp, BradyrhizobiumColbertium
atgctgtcggtgcgtgaagtcacgacggcctatcagggcctggtggcgatctccgcggtctcgatcgaagtcgagaaaggcgagatcgtctgcgtcgcaggcgccaacggcgcgggcaagtcgacgctgctcaaatccatcgcgggtgccgagcgtccgcgctcgggcacggtgacgttcgacggcaagcgcatcgacggcatggcgcagcaccacgtcaccgccgccggcatcgcctatgtgccggaaaaccgccgcctgtttccacggctgtcggtgcgcgacaatcttcgcctcggcagttatctctatcgtggcgaggccaatcgcgaagagcccctcgatctcgtcttcacgctgtttccgcgtctgtccgaacgcctggagcagcgtgccgaaacgctctccggtggcgagcagcagatgctcgcgatcggccgcgcgctgatgacgcgtccgcgcctcttgatgctcgacgagccctcgcagggcatcatgccgaagctggtggacgagatcttccaggcggtgaagcgcatccgcgacgccggcatgaccgtgctgatcgtcgagcagcgcatggccgagtgcctggagatcgccgatcgcgcctacatcctgcaaaccggccgcgtgctgatgcagggcgcagcaagcgagatcaagggcaatcccgacgtgaggaaggcgtatctgggactgtag

SEQ ID NO: 4876 - DNA, 732 bp, BradyrhizobiumColbertium
atgagcgcgctccttgagacccgcggcgtctggcagcggttcggcggcctcgtcgccaacagcgacgtctcgatctcggtcggccgcggcgagatcgtcggcctgatcggcccgaacggggccggcaagtcgaccctgttcaatctgatcgccggcgtgctgccgccgacgcaaggctcgatctggttcgacggcgaggatgtcaccaacttgccggcagcccaacgctgccagcgcggcatcggccggaccttccaggtcgtgaagagcttcgagacgatgacggtcatcgacaacgtcatcgtcggagcgttggtccgcaacacggtgatgaaggaggcccgccgcaaggcacgcgaggtgctggaattcaccggccttgccgcgcgcgccgacgtgctcgccagcgacctcgtgccggccgagaagcgccgtctcgaagttgcccgtgcgctcgcgaccgggccgaagctgctgctgctcgacgaagtcctcaccgggctcacgcccacggaggcgcagaccggtgtcgcgcttgtgcgcaaggtgcgcgatgccggcatcaccgtcttgatggtcgagcatgtcatggagatcgtcatgcccctggtcgaccgcgccatcgtgcttgacctcggcaaggtgctggtcgagggcaagcccgccgacgtcgtccgcgatcccaaggtgatcaaggcatatctgggagaccgtcatgctgtcggtgcgtga

SEQ ID NO: 4877 - DNA, 984 bp, BradyrhizobiumColbertium
atggacaaggattttacagcgcggcgccgccgcgacctcatcatcgcggcgctgctcgccctgatcgcggcgctgaccccattgttcgtgaaggacgtcgtcgtccagaacatcctgatcctgacgctgatgtatgcgggcctgtcgcagagctggaacattctgtccggctattgcgggcagatctcgctcggccatgcgctgtatttcggtctgggtgcctacaccaccgagctgctgttcacgaagttcggcgtgctgccctggttcggcatgctggcaggcggggtggtgtcggctctgatcgcgatggggctcggctatcccttcttccgcttgcgtggccattacttcgtgatcgccaccatcgtcatcgccgagatcggcctgcttctgttccacaactgggaatgggctggtgctgcgatgggtatcaccattccgatccgcggcgacagttggcttaaattccagttcctgcgcaccaagctgccgtacttctattttgcgttggcgctgtgctgcctcgcctggttcgtgacctggtggctggaaaactccaaatggggattttggtggcgcgcggtcaaggacaacccggaggcggccgagagcctcggtgttgacgtgttcaattccaagatgggtgcggccgccgtctcggccttcctggtcgccgtcggcggcagcttctacgcacagttcgtttcctatatcgatcccgagagcgttatgggctttcagttctcgctgctgatggcgctgcccgccgtactcggcggcatcggcaccctgtgggggccggtgctcggcgcagccatcctgattccgctgactgagctgacccgcttcaaattcggcggctcggggcgcggtatcgacctcatcgtctacggcacgctgatcgttctgatctcgttggccctgccgcgcgggctgctgagcctgttttcacgcccgaagaggacgggagccgtacgatga

SEQ ID NO: 4878 - DNA, 834 bp, BradyrhizobiumColbertium
atgggcctgctctacggattgatcgcggtcggcctcgcgctgatcttcggcctgatggacgtcacgaacttcgcccatggcgagttcctgatgatcgccatgtacctgtccttcttcctgttcgcgttcttcgcgatcgatcccttgctgtcggcgccgctggtcgccgcggcattattcatattcggagcggtcgtctatctgctcctcgtacgcttcgccatgcgggcgaaggccaacgccggcatggtgcagatcttcaccacctttggccttgccatcgtcatgcgcggcctcgcgcaatacttcttcacgccggactatcgcagcattccgcaatcctggctcggcggcaaaaccatctcgattgccggcatcttcctgccggagccgcaactggtcggcgcgctggtctcgattgcggcgttcgcgggtctttatatcttcatccaccgcacggacttcggccgcgcgatcgaagccacccgcgaagatcccggcgcggtcgcgctcgtcggcatcgacaagaaccgggtgttcgcgttcggctggggcctcggcgccgcgctggtcggtctcgccggagcgatcatggccgtgttcttctacatttaccccgatgtcggcgcgtcgttcgcgctgatcgcctatgtcacagtggcgctcggcggcttcggcagcgtgttcggggccttcgccggcggcatcatcgtcggtctcgtcgaagctgtcactgcgctggtgctgccgccgtcgctgaagtcggtcggcatctactcggtctatctgctcgtcgtcttcatccggccgcgcggcctgttcggatcgatctga

SEQ ID NO: 4879 - DNA, 1245 bp, BradyrhizobiumColbertium
atgacgatcactcgccgcgacgtgttgttgggagccgccgccactgccgctctcgtgccgctggcagcgcgcgcacagacctcggaggtcgtgatcggcgtgatctatccgttctccggcggcagcgctcaacagggcgtcgacgcgcagaaggcctatgagaccgcgctcgaagtcatcaacaaggactccgctttcgacctgccgctggccaagggcgaaggtctgccgggcctcggcggtgcgaaggtccgcctcgtgttcgccgatcaccaggcagatccgcagaagggccgcgccgaggccgagcgcctgatcacgcaggagaaggtctgcgccatcatcggcacctatcagagcgccgtcgccgtcaccgtcagccagatctgcgaacgctatcaggtcccgttcgtttccgccgacaactcgtcgcccagcctgcatcgccgcggcctgaagtattacttccgcgcggcgccgcatgacgagatgtactcggcagcgatgttcgacttcttcgatgccatgaagaagaaaggcaccaagatcgacaccctgtcgttgtttcacgaggacaccatcttcggcaccgactccggcaacgcccaggccaagatcgccggtgagcgcggctacaagatcgtcaccgacatcaagtatcgcgccaattcgccctcgctctcggccgaggtgcagcagctcaagacggcaaatgccgacgtgctgatgccgtcgagctacaccacggacggcatcctcctggtcaagaccatggccgagctcggctacaagccgaatgcgatcgtggcgcaggacgccggcttctccgagaaagctctttatgatgccgtcggcgacaagctcgaaggcgtgatctcgcgcggcaccttctcgctcgacctcgcgcagaagcgcccgatggtcggcaagatcaacgacatgttcaaggcgaagtcgggcaaggatttcaacgatcttacgtcgcgacagttcatgggcctgatcatcctcgccgacgccatcaaccgcgccaagtcgatcgatggcgagaagatccgcgatgccttggcggcaaccgacatccccggcgaccagaccatcatgccgtggaagcgcgtcaagttcgacgagatgggccagaacaacgacgccgacccggtgctgctgcaatatgtcggcggcaagttcgtcaccatcttcccgccgcaggccgcgatcgccgaggcgatctggccgatgaagtga

SEQ ID NO: 4880 - DNA, 804 bp, BradyrhizobiumColbertium
gtggcagcgcagcaaactgaaacacccgacacgctcccgagccgcaaggcccggctcgcctaccgggaggggctggtcgcctccaccgccggcgtcgcttcgggcttcgtccagggcaatctggcgatcctgccggccgattatgcgggcgcctttcatcgcttctgccagctcaacccgaaaccgtgtccgatcatcggcatgtccgatgtcggcagcccgttcattcctgcgctcggcgccgatctcgacatccgcaccgacgttccgcgctaccgcgtctggcgcgacggcgaggtggtggatgagccgaccgacgtgaccaagtactggcgtgatgacctcgtcaccttcgtgctcggctgctcgttctcgttcgaggaggcattgctcgacgaggggatgccgatccggcacatcgagcgcaatgtacgcgtgcccatgtatcgcaccaacatcgcttgcagcgaggccagtccgttcgccggtcccatggtcgtgtcgatgcgcccgttcaagccggcggatgcgatccgcgcggtgcagatcacctcacgctatcccgccgtgcacggcgcgcctgtgcatctcggccacccgcacctgatcggcatcaaggacatcgcgaaaccggactacggcgatccggtgccggtcgccgacgacgagattccggtgttctgggcctgcggggtcacgccgcaatcggtgatcaacgccgcgaaactgccgttcgcgatcacgcattcgcctggcctgatgctcgtgacagatctgaagaacaaaagcttggccgtgatttga

SEQ ID NO: 4881 - DNA, 918 bp, BradyrhizobiumColbertium
atgctggacttcaggtcgatcgagacgttcctttgggttgtgaagctgggcagctttcgcggcgccgctcaaaggctcaacacgacccagccggcgatctcccagcggattgcccagctcgagcgcgagatgggcgtgaagctcctcaaccgcgatcatcgcgtggcctcaccgacgccgagcggccggcagatgatggtctatgcggagaagctgatcgggctgcgtgcccagatgatggcggagatcggcgaccggtcggcgatgcgcggcgtgatgcggctcggcgtcgccgagaccatcgtgcacacctggttgccgcggctcgtgaaaagcgtgaacgaggtctatccgaacctgtcgctggagattgaggtcgacatcacgccgaacctcaccgcgcgcctgctcgcgcaggagatcgagctcgcgtttgtggtgggaccgctgtccgcttccggcgtgcacaaccgcgtgctcgccgattatccgatcggcttcctcgcaagcccctcgctggggctcggcaagggcccggtaacaccgacggacctcgcacggtttccaatcatcaccttcccgcgcaagaccaagccgtacgaggtcgtgcgcgaagtgttcgaccggccggagttgccgccgatccgcctgcatgcctccgcttcgcttgccaccgtcatccatatggcggtcgaggggctcggcatcgccgtgatccccgacgccatcgtcgagaacgagctcgccgacggccggctgcaactgctcgacaccgatctcgcgatcgcgccgctgaccttcacggcaagctggctcgcctctcccgacgtcgtcgccgtggagcgcgttgccgagctcgcaaagcagatcgcgcagagcagcctcgcggttgacgcgcccgcgcaggcgggtcattga

SEQ ID NO: 4882 - DNA, 1251 bp, BradyrhizobiumColbertium
atgagccgagccgccaccaatctacaaatcgattccgcccgcctgtggggctccattcacgagaccgcgcaattcggcgcgaccgcgaagggcggcgtgaggcggctgaccctcagcgccgaagataagcaggtgcgggactggttccgcaaggcctgcgaggacgctgggctcgaagttcacgtcgatgcgctcggatcgcagttcggcttgcgcaagggacgtgacatgtcgaagctgcccgtcggcatcggctcacatctcgacacccagccgaccggcggcaaatatgatggcattctgggaacgctcggcgcgctggaagtgatccgcacgctgaacgacgctggcatcgagaccgaagcgccgatctgcgtcgtcaactggaccaacgaggaaggctcgcgctttgcgcccgcgatgatggcttcggccgcctatgtcggcgacttcaccaccgacgacattttgtcgcgcaaggacgccgagggcaccagcgtcggccaggcgctcgacagcatcggttatcgcggcgacaacccggtcggcttccagaagctcggctgcttcgtcgaattgcacatcgagcagggccccattctggaagcggaaggcaagaccatcggcgtggtcgattccggtcagggcgtgctctggtacgacggcaagatttccggcttcgagagccatgcaggctcgaccccgatgccgctgcgacgcgacgcgctggcgacattgtcggaaatcgtactggcgatggaagcgattgcgaaaaagcatgggccgaacgccgtcggcaccattggcgaggccgtgatcgcaaatccctcgcgcaacgtcattcccggagagatcgccttcaccatggactgccgcagtgccgatggcgcgatcatggacgcgctcgaccgcgatcttcgtgcggcaatcgccgagatcgccgcgcgccgcaaggtcgaagtcaagatcgacctggtctggcgcaagccgcctacgcatttcgatccgaaactgatcgcagcggtcgagaacgcggcgaagacgctcggctattcctcgcgccgcatcacctccggcgccggccatgacgcctgcaacctcaacacggtgatgccggcggcgatggtgttcgtgccctgcaaggacggcatcagccacaacgagctggaggacgccacacaggccgactgcgcggcgggcaccaatgttctcatgcataccgtgctggcaatcgccggcgtcgcatcctga

SEQ ID NO: 4883 - DNA, 912 bp, BradyrhizobiumColbertium
atgcgtggagttttcgtcgacgccaacgaagcccttgccgtgatcatggagcgcctggagaagcccggcgatcccaaggtgcgtatccacagggctcccgatatcaagcccgagcaatatcctgaaatcctcgacggcgccgagatcgcgatcgtggaccataccgcactgccgaccgatgtcgcgaagaagtgcaccgggctgaagcacgtcgtgttcctcggcaccggcgcgcggagctacatgaatccggaggagctcgccgagctcggcatctccgtgcatctgatcaagggctatggcgacacggcagtcgctgaatccgcgatcgcactgatgtgggcttcggcccgggtcatcgcgatgatggaccgcgagatgcgcgccggcaactggctgcgcgaggatggcatgcagctgaccggcaagacactcggcctgatcggcttcggcggcatcgccgctgaggtcgcgcgcattgccaccggcagcggcatgaaggtgatcgcctggaaccgctcgcccaagagctatcccggcgtcgagttcaccgacctggataccgtgctggcaaggagcgacgtcgtatcgttgcatctgctgctcaacgacgagacgcgcggcatgatcacccgcgagaagattcttgccatgaagcgcggtgtcatcctcatcaacacggcgcgcgccgccgttgtcgacgaggccgccatgatcgaggcactgaaatcgggtcacatccgacatgccggcctcgacgtcttcaacgtcgagccgctgcctgcggatcatccactgacgaagctcccgaacgtgaccctgtcggcgcattcggcgttccgcacgccggaagcgagcgaaaacctcattcatgcggcgtgggagcactgccgccggatcgtgaaaggataa

SEQ ID NO: 4884 - DNA, 1074 bp, BradyrhizobiumColbertium
atggccgactatcgcaccatcaaggcagagccgctcaccaacgccatccgcgccatcgtcaaggcgggcggatcctcggatcgcgaggccgaactcgtctcgaccaatcttgtcgaggccaatctcaaggggcacgactcgcacggcgtcggcatgatcccgcgctacgtccagagcgtcaccaacggcggcctcgccgtgaaccagcacgtcaagatcgtgctcgacaccggtccgcttctcaccctcgacggcctcacgggctacggccaggtgattggccatgaagcgatggagctggcggccgagcgcgccaagcgcaacggcgtctgtctcgtcggcctgtccaacgcgcaccatatcggccgcatcggccattgggccgaacagtgcatcgaccatgggctggtctcgatccatttcgtcaacgtgatctcgcggccgatcgtggcgccctggggcggcagcgatgcccgtcacggtaccaacccgttctgcgtcgggatcccgcgcaggggcaaggacccgatcgtgctcgatttcgcgaccagccggatcgcgcaaggcaagacgcgggtcgcccacaacaagggtgtcgagctcgagcccggcaccatcatcgacaatgaaggcaagcccacggtcaatccgcgctacaccgtgatcccgccgcacggcgccatcctgccattcggcgagcacaaaggttcggggcttgcgctggtgtgcgaaattctcggcggcgcgctctccggcgggcaggtggtcaagggaccgtccgacggcaagtacaacgtcctcaacggcatgctctcgatcgtcatcgatccgaacaagctcggcactggcgagaacctcgcgcgcgaggtcgaaggcttcgttgcctggcacaccgcctcaccacccgcaccgggcgtcgacaaggtcaggatcgccggcgagcccgagcgcgagaccaagaggaagcgtctggccgaaggcattccagtcgatccgaccacctggcaggagattctcgaggccgggaagaagttcgggctggatcaggccgcgatcgaaggaatcctgggctga

SEQ ID NO: 4885 - DNA, 1074 bp, BradyrhizobiumColbertium
atgagcaagaaacagtaccggatcgcggtcattcccggcgacggcatcggcaaggaagtcatgcccgagggccttcgcgttctggaggcggctgcgaagaagcacggcgtctccgtgcatttcgaccatttcgacttctcgtcctgggactattacgagaagcatggtcagatgatgccggacgactggaaggagaagatcggcaagcacgatgcgatctatttcggggcggtcggctggccggccaagatcccggaccacgtctcgctgtggggctcgttgatcaaattccgccgcgagttcgaccagtatgtgaacttgcgcccggtgcgcctgatgcccggtgtgccttccccgctggcgggccgcaagcccggcgacatcgatttctgggtggtgcgcgaaaacacggaaggcgagtattcctccgtcggcggccgcatgttccccgacaccgaccgcgagttcgtgacgcagcagacggtgatgacccgcaccggcgtcgaccgcatcctgaaattcgccttcgagctcgcacagtcgcggccgaagaagcacctgacgtcggcgaccaagtccaacggcatctccatcaccatgccctattgggacgagcgcgtggaggcgatggccaagaaatttcccggcgtgaagtgggacaagtaccacatcgacattctcacggcgaacttcgtgctgcatccggactggttcgacgtcgtggtcggctctaatctgttcggcgatatcctctccgacctcggcccggcctgcaccggcaccatcggcatagcgccgtcaggcaacatcaatccggaaggcaatttcccctcggtgttcgagccggtccacggctcggcgcccgatatcgcagggcaggggatcgccaacccgatcggcatgatctggtcgggcgcgatgatgctggagcatctcggcgagaaggaagccggaaagtcgatcgtggacgcaatcgagcgcacgctggccgagcgcacgctgcgcacgaaggatctcggcggcaacgcggacaccacggcctgcggcaaggcggtcgcggatatggtggattag

SEQ ID NO: 4886 - DNA, 777 bp, BradyrhizobiumColbertium
atggatctgcatctgcgtggcaagcgcgtcctgatcaccggcgcgtccaagggcattggcgcagctgccgccgaggcgttcgccgaggaaggtgcaaatctcctgctcgccgcccgcagcggcgatcagctcaaggtgctggccgagcgcctgcgctccgcacaccagatcgacgccgcaacgagcatcgtcgacctgcgcaagggagaggatgtggagcgactggcgaaggaagccgccgacatcgacgtgctcgtcaacaatgccggcgacatccccgggggctcgatcgacaaattagacgaggcgacctggcggcacgcctgggaattgaaggtgttcggctacatcaacctgacgcggtacatctacgcgcagatgaaggcgaagggcggcggcgtcatcatcaacgacatcggcgcggctggcgaaaagttcgacgccaattacatctgcggcagtgccggaaatgccgcgctgatggccctcacccgcgcgctcggcagcaagagcctcgccgacaacatccgcgtggtcggtatcaatccgggacccgtcggcaccgatcgccacgtcacgcggctgaagacgcgggccagggatcagttcggcgacgagagccgctacaaggaattccagaagagcctgccgctcgggcgccctgcgcatgcgcgcgagatcggcgacctcatggcgttcctgggctcggatcgctctggctacacgtcgggcgtgatctacacggtggacggtggcatcagcgcgggctggggttag

SEQ ID NO: 4887 - DNA, 1419 bp, BradyrhizobiumColbertium
ttgtctcaagacctgatccgcgaaaccgcctgcaccgtcgtcgacaagctgcggtccggcgacgtctcgccgctcgagctgcttgatgtgctggagacgcgcatcaaggaggtcgacggcaaggtcaacgcgctgccgatattatgcttcgatcgtgcaagggataacgccaaggcgctgatgcggaagccggccggcgcgcgcgggctgctctcgggcctcccgctaccgatcaaggatctgaccgacgtcgcgggcgtgctgaacacgcagggctcaccgatcttcaaggacaacgtccccgcgaagtccgacctcatggtcgagaatctcgaagccaacggcgcggtggtctacgccaaatccaacacgcccgaattcggcgccggcgccaacactttcaacgaggtattcggcgcgacgctcaacccctgggacacgacgaaatcagcagccggctcctccggcggcgcggcggtggcgctcgcgaccggcatggcctggcttgcgcagggctccgacatgggcggctccttgcgcaaccctgccgccttctgcggcgtcgtcggcatgcgaccgagcatcgggcgcgtcgcgcacactcctaagtcgggtatcgatcgcaatctcggcgtcgtcggcccgatggcgcgcaacgtcgatgatctcgcgctgctgctggatgcaatgagcggcgactatgcagatgatccgctgtcgctgcccgcccccgcaacctcgttcctgtcggcggcacaggcgggcaagaggccgaagcgcatcgcctattcacccgatcttggcattacgccggtcgatcccgaggttaaggcaattacgcgcaaggccgcggagcgcttcgcggaagccggagcgatcgtggaggaggcgcatccggactggcgcgaggcgcatgaatgcttccacgtactgcgcgccttcgatttcgcgatcaccaaggccaatctgctgcgcaccaagcgcgacctcctcaagcccgaggtaatctggaacatcgaggaaggcctcaagctcacggtcgagcagctggggcgcgccgaggcgcagcgcgtcgacatgaccgcgcgggccgtcgagttcttcaagaactacgacctcctgctggtgccgacgacgatcgtgccgcccttcccgatcgagcaccgctatgtcgccgaatgcgccggcaagcgcttcgacaattacgtcgagtggctcggcatcgtctatgccgtcacgctcgcctgctgcccctcgctgtcactgccgtgcggcttcacacagtcgggcctgccggtcggcgttcaggtggtcggcgccccccgcgccgatgcgcaggtgatcgccggcgcgaaggtgctggaggacattttgggcctgcgcggcacgacgccgatcgatccgaaggtgaagaattga

SEQ ID NO: 4888 - DNA, 651 bp, BradyrhizobiumColbertium
atgacgacggctcctcgcgtcgccctcatccacgccctcaagcattccatcgccccgatcgaggccgcgttcgcaaaggcctggcccgaggcacggctgatgaatctgctcgacgacagcctgtcggcagatctggcgtgcgagggagcgctcaccgacgccatgaccgggcgcttcctcgcgcttggtcattatgcgacggccacggcagcggacgcgatcctgttcacttgctccgccttcggaccctgcatcgaggccgtcgcacgcgcacatgcgtcgataccggtgctgaagccgaacgaggccatgatcgaacgcgccgtgaccatgggcaagcgcatcggcctgctctcgacttttccgccgacgctggcgtcgatgccgcccgagtttcccgcctcggtccaaatcgtgccgaaacttgccgaaggcgctctggccgcactcgattgtggcgatcgcgccgcacatgatcgcctgctcgcggaagcgtcccgcgatctccgcgattgcgacgtcatcgcgctcgcgcaattcagcatcgcggcggctgcgccgctggttgcggaggccaccggccgcccggtcgtgacgacgccggacagtgcggtcgacaagctgatgaggctgctgaaagcgaaggcttaa

SEQ ID NO: 4889 - DNA, 648 bp, BradyrhizobiumColbertium
atgcgttcacaactcgcccgcaagcccgacaagacctaccaccacggcgatcttcgcgatgcgctgatcaaggccgcgctacgcgaggcggagcagggcggtgccgaggcgatcagcatcaaggcgcttgccaagaagctcggcgtctcgcagccggcaccataccggcattttgccgaccgcgaggctttgatcgcggcgatcactgcggaggcgtttcggcaattctcggcacttctgcgcgaggcgatggcaaagcagtcgaagcagtcgaaactcttgcggctggcgctgaccaccctcgatttcggtctgcgtcgcaacggtatctaccgattgatgtttgcttcgcgcacggtgtcgtgcgcggccaagggcagcgagctgcacgaggccacgcgggagacctttgcgctcgttatcgaagccttggaagcccccgccgtcggctatttgcgcgaacggcaggcgctcaagatctgggcggcattgcacggcgtggtgatgttggccgagcagggcctgttcaccggtgaggcggcgcacgcgacccgcgaggaactggtcgaggatttcgtcaacgagaccaaggctgccctcacagtcgcgattagggatgcgcgccgccggacaaaggcgggggcttaa

SEQ ID NO: 4890 - DNA, 243 bp, BradyrhizobiumColbertium
ttgggccctgcgcacacgaccaaggaagccgcgatggcagagcgactgaaggttcacgtcaatcccgacaaatgccagggccatgcccgctgcaaggcactcgcgccggagcttttcgatcttgacgagtacggcaacgcgcacgaagccggcgacggcattgtcccgccggggctcgaagacaaggcctggcttgcgaaatccaactgcccggagatcgcaatcgatgtgatcgaggagtag

SEQ ID NO: 4891 - DNA, 1221 bp, BradyrhizobiumColbertium
atgtccgacgtcaaccagcccgccgcccatccgcccgtgaccgactgggtccatgatttcgaccacaccgatccgcaatggacggaggatccctttccgatctgggaccagctgcgcgccacaagtcccgtggtgcacacgaaacgcttcctgggctgctatctgccgacgacctatgaagccgtgcgcgagatcgccaacgacaccgagcacttctcctcgcgccgcatcatcgtccgcgatgtgcgcccggaggtcgccaggaatgcagccccgccgatcacctcagatccgcccgagcacaaacccgccaagcagttgctgctgccgccatttacccctgatgcgatgaagaagctcgagccgcgggtccgcgcgatctgcaacgagctgatcgacgaattcattgccgacggcaaggtcgacgctgccgcacgctacagcaaatacatcccggtgcgggccatcgcccacatgctcggcatccccgagagtgacagcgatctcttcatcaagtggatccacatgatcctggaactcggcatcaaggacgagagcaagctgctccaggccgtgcaggagatgacagcctatttcagcggccacatcgaagcgcgcaagaacaagcccaccgacgacctcatctcgtacctgacgaatgccaggggcaaggacggcaatccgctcgaggactcccatgtgctgggctcgctgcgcctgctgctgattgccggcatcgacaccacctggagcgcgatcggctcctcgctctggcatctggcgaagacgccgtccgatcgcgaacgtctgatcgccgagccagggctgatcccgaccgcggttgaggagctgctgcgcgcctattcgccggtgacaatggcgcgcgaggtggtcaaggagaccacgatctcgggttgcccggtcaagtcgggcaacatggtgctgctgtccttcccggccgcgaaccgggaccccaagatgttcccggatgctgacaaagtcgtgatcgaccgacgcgaaaaccgccacgccgcctttggcctcggcatccaccgttgcgtcggttccaacctggcgcgcatggaaatgcaggtggcgctggaggaatggctaaagcggatcccagacttccggctggatccggcaggcacggtgacctggtcacaaggcacggtgagaggcccccggcagttgccatttctgcttggaaaggcgatgtag

SEQ ID NO: 4892 - DNA, 663 bp, BradyrhizobiumColbertium
atggctgacgacaaggcgccgcccgacagcaagctgacgcgcaccaaggagaaatgggcccgcgagggccggtttctcaccggcaaggtcacacgtccggaagcccagcgcctgccgcccggccagcaccttaccaaggactggccggtgctcgatctcggcatcgtaccgccggtctcacgcgagcgctggcgcctcgacgtctacggcgcgatcgaaactcccgtgttctggagcttcgacgagttcatcgcgcaaaagcaggcgcggttcacctccgatatccattgcgtcacgacctggtcccgctatgacaatgaatggaaggggcttgccacgcgcgagttgctggcggcctgccagccgcgcgaggatgctcgtttcgtcgtgctgcattcctatgacggttacaccaccaacctcgcgctcgaggatttcgctgcagaggatgcgctgctcgcccatagctggtcgggccagccgctgacggaggaacacggcggtccggttcggctggtcgtgccgcacctctatttctggaaaagcgcaaaatggctccaggccatcgaattcctgaccgaggacgcgccgggcttctgggaagtccgcggctatcataaccgcggcgatccctggaccgaacagcgctattcgaacgactag

SEQ ID NO: 4893 - DNA, 1224 bp, BradyrhizobiumColbertium
atgccgacggaacgctttcaattcaccggagaaggcggccatcagctttcggccgcgcttgagctgcccgacggcgagcccgcggccttcgcgctgttcgctcattgcttcacctgcggcaaggacacgctggcggccaaacggatttctgtcgcactggcggccaagggcatcgcagtgctgcgcttcgacttcaccgggctcggctccagcgaaggcgacttcgccaactcgaccttttcctccaacgtcgccgatctccttcgtgcggccgaccatctgcgcagcgtccgcagggctccgtcgatcctggtcgggcacagcctcggtggtgccgcgatcctggccgcagcaggacaaatccccgaggccaaggcggtggtcaccattgcggcgccgtccgatcccgcccacgtcactggccttttcaaggagcacatcgacaacatccgcgcgcacggcgaagtggaagtctcgcttgcaggccgcccattccggatcaggcgtgaatttctcgacgacatcgccgagcgcgagttgatgaagaacgtcaccagcctgcacaaggcgctgctggtgatgcactcgcctgtcgacgacacagtcggcatcgacaatgcgaccaagatcttcattgcagccaagcactccaagagtttcgtctcgctggaccatgccgatcatctcctgacgaaacccgctgacgctctctacacagccgacgtgatcgccgcctgggccagtcgctacatcgacactgcaaagcccgcgaaaaccatggatctcgccgaagtgccacgccaggtcgtggtgcaggagacccgcaagagcaagttcaaccagatcatcactgtcgggccgcatcatctggtggcggacgagcccgttgcggccggcggcgcggatgccgggcccggtccctatgatttcctgcttgccggcctcggcgcctgcacctccatgaccatgcggctctatgccgaccgcaagtcactgccgctcgaccgcgtcacggtcacgctgaagcactccaagatctacgccaaggattgcgcggagtgcgaaacgcgcgatggcatgctcgaccagatcgagcgtggcattacgatggacggcgccctcgatgcagaacaacgcaagaagctgatggaaatcgccgacaaatgcccggtgcaccgcacgctgacatcggagatccgcatcgtgacgaaggcgattgattga

SEQ ID NO: 4894 - DNA, 1449 bp, BradyrhizobiumColbertium
atgccagttctggaagacgtgatctccgctctggtcgacttgaaacggacggacgacgcggggctggtgacgcagttgacgagccagctcagagacctgatcgcgagcggccgtctcggcaaggggcgggcgctgccgtcgagccgtcggctcgcgggcgatctcggcgtctcccgcaacaccgtcactcatgcgtacgagcagcttgccgccgagggatatatagaggcgtcgcacggccgccgtccggtggtcacggtcgatggaggcggacgtaggataggagcgggtgctgctgtggcgcgcgaacgctccggtaagccgcaactgtcgccctgggcctctagtctcaagcagaccgactggccgatgtcctatcaggcatcactaaggccgttgcgcccggggcacggcgatttcagagagtttccggacgaggtctgggcgcgttgcttgcgccgcaatgcggtgcgtgctgccaggcgcgagctcggcccggttaaccggacgcgcctgcgcgaggtgctcgcggattatctggcgaccagccggggtgtccgggccaccgcagaccagatcatgatcctgccgagcgcacaggctgcgttgaccttgattgccacgaccgttgtcacgcccggcgatgacgtctgggtcgaggatcccggttatcccggtgctgcggctgccttccgggcgtacggtgcacgcgtgagcggtatcagactggacgagcagggtatgcaacggatgccggggcttgcggcaccaaagctgatctttatgacaccctcccatcagcatccgaccgggcggctgatgtcgctgtcccgccgcaccgagtttctcggcctgagcaggcccggcaagacctggatcgtggaggacgattacgacggcgaattccactacgacagcaggccggttccggccttgcagggactcgatgcccatggccgcgtgttctatgtcggcaccttctcgaaggcgatgacgtcggatatccggcttggctatctcgtcgcgccgccggcactggccaacaccttggagatcgcgcagcggcatattgggctgatcgcttcaagtcacatccaggaggcactcgccgagttcattgctgacggccattttctcgcgcatctgcgccggatgcgccggctctatcacgcgcgccgcgatcacctcgtcgaggaactggagcgacagctgggcggtatgctctcgatcgaagtgccccccggaggcatccaactcgtcgcccgcctcaagcgcggtcgcactgatcaggcggcggcgaagcggctggttgcggcaggggtcgagacacgcgccttgtccagcctggcgcttggccggccccgcgatcacggcctgctgctcggctttgcggcctggcaggagtgcgagatcagcgcggccgtgcggacgatggcatcgtgcttctag

SEQ ID NO: 4895 - DNA, 954 bp, BradyrhizobiumColbertium
atgctatccggcgaagtgaactgcttcaaggactccgagatgaactcactctcatcccgcgcggccgtcggcctcttcctcatcgtcgtgctggcctggggtgtgaactggtcgatgacgaagcaactcgtgcaattcgttccaccgctatggaccgcggcgatccgaagttggatcgcgctggtcggcctcatcacgatcctcggattgagcaagaatctggtgatcccggaacgacgcgatattcccgtgatcctcagcgtcgcgctgctgcacatgacgctgttctcaaccctcgtcgccgcgggcctgcgcttcctgcccgcaagcaagggcatcgtgctcggctacaccacgccgctctgggtcgcactcgccgcgcccgtgctcggaaaggaggcgctgaccgcgcccaagcttgccggcgctctgctcggactgatcgggcttgccgtcatcctgaatccatcctcgattgactggaccaatgcaggcgtcctgctcggcgccgcgatggtcatcctcgccgcgatctcctgggccgcgaacatcatctatatccgcgcgcatcgctggatcgcatcgccgctccagctcctgctctggcaggtgctcgtggccacggccgtgctatcggcgctggcgatgatcatcgacgggctgccgcacgtcgagtggtcatggaggcttgtgtcgctcttcctgtattcgggcctgatcgggacggcgttggcctattgggcgatgtcaatggtcaacaagagcatctcggccctgacgacgtcgctcgggaccaccgcgacgccgcttgtcggcatcgccagtgccgcggtcctgctgagtgagccgatcgacaccagccttgccatcgcggccggactgatcgtcaccggcatcggtcttgcgacgctgggcgatcgactgctgcgcggtcaggccactgcgagggggtga

SEQ ID NO: 4896 - DNA, 1056 bp, BradyrhizobiumColbertium
atggaatccgtacaactcgtcatcctcttcggcatcgttataggcctgatgtacggcgccgtcggtctgctcagcggcttctgcctgatgagcagcatgcggggatggttggcggagggggatgggcggcttgtgcggagctacgcgctggcgattgcggttgcgatcgccgccagccagttcctcgccggcggcggcatggtcgacctcaacaagtcgatctacctgcagacttcgttttcaccggcagtactgttcctgggcggcctgctgttcggctacggcatggtgctgtcgaatggctgcggctcgcgggcgctggtcctgctcggccgcggcaatctccgctctttcgtcgtcgtgatcgttctcgccatcgccgcgcagatgacgctgaagggcctgatcgcgccggcgcgtatcgcgctggtgcaagcctcgcaaacgaccgtcagcgcaaattcgctgccctccgtgctggtgatgctcggtctctcggaatcactttcgcgcgcgcttgccgccgccgcgaccgttgtcgcgctgatcctgttcgctttcgctcacccggcgtttcgacgctcgccagggcagatcgcagcaggtgtcattgtgggcctgctcgtcgccggcggctggtacgtcaccggctacctcggcgctgacgatttcaaccccgtcccggtcacctccctcaccttcatcgcgccgatcgccgataccctgcaatacgccatgctttcgaccggcctgacgctcaacttcggcgtcgcgacggttgtcggcgtcttcggcggtagcttcgcgacggcgctcgcaacgggccgcttcaagctcgaaggctattcctcgccgcgccacatggtgcgctcggggagcggcgcggcgctgatgggcatcggcggcgtgatggcgttcggctgctcgatcgggcagggcctcaccggcctttcgacgctcgcgctggggtcattcatcgcgttcgccggcatcctgcttggcacgacggcaggcctgcgcggtgcactgcgggctcaccccctcgcagtggcctga

SEQ ID NO: 4897 - DNA, 966 bp, BradyrhizobiumColbertium
gtgcgcctcaacgccaaggctgagaacgcggcagcgctctcgccggtggtcgagcgcaggacgctcacgcgcggcccgtgcgacctgctaatcgaggtcaaagccgcagccgtcaatccatccgacgtcaaggccgcgaccgggctgatgccctatgccgtgttcccgcgcacaccgggccgcgactatgccggcgtggtgatcgacgggccggccggaacagtcggtcgcgaggtgttcggctcgtccggcgatctcggcatccgtcgtgacggcacgcatgcgagtcatctcgtggtcgaagccgatgcggtcgttgagaagcccatgtccgtgtcctgggaagaggccgccgggatcggcgtgccgtttgtcaccgcgatggaaggctttcgccgcgcaggcgtgccgaacagcggcgagaccgtgctggtgatgggtgtcaacggcaaggtcggccaggccgcagtgcagatcgcgacctggaagggtgcgcgcgtcatcggcgtggtgcgcaaggcggaagcctatgaaggccatgccaatgcggccgtcgaggtgatcgacgcctccacgaccgacgtggccccgcgcgtgcgcgaattgactggcgggaagggcgccgacatcgtcttcaacaccgtcggtgatccctattttcaggctgcgcacaaatcgcttgggcttcgtggccgccagattctgatcgccgcgatcgaccgcatcgtgcagttcaacatcctcgaattctatcgcggccagcacacctatgtcggcatcgacacgctggggctgtcgtcggccgccacaggcgccgtgctgcgcgacctcggccccggctttgcgggtggccatctgaagccgttcccgattaacgcgaatgccgtctatccgctcgagagcgcgaaggaggcgtacgttgcagtcgcgggctcgtcgcgggaccgtgtgatcctgaagccgtaa

SEQ ID NO: 4898 - DNA, 1332 bp, BradyrhizobiumColbertium
atggctctgacgaggctcaaggaaggtgccactacctatagcgccgagatggatgcatatgagcgcgcctcgcgcgacgagatcatggcgctgcagaagcagcggctggcttggtcgctgaagcacgcctacgacaacgtcacgcattatcgcaacgccttcgacaaggccggtgtgcatccgtccgacttccgcgaactgtcggatctcgcgaaatttccgttcaccgcgaagacggacctgcgcgacaactatcctttcgacatgttcgccgtgccgcgcgaaaagctggtgcgcgtgcatgcctcgtcaggcacgacgggcaagccgatcgtcgtgggttacacccagcgtgatatcgacacatggtcggaagtcatggcgcgctcgatccgcgccgccggcgggcgcaccgggatgatcatccacaacgcctacggctacgggctcttcaccggcggcttgggggtgcattacggcgccgagaagctcggctgcaccgtggtgccgatctccggcggcatgaccgagcgacaggtgcagctcatcaacgacttccgccctgacatcatcacggtgacgccgagctacatgcttgcgatcctcgacgagttcaagcgccagaagctcgacccgcgccagtgctcgctcaaggtcggcatcttcggggccgagccctggaccaatgcgatgcgcggcgagatcgaggacgccttcgacatggacgcgaccgacatctacggtctctccgaggtgatcgggcccggcgtcgcgcaggaatgcatcgagaccaaggacggcctgcacatctgggaggaccatttctacccggaggtgatcgaccccgaatccggcgcggtgctgccggatggagagaagggcgaggtggtgttcacctcactcacaaaggaagcctttccagtgatccgctatcgcacccgcgacttgacgcggcttttgcccggcacggcgcggcccgggatgcggcggatggagaaggtgaccggccgctccgacgacatgatcatcctgcgcggcgtcaacctgtttccgacccagatcgaggaagtgttgcttgcgaccgactggtgcggtgggcacttcatcctggaactgacccgcgaaggccgcatggacgaactgaccatcatcgcggaggcgcggcccgaaagctgggacggccggggtcttctcgaccatgccgatcggatctcgacccacatcaagaacacgattgggatcagctcgaaggtgcaggtggttgcgcccgccactctggaacgctcgctcggcaaggccaagcggctctacgacaagcggccgaaggattga

SEQ ID NO: 4899 - DNA, 450 bp, BradyrhizobiumColbertium
gtgaacgtcaaagccgccctgtcacccgaggatattgcccgcgcttgcgctgacgccatgtgggcagaggacgatgcctcgaagggactcggcatggagatcgtcgagatcggcccgggctttgcaacgctcgcgatgacggtgcggccggatatggtcaacggccaacgcatcgcccatggcggtttcatcttcacgctcgccgattccgcctttgcgtttgcctgcaactctcacaatgagcgcgtcgtggcagcgcaggggcagatcactttcatcaagccgggcaggctggacgaccggctcattgcgaacgcgcgggaggtcacccgcggcggccgctccggcatctatgacgtgcgcgtgaccgtgggcgacactgtcatagcggaattccgcggacattcgcgcgtcgttcccggcacgtggctgccgacgcaagatcagtaa

SEQ ID NO: 4900 - DNA, 1083 bp, BradyrhizobiumColbertium
atgtccgcagctgcaccgcgctttcaccgtctggccgtaaacgatctccgccgcgaggcatcgaacgccatttcgatgaccttcgccatcccggacgaacttgccgacgactacgccttcacgcccggccagtaccttacgctccgcacctcgctcgacggcgaggaggtgcgtcgctcctattcgatctgctccggccctgacgacggtgagatccgtatcgcggtgaagaaggtcgatgggggtgcattttcgagctgggcggcggacgaactgaagtgcggcgaccagctcgacgtaatgacgccgaccggccgcttcggcgtggttcccccggcagaacgcgcgcgcatccatgtcggttttgccgcaggatccggcatcacgccgatcctgtcgatcgtgaagggcgtgctggcgcgcgagccggacagccgattcttcctgttctacggcaaccgcaccaccgataacatcatgttcctcgaagcgctcgaggagctgaaggaccgcttcatcgatcgtctctcgatcttccacgtcatctccggcgaggagcaggacatcccgatcctgcatggccggctcgacggggaaaaggtgagggtgctgctgcgttcgctggtgccggcggaggatgtcgatcacgtcttcatttgcggcccccttggcatgagtgaggagatcgaggcgacctgccgcaatctcggcatcacggatgaacgcatccacgtcgagcgcttcgtctcggaattcggcggcaagccgcggccgaagaaggccgttgctcccgatgcgccgccgaaggcgatcgcttccctcatcatcgacggcaagcatcgcgacgtacccgttgccgaggacgaagccatcctcgatgcagcgctccgcgccggtctcgacctgcccttcgcctgcaagggcgggatgtgctcgacctgccgcgccaagctggtggagggggaggcgctgatggacctcaactattctctggaaccatgggagctgaaggccggcttcgtcctgacctgccaggcgaaaccatcgtccgagcgggtcgtggtcgattatgatcatgtctga

SEQ ID NO: 4901 - DNA, 504 bp, BradyrhizobiumColbertium
atggtgacgatgctggagcgcgacagcgagctgcgccggcgggcttgggacgctgcggcaagcgtcgtagaccccgaaattccggtgctgaccatcgccgatcttggcgtactgcgcgatgtgttattggacggcgatcgtgtcgaggtcgcgatcactccgacgtattcgggctgcccggccatgaacatgattgcgctcgaaatcgagctcgcgctggagcgcgccggcttccgtcacccaaaggtgcgcaccgtgctgtcgccggcctggacgaccgactggatgagcgaggacggccgccgcaagctgcgcgcctacggcatcgcgccgccgcaagcatcgagctcccgccgtgcgctgttcggcgcgcaggcggtggcgtgcccgcagtgtggctcagaccagaccgaactgctgtccgaattcggatccacctcctgcaaggcgctctggcgctgcaagtcctgtcgtgaacccttcgactatttcaagtgtcattga

SEQ ID NO: 4902 - DNA, 777 bp, BradyrhizobiumColbertium
atggcggtcgccaacatccaggtctccgaaacgccgctggtgctctacgtgctgcgccgcgccgacgatgcgctgatcctcggtcaccggctctccgaatggtgcgggcacgcgccaatgctggaagaggacatggcgctctccaacatcgcgctcgacctgatcggccaggcgcgggagctgtatagctacgccgccaaggtcgaaggcaaggacaacgacgaggacaagctcgcatacttgcgcgacgtacggcagtatcgcaatctgctgctggtcgagcagccgaatggcgatttcgcgcagacgctggtgcggcagctgttctactccggctttgccgacctctattggcgtgcgatgatgggctcgggcgacgcgacgctggcggcgatcgccgcgaagtcggagaaagagagcgcatatcacctgcgccacgcctcggaatggatcatccggctcggcgacggcactgaggagagccatcgacgggcacaagccgcgatcgatcagctctgggcgttcaccggcgagatgtttgcggtcgacgacggcgagcggcacctgatcgatgccggcgtcgccatagatccggcgagcttgcgcggtcgctggtttgcggcgctgtccgacgtcgtcggcgaagccacgctcgaactgccccagaacgactggatgcagcaaggtggtcggtccggccggcacagcgagcatctcggccatctcctgtccgaattgcaatcgatgcagcgcaccttcccggggctgacatggtga

SEQ ID NO: 4903 - DNA, 288 bp, BradyrhizobiumColbertium
atggccacgccgaacacgccgctgtgggaagtcttcattcgcagccgcaatgggcttgcgcacaagcatgtgggatcgctgcatgccagcgacaccaccatggccctgcaggccgctcgcgacatctacacccgccgcggcgaaggcctgtcgatctgggtcgtgccttcgagcgcgatcaccgcgagcgatcctgccgagaagggcatgatgttcgagccggcggaatcgaagatctaccggcatccgacgttctacgaggtgccggaagaagtggggcacatgtaa

SEQ ID NO: 4904 - DNA, 993 bp, BradyrhizobiumColbertium
atgtatacccaggcgctcaacacggccgagagcgacgatcgcgctcttgaggacgccgccaaggctgcgcagttccaggcccggatcgacgccgaggaacgcatcgagccgaacgactggatgccggcggcctatcgcaaaaccctcacccggcagatctcccagcacgcacactccgaaatcgtaggcatgctgccagagggcaactggatcacgcgtgcgccgacgctgcgccgcaaggccgcgctgctcgccaaggttcaggacgagtgtggccacgggctttatctttacgccgctgccgagacgctaggcgcttcgcgcgaagagctggttgacgccatgcttgcgggcaaggccaagtattcctcgatcttcaattacccgacgctgacctgggccgacatcggcaccatcggctggcttgtcgacggcgcggcgatcatgaaccagatcccgctgtgccgctgctcctacggcccctatgcgcgcgccatgatccgcgtttgcaaggaggagtccttccatcagcgccagggctacgagatcatgctgacgttgtgccgcggctcggacgagcagaaggcgatggcgcaggacgcgctgaaccggtggtggtggccagtgctgatgatgttcggcccgcccgatgccgcgagccagcacagtgacacctcgacgagatggaagatcaagcgcttctccaacgacgagctgcgccagaagttcgtcgatgccaccgtgccgcaggcgcaatatctcggtctcagcattcccgatccgggcatgattcaggatgccgacgggcactggcgctacagccagatcgattggaccgagttcaagcaggtgcttgcgggaaacggcccgtgcaaccgcgaccgcatggccgcgcgccgcaaggcgcatgaggatggcgcctgggtgcgtgaggcagccgccgcctatgccgccaagcgtgggcagcgtcagagcgcgcaagctgccgaatag

SEQ ID NO: 4905 - DNA, 864 bp, BradyrhizobiumColbertium
atggcgcatccgctctcccgcatcatcgaccagctcaagcgcgagccgtcgcgcaccggatccatcgtcatcaccgtgttcggggatgccatcgtgccgcgcggtggttcggtgtggctcggcacgctgctggagttcttcgagggtctcgacatcgacagcggtgtcgtgcgtaccgcgatgtcgcgcctcgcggccgatggctggctgacgcgcgaaaaggtcggtcgcaacagtttttaccgtctcgccgagaaaggccgccagacgttcgaggcggcgacgcgtcacatctatgatccgccgccgtctgagtggaccggccgcttcgagttgctgctgatcggcaatggtgaggatcgcgacgcctcgcgcgaggcactccgcaacgccgggttcggaagtccgctgccgggcgtctgggtcgcaccgtcaggtgtgctggtgccggacgaagcggcgggggccatccgtctcgaagtttcggctgaagatgacagcggccgccgcctgctgagcgcaagctggccgctgcaacgcaccgcggacgcctatctcaaattcatgaagacgttcaaacctctgcgcgccgcgctcgcgcgcggtacggacttgtcggagcccgacgcctttacggcgcggatcctgctgatccactactatcgccgagtcgtactgcgcgacccgctgctgccggagagcctgctgccggcggattggccgggccgggccgcccgtgaactctgcggcgagatctatcgcgggctccttgctccatcggagcaatggctcgacggtcatggaaccaacgagaaggggccgcttccggcggcccggaagcttctggaacggaggtttgcctga

SEQ ID NO: 4906 - DNA, 726 bp, BradyrhizobiumColbertium
atgtttctggaagggcgcgcgatccacgagttcggtgccttcctcagcgcgctgccgctgctgagtcttgcgccgagcggcgatgggcaccccgtgctggtgctgccgggcctcgtcgcctccgatgggtccacgcgcgcgctgcgcacgtttctgaccagcaagggatacgcggtgagcggttggggacagggccgcaactacggcctccgtccgggcgttcaggacgcgatggtcgatctggtgcacgagctcagcgacacgcatggccgcaagatcagcctggtcggctggagcctcggcggcctctatgctcgccagctcgcgaagatggcgcccgatcgcgtgcgccaggtcatcacgctcgggagcccctttgccggtcatccgcgctcgacaaatgcctggcgcgtctacgaatgggcgagcggacggaagtccgacgaggtcgatccgcagttcggcggcgagctcgccgtgccgccgccggtgccgaccaccgccatcttcagccgcactgacggcgtctgcgcttggcagggctgcatggagaaggcgggggcgcagaccgagagcatcgaggtcgagagcagccattgcggcatgggccatcatcccgccgtcgtctacgccgtggccgaccggctcgcacagaaggaaggccagtggcggccgttcgatcgcagcggctggcgcagcctcgcctatcctgacccgcacagatag

SEQ ID NO: 4907 - DNA, 159 bp, BradyrhizobiumColbertium
gtggatcgcgcgcccttccagaaacatcagggtacgggacggcggacgcagcggctgggcggaagcggtcatcaatggtcccttgaaagaattgctggaaggatcaccgggtggaaaaaccggaaaaggcgaatgaattccaactccccggcttcttga

SEQ ID NO: 4908 - DNA, 1287 bp, BradyrhizobiumColbertium
atgatacaacctgccacctcttccttcgtcactcccggcgatgccgaacgtgcagccgagcttcgccgtgtgaaagcgctggcgacgctggtgctggtctcgacgttggcattgttcgtggtcgcaaagtggctgctgcccgtgcatcccgtgttcggcttcatcgcagccttcgcggaagccgcgaccatcggcggcctcgccgactggtatgccgtggtcgcgctgttcaagcgaccgctcggactgcctatcccccacactgcgatcattcagagtaatcaggcccgtatcgccgacaagctcggcgaattcatcgaggtgcatttcctggaagccggaccggttgaagccaaactgaaagaaatcgatttcggctccttcgtcgcggactggctacgcgaccgcaagtgcagcgatgatctggcgcgtttcgcgttgcgcctactgccggaggccttctccgcgaccgaaagctccggcctgatgacattcatcatccgccgcatgtcatcgcagctgcaggccatcgatcttgcgccgctcgccgccggcacgctacgcggcttcgtcgcagagagacgacatcagatcctgttcgatgatctcctgcgcgtgatgcacgagacgctgaatcagaaagacacgatggcgatgatccgcgagaaagtgcgcgcggaactgccgaccttgctgcggctgtatcgcgccgacaagtttctggtgaacaagatcgtggcgtccgcgacggcgttcttcaatgaggtgcgcagcgatcccgagcatccgtttcgcggtgagtttgatcgcatggtgctaggcttcgtcgaccggctcggtaccgatcaggcctatatcgaccgcatcgacggcttaaagcgcgatctgctcgcacgtcccgagcttgccgatctcgcccgcaccatctgggccaacacgcgttcgttcatcgagcgtagcgcaagcggcgagacgcaggtgctgcaacatcatctcgccggcatgttcgtcgcggcgggtgaggcgctcgccggcgacgccgaactgcgcggcgagatcaacaagggcctggtgacggtgctgcgcagctttgtcgccgaccagaagaggggtgtctccagcttcatctccgatcaggtcaaggcttggaacatgaagcagctgatttcgctgatcgaaatcaatatcggccgcgatctgcagtacatccgcttcaacggttcgctgatcggcggcctcgcagggcttgcgctgtactccgtagaatccctgcttcgatggttgtga

SEQ ID NO: 4909 - DNA, 456 bp, BradyrhizobiumColbertium
atgaccaccgaaaccaacgccgctttcgacagcttcaaggacgctttcaagaacatccagaacctggaagttcccgaggccgcccgcgagttcgtcaagaagaccgccaacactgcgaaggaccgtgccgccgaggtgttcgcaggctccgagcgcgtgaccgctgccgtcgagaacgcggtaaccgagtccgtcactgaagccggcaagatcagccgcaacatccagcaggcgatctacgaggacgcagaggcattcttctcgggcatcgacaagctcgcgtctgccaagtcgttcagcgaggccgtcgagatccagtcgggtctgctccgcgcccgcggcgaagcgttcgtctcgcgcgccaaggcgaccgccgactatttcggccagctcgctgccaacggtgcgaagtccgctcaggacaatttcgccaaggtctacaacaagaccgcctga

SEQ ID NO: 4910 - DNA, 594 bp, BradyrhizobiumColbertium
atgagtgaacagcgttcctatccgcgtcacgtcaagaccgatgccggcgatgtcgagatccgcctgatgtcgcctgcagacgaggccgcggtgctcgctttcggcaagagcctgccgacccacgatttgctgttcctgccgcgcaacatcagcgagcccaaggtgctgtcggcctgggtcaaggagatcgagcgcggcgcgattcaaagcctgctcgcggtgagagagggcagggtcgtcggttgcggcacactggtgcgcgatccccactcctggtcgccccacgtcggtgagatccgcatggtggtttcgcccgaggtccgcgggaaaggggtggggaaggcgctatcgcaggagacatttgcgctcgcttttggggctggcctggaaaagttgtcggtccagatgacggtcgaccaacaggcggcgatcgctctcttcgaaagtctcggcttcaaggccgaggcgttgctgcgcgatcatgtccgagatgtcggcggcaagacccacgacatcgtcgtgctgggccacaacatcgcacaggtccaggctcaactggaggcctacgggctgccaggcgctgtccagcaatag

SEQ ID NO: 4911 - DNA, 1083 bp, BradyrhizobiumColbertium
atgaatgcgacagcaggacttgatttcgccgcgatacccgagcgcatccagtctgaagtgcagcgcgcaatcatgcgcagtatcaaaggcgtcgaatacttctcgacgtccggccctacgctcggctcgacgccaaaggacgtgctgcattcgcgcggcacaatgagcctgtatcactaccggccgatgtcggacgaaatttaccgcgtgccggtcctgattgtgatggccaccaccaatcgaggttacattctcgacctcgtgccagggcaaagcttcatcgagttcctgctcaggcgcggctacgacgtctacatgctggactggagcgccccgcggccggaggagaagagcctgcgcatggacgactatgtcctcgacttcatcccggattgcgtccgccgcgtgcaggccgattccggcgagcaggacgtctccgtcatcggctattgcttcggcggcgtactgtcgctgctctacggctcgatccacaagggcgggccgatgaagaacctcatctgcttcaccacgccgatcgacttccgcgagatgaagctgttctcgaacttctccgaccgccgctatttcgacgtcgaccgtctcgttgacagcgtcggcaacgtgccgccggaaatgatcctgtcctcgttcgagatgctgcgcccggcgtcgcgcaccgcgagtcagattcagctgtgggagaacatctggaacgacgagttcgtcaagtcgtaccgtatgttcgaccgctgggcgaccgacacgctgccgctcgccggggagtatttccgcgcgatcaccaaggacctgatgtgggacaacaagctgttcaacgacaccatgtcggtcggcggccgcgcggcgaagctggaggacatcaaggtgccgatcctgcacgcggtcgcggagcacgatcacatcgtgccgtatgaagccgcaaagcacctgatcgccaagatcggctcgacggacaaggaagaggtgatcctgaagggcggtcacgtctctctggtggcgggcgccaacgcagtgaagcggctgtggccgaaactggattcctggctggggaagagatcgacatga

SEQ ID NO: 4912 - DNA, 381 bp, BradyrhizobiumColbertium
atgaccgacaagatcaccgatccagtcgccttgtggcagaagatggttggcgagatggagaagggtttcaactccttcgccaccaaggcgatggagacgccagaattctcgcaaaccgtgaaccgcgccggcggggttgctgcaggtgctcagaagcagttcggcgatctcatggagaagtacctgctctccatgaacctgccgagccgcgagcagatgaccggcatcgcggagcggctccagtcgatcgaaggccaactcggcgagatcaagtcgatgataagccagatgtcggccaattcgggcgcgcagcaaccaggcgccgcgccacggccgccgcgcaccaaacgtccgccgtccgaaggcggagggcgggaatga

SEQ ID NO: 4913 - DNA, 915 bp, BradyrhizobiumColbertium
gtgaccgctcatcagccgccccagaccgtccgcgccaacggaatcgacatctgctacgagattttcggcaacgacaatgccgagccattgctgctgatcatggggctcggggcgcagatgatccactgggacgatgcgttctgcgagcagcttgccgcgcgcggcttccgcgtgatccgcttcgacaatcgcgacatcggcaagtcgagccatctcacgggcggcaaacggctgacgccgctcgaactgctgaagctgcgcctcttcaggatacccgtggccgcgacatacaagctgatcgacatggcgaaggacacaatcggattgatggacgcgctcggcatcaagtcggcgcacctcgtcggggcctccatgggcggcatgatcgcgcaggaggtgacactgtcgtttccgcaccgcgtacgctcgctgacctcgatcatgtcgaccacgggtaatccgcgcgtgccgccgccgacacgcgaggccgccgcgatgctgatggcgccgccgccgcgcagcaaggaggagttcattgtccgcttcggccagacctggaaagtgctgcgcgccgggcattttccggaagaggaagcgctagacccgggccgcgccgagcgcgtgttcgcgcgtggactcaatccggccggcgtcggccgccagctccgcgccgtgctggcgtccgggagccggaaggagcggctgcacgcggtgaaggcaccgacattggtcattcacggcaccgtcgatccactggtccgccccgaaggcggcaaggacaccgcagcgtcaatcccgaacgcgaagctgctgatgatcgaaggcatgggccatgccttgccgatgcggttctggcctcagatcatcgacgccatcgacgagcacgcgcatagcgctgcggcccaggctgcctag

SEQ ID NO: 4914 - DNA, 675 bp, BradyrhizobiumColbertium
atgattccctgggaaaagatcgataccgccaaaatccccggctcggacgaagagctccgcctgatgcggcggggcaaggaattttcgatcaagctcggcaccaacgagctgatgaacaatcgcctttcgggctccgaagctgcgcttgcgacgcttgcggcgaagcagatagagcacacagcgaagcctgtcgttctcatcgggggcctcggcatgggctttacgctgcgcgcggcgcttgccgtgctcggatcaaaggccaggatcgtggtctccgagctcgtgccggcggtggtgagctgggcgcgaggcccgatggcggaagtcttcggcgacagcctcgatgatcccagggtgaccatccgcgagatcgacgtggccgagatcatccgggcgaagcggtctgccttcgatgccattctcctcgacgtcgacaacgggccggaagggttgacccggaagggtaacgacgcgctctacagtgcgagcgggttggggacggcaaagaatgcgttgcggccgggcggtgtgctcgctgtctggtcttcgggacccaacccggcgttcaccaggcgtcttcggactgccggctttgcggtgaacgaggtcaatgtccgcgccaccggacgaggcggcggtgcgcgccacgtgatctggatcgcaaagaagagctag

SEQ ID NO: 4915 - DNA, 3237 bp, BradyrhizobiumColbertium
atgtcatccacgaaccgtctggaccctattccgcatccgccgaccaagccggtggtcggcaacatgctgtcgctggattcggctgctcccgtgcagcacctgacgcggctcgccaaggagctcggcccgatcttctggctcgacatgatgggctcgccgatcgtggtcgtctccggccacgacctcgtcgatgagctctccgacgaaaagcgcttcgacaagacagtgcgcggcgcgttgcggcgcgtgcgcgcggtcgggggcgacggcctgttcacggccgataccaaggagccgaactggagcaaggcgcacaacatcctgctccagcccttcggcaaccgcgccatgcagtcctaccacggaagcatggtcgacattgccgagcagctcgtcaacaagtgggcacggctcaacgccgacgacgagatcgacgtggtccacgacatgacggcgctgacgcttgatacgatcggcctgtgcggcttcgactaccgtttcaactcgttctatcggcgcgactaccatcccttcgtcgaatcgttggtgcgctcgctcgaaaccatcatgatgacgcgcggcctgccgttcgagcagctctggatgcagaagcgccgcaagacgctcgccgaagacgtcgccttcatgaacaagatggtcgacgagatcatcgccgagcgccgcaagagctcggacgggatcgacgacaagaaggacatgctggctgcgatgatgaccggcgtcgaccgtgcgaccggcgagcagctcgacgacgtcaacatccgctaccagatcaatacgttcctgatcgcggggcacgagaccaccagcggcctgctgtcctacacgctctatgcactgctcaagcatccggacattctcaagaaggcctatgacgaggtcgatcgcgtctttggcccggatgtcaatgcgaagccctcctaccagcaggtaacgcagctcacctacatcacgcagatcctgaaagaggcgctgcggctgtggcccccggcgccggcctacggcatctcgccgctccaggacgagactatcggcggcggcaagtacaagctcaggaaaggcacgttcaccaccattctggtgactgcgctgcaccgcgatcccccggtatggggaccgaacccggatgcgttcgatcccgaaaacttcagccgcgaggcggaagccaagcggccgatcaatgcctggaagccgttcggcaacggccagcgcgcctgcattgggcgtggctttgctatgcatgaagctgcactcgcactcggcatgatccttcagcgcttcaagctgattgatcatcagcgctaccagatgcacctgaaagagacgctgacgatcaagccggaaggcttcaagatcaaggtgcgtccgcgcgccgatcgcgagcgcggcgcctatggggggcccgccgcggttgcgtcgtcgacgccaaaagcgcagcgccaagccaccacgcggcctggccacaacacgccgatgctggtgctctacggctccaatctcggcactgccgaggaactcgcgacgcgcatggcagacctcgccgagatcaacggctttgccgtgcatctcgggcctctcgatgattacgtcggcaagctgccgcaagagggcggcgtgctgatcatctgcgcctcctataacggcgcgccgcccgataatgcgacacaattcgtcaagtggcttggcagcgacttgtcgaaggatgcctttgctggcgtgcgctacgccgtcttcggttgcggcaacagcgactgggctgccacctatcagtcggtaccgcgcttcatcgatgggcaattgtcggcccatggtgcgcgcgcggtgtatccgcgcggcgagggcgacgcacgcagcgatctcgacgggcagttccagaaatggtttccggcggcggccgaggtcgcaaccaaggaattcggcatcgactggaatttcacccgcaccgccgaggacgatccgctctacgcgatcgagcccgttgcagtgaccgccgtcaacaccatcgtcgctcagggcggcgcggtggcgatgaaggtgctggtcaacgacgagcttcagaacaagagcgggcccaatccgtcggaacgctcgacgcgccacatcgaggtggaattgccatccactgtcacctaccgcgtcggagaccatctgagcgtcgttccgcgcaacgatccgaccttggtggactcgattgcccgccgcttcggcttcctgccggcggaccagatcaggttgcatgtcgcggaaggccgccgtgcgcaactgccggtcggcgaggccgtgtcggtcggtcgtctgctcagcgagttcgtcgagctacagcaggtcgcgacgcgcaagcagatccagatcatggcggagcacacccgatgccccgtcaccaagccgaagctgttggcctttgttggcgaggaagccgagccgctggagcgctaccgcagcgaagttctggccaggcgcaaatcggtgttcgacctcctgctcgaatatccagcctgcgaattgccgtttcacgtctatctggaaatgctctcgctgctggcgccgcggtactactccatctcctcctcgccgtcggtcgatcccgcgcgttgcagcgtcacggtcggtgtggtcgaagggccggccgcgtcggggcgcggtatctacaagggcatctgctcgaattatctcgccaaccgccgtgcgggcgatgtgatctacgcgaccgtacgcgagaccaaggcgggcttccggctgccggacgattcgtccgtgccgatcatcatgatcggaccgggcactggccttgcgccgttccgcggcttcctacaggagcgcgccgcgcgcaaggcaaggggggatgtcctcgggccggccatgctgttcttcggctgccgccatcccgatcaggattttctctacgccgaggagctgaaggcgctcgcggcggccggcatcaccgagctgttcacggcgttctcgcgcgcggacggaccgaagagctatgtgcagcatgtgctcgctacgcagaaggagaaggtctggtcgctgatccagcaaggtgcgatcatctatgtctgtggcgacggcggcaagatggagcccggcgtgaaggcggcgctggtcgccatccatcgcgagaaaagcggcagcgacgccgctgccggtgcacgctggatcgacgagatgggcgcgaagaaccggtatgtgctcgacgtctgggcaggagggtag

SEQ ID NO: 4916 - DNA, 996 bp, BradyrhizobiumColbertium
atgattgaaatgccgccgctcaagttcgcgcagacgaacggaatccgcatgggctattacgaggcagggccagccgacgacaagccgccgatcgtgctgtgccatggttggcctgagctcgccttttcctggcgtcaccagatcaaggcactgagtgaggcaggcctccgtgtgatcgcaccggaccagcgcggctatggcgccaccgaccgccccgagccggtcgaagcctatgacatggagcatctgaccggcgatctcgtcgggctgctcgatcatctcgaaatcgaaaaggcgatcttcgtcggccacgactggggcggctttgtcgtctggcagatgccgctgcggcatcccacgcgggtggccggcgttgtcggcgtcaataccccgcactgggatcgcgcgccgatggaccccatcgcgctgtttcgccagcgcttcggtgaccagatgtacatcgtccagttccaggacccggcgcgcgagccggacaggatcttcggcagccgggtcgagcagaccttcgacgcgttcatgcgcaagccgctgccgcgaccggcggccaagccggacgagccgccggtcgccggggtcggagcttcgtcgaagaccaacctggcgtttccccagatgatcgccgcctacgatgccaaggttgatccgcgcacgccgatcctgtcggcggaggagaagaaggtgttcgtcgacaccttcacgaagaccggcttcaccggcggcatcaactggtatcgcaatttcacccgcaactgggagcggtcgaaggggctggaccatcacatccacgtgccctcactgatgatcatggccgaaaacgatgcggtgctgccgccctctgcggccgacggcatggagaatctgatcggcgatctcgaaaagtatctggtgaaggacagcggccattggacgcagcaggagaagccggaggaggtcagcgccaagttgatcgaatggcgtagaaggcgatttggctag

SEQ ID NO: 4917 - DNA, 1551 bp, BradyrhizobiumColbertium
atggctgacgggaagaagctgtcgtcgctggacgcgtcgtttctctatctggaaacccctgagatgccgatgcatgtcggcagcatggcgatctttcgtctgccagacgactacaaaggtgacttcttcgaagatttcaaggcgatgatcgtctcacgcctgcatatcgcgccgatcctcaaggcgcggctggagaaggcgccgctcgacatcgatcatccctcctgggtcgaggacgatcagttcgacatcgaccgtcacatcttccgcgccagcctgccgcagccgcgcgaccgcgccacgctggagcgcatcgtcggctggatgcatgccaagctgttgaaccgcgcccgcccgctctgggagttctacgtgttcgagggcatgaaggacaacgaggtcgggctctattccaagatgcaccatgccgccatcgacggcggcgccggcgcggcgctgaccaacatgatctacgatatctcgccgatcccgcgcaaggtcgctccgccgtcggccggcagcaagccgggacaggagccgcgcgacatcgccgcgaacctcctggattcatatcagcagctgttcagccagccgctcgatgcctcgcaagcggcgaagaacctgcagctgccgcgaaccggcaagagcgacatcggctcgatcctgttcgacaacgcgatgtaccagatcgagagcgcggtgcgcttcgccggcaacatcccgaccgtgctcaagagcatgtccgacgtgctgggcaaggtcgccgatcccaagtcgcgcgagagtctcgccagcatggtgtcgcccccgaccatgctcaacaagaccatctcgtcggaacgaagcttcgccggtgtgtcgatctcgctatctcgctccaaggcgctggcgaagctcgcgggcggcaagctcaatgacgtcgtgctggcgctcgcctccggcgtcgtccgccgctacctcctgcaacacggcacgctgccggcgaaatcgctgacggcagcggtcccgatctcgctgcgtgaggagggcaacaccgaggccaacaaccaggtgttcggcatgatctgctcgattgcgaccaacatcgaggatcccaaggcgcggttggaggcgatcatcgcgcaatcgacgaagtccaaggagatgtcgcatcccttgcgtgcgctgatgccgcaggtctccaacatctcgatgctgggcgcgccgatcatggtgcagatcctggccttgctctacagccgctcgaatctgtcggacgtgctgccgccggccgccaacatcaccgtatccaacgtgccggggccgcggcagacgctctatgccgcgggcgccgagctgctgcacatcttcccggtgtcgatctcgacgcacgggcaggcgctcaacatcaccgtgcagagctatcgcgaccaacttgacttcggcttcatcgtcggggccaacatcattccgcatgtacaagtgatgtgcgatatgctgccggaagagttcgccgccctggagacggcctacgcgccaccggcggcggagatcaagggcgccgccgaatag

SEQ ID NO: 4918 - DNA, 801 bp, BradyrhizobiumColbertium
gtgtcttccggacggaacggggcgccggagtctggccggcttcgtgcgccgggcctcggcctgctgctggccgaagcccgtggactgttcgagctgaacgcgagcctcttgctttcgccgctcctgatgcgagccccccgaggggacggccatcctgtgctggcgctgccgggcttcctcgccagcgatctctcgatggcgccgatgcgacgttatctccgagagctcggctatgaggcacatgcctggcggatgggccgcaacctcggtggtttggcgcggatgcgggattcgctgcgcgcgcttctcacccagacccatgccgcgagcgggcgcaaggtcagcctggtcgggtggagcctcggcggcgtctttgcccgcgacctcgcgctttgggcccccgacatggtccgctacgtcattacacttggcagcccctttgccaacgacgtgagggcaacgaacgccacctggctctacgagctactgtccggcgagcgcgtagaggattttgcggaagcgcgcgaagcgatcgcgggcgatctgccggtgcccacaacgtcgatctattcgcgcgccgacggtgtcgtgaactggcggacctgcctgcttcgtgcctccgagcgtgcggagaacatcgaggtgcactgggcgagccatatcgggctcggtgtgaaccccgcagcgctctgggccgtcgcggaccggctggcgcagccggaagggcaattccggccattcgaccgggcggggccgtttgccattgcatatgccccgccggaacaggcagtattggcctga

SEQ ID NO: 4919 - DNA, 258 bp, BradyrhizobiumColbertium
atgaaggtaaatatcgaaatcgactgcacccccctcgaagctcgccagttcttcggcttgcctgacgtggcgccgatgcagacggcggtgatggacaagctgcagcagcaggttctgactaacatcgagaaggtctcgccggagtcgctgctccagagctggttcaccttcgatccgaaaatgaccgagagatttcaggacatgttcgccgcgatggccggcctcggcggcacacgcagcgccgacaagaaaaaatag

SEQ ID NO: 4920 - DNA, 1761 bp, BradyrhizobiumColbertium
atgccaggccacgcggtgaacattgctgcacagcggcgcaactttggcgcgttccttgctggaatggcgcttgcacgtgtcgagaactctgggcaacatgcattgaaaagccggccgaacaaaccaaaaatcaccggcacggcagtgtggagagggtcaagaatgtcggtaggtcgaactctgtatgcggcgacgttcgccggagcgcttgcgtttttgtcggccgcgcctgcgttgagccagacgctgcgctatgccaaccagggcgacctgaagtcgctcgatccctatacccttaacgaaagcaccacccacgcccatctcggtcacgtctaccaaggccttactgcgcgcgacaaggacctcaagatcattccggcgctggcggagcgctgggaaacaccggaaccaacccgctggcgcttctatttgcgcaagggtgtgaaattccacaacggcaatcccttcactgcagacgacgtgctgttctccgccgaccgcgtccgcaagaagggctccaatatgcagacccgccttgcggccgacgtcaaggtcgtcaaggtcgacgactacacggtcgatttcgtcctcccctcgcccaatcccatcctgcatagctcgtgggatgtctggtacatcatgaacaagaaatgggccgaggaaaacaacgtcgtcgatccgacgccggttgcggcgactaccccaagctacgcctcgctccacgagaatggcaccggtccgttcatcgtcgaaagccatcagcccggcgtgaagaccgtcttcaaggccaatcccaactattggggcaaggtcgaaggaaacttgaaggagatcatcttcaccccgatcgcttcggacgcaacccgcgtcgccgcgctgctctcgggcgaagtcgacgtcatcgagccggtaccggtccaggacatcgcccggatcgacagcagtccgaatgcccaggtcctgaaggggccggagctgcgcaccatcttcatcgggttcgaccagacccgcgacgaactgctctattccaatatcaagggcaagaacccgttcaaggacgtccgcgtccgcgaggccttctacaaggcgatcgatatcgagctgatcaagacgcgcgtgatgcgcggactgtcgacgccgtccgccctgatgatcgcgccggaattgttcgcgctgtccaaggagttcacgcgtccgaagttcgatcccgacggcgccaagaagctcctgaccgaggccggttatcccgacggcttcgaggtcacgatggactgcccgaacgatcgctacgtcaacgacgccgcgatctgccaggccgtggtcggcatgcttgcccgcatcggcgtcaagatcagtcttctggcgcagccgaaggcacagtatttcgccaaggtcctgaagcaaggcaactaccagacctcgttctacctcttgggctggacgcccagcaccatggattcacacaacgtgctctatgacatcatgggctgccgggacgatgcgaagtcctcacgaggcgaggccaacctaggcggctactgcaacaaggatttcgatgcgatcaccgacaaggtgctggtcgaaccggacacggccaagcgcaatcagctcatcaagcaggcctacgagatcggcaacaaggactggtcctacatcccgctgcaccagcaggcgctggcctggggtgtatcgaagaaggtgaagctgccgcagcgcgcagacaatcaggtcctgctctactgggcaaccaagcaggaatag

SEQ ID NO: 4921 - DNA, 981 bp, BradyrhizobiumColbertium
atgctcgctttcactctgcgccgcgccattcaggccatcggcgtcatgttcgccgttggcatcatcgcgttctcgatgttccgcttcgccggcgatcccgtcaaccagatcgtgtccatcgacacgcctgcggccgagcgcgaagccgtgcgcaagtcgctcggcctcgacgaccccgtgccggtgcagttcgttcgctattttgccgatgccgcgcagttcaagttcggcgtctcctaccagttccgccaaccggtctcggcgctgctgatggagcgcatgcccgcgacgctggaacttgcgatctgcgcgaccgtctttgcgatggtcctcggcattctcatgggcgtctattccgcgctcaggcgcgataccttcctggccaagctattccaggcggtgtcactgatcggcatctcgctgccgaccttccttatcggcattctcctgatctacctgttcgccgtgacgttgggctggttgccctcgttcggccgcggtgaggtggtcaggctcggctggtggacgacgggcctgctcacgctgtcggggctgaaggcgctgatcatgccttcgatcacgctcggcttgttccagatgaccctgatcatgcggctggtgcgcgcggagatgctcgaagtgctgcgaactgactacatccgcttcgctcgcgcgagggggctgaccacccgtgccatccatttcggccatgcgctgaagaacacgctgattccggtgatcacggtcgcaggactccagtttggctcggttattgcattttccatcatcaccgaaaccgtgttccagtggccgggcatgggacttctcttcgtgcaggccgtgcagaacgtcgatattccgatcatggccgcctacctgctgatggtttcgctgattttcgtcaccatcaatctggtggtcgatatcctctacaccgtggtcgatccacgtctgcgctcgaccgtcggtcgcgccgcatag

SEQ ID NO: 4922 - DNA, 969 bp, BradyrhizobiumColbertium
atgtccgacgcagtcgtctccaagtccgacaggcagggcacgcagcccgcgcgcacccacggctggttcggtcgcgcgctcgacagcgacctcttctattcgttccgccgctccaagctcacgatggtggcagcagccatcacggttctgttcttcctgcttgcgatctttgcatccgcgctcgcggtgcagaacccgttcgacccggcgcagctgcaattgatgaattcgcggatttccccgctctggaccgccgacggccagagccccttcctgctcggcaccgacgaacagggccgcgacgtgttctccgccattctctacggcatgcgcatctcgctcgcagtcggcgtagccggcgtgatctttgccggtgtgctcggcatcgcgcttggcctgatcgccggatatttcggcggcgcggtcgacggcgtgatcatgcggatcgccgacgtgcagcttacctttccggccatcctgatcgcgctgctggtcaacggcatcgccaagtcgattctcggcaaccggctggacgccaccagcatgctgacggtgctggtcatctcgatcggcctcagcttctgggttgggtatgcccgaacggtgcgcagttccgtcatggtcgagaagaacaaggactatgtggctgccgcgcagctgatcggcctgccagcgcccaagatcatgcttcggcatgtgctgccgaacacgatggggccaatcctggtcatcgccacgatcaatctcgcacttgccatcatcaccgaggcgacgctgtccttccttggcgtcggcctgcccgacaccatgccttcgctcggcacgctgatccggatcggcaacaactacctgttcgcgggcgaatggtggatcgtcgccttccccgggctcgccctggccgcgctgatcctgtcaatcaacctgctcggcgactggttgcgcgacgcgctcaacccgaagcttcgatga

SEQ ID NO: 4923 - DNA, 987 bp, BradyrhizobiumColbertium
atgaccgaacccgtcctctccgtgcgaaatctcaaggtcgagttcgcctcgcgccgcgggacgttgcgcgccatcgacggtgtctccttcgatatcgccaagggcgaggtgctcggcgtcgtcggcgaatccggcgccggcaagtccgtcaccggcctctccgtgatcggcctgatcgatccgcccggacggatcgccggcggcgagatccgtctcgcgggcctgcgcattgacaatctgccgccggaggagttgcgccgcgtccggggcaagcgcatcgggatgatcttccaggatcctctcacatcgctcaatccgctctaccgcgtcggcgaccagattgtggagacgatccggacccatctcaatctgtccgggacggccgcgcgccgccgcgccatcgacctcttggccgaagtcggcattcccgcgcccgaaaaacgtatcgacggctatcctcacgaattctctggcggcatgcgccagcgcgtcgtgattgcgctcgcgatctgcgccgaaccggagctgatcatcgccgacgagccgaccaccgcgctcgacgtctccgttcaggcgcagatcatctcgctgatcaagcggctgggacgcgatcacggcaccgccgtgatgctggtgacccacgacatgggcgtgattgcggaaacatccgaccgcgtcgcggtgatgtatgccggccggatcgccgagatcggcccggtccaggacgtcgtgaagaatcccctgcatccctacgccaagggcttgatgggcgccattccgacgcttgcgggcgaggacaagcgactcgtgcagattcccggctccatgccgcggctgtccgccatcccgcccggctgttcgttcaacccgcgctgcgccttcgccttcgatcgctgccgcgtggaccggccggacccgctcccgcgcggagcgcaatcggtcgcctgccatctctatgacgatgcggcggcggagagcgtggcatga

SEQ ID NO: 4924 - DNA, 990 bp, BradyrhizobiumColbertium
atgagcgccccgttcgttcaggctacagacctgcgccgcgtcttcgacgtctcaaagccctggctaaatcgcgtgctcgaaggcgggcatctcgaatatctcaaagcagtcgatcacgtcaccttcgacatcagaaaaggcgagacgttcgcgctggtcggtgaatccggctccggcaagaccacagtcgcgcgcatggtcgtggggctgctgccgccgagctccggcgacgtgctgatcgacggcgtctccatgaccgatccgcggcaggcgcccgcgcgccggaagctgcgccgccgcatccagatgatcttccaggacccctatgcaagcctgaacccgcgcttccgcgtggatgcgatcatctccgagccgatccgcgccttcggcttgatcctgggcgagcgcgacatccaggctcgtgtcggcgagctgctcaacctcgtcggcctgcatcccgacgaccgtctgaaatatccgcacgaattctccggcggtcagcgccagcgcatcgcgatcgcgcgagcgctcgcgtctgacgccgagttcatcgtctgcgacgagccgacctcggccctcgacgtttccgtgcaggcgcagatcctgaacctgatgcgcgacctccaggacaagttcggcctgacctacatgttcatcagccacaacctcgccgtggtccgtcacatggcgagccgcgtcggcgtgatgtatctcggccgcattgtcgagatcgcggaagggcgcgagcttttcgcccgtccacgcatgccttacaccaagatgctgctcggcgcggtgcccgatctcgccatgagcggccgtcagcgggttcccgtcaagggcgagatcccaaacccgatcaacccgccgcccggctgcgccttcaatccacgctgtccgctcgcgttcgatctctgccgcagggagacgcccgaactgatcgacggcgccgcctgccacgcggtcaacactgcgccggtcccggcgtga

SEQ ID NO: 4925 - DNA, 1806 bp, BradyrhizobiumColbertium
atgggcagcaatatcaatcccgatccgttcacgacgagacccgagattgagggcaccttcggggtcgttgccaccacgcactggattgcgaccgcggtcggcatgggcattttggagaaaggcggtaacgccttcgatgccggcgtcgccgccgccttcactctccaggtggtcgagccgcatctgaacggtcccggcggtgatgtccccatcatcgttcacgacgtcaaacgcggccgcaccgaggtgatctgcggtcagggcccggcgcccgcgcgcgccaccatcgcgcattacaggagcgaaggtctcgacatggtgcccggcacgggcctgctcgcggcctgcgttcccggcacgttcgagtcctggatgatgctgctgcgcgattacggcacgatgcgcgtgcgcgacgtcctggagcctgcgatcgcatacgcccgcgacggctatccattggtcgagcgtgcctgcgccacgatccagatggtcgagcagttgttccggaagcactggccgacctccgccgcagtgtacctgccgaacggcgaggtgccgaaacccggcacgctcttcaccaacaagacgttggccgcgacctacgaccgcattctccgcgaagccgagagcggcggtgcaggccgcgacgccgagatcgagcgcgcgcgcaaggcctggtcgcaaggcttcgttgcggaggccatcgacaagttttgccggacacaggaggtgatggacgtcagcggctccccgcatcgcggcgtcctgtccgccgacgacatggcccgttggcagccgacagtcgaggcaccgctcacctacgaatatggccgctataccgtctgcaaggctggcgtctggagccagggccccgtcacgctccagcagcttgcgctgctcaagggcttcgacctcgacggactcgatccgacgggaccggagttcatccatctgcagatcgaatgcgcaaagctcgccttcgccgaccgcgaaaagttctacggcgatcctaagttcaccgagatcccgatctcgacgctgctgtcggatatctacaatgatgagcgtcgcaagctcgtcaccgacaaggcctcgctcgatttcatccccggctcggtggagggttttggcggaatggtcaagctgcgccgcgccgagggccagcgcgaagcggtcggtgcgctcggtgccggcgagccgacggtgggacgcttcggcgaggtgcgcggcgacaccgtgcatttcgacatcatcgacaaggacggcaacatggtgtcctcgaccccctcgggcggctggttgcaatcctcgcccatcattccggagctcggcttctgcctcggcagccgcgcccagatgttctggctcgaggaaggccaccccgccgcgctcgcgccgggcaagcggccgcgcacgacgctgtcgccgaccatggcattgcgcgacggcgagccgtaccttgcctggggctcgcccggcggcgaccagcaggaccagtggatcacgcagttcttcctgcgccacgtccattgcaacctcaatctccaggaggcaatcgacgcgccggcctggcactccgagcacttcccgatctcgttctggccgcgcaccgcgcgcccgggcgtgctcgtggtcgagaaccgcgtgcctaaggcaacgatcgagaacttgcgcgagcgcggacatatcgtcgagatcggtcccgactggtcggaaggccgtctcaccgccgcctcgcgggtcggtccacgccgccgcgctgccgccaatccgcgcggcatgcagggctacgctgcgggacggtag

SEQ ID NO: 4926 - DNA, 711 bp, BradyrhizobiumColbertium
atgacttggtcgatcatcgcgcgcgaccctgccaccggtcagttcgggattgcggtggccacccgcttcttcgccgtcggcgcgcgggtcccgtacattgctgccggcgtcggcgccatcgcaacgcaggccttcgtcaatccctattacggcatcgacggcgtcaggctgctgcgggaaggcctcaatgcccacgacgtgctgggctctctgctcgcaaccgacgacggccgcgagagccggcaagtccacatcatggatgcgagcggcgaaatcgcggctcacacagggcacgactgcgtcggctggtgcggtcacatcgccggcagcggcttctcgatcgccggcaacatgctggcaggagccgacgtgctcgacgagaccgcaaagacctacatcgccaatgacagcttgccctttccgcgccgcctgctcgccgcgatgcgcgcaggcgaagccgcaggcggcgacaagcgcggcaagcagtccgccgcgctgctgatccacggcgaggaagaatggccagcgctcgacattcgggccgacgatcatcccgatccgctgggcgagctcgaacggctcgagcgcgtcagccacgagctctgggtgcactttcgcgcctccatgccaacgcggcagaacccggcgggcaacaccgatcgcagcgtcatcgaggccagcattgctgcggcgcgcataagacagtcatga

SEQ ID NO: 4927 - DNA, 747 bp, BradyrhizobiumColbertium
atgacccgtgaattctcagccggcaactaccgtttcattccatccgtgttccagtactccgcaggcgccgccgcggacgaaggctatgagatccagcgcgtccggttcgatcgcctggtgccgctcgcagaaggctttgcgctggcggcaaagtttatccaggaggcgggacgtccgttgacggcattctgtgcttgcgagctgcggtcgccggcggccttcagcgaggaaggctttcgcgcgttcaatctgcattatgtgaagaccctgtccgaatggggcatcttcgacggcaccaccaatccggtggcgcgcagcaatgtttgtcccgagatcgatccgccatcggagccctcgttctatgcgttctccttcacgcgcccgacacggtcaaacgcgccgagcttcgtcatcgccggcggcgccgaggcacgtgagggcagcggcacctatgtcgagcgcacggtgcgttaccgcgatctcagcccggaagggcttcgggaaaaggtgcgcttcacgacgacgtcgcagatggagaaccggatggcggccttcggcttcggttggaaggatactaccggcgtgcaggcatattccgtgcacgacttccatcatgcgctggtcgacgagctggtccgccgtggcgcgctgcgctccggcctgacatggcattttgcccggccgcctgtcgtcgatctcgaatacgagatggattgccgccgggtgatgcgggaagtggtgatttag

SEQ ID NO: 4928 - DNA, 1251 bp, BradyrhizobiumColbertium
atgactgcgaccatcctcttcgtcgacgacgagcccgacctcgaggcgctggtcctgcagaaattccgcaagcaggtccgcgacgggcagctcgctctcatcttcgcgcgcgacggcctggaggcgctggagtcgctcgagcggaacccgcatgtcgacatggtggtttccgacatcaacatgccgcggatggacgggttgtcgctgctggcgaagctccaggaggccgaggacaagaagtcgaccatcatcgtctcggcctatggtgacatgagcaatatccgcatcgccatgaaccggggagcgttcgacttcctgaccaagccgatcgacttcgccgatctggagacaacgatcgagaagaccattcggcatgttgaaatgctgcgcgaagtccggcggcgtcagatggaagccgagcgtgcccatgctgcgctgtcgcgtcatttctcgccacagctcgccaaacggctggcggcaagcggcgaaggcgaaggggttgaagtacagtggcgcgacatcgcgaccatcttcaccgatatcaccggcttcacctcgctggttgaaagtgcgccgcccgagacgctgggcgaactgctcaacgaatatgtcggcgggatgaccgagatcgtcttcacgcacgaagggacggtcgccaaaatcatcggcgacgcgatccaggttctgttcaatgcgcccggagatcagccggactatgcgacgcgtgccgttgcctgcgcgcatgatcttgatgcctgggcgcagagcttttgcgtgcgccagaaagccaggggtgtgaattttggcacgacccgtatcggcattcacgccggaccggcgctggtcggaaatttcggcggaaaccgctttttcgactacacggcctacggcgacaccatcaacacggcggcgcggctggaggccgcgaacaagcatctgggaacgcgcatctgcgtcagtgccagcgtagcgaacggggcagcgaatttccatggtcgtccggtgggcgacctgatgctgcgcggacgcagcgagccgctgcgcgcattcgaaccgctccgccagaccgaattcgaagctccggcgacggcgcaatattccgaagctttcggcaagatggaggctggtgatgccgcggccatgccggcctttgccgcgctggtcggcatgcatgccgacgaccctctggccagttttcacctgaagcgcctgctcaacggcgccaagggcattcgcatgcaattggaatag

SEQ ID NO: 4929 - DNA, 390 bp, BradyrhizobiumColbertium
ttgaacgtatacatcctggtcgtcgacgacgagccggacgtcgaggcgctgtttcggcagcagttcaggcgcgacctgcgcgccggccggttccagatggagttcgcgctctctgcgcccgaggcgctcaagcgtgccgccgaggtccgcgatccctcgctgatcctaatcctgtccgacatcaacatgcccggcatgagcgggctagacatgctgcccaaggtccgcgctgcgcatccggacgtccccgtcatcatgatcacggcctatggcgatgccgaaacgcgccgcaaggcgatcgaacgcggcgccgtcgggcttctcaccaagccgatcgacttcgcgctgctgcggcaggagatcgacacgaggctcgagcaagccgcatga

SEQ ID NO: 4930 - DNA, 2055 bp, BradyrhizobiumColbertium
atgagcctttccctccaccccgactcacctcaagctggaacgctagccagtgcggcaccaagccaggcagggcagggcgaaacgggccgcggcatcaggatccggctgttcaccaagtatgtcgccctgttcgtggccgtcgtggccatcgcgctgctggtcaacggcctgttcgaggtcttcttctactaccgcgagcacaaggctgcgctgatccgggttcagcacgagcaggccgagtcggccgcggccaagatcggtcatttcgtcaaggagatcgaaagccagctcggctggaccacccagctgccctggtccggaggctcgatcgaacagcgccgattcgatgcgctacgcctcctgcgccaagtgcccgcgattaccgagcttgcccaggtggattcgaccggcaaggagcggttgcgggtctcgcggctggcgatggatgcgctcgacagcgggatcgacctgtcgagcgatccgaagttcactgaggcggtcgtgcacaaggtctattacggccccgtttattttcgccgggaatccgagccctacatgacgctggcgctggctggggcgcgcaaggatgccggcgtcagcatcgcggaggtgaatctcaagctgatctgggacgtggtctcccaaatcaaggtcggcgcgcgcgggcacgcctatgtggtcggcccggaggggcgtctgatcgcgcatcccgacatcagcctcgtgctgcgcaatagcgacatgtccggcctcccgcaggtgcgttcggcgctggctgccggcggcaggatgccggatgaactggaggaggggcgcaacattcagggccagaaggtcttgaccgcctccgcccccatccagcctctgcattggaccatgttcgtcgagctgccggtcgaggaggcctatgcctctctttatgcctctctgcagcggctcgcgatcgtgttgcttgcggcgtcgatcttcgcggtgcttgcggggatcttcctggcgcgccgcttggtcggtcctatccaggcgttgcgcagcggcgccgaaaggatcggcggcggcgacttctcgcagcgcatctcgatccggaccggagacgagctcgaaggtctcgccgaccagttcaacgacatgggggcgcgcttgcaggaatcctatgccgatctcgagaacaaggtcgagcagcgcaccgcggaactgcgtcgatccctcgacgatttgcgcactgcgcagaaccgcctgatccagtccgaaaagctcgcgtccctgggccagctcaccgccggcattgcgcacgagatcaagaacccgctcaacttcgtcaacaatttctccgcaatttcgacggagctgatcgatgagctcaatgagaccctgcgatccgccccgctcgacggcaaggcgaaagaggaagtcgaggagctgaccggcatgctcaagggcaatctcgagaaggtggtgcagcacggcaagcgcgccgactccatcgtccggaacatgctgctgcattcgcgcgaaggctctggtgaacatcgcgccgccgacatcaatgccatcgtggaggaaagcatcaatctcgcctatcacggagcgcgcgcagagaaaccggatttcaacgtcacgatccagcgggcgttcgatcccgctgccggcatgatcgacgtctatccgcaggagatcacgcgcgttctcctcaatctgatcgcgaacggcttctatgccaccgccaagcgcaaggagagcgccggtgacggtttcgagcccaccctgagcgcgacgacgaagaattgcggcaacgccgtcgagatccggatccgtgacaacggcaccgggattccgcccgaagtcaaggagaagatgttcaaccccttcttcaccaccaagccggccggcgaggggacggggctcggtttgtccatgagccacgatatcatcgtgaagcagcacgggggtacgatcgacgtgaacaccgagcctggtgtattcaccgagttcatcattacgctgccgcgagccatcgcaaccggccccacgactggcacacctggaggcaagtcttga

SEQ ID NO: 4931 - DNA, 3096 bp, BradyrhizobiumColbertium
atggcctttaccgatattttcatcaagcgcccggttctgtcggtcgtcgtcagcctgctgatcctgctgatcggcttgcgtgcggcgatggtgctgccgatccggcaatatccgaagctgtcgaatacggtcatcaacatcacgaccgtctatcccggcgcgtctgccgacctgatccagggcttcatcaccacgccgatcgagcaggccgtcgcctccgccgagggcgtcgactacatcacttcctcttcggtgctcggcacctcgaccattcaggtctacatcaagctgaacttcgatccgaaccaggcgctcaccgaggtgctggccaagacgaactcggtgaaatacctgatcccgaaggaatccaacgacccgatcgtcaccaagaccacgggccagactacggccgttatgtatctcggcttctcgtccgaagaactgtcgggctcggcgatctccgattatctgacgcgcgtggtccagccggtgctatcgaccgtcgacggcgtggcttcggccgacatcttgggcggccagaccttcgcgatgcggctgtggcttgaccccgtgaagatggccggccgcaatgtctcgccgaccgatgttgcggcggcgatccaggccaacaacttccagtccgcggcaggccagaccaagggctatctgatcgtttcgaacgtctcgaccaataccggcctgaccaatgtcgatcagttcaagaagatgatcgtcaaggccaaggacggcggcttcgtgcggatggaggatatcgccaccgtcgaacttgccgctcaaagcacggatgccagcgtcgccttcaacggcgagcacgcgatcttcatcggcgtgcaggcaacgccgcagggcaacccgctgacgctggtgaagggcgtgcgcgcgctgttccccgagctcgagcggaacttgccgccgtcgatgaagatgaaagtcgcctacgactcgaccaagttcatccagtcctcgatcgacgaggtggagaagacgctgggcgaagccgtgatcatcgtgatcgtggtcatcttcctgttcctggcctcgctacgctcggtcatcatccccgtcgtcaccattccgctgtcgatgatcggcgtctgcaccctgatgctggcgctgggcttcagcttcaacctcttgactctgcttgcgatggtgctggcgatcggcctcgtcgtcgacgacgccatcgtcgtggtggagaacatccatcgccaccttgaggagggcaagacaccggtccaggcctcgctgcaaggtgcgcgcgagatcgtgggtcctgtcatctccatgacgatcacgctcgcggcggtctacgcgccgatcggcttcctcggcggcctcaccggctcgctgttccgcgaattcgccttcacgctcgcgggctcggtgatcgtgtcgggcgtaatcgcgctgacgctctcgccgatgatgtgctcggtgttgctgaagaacaccgaggagggccgcttcgccaagctcgtgaaccgggtgttcggtgcgatgacgcgctggtatgggcgcaagctcgatcgttcgcttgactacaaggcgattaccggcctcttcgcggtcacgatcctcggtctcgtcggcttcctctatatgcacacttcgaaggagcttgcgccagaggaagaccagggcatcgtgttcgccgtcacaaaggctccgaaatacgccaacatcgattatctcgatttctacggcgagaagctcgacaaggaattcgcgaaattccccgagaccgatctgcgcttcgtgctgaatggcatcaacggtccgcagggcggcatcgccggcatgctgctcaagccatgggacgagcgcaagcgctcggcgatccagctgaagccgctggtgcaggccgaactctccaaaatcgagggggtgcaagcctttgcgttcaacctgccgccgctgccgggcggcccgggcggcttgccgatccagatggtgatcaactccaccgccgggttccagacggtctatgagcagatggagaagctgaaggaggccgcgcgcaacagcggcatgttcatcgtttccgacagcgatctcgcctacaaccagccgaacgtgaaggtgacgatcgaccgcaccaaggcgcaggatctcggcgtcaacatgcagaacctcggcgctacgctggcggtgctgctcggcggcaactacatcaaccgcttcaatctcgagggtcgttcgtaccaggtgatcccgcaggtgccgcgtgccaagcggctgtccccggaatcgctcggcggctattatgtgacgaccaataccgggcagcagcttccgctgtcgacgttggtgtcgattgagaccaagaccgacccgaattcgttgactcacttcaaccagctcaattcggcgacgttctcggcagtgccgatgccgggcgtgaccgtcggtgctgcggtggacttcctcgaaggtgaggccaagaagttgccgcagggcttcagccacgactatctggccgattcccggcaatatgtgcaggaaggcaatcagctcgcgatcaccttcggcttcgcgctgatcatcatcttcctggtgctggcggcgcagttcgagagcctgcgcgacccgttggtcatcatgatctcggtgccgatggctatcgtcggcgcgctgatcccgctgttcttcggcgcggcgacgatgaacatctacacccaggtcggtctgctcaccctggtcggcctgatcaccaagcacggcatcctgatggtggagttcgccaacgagctccagatcaacgagcggctcgaccgccgctcggcgatcgagatgtcggctcgcatccggctgcggccgatcctgatgaccacggccgcgatggtgaccggcctgattccgctcctgaccgcgaccggggcgggtgcggccagccgcttctcgatcggtctggtcgtcgtggccggcatgtcgatcggtacgctgttcacgctgttcgtgttgccggcggtctatgtggtgctggcgaccgatcatcgcgcggcggccgattcggagcggaacaagcagatcaacgacctcgacctcggatcaaaagcgctgcggccgacctga

SEQ ID NO: 4932 - DNA, 1203 bp, BradyrhizobiumColbertium
gtgcatgacatgaacgtcgtagccgaacacaagatttcgggcgaaccgatcgatagcaaggctcccaagcgtccggtccggccggtgctgtggttcatcatcgtcggcacgctgctggccgcgctcgtcggcggcctcgtctggttcaattatttccgcggccagatgatcaagcagttcttcgccagcaacaagccgccgccgaccgccgtcagcgccgcggaggcgaagtccgaggtggtgccgaacctgctcaccgcggtgggcagcctcgtcgccgtgcatcaggtcgacgtcagcgccgacgtcaacggccgcgtcaccgagatcaagttccaacctggtacgcgtgtggaagccggcacgccgctggtgcagctgttcgacgcgccggagcagggcgacctcgccaattacaaggcacaggcgaccgtcgcgcagctgtcgctcgatcgcgccaagcagctggcggcacgccagttcggtccccaggcaaccgtcgataccgcccaggctgcctacgaccaggcgctggccggcattgccaagaccgaggcgttgatctcgcagaagctggtgcgcgccccgttctctggcgatctcggcgtgcgcaaggtcgaggtcggccaatatctcaccgccggcaccgctatcgtgtcgctgaccgatctgtcgcagctgtgggccaacttcaccgtgacggaaaaggattccggcagcctcaaagtcggacaggccgtcaggctcaaggtcgacgcctatccgggccgaaccttcgaaggcaagatcaccacgatcgagccgcaaatctccaccgacacccgcaacatccgcgtgcaggcgaccatcgccaatccggagaagatcctgaagcccggcatgtttgtcaccacgacagtggtgctgccggagaagcccgccgtgatcactgtgcctgaaacggcggtcgattacacgctctacggcgactccgtgttcgtgatcaccgagaagaaggaagacgacggcaagaccagcctttcggcggtgcgcaccttcgtgcagaccggcagccgggtcgagggtcgcgtcgaaatcgtcaagggcctgaaggcgggcgacaaggtcgtcgctgtgggccagctcaagctgcaatcgggtgcgccggtgtcgatctccaccgacccggccccgccgatcccggcgcagccgccgcgctactga

SEQ ID NO: 4933 - DNA, 663 bp, BradyrhizobiumColbertium
ttgatcctcggtgccgcaaagcgctgctttgcccgacatggttataccggcaccacgacgaagagcgtggcggccgccgctgccatttccgaggcgctgctgttcaagcatttcccctcgaaggcggcgctctacgccgaaatcctgagcgacgagtgcgaggcggacccggccttcatggagctgctcgaacgggagccctcgacggccactctggtcgaactgatccgcggcatggtcgaacacttcctccagatcgcggatggtcccgatcaggaagaggcgcagcgtctgcggctgatggccacgagtcatttggaagatggcgaattcgcccgtctgctatatgccaagatcgagacgctgatcggggctgtcttcgtcgcctcgctcgaacgcgcgattgcgagcggcgatgcgcggccatgcgacggcgatccgctcaacctgttctggttcgcgcatcattcggtgatgactgcggcgctgaccaggctgccggccaagccatgtctcgcttacggcaaggccaacgatctggagcggcagctctgtgagtttctcctgaggggtatcggacttaacgacgccgcaattgcttcgcatctgggccgcgatcaggcctcagatgccggcgaggcggcgattgcagaaagtgcatga

SEQ ID NO: 4934 - DNA, 591 bp, BradyrhizobiumColbertium
atgagcaaggccaatctcctcgaccgccgccaggtggtgtccacactgctcgcggaccgcagggacgtcgtcgcgatcggcggcctgggcgcctccacgaacgacatgtgcgcggtcggcgaccacgcgcgcaatttctatctctggggcggcatgggcggcgccgcgatgattggccttggcctcgccctggcgcagccgaagctgccggtgttggtcatcacgggcgacggcgagatgctgatgggcatgggcagccttgccaccatcggcctgcagaagccgtgcaacctctccatcgtcgtgctcgacaacgaggcttatggcgagaccggcggccagaccagccacacgtccgcggccgccgacctcgtcggcatcgccagagcctgcggcattgcggacagccgggccgtcacgaccatggccgaggtcgaggccttcgccaaagccgtccacgacgtctccgccgggccgcgctttgccaatgtgaagatcgacagcgccaacctggagcgcatcctgcccagccgtgacggaacctacatcgtcaaccggatccgcggcgacctgggattccagccgatctag

SEQ ID NO: 4935 - DNA, 543 bp, BradyrhizobiumColbertium
atgcacgcacgcactgacgctgccgacacgacgccgagttggcctgacgatattttcgcgacgttgcagcgcttcgacgtccggcaggtgccgtacgtgcccgatgccggtcattccaagctgatccagcgcgtgctggactcctccacgatgcgcggcattcccttgacgacggaggaggagggcgtggcgctgctcgccggcgcgtggaccggaggacagcgcggcgtgctgctgatgcagtcgagcggcgtcggcaattgtatcaacatgctgtcgctgatcccgatcctgcgttttccgttcctcacgctcgtgaccatgcgcggcgagtggggcgagttcaatccgtggcaggtgccgatgggatcgaccacgcaaggcgtgttcgagctctccggcgtcaaggtgctgcgcgcctcgaacgcggccgaggtgccggccgtgctcgaggccgccgcggcgcaggcctacaacgcgctgacgcccactgccgtccttctgtcgcagcgcctgatcggcgccaaggttttcaccaaatga

SEQ ID NO: 4936 - DNA, 1233 bp, BradyrhizobiumColbertium
atgaacgcagatgcgaaggcgctggccgcaagcttcgacctcgagaagctgacgcctgagttctacgataacccctacccgacctatcgtgcactgcgggagaacgagcccgtcaagcgcctgcgcaacggcaccgtgttcctgacccgctacgacgatctcgtcaccacctacaagaacacgaaagcgttcagctcggacaagaagcgggagttcgcgccgaaatacggtgacacgccgctctatgagcaccacaccacgagcctcgtcttcaacgatcctccgtcgcatacccgcgtgcggcgcctgatcatgggcgcgctgtcgccgcgcgcgatcgcgagcatggaggccgacctgatcaagctcgtcgaccgcctgctcgacgcaatcgccgccaagggcagttgtgagctgatcgaggacttcgctgcttcgatcccgatcgaggtgatcggcaatctgctcgacgtccctcacgacgaacgcgggccgctgcgcgactggtccctggcgatccttggcgccctcgaacccgtggtgtcgcccgaagcggccgcgcgaggcaacaaggcggtgacggatttcctcgcctatctcgaaacgctggttgcgcgccggcgccagaagccaggcaatcccgagcgcgacgtgctgacgcggctgatccacggagaaggcagcggcgaggagaacggcgagcggctgaccgagaaggagctgctgcacaattgcatcttcctgctcaatgccggccacgagaccaccaccaatctgatcggcaacggccttgtcgcgctcgaccggcatcccgaccagaagcagcgcctgatcgacaaccccgacatgatcaagaccgcggtcgaggagatgctgcgctacgagagctcgaaccagcttggcaaccgcatgaccaccgagcgcgtcgaactcggcggcgtcatgctcgaggcagggacgtcggtgacactgtgcatcggtgcggccaaccgcgatcccacgcagtttccggaccctgaaagcttcgacatcgcgcgcacgccgaaccggcaccttgccttcgccaccggcgcgcatcaatgcgcgggcatggcgctggcgcggctggaaggcgcgatcgcgatctcgcgcttcctggcgcgcttcccgaactatgccgtgagcgggccgccagtgcgggggggacgggtccgtttccgcggctttctgagtgtgccctgctcgatcggctga

SEQ ID NO: 4937 - DNA, 864 bp, BradyrhizobiumColbertium
atgcgcgacttctcgtccgaccatcgctggctatcgctgaacacggcaaccgtccgcaagcagggtgatatcctcgcgatcatagacgcttgtgcgaagcacggcatccgcgccatcgacccctggcgcgatcaggtcgcagctgtcgggctcgaacgcgctacgcgcgccgtccgcgatgccggacttgagctgtcaggctattgccgcggcggcatgttcacgtcggacgcctcgcgctgcggcgaggtacgggacgacaacaggcgctgcgtcgacgaagccgaggcgctgggcgcgccctgcatcgtcctcgtcgtcggcggtctgccgcaatattcacggccgggcagcgaggcctcgaaggatctcgtggcggcgcgcgggcaggtcgaagaagcacttgccgagatgctcgactacgccagacaggcaaagctgccgctggcgatcgagccgctgcacccggcctatgcagccgaccgcgcctgcgtgaacaccacaaagcaggcgctggacatctgcgaccggctcgatcccggccgaactggcatgctcggcgtcgcgctcgacgtctatcacatctggtgggaccctgagctgatggggcagatcgcgcgggccgggaaagatcgcctgcttgctttccacgtctgcgactggctggtgccgacaaaagatattctcaacgaccgcggcatgatgggcgacggcgtcatcgatatcaaatcggtgcgtcaggcggtcgaagcgcagggctttgccggctattccgagatcgagatcttctccaacgagtggtgggccaagccgatggacgaggtgctgcgaacctgcatcgcgcgccacaggaccgcggtgtag

SEQ ID NO: 4938 - DNA, 1191 bp, BradyrhizobiumColbertium
atgaacaagcccgttcaacccatgtcgtcattgtcgctgaagctgcccaaggccgatcgctcgatcgagacctatcggctcgcggcctcgcgcacgtttcccgcaaagctggaaggaccgctcaatcgcatcgccttctccgccgtgcacaccgtcgccgatcccttcgccgacaacgatccctggctgtcggtggccgtcgactgggacaagaccgtcgccttccgcgagcacgtctgggacctcggcctcggcgttgccgaagccatggacaccgcgcagcgcggcatgggcctggactggccgacctcgctggagctgatcacgcgctcggtcggtgccgcaaagcgccgcaacgcgctggtgttctcgggtgccggcacggaccatctcgcggtggaagatgccaagaccatcgacgacgtgatccgcgcctatgaggagcaggtctcggcggtggagaaggttggcggccgcatcatcctgatggcgtcgcgcgcgctggccaagctcggccgcaacgccgacgattacgccaaggtttatgaccgcgtgctgtcgcaggttcgcgagcccgtcatcatccattggctcggcgacatgttcgatcccgcgctgaccggctattggggcaccaaagacctcgacaaggcgatggacgcggctgtggccatcatcaacggcaatgccgccaaggtcgacggggtcaaggtctcgctgctggacaagcagcgcgagatcgacatgcgccgccgcctcgacaagcgcatcaggatgtataccggcgacgacttcaactacgcagagctgatcgccggcgacgagcagggcttttcgcacgcgctgctcggcatcttcgatgccatcgcgccggcggcatcctatgcgctgtcgcggctggcggccggcgacgaggccggcttccacgatgtgctggggccgacggtgccgctctcgcgtcacatcttcaaggcgccgacgcgtttctacaagaccggcgtggtgttcatggcctatctcaacggccatcaggatcatttcaccatggtcggcggccaggagagcacgcgctccacgctgcatctggccgagttgttccgtctggctgacaaggccggcctgctcgccaaccctgaactcgcgacgcagcggatgaagaccgtgctcgccacccacggtatcgaatcctga

SEQ ID NO: 4939 - DNA, 117 bp, BradyrhizobiumColbertium
atgtccaccaacccgtcattgcgagcgaagcgaagcaatccagtgtccatccgcggcaacagtctggattgcttcgtcgcttcgctcgcaatgacgggaagaggtctgaaatcatga

SEQ ID NO: 4940 - DNA, 1152 bp, BradyrhizobiumColbertium
atgaccacccaacgcctcggcctcatcatgaacggcgtcaccggccgcatggggctcaaccagcatctgatccgctccatcgtcgcgatccgcgaccagggcggcgtccgcctgaagaacggcgaccgcgtcatgcccgatccgatcctggtcggccgcagcgccgacaaggtcgaggcgctcgccaggcgctacaacatcacgcgctggaccaccgatctcgatgcggcactcgccgacaagaacgacaccatgttcttcgacgccgcgaccacccaggcgcgtccgggcttgctgacccaggcgatcaatgccggcaagcacgtctattgcgagaagccgatcgcgaccaatttcgaggaggcgctcgaggtcgtgaagcttgccaatgccaagggcatcaagcatggcacggtgcaggacaagctgttcctgccgggcctgaagaagatcgccttcctgcgcgatagcggctttttcggccgcatcctctcggtgcgcggcgagttcggctattgggtgttcgaaggcggctggcaggaggcgcagcggccgtcctggaactaccgcagcgaggacggcggcggcatcatcctcgacatggtctgccactggcgctacgtgctcgacaacctcttcggcaacgttcagagcgtgagctgcatcggcaacaccgacatccccgagcgctatgacgagcagggcaagaagtacaaggcgaccgcggatgattccgcgtacgcgacattccagctcgaaggcggcgtcatcgcgcacatcaacatgtcatgggtgacgcgcgtctatcgcgacgacctcgttacgttccaggtcgacggcacacacggctcggcggtcgcggggctcaccgactgcatgatccaggcgcggcaggcgaccccgaggccggtctggaatcccgacgagaagcggctgcacgatttctacggcgactggcagaagctgcccgacaacgtcacctacgacaacggcttcagggagcagtgggagatgttcatccggcacgtctacgaggatgcgccctacaagttcacgctgctcgaaggcgccaagggcgtgcagctggccgaatgcgcgctgaagagctggaaggagcggcgctggatcgacgtcgccccgatcaaggcgtga

SEQ ID NO: 4941 - DNA, 1443 bp, BradyrhizobiumColbertium
gtggatgcccgggacaagcccggctatgacgagcttcataggaccatgtcggtgcgcctgaagctgcgagacatcgccttcttcgaacgtcccgtgccattcgcgcggccgttccgcttcggcgcgatcaccatcagcgccacgccgcagctgttcgtgcgggtcgagctcgaggttgagggcagggggaccgctgtcggcgccagcgccgagctgctggtgccgaagtggttcgacaagcggccggagctttcgccggcacagacggtagaggggctgagagaatcgctggagatcgcgcgcgggctctatctggcgagcgccggatatcagaccgcgttcgatctgcatgcctcgtgcatcggggaccaggtcgcgacctgtgcgaacaagaacattccgccgctcgccgcggcttatggcccggcggagatcgacaaggcgatcctcgatgcgctgctgcgcgccgccgaaaccaacttcttcgaggggatggccggcaatatcgcgggcatcgatgcgcggctgtcgcctgacctcgcaaaattggacatcgccaggtttctctcgggtcgggtgccgctgcagcgtgttgccatcaggcacaccgtcggcctggatgacgccatagagggcgagggcggcgtcgccgatccgcgcgagaacgccggcgcgcgctacttcaagctcaaactgtcgggcgatcccgccgccgatacggcgcggctcgcgcggatcggcaaggagctcgacacgctcgggcgcgactacagggtgacgctcgacgccaacgagcaatatgcggacttcgccgcattgcaggcgctgatggaccggcttgatcatgacgccgcgctgcgtccgatcgccacgcgtctgctctatatcgaacaaccgatgccgcgcgacatcacgcggcaatcgccgctcggcgcattggctgcgcgtggtttcatcatcgacgaggccgacgattcctatgatgccttcccgacggcgcgggcactcggctatcgcggcatctcctcgaaatcctgcaagggaatttacaagtcgatcgtcaacgccacgcgtgcagcgaaatggagcgcggagagcgagactttctacgtcaccggcgaagacctcacctgccaggccggcctcgccgtgcagcaggatctcgcgctcggtgccttcctcggcgtcacccatgccgaacgcaacggccatcactatgtcgacggcttcggcgaaacgcctgcggcggaggcagcggccttcgcggccgcgcatcccgatctctatgccgatgccgggcagggcatccgcctcaagattcacgacggcgatctcctgacgggatcgcttcacgcaacgggtttcgcgacgtcggtccatccggactggccggcgctgtgcccgctcgaacagccaggatcatctcaggagcatttggcatga

SEQ ID NO: 4942 - DNA, 831 bp, BradyrhizobiumColbertium
atgagcgaaaccgcgcagccggctgcacatctgagactggtgagcggccgggctgccggcgatgcgtcgggcatcaagctgtcgggcgtatccaagacctaccggacacgcgacggcgacgtgccgtcgctacggccgctcgacttccacatcaacgacggcgagttcttcgtcgtggtcggcccttccggctgcggcaagtccacgttgctcaagctgatctcgggcctgctgccgccgaccacgggcgagatcctcgtcgagggcgagaaggtgacgacgccgcacggcaatgtcggcatcgtctttcagaacgctctgctcttgccctggcgcaacatcctcaagaacgtgatgctgccgatcgacatgaagcggctgccgcgggacaagtatcttccccgtgccaaggagctgttgaagctggtcggcctcgaaggcttcgaaaagaagctaccgtggcaactctccggcggcatgcagcagcgtgcctcgatctgccgcgcgctggtgcacgatcccaggatcatgctgatggacgagccgttcggcgcgctcgatgcgttgacgcgcgagcgaatgaatgtcgaattgatgcggatccagcgcgagaccgggaagacggtgttgctgatcacgcattcgattcccgaggccgtgttcctcgccgaccgcgtgcttgtgatgaccgagcgccccggcgcgatcgccgcgatctacgacgtgccactgccgcgtccgcgctcgctcgacgcgatggccgatcctgtcttcaccgagctcgtgcagcgcatccgcaagcacttcttctcgcaaggggcattggattga

SEQ ID NO: 4943 - DNA, 993 bp, BradyrhizobiumColbertium
atgaagcggttgattggggctgtctcagcggcgctgatggcatttacggccatgccggcgcacgcggccgacaaggtcgtgctgatgctgaactggtacgtctatggcgagcatgcgccgttctattatgggaaggccaagggcatctacgcggccgagggcattgatatcgagatccaggaaggccgcggctcggcggcgaccacgcaggctgtcgccgccaagacggccgatttcggctatgtcgacgtccccaccatgatgcgcgccgcgatcaagggggcgccggtggttgcgaccggtgtcctgctccagacctcgccgatgtccgccatgggcttcgccgacaagaacatcaggaagcccgaggacatcaagggcaagacggtggcgatcacgcccgccgattccatgacacagatctggccgctgttcctgaagaagaccggcttgaaggaaagcgatttcaagaccgtcgccggcgacggccagaccaagctcaacgccgtcatcaacggccaggccgatctgctgctcggctacgtcatggaccagtcgatgaagatcaaggacgccaccggcaaggacgtctatccgatcaagttcgccgactacggcatcaacatggtctcgtccggcatcatcgccaacgccgattatgtgaaggccaatgccgatctcgtccgccgcttcatgtcggcgacgacgaaagcggtcgaagccgccgaaaaggagccgaaggcggcggcgcaggcgatccttgacgccaacccgaagggcggcaagatcgatacgctcacgcagggttttgagctcacgattccgctctaccggaccgcggagaccaagagcaagcggccgttccaggtcagcgaccagaacatgactgatacggtcaatctgatggtcgaatatggcggcctcgatgccaaggccaaggagaacccgaaggccttctacaccaacgactatctgccgaagagcggctcgtga

SEQ ID NO: 4944 - DNA, 810 bp, BradyrhizobiumColbertium
gtggctgaattgaagccgcaaaacgccgtttccaagctgctgaatgcagcctgggttcggccgttcttgttcctcgtcttcatcgtcgtcgcctgggatctcgcgatccgcctgttcaggattcctgcctaccagatcccgtcgccgctcgacgtcgtcgccgtgctgcgcaccgaatggccggagctgctgcgccaggcctggccgacgacctacgcgaccgtttgcggcttcctgctctcggcgctgttcggcattcccgtggcgatgctgatcgcgggctcgaagacggtggagagctacgtctacccgctgctggtgttctcgcagtcggtgccgaagatcgcgatcgcgccgctcttcgtggtctggttcggcttcggcatcattccaaaggtgatctcggccttcctgctcggcttcttccccgtggtggtgtctgcggtgcagggcttcaaatcggtcgaccctgatatggtcgatctcgcccgcgccatgcagggcagccgctttcaggtgtttcgcgcggtgaacctgccgcatgcgctgccggcgatcttttccggcctcaaggtgtcggtgacgctggcggtcgtcggtgccgtcgtcggcgagttcgtcggctcaaattccggcatcggctacgtcatgcagcgctcgatcggcacgttcgacctgccgacgatgttcgcggccctcgtcattctcgcgctgctcggcgtggtcctgttctggatcgtcgaccgcatcgagaagctggtcattccctggcatgtcagccagcgcgaggacgtgatctttgcgtcttaa

SEQ ID NO: 4945 - DNA, 708 bp, BradyrhizobiumColbertium
ttgacgaagccaaagcgaactcagaaatggcagcgcgatcccgaggggatgcggctgcgcattctcgaagccgccaagcaggaattttccgctcatggcctggcgggcgcgcgcgtcgaccggatcgcggcgaaggccggcgccaacaagcgcatgctctactatcacgtgggcaacaaggacgagctttatctcgcggtgctcgaaggcgcctatgacaagatccgcagcgaggagcgggggctcgatctcgaacacctcgatccgcccgaggccatccgccggctgatcgagttcacctggaattacttcctgcgcaatcccgaattcctgtcgctgctgcagaccgagaaccttgcacgcgccaagcatctgaagaaatcgaccaaggtcaagtcgatgcactcgcccttcgtcgagatgatccggactgtggtgcggcgcggcgtcgacagcggcgacttccaggtcgcggtcgatccggtgcagctctacatctcgatcgcggcgctgagcttcttctacctgtcgaactctgcgacgctcagcgtgatcttcgggcgtgatctcctcgacaagaaggccaaggacgagaggctggcccatatggtcggcctcgtcctggctgcgctgaccgggcggtcggccgcgctgttcgagatcgcgaaggccccgaagtcccgcagcgcggtggcgcagacggtttag

SEQ ID NO: 4946 - DNA, 849 bp, BradyrhizobiumColbertium
atgatcaccggcctcgatcacatcgtcgttctggtgagtgatatcggtgccgcaaaggcagcctatcagacgctgctcgcccgcgcaccggcctggcagaactcgggcgagggcgcggacagggtgctgttcaccctggacaacatgaccatcgaattgatggcgccgagcggcttcagcgtcaccgccgaccgcatgcgcgcgctgctcgacgaccaggaaggcattatcgccagcctttgctttcgcgtcgcagacgtcggcaagatgcaccgccggctggagcgtgtggccttgcagccggacccggtcacggaggtcgagagcagcgatgccggatcgggcgccgtactgcactggaagcgtacgcgtgccgccaccgagctcacgcggggcgtgcgcatgttcttcctcgaactggccgaggagcgcccgaagtcggtcgcgaccgatatcgcgccgatcgacgcgctcgaccacgtcgtcgttaccactgaggattccgatcgcgccgccgcgctctacggtgcgcggctcggactcgatctggcgctcgatcgctctcaccaggattggggccagctgatgttcttccgctgcggcgacctcatcgtcgaggtggtccgccgccccgtggccggcggcgatgccgcgcatgaccgcctctggggtgtgagctggcgcgtcgccgacatcgacgctacgcgcgcccgcctgatcgccgccgggctcgacgtctccgaggtccgcaacggccgcaagccgggcacgcggatcatgacggtgcgcagcggcacctgcggcatccagaccgtgctcctggagcgctccccgaagccggtgaagtga

SEQ ID NO: 4947 - DNA, 894 bp, BradyrhizobiumColbertium
atgcaggctctcttcatcggacagacctatatcgacgtcgtcttcatcaccgaccacatgccgaccggggacgagaagcacgtggcttcggattacgcggtctccttcggcggcaatgcggtgaccgcggcgttctgctgcgccaagctcggcatcgtgccggatctcatcgccactgcggccaatgactggctggggcgcatgttccaggacatgtgcgccaagtacggcatctcgctgcatgggcgcaaggtcaaccagtcctcgctctccttcatcatgcccaaggacggcaagcgcgccatcgtccgctgccgcgacgacgagcacatccaccccttccccatcctcaatctcggcggctgccgcgccctgcacgtggacggccatcagcccgatgccgcgatccattacgccaaggtctgccgcgaggctggcatcctgacctcgctcgacggcggcggcctgcgcaccaacacccatgagctgctcgaattcatcgacgtcgcgatcgtcgccgaacgcctttgcgagcagatggacctgacgcccgagaagatgctcgactatctcaagggccgcggctgcaagatcggcggcgtcaccatgggcgagaagggcctgctctggtacgacgaaacagggacggtgcaggtgatgccggcgatgccgatcccgcgcgagcgcgtgatcgacaccaacggcgccggcgacgtcttccacggcgcctatgtctattcctacctcgcccatcccggcaaaagctggcgcgagcatttcgatttcgcgcgcgccgcctcgaccttcaagatccagcgcctcggcaacgaggccggcttgccgacgctggtcgacatcgccaaggtcaggcacgagttcgaggtcagggtctag

SEQ ID NO: 4948 - DNA, 909 bp, BradyrhizobiumColbertium
atggggcgcgtcttcgtcgccggcagcatcaacatggacgtggtggtgacggcggatcgccaccccaaggttggcgagaccgtcgcgggtcagcaggtgctgtatttcccgggcggcaagggcgccaaccaggcggtcgcggcatcccggctcggtgcgcggaccacgctgatcggacggctgggaaaggattcattcggggccgagctgaaagccttcctcgacgaacagggcatcgatctcggctatgtggtggagacggcggaggcccacaccggcacggccatcattacggtggcagaggccgacaacacaatcgtcgtcatccccggggcgaacgggctggttgccgccgacgacgtcaacgtcgtgccgctgctgaagggcgatgtcgccgtcagccagttcgagattccgctccccgcgatcgccgcctttttccaacgcgcgcgcggagccggggccacgacgctgctcaacccggcaccggcgcaggcaatgccccgcgagctgctcgcgctggtcgacatcctcgtgctgaacgagaccgagctcggcgtcctcgcaggcagcgagctctccgagagcgacgcggcggcgcggatcatcgaggtcgcgcggaaacttcaggcgcgcaaggaccagaccatctgcgtcacgctcggcaagcgcggcgtgctcgccctcgccgggcgcgaggagattgccgtgcccggccgcgcggtgaaggcgctcgacaccacgggcgccggcgattgcttcgtcggtgccctggccgcgcaactggccgacgacgtgcccctgcgcgccgccctcacgttcgccaacgcggccgcttcgatcagcgtgcagcggatgggcgcagggccgtcgatgccgacggcggaggaagtagcagccgtcttgtag

SEQ ID NO: 4949 - DNA, 1221 bp, BradyrhizobiumColbertium
atgacgggcggtccggtgatcatcgtcggcgccggccacggcggctaccaggtcgcggcatcgctgcgccaggcaggcttctccgcgcgcatctgcctcatcaacgacgagtcgcatctgccctatcagcggccgccgctgtcgaaggcctacatcaagggctcggccgggccggagagcctgatgttccggccggagaaattttaccaggaccagaacatcgagctgatcgcgggccgcgcggtgtcgatcgaccgggccgggcgcagggtgcatctcgcatccggcgacacgctgccatacgggcacctcgtcctggcaaccggcgcgcgcaatcgcctgctcgacctgcccaatgccaacctgcccgacgtgaaatatctgcgcatcctcgacgacagcgaggcactgcgacagatcatgcccacgaagaagcgcgccgtgatcatcggcgccggcttcatcggtcttgaattcgcctccactgcgagaatcaaagggctcgaggtcgacgtgctcgagctcgccccgcgcgtcatggcgcgcgcggtcacggctgaggtctcggagtatttccaggagcgccatcgcgaggccggcatccgcatccatctcggcgtgcaggccaccgcgatcgaggccgagggcggcaaggtcaccggcgtttccttgagcgacggacggcatctgcccgccgacctcgtcttggtcggcgtcggcgtgctgccgaacatcgagcttgccgcggaggcggggctccccgtcgccgccggcatcatcgtcgacgaatatctctccaccgccgatcccgatatctccgcgatcggcgattgcgcgctgttcgcaagcccgcgcttcggcggctcgctacggctggaatcggtgcagaacgccaccgatcacgcccgctgcctcgcggcgcggctgaccggcgacaggaagccgtacgacagccatccctggttctggagcgaccagggcgacgacaagctccagatcgccgggctgaccaccggctatgatcgcgtcgtgctgcgcggcaaccccgccaacaaggcgttctccgcgttctgctacaagggcgacaagctgctcggcatcgaatcgatcaatcgcgccggcgatcacatgttcggccgccgcctgcaggccatggaccgctccatcacgccggagcaggccgcggacgagagcttcgacctgaagagcgcgctggcatag

SEQ ID NO: 4950 - DNA, 795 bp, BradyrhizobiumColbertium
atgccagctcccgtctcgaagcccgacgatcccgccctgctgcggatcgacggcccgatcgcgaccatcacgctcaaccgccctgccgcgtacaacgcgatcaacctcgccatcgcgcagaagctcgagcagctcgcggcctatatcgagggcgacgacagcatccgcgtcgtggtgctcgaaggcgaaggccgcgccttctcggccggcggcgatctgcagacgatcggggccgccgccgaggccggcacggtgacgcccgtcgtcggcgagctcttgaagcactatcacgccttcatcgagatcgtcaggcgcatgccgaagctgtcgctgtcgagcgtgcacggctcggccgccggcgccggcatggggctcgccttcgtcaccgatctctgcatcgccgccgatgacgccaagttcacgccggcctatgccaagatcggggtgtcgccggacggcggctcgacggtcgggatcgtcggcacggtcggctctcgccgggcgctgcagatcttcctggccgaggacaatttcaccgcgcagcaggcctacgaatggggcctcgtcgccaagaccgttccggccgccgatctgaaagcggcaacgcggcaattcgccgagcggctggcgcagaacccgcccgcggcgatcgccggcaccaagcagctggtctaccaggccgcgaccacgccggtgaagcagcagctcgatgccgaggagcacaagatcatcatggcgatgaacacggacccgtttcgcgccgccgtgaagaagttcaccagcaagggcaaatag

SEQ ID NO: 4951 - DNA, 1719 bp, BradyrhizobiumColbertium
atgacgagtggcttgcgcaagggtttgaccagctatggcgatgccggcttctcgttgttcctgcgcaaggcgttcatcaaggccatgggctattccgatgatgcattggagcgcccgatcgtcggcatcaccaatacctatagcgactacaatccctgccacggcaacgtcccgcagatcatcgaagccgccaagcgcggcgtgatgctctccggcgcgatgccgttcgtgttcccgaccatttcgatcgcggagagctttgcgcatccgacctcgatgtacctgcgcaatctgatggcgatggacaccgaggagatgatccgcgcccagccgatggatgcggcgatcgtgatcggcggctgcgacaagacgctgccggcgcaggtgatggcagcgatcagcgccgatctgccgacggtggtcattcccgttggtcccatggtggtcggccatcacaagggcgaggtgctgggggcctgcaccgattgccgccgtctctgggcgaaatatcgcgccggcgaaatggacgatgccgagatcgaggcggtgaacgggcgtctggcgccgtcggtcggcacctgcatggtgatgggcacggcctcgaccatggcctgcatgatcgaggccatgggcctgtcgctgccgatgagcgcgaccattccggcgccgcatgccgagcgcttccgtctcgccgaggccagcggcaaggttgccgccgccatggccaaggccaagggaccgaagccgagcgaattgctgacgccctcgtcattcaagaacgcgcaagtcgtgctccaggccatcggcggctcgaccaacggcctgatccatctcacggctatggcccatcgctcgccgcaccggatcgatctcgaagtgttcgaccagatcggccgcgaggtgccggtgctggtcgacctcaagccctccggcgagcattacatggagcatttccatcacgccggcggcgtgccgaaattgctggcgcagctcggcgatctcgttgatctcgatgccaagacgatcaccggccagacgctgcgcgacgtcgcggcgaatgcggaggacgtgcccggtcaggacgcgatccgcccgcgcgacaacccgatcaagaaggaaggcggcctcgccgtcctgcacggcaatctcgccccgcgcggcgccgtcatcaagcaatcggccgccaccccgaagctgttgcagcatacggggcgtgccgtcgtgttcgaatccgtcgaggacatgaccttgcgggttgacgatcccgatctcgacgtcactgccgacgacgtgctggtgctgcgcaatgccggcccgaaaggcgcgccgggcatgccggaagccggctatctgccgatcccgaagaagctggcgcggaacggtaccaaggacatggtgcgcatctcggacgcgcgcatgagcggcaccgcgttcggcacgatcgtgctgcacatcacgccggaatccgccgtcggcggcccgctggcgctggttgagaacggcgacatgatccgcctcgatgtcgcaaggcgcagcatcgagctgctggttgatgccgtcgagttggaacgccgtcgcgccgccttgatgccggccgccgcacccgaggaggcgcggcgcggctacgcctggctgttcaacgagaccatcctgcaggccgacgagggctgcgatttcgatttcatgcagagggccgggcccggcgccgcgaagcgctga

SEQ ID NO: 4952 - DNA, 975 bp, BradyrhizobiumColbertium
gtggatgtcgtgctgagaaaatcgagcttcaggggcgccatgtcggcggcaacgatcgtcgccggtcatctggcgagttgcgtctccgcctcagctgacgagggcgcacgcggcctcgcaaatgcccccccctcgctcgccgccggcgtcgacaagctgacgggaggattgccgtcggcccatgcggagatcgacaccgagcacatcttcggcttcagcatggggtccgatatcggcaagcccggcgaaatcgaggtcgagttcgagaatgtcggcgcgttcggcaagcgctccggcacttacgcagcctgggccaatctcaatcaggtcaagtacacggtctcggacaatttccggatcgcacccggatttgcactgagcggacagcacatcaatggcgttcccgggcttaccgatcatcgcgaccttgccttcagcggcgcagcgctcgaactgcgctacaagctcgtcgatcgtgccgtcgcgcccttcggactgacgcttcatgcacagcccggctggagccggatcgacgacgccagcggcgtgcatatcgcgcagtatggcgcagagtttgccgcgctgttcgatcgcgaactgatcaaggacaggttgtttgcggcattcaacgtctggtacgggaccggcggaacgcgagagatctcaaccaatctctggcggcacgattccgagatgcagctccagacagcaatctcatacgcagtgcagcccgaactgctgctcggcctcggcattcgctacgcgcgggcctacgacggcggcgcactcaaccgcttcataggcgacgcggtcttcgccggcccgaccttctcctacaccatctcgaaggaagtcggcatctccggcacctggcagatgcaggttgcaggcggggcagtcggagacaaccgaagcctcaacctggagcagttcgagcggcaccaggcgctattgcgtctcaacctgcatttctga

SEQ ID NO: 4953 - DNA, 933 bp, BradyrhizobiumColbertium
atggatcgtctcgaaagcatgtcggtggtcttggcggtggcggaggcgggcagcctatcggccgccgcgcgccgtcagaaaatgccgttggcaacggtgagccggaaggtgtcggagctcgaggagcatctccagaccaagctgtttcatcgatcgagccgcgtgctcgtcccaacggacgccgggcgctcctacatcgctgcagccaagcgaattctcgccgatctcaccgaagccgagcgcgttgccgccggcgaatacaccacgccgcgtggtgatctgagtatcacgacgctggtcgcgctcggtcgcctttgcttgcagccgatcctggccgagttcctcgcggcgtttccggaagtggacgttcagctgatcttgcaggaccggacgctcaatctcctggacgagcacatcgacgtcgcgcttcgcgtcggcgacctcgccgacagtggccttatcgccgtccgcgtcggggaaattcaccgcgtcgcctgcgccagcccggcctatctgaagttgcggggaatgccgaagtctccggatgatctctgcgcccacgactgcatcagctatcctccgcttcaatcgccgagcacgtggagattcaagcgagggcagaccgagtatgcagtgcccgtgcggtcgcgcttcattgcgagcaacctggaatcggccgtcgatgccgcacgcgccggcatcgggatcaccgtcgcgttctcttacctggcgtcggatgcgctcaaatctggagcgctcgttgcgctcctgcaggactttcaaccgcccccgcaaccggtcagcttcgtctattcgcccagccggttcatgcccgcgaagctgcgagcgttcctcgatttcgccgtgccgcgcctgaagacgcgcctggccgacatgcccggaaacgttgcgctgcggaggccgcggacgtaa

SEQ ID NO: 4954 - DNA, 813 bp, BradyrhizobiumColbertium
atgacccagccccgaaaaggcactgccctcatcaccggtgcttcgaccgggatcggcgcgatctacgccgaccgactggcgaagcgcggccacgacctcatcctcgttgcacgcaacaggcagcggcttgcatcgctcgcgcgcaggctgagcaacgaaagcggccgcaaggtggagacggtggaagccgatctcacatcccctgccggcctgcgccgcgtcgagcaactcgtcggaaccaacggcgacatctcggtgctggtcaacaacgccggcgtcggcgcctcggccccgctgatcgaatccgacatcgacaagatggaggacatgatccgtctcaacgtcagtgcactgacgcgcctgacctacgcagcggtgcccggatttgttgcgcgccgccatggcacgatcatcaacatcgcttccatcgtcgcgatcgcgccggagctgctcaacggcgtctacggcggctcgaaagccttcgtgctcgcattcacccagtcactcgttcacgagctcgccggcaagggcatccgcgtgcaagccgtgctgccgggcgccactgcgacggagttctgggacgtcgcgggcacgccggttcaccagctcccggcagagatcgtcatgtcggccgacgatctggtcgacgccgcgctcgcaggtctcgacctaggcgaagtcgtgacaatcccggcgttggccgacaagtcggagtgggatcgccacgagagcgcgcggcttgccatgacgaacaggctctcgagcgccattcccgcccctcgctacaacctgcacacgcacgtgaatgcgtga

SEQ ID NO: 4955 - DNA, 531 bp, BradyrhizobiumColbertium
atgtcacgcatcatcagccattcgtccacctcatccatcgccctgcgcacgatcagctggcgcgaacagtctgaacgcctgctcgcctacgccgaacccatcagccggatcggtctctacgcgtcgctcgcactcatctacgcctggttcggcggcatgaaattcaccgattacgaagcgcaggggctggtgcccctggtcgagaacagcccgctgctgcgatggttctacacgctgttttcggtccgcggcttctcgacctttctcggtttcgtcgaactgagcatcgggctcctgatcgcgctccggctgtcgagcccgacctattccgcagccggcggccttctgtcggccggactgttcgtgacgacgctgagcttcatggtctcgacgcccggcgtcgtcgtgccggagctcggggcacccgcgatcacggtcgctccgggacagttcctgctcaaggacgtcggcctgctcgccgcttccttctgggtgttcacggactcgctgaaggccgtcatccgcaggtga

SEQ ID NO: 4956 - DNA, 447 bp, BradyrhizobiumColbertium
atgaaagtgccattcatcttcggggcggctttcgctgccattgccattgcgggtgcgacgcccagcgccgcccatggcatcggcgaaacggtcacgccgcatttcgagcaatcgatccccaatatcccgggcaagtcagtcgtggccctggttgtgaactacgcacctggtggagcgtcgccttcgcacgtccatgccaagtcggctttcatcttcggctacgtgctgtcaggcgcaatcgagtctcaggtgaacgacggacccagacgggtctaccgcgccggcgagagcttctatgagccgccgggctcccgtcatcccgtcagccgcaatgcgagccggtccaagcccgcaagcctgctcgcagtgttcgtcgtcgacagcagcgagaaggatctgaccagtaccgtccggcagaatcagcatcagggagagaaacatgagtaa

SEQ ID NO: 4957 - DNA, 453 bp, BradyrhizobiumColbertium
atgagtaagcgtctcgactacaaccagatcgcgccggcaggcatcaaggcgctcggtggcgtctacggctacctcctgcagagccgcctttccgccacgctgatcgagctggtctatctgcggatctctcagatcaacaattgcgcctactgcctcgacatgcacacgcgcgacctgctcaagaagggagaaaaggtcgagaagatcgcgttgctgcaggcatggcgcgaggccggcaatctcttcgacgaacgcgaacgggctgccctggcctgggcggagacggtgacacgggttgccgagaccggcgtgcccgacgaggcataccaggccgcacgcgccgcgttcgaagagcgtgagctcgtggacctcacgatcgcgatcagcctgatgaatgcctacaaccgcatggccatcagctttcgcgcaacgccggcggctgccgccggctga

SEQ ID NO: 4958 - DNA, 393 bp, BradyrhizobiumColbertium
atggttgcggcggcgctgatcgccgcaaccagcctggcttcgctctcggcacgatccgaggagccacgactgggagacatcaagcgcacacatctcatgaaggaagctctgagcgcacccgggcgcgaggtcatccaggtgcgcgtcgattttcctccgggtgtcgccgccgtccggcacagtcatccgggcgaagagctcgtctatctcatcgaaggcgagctggaatatcagctcgacggcaggcctccgatgatcctgaaggccggagacgtgctgctcattcctcacggagtgcatcacgcggtgaagaatgtcggcagcggcaacgccgcggagcttgcgacctacattgtcgagaccggcaagccgctgttgacgctcggccggtga

SEQ ID NO: 4959 - DNA, 825 bp, BradyrhizobiumColbertium
atgccgcgcatcttgatgacgggagcttcgggcggaatcggaacgcgactgcggcagctcttgccgccgatctatccggacctgctgctctccgacatcacgccgccggcggatctcggcgcgaatgagagattcaagatggcggaccttgccgatctcgcccagtgcgaggcaatgtgcgagggcgtcgacggcattctccatttcggcggctattcggtcgaaggcacctgggaccagattcaccaggccaacatcgtcggttgctacaatctgttcgaggccgcctatcgcaagggcgtcaaacgcgtcgtgttcgcctcgtccaatcatgccgtcggcttctatccgcgccaccacaagatcggcaccgacgtcaccgcgcggcccgacagtcgctacggcgtcagcaaggtgttcggcgaagccgtcggcgcgctctacgccgacaagcatggcctgaaggtcacttgcctgcgcatcggcaatttcggcgacatgccgctcgaccagcgtcgcctctcgatctggctcaagcccgacgacctcgtgcagctctgccgcatcgggcttgagcatcccgacattcatttcgaggtcttctacggcgcgtccttcaacgagcgcgcctggtgggacaatcaccgggcctacgaattcggctatcgcccgaccggccgcgccgaagatttctgcgaacacgcgatggccgagcaggccaagttgaagccggatcccgtcggcgattattttcagggcggcacgttctgcagcatggagttcgatgccgacccgagtcgcgtgatcgactggaataagcggtag

SEQ ID NO: 4960 - DNA, 969 bp, BradyrhizobiumColbertium
atgaaggatgcatcgtcccatcacgagggctggcggccggcgacccattaccctgaccctgcgatcgaagcgctcgatcctcgcttcgaaaagtactggctgaagctttctgcggtggagcggctgacgaccggcctgcgctgggccgaaggtccggtgtggttcggcgacgggcgttatctgctctgcagcgacattccgaaccagcgcatcctcaaatgggaggaagagaccggcgccgtcagcgtgttccgcaagccctcgaatttcgccaatggcaacacccgcgaccgccagggacggctcatcacctgcgaacatggcgggcgacgcgttgttcgcaccgaatatgatggcagcatcaccgtgctgatggactcgttcgacggcaagcggctgaactcgccgaacgatgtcgtggtgaagtccgacggctcgatctggttcaccgatccgaccttcggcctgctcggcaattacgagggttacaaggcggagtcggagatcgacgcgaatgtctaccggctcgatcccgtaagtggcaaggcgaccatcgtcgccgagggcgtgctcggcccgaacggcctgtgcttctcgccggacgagaagatcctgtacgtcgtggaatcgcgcggggtgccgaaccgcaagatcctcgcctatgacgtctcggccgacggcactgcgatctcgaacaagcgcgttcacatcgacgcaggtccaggcacgcccgacggaatgcgctgcgacatcgacggcaatctctggtgcggctggggcatgggcgatcccgagctcgacggtgtcgtggtgttcgcgcccgacggcgtcatgatcggccgcatcgcactgcccgagcgctgcgccaacgtctgcttcggcgggctcaagcgcaaccgcctgttcatggcggcaagccagtcgatctacgcgctctatgtgaacacgcagggcgcgctggggggatag

SEQ ID NO: 4961 - DNA, 1431 bp, BradyrhizobiumColbertium
atggtcaatcgcatgcaattctacatcgacggcgcctgggttgatccggtcgtcaagaagtccaccgccgtgatcaatccggcgacggaagaggcgatgtacgaggttgcgctgggctccaaggccgacgtggacaaggccgtcgccgccgccaagcgcgcgttcgcaacgttctcccagaccagccgcgaggaccgcgtcgcgctgctgtcgaagatcatcgagatctacaagggccgcctcaaggagatcggcgccgccgtgtcggacgagatgggtgcgccgctgccgatggcggagaagctccaggccggcgccggcctcggccatctcatgaccacgctcgacgtgctcaagaactatcatttcgaggagcccgtcggcaccgccatggtgctgcgcgagccgatcggcgtggtcggcatgatcaccccctggaactggccgctgaaccagatcgcctgcaaggtggcgcccgcgctcgccgccggctgcaccatgatcctgaagcccagcgagttcacgccgacctcggcgctgatcttcgccgaaatcctgcatgaagccggtgtgccgaagggcgtgttcaacctcgtcaacggcctcggccccgaggtcggcgccgccatgagcgagcaccccgacatcgacatgatctcgttcaccggctcgacccgcgccggcatcgacgtggccaagcgcgctgctcccaccgtgaagcgcgtcagccaggagctcggcggcaagtcgccgaacgtcatcctcgaaggcgccgacctgcagaaggcggtgaccggcggcgtgatgcacatgttcaacaactcgggccagtcctgcaacgcgccctcgcgcatgatcgtgccggcctcgaagatgaaggaagtcgccgcgatcgcgaaggccgtcgccgacaagaccaaggccggcgatccgcgcgccgaaggcaccaccatcggaccggtcgtcaaccgcggccagtgggacaagatccagggcctgatcaagaagggtattgacgagggcgcgacgcttgtcgccggcggcccgggcctgcccgaaggcgtcaacaagggcttctatgtccgcccgaccatcttcgccgacgtcacgcccgacatgaccatcgcgcgcgaggaaatcttcgggccggtgctcaccatcatcggcgccaaggacgaggccgacgctgtcaagatcgccaacgacacgccctatggtctcgcgggctatgtctatggtccgtcggtcgaggacgccaagcgtgtcggtcgccagatccgcgccggcaacgtcaacctccagggccagcccaacgaccgtaccgcgccgttcggcggctacaagcagtccggcaacggccgcgaatggggcaagttcggcctcgaggacttcctcgaagtgaaggccgtcgccggcttcaacgccgcgtaa

SEQ ID NO: 4962 - DNA, 2364 bp, BradyrhizobiumColbertium
atgcccgttgaccccgctcgcctcgaaatcctgaccgccctcagccgcaaggcgctgtggctgtcgtcctggaccatccaccacgccaaccacatccgcgccaatgcggacggcctcaaggtcggcggccaccaggcttcctccgcctcgctcgcgaccatcatgtccgcgctatacttccacgtgctgcgccccgaggaccgcgtcgcggtgaagccgcatgcgagcccggtgttccacgccatccagtatctgttcggccggcagagccgcgagaagctggagaatttccgcggcttcaagggcgcgcagtcctatccctcgcgcaccaaggacgtcgatgacgtcgatttctccaccggctcggtcggcctcggcgtcgcgcagacgctgttctcctcgctggtgcaggattacgtcaaggcacacggctggatgaaggaccgccgcgaggggcggatgatcgccctggtgggcgatgccgagatggatgagggcaacatcttcgaggcgttggcggagggctggaagcacggcctgcgcaacacctggtgggtggtcgactacaacaggcagtcgctcgatgccgtcgttcgcgagggactctgggaaaaattcgagaacatgttccgcaatttcggctgggacgtggtgatcgtgaaatacggccgcctgatgcgcgaggccttcgccgagcccggcggcgaagccttgaagcgctggatcgacaactgcccgaacgcgctctatgcggcgctgtgcttccagggcggcgcggccttccgcaagcatctgcacgacgagatcggcgaccagggtccgatcacgaagctgatcgacaagcggagcgacgaggagctgctcgcgctgatgtcgaatctcggcggccacgacatggcgagcatgctcgaggcgttcgattccatcgatcacgaccgcccggtctgcttcatcgcgtacaccatcaagggcgtcggcctgccgttccagggccacaaggacaaccacgccggcctgatgacggtcgcgcagatggagaaatatcgcgagagccagaacatccggcccgggcatgaatgggacaagttcgaggggctggcgcaggaggcggccgagctggaagcgttcctcgcgcgggtgccgttcaaccaggacggccgccgcctgagcgcgcccgtcgtcgaggtgccccagcaattggccttcaagccttcggcgcagatgtcgacgcagcagggctttggcctcgtgctgaacgagatcgcgcgcagcgacagcgaactggccaggcgcatcgtcacgacctcgcccgacgtcaccgtctcgaccaatctcggcccctgggtcaaccgccgcgggctgttcgcgcgcgccgagaaggcggacttattccgcagcgagaaaattccctcgacctacaactgggacgcctcgcccaagggccagcacctcgagctgggcattgccgagatgaacctgttcatcatgctctcggcgctgggtctgtcgcaccagatcaatggcgagcggctgctgccggtcggcacgctctacgatcccttcatcgagcgcggcctcgatgccctgaactattcctgctaccaggatgcccgcttcatggtggcggcgacgccctcgggcgtcacgcttgccccggagggcggcgcgcaccaatcgatcgccacgccgttgatcggcatggcacaggacgggctcgcctcgttcgagccggctttcgtcgacgagcttgccgcgatcatggcgttcggcttcgagcacatgcagcgcgatccgggcgagggcggttcggtctatttgcggctctcgacgcgcagcatcgagcagccgcaacgcatcatgacgccggagctgaggcagggcatcaccgacggcgcttactggctgcgcaagccgggaccgaatgccgaggtcgtgatcgcctataccggcgcggtcgcgccggaggcgatcgaggccacaggcttcatcggcgagagccgccgcgacgcgggcctgctcgcgatcacctcggccgatcgcctgcatgcgggttggaccgccgcacggaaattgcggcgggatcgccgcggcgtgcagcatctcagccacatcgaaaggctgctggcgccgttgccgcgtgactgcggcatcgtgagcgtgatcgacggccaccctgcggcgctcggctggctcggcagcgtccgcggccaccgcgtcgaggccctcggcgtcgagcagttcggccagaccggcagcattgcggacctgtatcggcactacggcatcgacgccaacgccatcattgatgcggccgaaagcctcaccactggtgcgccggtgctgcaccggaagatggcggtgtag

SEQ ID NO: 4963 - DNA, 462 bp, BradyrhizobiumColbertium
atgcacgagctcgacgccattgaccgcaagatcctcagctatcttcagaacgacagccgcatgaccatgcaggagctggccgagaaggtcggtctttccgtttcgccctgccatcgccgggtcaagctgctcgaggagcgcggcgtcatctcgcgttacgtggcgaccgtggaccagaaggcgctggggctgcatgtcagcgttttcatctcgatcaagctggcgcggcagaaggaggaggacctcaaccgcttcgcccgcgcgatctcgaaatgggacgaggtgctcgagtgctatctgatgacgggcaaccgcgactatctgctgcgcgtcgtcgccgccgacctcgcctcctacgagacgttcctcaagaccaagctgacgcggctcgacggcatcgcctcgatcgagtcgagctttgcgctaagccaggtgaagtattcgatcgcgctgccagtgtga

SEQ ID NO: 4964 - DNA, 174 bp, BradyrhizobiumColbertium
atgatcagagctctgcttgagcgatatccagtcgatatcgatgctagcttcatgatcggagacaagcaaagcgaccttgcctcggcacaggcggccggcatcgccggctatctgttcaatggtaccaatctccacacctttatcgtcccgttgctaagcgggccggtctcatga

SEQ ID NO: 4965 - DNA, 228 bp, BradyrhizobiumColbertium
gtggtcgacatgtccacctcgaaccaatgggcagagctggcggccacctatttgcgaacccgagaggcccacgggcaacatgaggcggcgaaggccgacctgaaagctctcatgccggaagacgccaaggaagccaccgggcacgggatcaaggccaagcgctccaagtccggcgcaatcagcttcgaagcccaggcgacgcaggggccccatgcatcagtccagtga

SEQ ID NO: 4966 - DNA, 423 bp, BradyrhizobiumColbertium
gtggatcaaatcgtcgcggcttacctcaagcagatcggccgtgagcggccagtgaagccgttggagcggttagcagccaatacgtatggagcctccgttgccgacgccatgatcgcgaagatgctaacgccggagaaccttacggcggtcttgagcaagggtgccatcagcgttggcggggtcgacgctaacatgcagcgcctgaccgatatcgacaccgccaaggtcttcgacatcttgaagcgtgtgaggccaacgaagccggtcgagcttcaaatcctcgtcggcgaggcggaaaacgaaggaagcgtcagccttcacttcgagggcaacggatggaagctttcgggcatccaactgccgaatgccgcggttcaagtgctcgcccagaacctcgtaaggaatcccggccggaacggataa

SEQ ID NO: 4967 - DNA, 138 bp, BradyrhizobiumColbertium
atgcagtcttcatccaaagccatcattgacgcgaccaagaagcgcgcggagaagctgctatcgaagggtaaggatgtcgacttcaaggagcgcttcggatggagcccaacagcggcacaacggacattcggaacctaa

SEQ ID NO: 4968 - DNA, 225 bp, BradyrhizobiumColbertium
atgatcaaggctgccggcgccaggctctggtacctgccgccatactcgcccgacctcaacccgatcgaacaggccttctccaagatcaaacattggatgcggcaagctcagaagcgcaccatcgaggacacctggcgccatatcggtcacctcgtccaggacatccagcctcgcgaatgcgccaactacttcgcaaccgccggttatgcttcaatcaaaatgtga

SEQ ID NO: 4969 - DNA, 192 bp, BradyrhizobiumColbertium
atggcgaagaaagcaaagaagcagtcggctcgcggacgcaagcaggacagggcccgcgtggctggcgggcaggattatgaggtgcaatatgaagcgaagaaaactcgcaaatcagcgtcagccgtgaagaaggccgtgaagaaggtcggcagcagccgcaagaaggtagaacggcgtttgaggtcgaaataa

SEQ ID NO: 4970 - DNA, 741 bp, BradyrhizobiumColbertium
atgtgcaatctgtattcgatcacaaccaaccaggctgcgatcagcgcgctgttccgcgtggtcaatcaatacgtcggcaatctagcgccgatgccgcgcgtcttcccagactacaaggcccccatagttaggacgggggccgagggtcgtgagctcgctaccgcgcgctggggcatgccttcgtcgtcgaaggccctgatggacgcgacaaagaagcgcgccgagaagcagcaagccaaaggcaagacggtcgacttcaaggaactgcttcggatggagccagattccggaactaccaacatccggaacgtaaaatcgaagcattgggcccgctggctcggtgtcgagaaccgctgcgtggttccgttcaactctttcagcgagttcaacaaggccgagggcggcgacatctggttcgcgcttgacgagagtcgtccacttctgtgctttgccggcctatggaccagctggacgtcggtccgaaaggtcaaggaaggcgagaccaccaacgatctgttcgcgttcctgacgacggaagccaacgccgaagtcggcgccatccatccgaaggcaatgcctgtcatcctgaccacccccgaagaggtcgagacgtggatgaatgctcccgctgaggaagcgctgaaactgcagcggccgcttcccgacgggacgctgcagatcatcgctcgcggagtgaaggaagaccccgccaccgaaatggatcacccgctgacggggtga

SEQ ID NO: 4971 - DNA, 765 bp, BradyrhizobiumColbertium
ttgctgaagcgcgacgtcagcgaggctgacacggtcactgtcatcaacgatatgctttccgacatttgcggctatgacaaatatctgcatgtcactagccagtacgcgatccgcggtacctatgttgatcttgccgtgaagtttgacgacgagatcagattcatcatcgaggttaaagccatcgggatagacctcaaggatgcccacgtaaagcaagccatcgattatgctgccaatgagggtatcgagtgggtagtgctgacgaatggtgcccactggcggatctacaaggtgcacttcggccaaccaatcgagaaaatcctcgtttgtgagttggatgccattggggcgagcgcgaagagccccgaggccctagagtgttttggaaacttgagccgcgaaggcttttcgaagggcacgatggcagagttcttgctgcacaagcaggtcacgaacaagtttactgtggcagccgttctgcagaccgacttcattctggaggttctgcgccgcgagattcgtcggatgagttccggcgtcaaggtggaagtcgactatctgaagaccttgttgcgtgaggaagtcatcaagcgcgacttggtcgatagcgatgaagcgaaggcggctctcctgaacatcaagcgattgcagcgggccgcgacccggaagaaggctgcgccgaaagctgctgatgaagaagcgccgatagttgctccggttgaggatgcttctgcctccctcccgcgagcagtcgctactccctaa

SEQ ID NO: 4972 - DNA, 1464 bp, BradyrhizobiumColbertium
ttgacgatcatcagcctgaaaaaggattggacccttggtgagcggcttggcgccggtgggtttggccaggtctttgctgccgagagtccagatgggtcgaaagccgcgattaagctggtgccgaaggcgcctggcgcgagcagagagcttctgttcgtggacttgaaggatgctcgcggaatcgtcccgatattagatagtggcgaacaggacgaacattgggttcttgtgatgcctcgtgcgagcaaatcgctgcgagaccatctgacgagctcgagagctatcggaacgacggatgcgacctcgatcctgatcgatatcgcttccgccctggcggaattggacggcagagttgtccatagagatctgaagcctgaaaacgtcctctatctagatgggaggtggtgcctatcggatttcggcatctctcgatacgcggaggcaacaacggctcctgacactcaaaagcattctcttagtcccccctacgctgctccagagcgatggcgggccgagagggcgaccagtgccgctgacgtctacgctctaggggtaatggcgttcgaaatgctctgcgggaacaagccctttccaggtcctcacatcgaggactatcgagagcagcaccttcataatgagcccccgcccattgacgcagggacctcggtcctgaaggccattatcaccgaggcgttgttcaaggcccccggtgctcgtccgtcaccttcgaatttgctcactcgactgacgcgctcacagcaacaacgctctgccggtctaggaaagcttagcgaggctcatcttggcgaggttgccaaacagagtgaagccgcgcgacaggcatcagcggctcgatctgccgctgagcagcgagcggatctgtttcgtggcgcttccgcgctcatcaatggtctctacgcggagttatccgacgccatcttggaggctgctcccagcgccagaaatgggaaggacgggaaacggaaaggccaaaccatatcgctcggcacagctcagctcgagcttgtgccggtctttaacacgcctcttaatccttgggagtggagagatgctccagcatttgacgttgtggctcaagccggcgtcatccttcgcgttccacgggatcgatatgacttcgaaggacgaagtcactcgctttggtactgcgatgcttttgaagcggggcgatttgagtggatcgaaacggccttcatggtctcgcccttgatgggcagaaacacgacgatgcggccttttatggcggatccgggcatcgaggcggcgaaggcgctctgggccggtatggctgaatttcagctggcctggccaatggagccggttgaatcggaggcgttcatcgaacgttgggccggttggctcgcagatgctgcgcagggccgcttgcatgcgccttcaactatgccagagaagccaatttctcagaattggcgccggaagtag

SEQ ID NO: 4973 - DNA, 126 bp, BradyrhizobiumColbertium
gtgcagctcgcttttgtttgctatcgcgtgtgttctgatatcatcaaatgccggacgaagaacgggtgcggagtgctctatctgaagaggcggcaatccgaggtgttgaaggcaggtctggaatag

SEQ ID NO: 4974 - DNA, 159 bp, BradyrhizobiumColbertium
ttggaagtacgacgcaattcctcgaaaggatggatcacttttcacagtcccaatgtatggccggcgcgtaaggatagacacaaggaaatcgcatccaaggcgcagatcgatcgtgacctcaccaatctggctctgatcgagcaacggatcgatgaatag

SEQ ID NO: 4975 - DNA, 1275 bp, BradyrhizobiumColbertium
gtgacaacccaccccaacgatcccagcctccgctccttcatcgacgtggatcccgcttccgacttcccgatccagaacctgccctatggtgtgttctcaaccgcagccaatccgacgccgcgggctggggtggcgatcggcgactgcgtgctcgacctttggacgctcgagcaggagtccaggctcgacgtggggccgctcggcgtgttctccgaagcctcgctcaatcggttcatggcgctgggcccaaaggtctggtcgaaagcccgtgcgcgcatcagcgagctcttgcggcacgacaatcccgagctgcgcgacaacgaggagctgcgcaagcaggccctggttccgatgcgcgatgccaagttacacatgccgttcgccgtttccggctacaccgatttctactcgtcgaaggagcacgccaccaatgttggcgtgatgttccggggcaaggacaacgcgctgcagccgaactggctgcatatgccgatcgcctacaacgggcgcgcctccaccgtcgtggtgtcgggcacgaaggtgaagcggccacggggacagctgaagccgccgaatgtcgagctgccgagctttgcgccgtgcaagcggctcgacttcgagctggagatgggcgtcgtcatcggccagtcatcaccgatgggcggcatgctcagcgagcaacaggccgaggagatgatcttcggcttcgtgctgctcaacgattggagcgcgcgcgacatccagcagtgggaatatgtgccgctcggcccgttcctggccaaagccttcgcgacttcaatcagcccctgggtggtgacgcgcgaggcgctggagccgttccggctgaaggggccggagcaggaaccggtgccgctcgactacctcaagcagacgaagccgcagaactacgatgtcgagctggacgtctcgctccgcgctgcaggtgccaacgcacccgccagcatcagccgtaccaacttcaaatacatgtactggtcttcggtgcagcagctcatgcaccacgcctcctctggctgcgccatgaatgtcggtgacctcttgggcagcggcaccatctccggcccggaaaaaaaccagcgcggcagcctgctggagatcagctggaacggcaccgagccggtcgagctgcctggcggcgtcaagcgctccttcctggaagacggcgacagcctcgtgatgcgcggctggtgccagggcgagggctatcgcgtcgggttcggtgaggtcgagggaacgatcttgtcggcggagtga

SEQ ID NO: 4976 - DNA, 372 bp, BradyrhizobiumColbertium
atggcattcgcgcggcgtgggcgatctgcgatgatccagctcgatgtgcggagattcgacatggccctccagcttcggccgaactgcgaatattgcgaccgcgacctgccgcccaacgcaaccgatgcgcggatctgctcctatgaatgcacgttctgtgcggactgcgtcgagacgaaactcttcaacgtctgcccgaattgcggcggcggctttgccccgcgcccgatcaggccaacgcaggaatggcggccgggcgtgtgcacgaccaagcaggcgccgtcggacaagcgggtgcatttgaagtacagcgtggaggatatcgcagcgcattgcgcacgggtgaaggacgtgccgccagaaagacggtga

SEQ ID NO: 4977 - DNA, 480 bp, BradyrhizobiumColbertium
atgatttcagttgatgtcttcgatctcaagatcctcggcgcgctgcaggacgacggccggcttaccaaccaggagctcgccgaggtcgcgggcctctcagcctcgcaatgctcgaggcggcggatgcgacttgaggaggcgaaggtgattgcgggctatcatgcggacctgtccagcgaggcgctcggcttcggcgtgatcgctttcatccaggtcgggcttgcgactcactcgccggataactccaagcgttttcgggcgttggtgaaccggatcgacgagatccaggaggcgtattcgcttacgggcgatgccgactatgtgctgaaggccgtgctgcgtgacctcaagggcctctccaacctcgtgaacgacgtcctgatgccgcaccagagcgtggcccatgtgcgttcctccatcgtgctggatcggctgaaggagagctcaaagctgccgctcagggagatcggggccggctga

SEQ ID NO: 4978 - DNA, 1119 bp, BradyrhizobiumColbertium
atgggtccgtttccgcacgatgcaccgccggccgcgatcagtgccgacaacccgatgggcaccgatggcttcgagttcgtcgaatacgcgcaccccaatccggaagaactgcacgccctgttcaagctgatgggttatgcgcccgtcgcgcgccacagaaccaagaagatcacggtctatcgccagggcgacatcaactatctcgtcaacgaggagcctggcacccacggccatgacttcgtcgccgcgcacggcccctgcgcgccatcgatggcgttccgcgtggtggatgccagggcggcatatgaccgcgcgatttcgctcggtgccgaacccgccgacctatcatccgcgcagaagacgctcgacgtccccgcgatcaggggcatcggcggcagtttgctttatctcatcgatcactacggcgccaagggatcggcgtatgatgccgagttcgagtggctgggcgcacgcgatccacggccggccggtgccggcctgttctatctcgatcatctcacccacaacgtccatcgcggccgcatggacgtctgggcaggcttctatgagaagctgttcaacttccgccagatccgcttcttcgacatcgagggccgcgcgtccggcctgttctcgcgggcgctgaccagcccggacggcaagatccggattccgatcaacgaggacgccggcgatgccggccagatcgaggaatatctgaagacctatcgcggcgagggcatccagcacatcgcctgcggctgccgggatatctatcgtaccatcgagggcttgcgcgaggccggcctgccgttcatgccgtcaccacccgacacctatttcgagcggatcgacgcgcgcctgccccagcatggcgaagacatcgcacgcctcaagaagaacggcatccttatcgacggcgagggcgtggtcgacggcggccagaccaaggtgctgctgcaaatcttctcggccaacgcgatcgggccgatcttcttcgagttcatccagcgcaagggcgacgacggcttcggcgagggcaacttcaaggccctgttcgaatcgatcgaggaagatcaaatccggcgcggggtgctgaaggtcgggacggcagcgtag

SEQ ID NO: 4979 - DNA, 1113 bp, BradyrhizobiumColbertium
gtgctcgataaatcagcccccacctcatccgtccgcacctccggcccgctgtcgggcttccgcatcgtcgaattcgccggcatcggacctggtccgttcgcatgcatgatgctggccgacatgggcgccgacgtcgtcacgctcgatcgcatcggcgcaaagaagagcacgaagtcggtggccggtcgcggacgcaaggtgatcgagctcgacctcaaggacaaggcggcgatcgcgcaggtgctcgacctcctggccagcgccgatgcgctggtcgaaggttttcgtccgggggtgatggagcggctcggacttggacccgacgtcgtgctcgctcgcaatcccaagctggtctatggccgcatgaccggctggggccaggaaggcccccttgccaacgccgccggccacgacatcaactacatctccatcaccggggcgctcgccgcgatcggaccgaaggaagcgccggtgccgccgctcaatctcgtcggcgatttcggcggcggcgcgctctatctggtcgtcggcgtgctcgctgccctgctggaagcggaaaagtccggcaatggccaggtcgtcgatgcagcgatgtgcgacggcgcggcatcgctgatgtcgtttttcttcgacatgaccgcgatggggcgctggaccgaaggacgcaaccagaacttcctcgacggcggcgcgcatttctacggcgtctatgaatgcgcttgcggccatttcgtctcgatcggctcgatcgaaccgcaattctatgcgctgctgcgcgaacatgccgggctcaccgatgccgatttcgacgcgcagatggacccgaaggcctggccagcactgaaggagaagctcaaggccgtgttcaagagcaagacgcgcgaggactggtgcaagatcatggaaggcaccgacatctgcttcgcgccggtgctgaccatgtcggaggcgacacggcatccgcacatggtcgcccgcaacgtcttcgtcgagcgccacggcgtgaagcagcccgccccggcgccgcggttttcgcgtacgccgtcggcggttcgcgagccggaagcggcggagatcggggcggtgacggccgcgtggaaggccgcgaagtaa

SEQ ID NO: 4980 - DNA, 801 bp, BradyrhizobiumColbertium
atgtaccagaccacttatcatcgcgcctcctcggtcgacgaggccgcaagccttttcgcaaaaggtagcgacgcgaaattcctcgcgggcggccagacgctgttgccggtgatgaagcagcgcctcgccagcccctctgacgtcatcgacctcggcaggatcaaggagttgcagggcgttgagctgtcgggcgacgtgctgaccatcaaggccgccaccacctactacgacatcatgcagaatcccgatgtgaagaaggcgatccccgcgatctcctatctcacctcggtgctcggcgatcccgccgtgcgctatcgcggaacgatcggcggctcgatcgccaacaacgatcctgccgcggatttcccggccgctctggtcgcgcttggcgccaccgtgaagaccaacaagcggtcgatctcggcggatgatttcttcaagggtctgttcaccacggcgctcgaagacggcgagatcatcaccgccgtgtcattccccgttccggcgaaggcaggctacgaaaagatgcggcacccggcctcgcgctttgcactgaccggcgtgttcgtggcgcagaccaagtcaggtgaggtgcgggtcgccgcgaccggcgcctcgcagaatggcgtgatgcgggtgcccgcgatcgaggcggcgctgaaggcgaactggtcgccgtcggcgatcgacagcgtgacgatttcggcgaacggattgctggccgacatccacggcacggccgagtaccgcgccaatctcgtcaaggtgatggctcagcgcgcggtcgcagcggctcgctga

SEQ ID NO: 4981 - DNA, 2343 bp, BradyrhizobiumColbertium
atgggtgttgaaggcatcggcgcacgcgtcgtgcgcaaggaagacaagcgtttcattaccggcaagggccgttacgtcgacgacatcaagctgacgggcatgacccacgcctatttcgtccgcagcccgcacgcgcacgccaaggtgaagaagatcgactcttccgccgcgctgaagatgccgggtgtggtcgcggtgctcacgggccagcagctcgtcgatgacaaggtcggcaatctcatctgcggctgggccatcacctcgaaggacggcagcccgatgaagatgggcgcctggccggcgatggcgccggagacggtccggttcgtcggccaagccgtcgccgtcgtgatcgccgagagcaagaatctcgcgcgcgacgcggccgaagccgtcgtcgtcgattacgaggagcttcccgcagtcgccgacatgcgggcggcgatcaagcccggcgcgccgcagcttcatcccgaggctccgggcaaccaggtctacgattgggtgatcggcgacgagagcgccaccgatgccgcctttgccaaggccgccaatgtggtgaagctcgacgtcaccaacaaccgtctggctccgaacgcgatggagccacgcgcggcgatcgccgattacgatccggccgaggagcatttcacgctctacacgacatcgcagaacccgcacgtcgcccgtctggtgctgtccgcgttctacaacatcgcgcccgagcacaagctgcgcgtgatcgcgcccgacgtcggcggcggcttcggctccaagatcttcatctatcccgaggagatggtggcgctgtgggcatccaagaaggtcgagcgtcccgtgaaatggaccggtgatcgcagcgaagccttcctcaccgacgcgcatggccgcgaccacatcacccatgccgagatggccttcgacgccaacaacaagatcaccggcctcaaggtgaagacctacgccaatttcggcgcctatatgtccctgttctcgtcctcggtgccgacctatctctacgcgacgctgctgtcgggccagtacaacatcccggcaatccatgccgaggtgatcggcgtctacaccaacaccacgccggtcgatgcctatcgcggcgccggccgtcccgaggcgagctacctgatcgaacggttgatggaaacggcggcgcggcagctcaacgtcgatccggcccagttgcgccggaccaacttcatcacccagttcccgcaccagacgcccgtcatcatggcctacgacaccggcgacttcaacgcctcgctggatgccgcgatgaaggcgatcgactatgccggattccccgcccgcaaggccaaggcgaaagccgacggcaagctgcgcggcatcggcctctcctgctacatcgaggcctgcggcatcgcgccgtccaaggcagtcggcagcctgggcgccggcgtcggcctgtgggaatcggccgaggtgcgcgtcaacccggtcggcaccatcgagatcctcacggggtcgcacagccacggccagggtcacgagaccaccttctgccagctcgtcgccgaacggctgggcattccgatcagccaggtctcgatcgtccatggcgacaccgacaaggtgcagttcggcatgggcacctacggctcgcgctccgctgccgtcggtcttaccgcgatcctgaaggcaatggagaagatggaatccaaggccaagaagatcgcggctcatgcgctggaagcatcggaagccgacatcgtcatcgagaacggcgagttcaaggtgaccggcacggacaaggcgatcgccctgccgatggtcgcgctcgcagcctataccgcgcacaatttgcctgaaggcatggagccgggcctgaaggagagcgccttctacgacccgaccaacttcaccttcccggccggcgcctatatctgcgagctcgaggtcgatcccggcaccggcaagacctccttcatcaacttcgtggcggccgacgatttcggccggctgatcaatccgatgatcgtcgagggacaggtccatggcggcctcgcgcagggcattggtcaggccctgctcgagcacgcgatctacgatgccaacggccagccggttacggcctcgttcatggactatgccatgccgcgcgccgacgatttgccctcgttcaacctctcccacaccacgacgctgtgcccgggcaatcccctgggcatcaagggttgcggtgaggccggtgcgatcggcgcttcggcggccgtgatcaacgcgatcacggatgcgatcggcaagaacaacctggaaatgcccgcaaccccggatcgggtgtggcgcaccatccacgcggcttga

SEQ ID NO: 4982 - DNA, 486 bp, BradyrhizobiumColbertium
gtgtctacagtcaaactgacggtcaacggcaaggccgttgctgtcgatgtcgaggaccgcacgctgctggtccagcttctgcgcgatcacctcaatctcacggggacccatgtcggctgcgacaccagccagtgcggcgcctgcgtcgtgcacatggacgggaaagccgttaaatcctgcaccatgctggccggacaggccgatggtgccagcattaccacgatcgagggcatcgcgaagggcgacgagctgcaccccatgcaggctgccttccgcgacaatcacggtctccaatgcggctattgcacgcccggcatgatcatgtcggcgatcgacatcgtgcatcgccacgggggccagctcgacgaggccaccgtgcgtcaggagctcgaaggcaatatctgccgctgcaccggctaccataacatcgtcaaagccgtgctggatgcggccgggcgcatgaaggtctcgcaggcggccgagtag

SEQ ID NO: 4983 - DNA, 2040 bp, BradyrhizobiumColbertium
atgtccgggcgtatcgcgtcaccgtctaagcgcacactgtttccgaccctcaggttccgcgcaaagatcatcctcggatttgctgcagtgctggcaatctccgccggcagcatggccttttcctatttcggcttcgagcgggtcgctttcggagtcgggtcgtaccgcagcagcgtttcggaggccgatcttgcccgcaacatcgaccgcgagctgctggcctatcgctctgctgccaaatatttcgtcgtcaccggcaaggaagacgacgccaaggccgcgctggatgccgaaggcagcctgaagaatgcgatcgacgaggccgtcaagggtgtcaagaacccggcaaggcaggagagcctcgccaagctcgccaaggagttctccaatttctccagcacgtttggaaggatcctccaggccaagcgtgatagtgcgctgctggtgcagaaccagctcgggcgtaacgccaacctcctgaaatacaagctcgacgacatcggcaacaacgcgtccgattccgaagcacaggcaatcgagttcggcaccaagcaggtcaatgcccaattccagaccgcgagcgcggcggcgaccaacttcgtgctgacgtccgaccagacgatcgccaccagcgcgctggcccggctgaaattcgtcgagaactcgctcggcgcgatctactccatggacgacaaggtcgtcgcgggcctgaaggatgccaaggcgctgctcggggcctatcgcgaagcactggagaagctgattgccaatgccaagctcgtcgatgatctcgtcaccgcgatgaacggctcggccggtgcgatcctgcaaggcgcgaccaccatgaagtcggacctcgtcgccgagcagcggcggctggattccgaatcggaggcgaccatcggccagaccgagcaattggtgctgatgctggccgtcggtggcacgctggttggggtggtcctggccttcctgctcggcaccggcatctcgcgtccgatgatcgcgatgtgcaaggcgatgcgcgagctcgccgccggcaatttcgacgtcgtgctgcccggcctcggccgcaaggacgagatcggcgagatggcgggtgccgtcgaggagttcaaggttcaggcggtcgccaaggccgagcgcgacgccgccgccagcgaagcccagaaccgggagcaggccgcaagccgccgcgccgagctgatccgcttcgccgacgatttcgagagcgcggtcggcgccatcgtctccaacgtctcggcctcggccgtgcagctggaatcggcggcctcgacgctgacccgcaccgccgagaccacgcaaagcctgtcgagccaggtcgccggcgtctccgagcaggcctcgtccaacatgcagtcggtcgcgaccgcgaccgaggagctgtcggcctcggtcgaggagattggccgccaggtccgcgattccagccggatcgccgaagccgccgtggtgcaggccaaggagaccgacggtcgcatcggcaagctgtcgcatgccgcccagcagatcggcgaagtggtcaagctgatcacggcgatcgccgagcagaccaacctgctggcgctcaacgccacgatcgaggccgcccgcgcgggcgaagccggccgcggctttgcagtggttgcgagcgaggtgaagtcgctggcaagccagacggcgaaggcgaccgacgagatctcctcgcacattgcaggcatgcagggcgccaccgccgaatcggtcgctgcgatcaaggagatcggcgcgaccatcggccagatctcgtcgatctcgacgtcgatcgcgagcgcggtcgagcagcagggcgcggcgacgcaggagatcgcccgcagcgtccagacggtcgcgcagggcacccagactgcggctaccgacatcggcgaggtcaaccgcggtgccgccgagaccggatctgcctcggaagaggtgctcaattcggccaagcccctgtcgagcgagagcacccgcctgcgcgccgagctcgaccgcttcatggcgacgatcagggccgcgtag

SEQ ID NO: 4984 - DNA, 1581 bp, BradyrhizobiumColbertium
gtggcaggcagaatgccgcactcccatgatcggatcgaccccgtccacgtcacctgggacggggctgcttccattgatcagacgcaacaaccgatggaattgcagcaaagtccagcgctgaactatgcacccgtagtcccggcggcgacggcggccgaccgtatcgtggagaccagcattccctcgaggctcgatgcgctgccgtggagcggtttccacacccgcgtcgtgctcgcgctcggcattacctggatactcgacggacttgaggtgacattggccggtgcgctctccggcgcgctgaagcagagcaactcgctgcatttctccaatctcgatctcggtatcgcgaactccgcctatctcgccggcgccgtgctaggcgctctcggcttcggctggctcaccgatcgcatcggccgcaagaaattgttcttcatcacgctcgcgctctacctgtcggcgacggccgcgacggccctgtcatgggatgtcgcgagctacgcgctgttccgattcctcaccggcgcgggcatcggcggcgagtataccgcgatcaactcgaccatccaggagctggtgccggctcgctatcgcggctggacggatctcgtcatcaacggcagcttctggatcggcgccgcgatgggcgcggtcgccgccatcgtgctgcttgatcccgccgtgatcgatcccgacctcggctggcgactcgcctatctcatcggcgcggccctcggccttgtcgtgctcctgatgcgaatgtggatcccggaaagtccgcgctggctgatgattcatggacgacccgacgaggcccatgccatcgtcggcgacatcgagcgttcggtgatcgggcacaatcaggatacgagcggcgggcgcttcaccaagattcggctgaggatgcgtgaccacacgccgattgcagaggttctccacacgctgttctcgctctaccgtcagcgtgcgctggttggcctcgtgctgatgagcgcacaggcgttcttctacaacgccatcttcttcaccttcgcgctggtgctgaccgatttctacggcatccgctccgatcacgtaggctggtacctgctgcccttcgctgccggcaatttcctcgggcctctcttgctcggccgcctgttcgatacgctcggccgccgcaccatgatcatgttcacctatggcgcgtcgggcctgttgctggcgctgtcgggctatctgttctcgattggtgtgctgagcgcgcagggacagacgattgcctggatggtgatcttcttcttcgcgtcacccgccgcgagtgcggcctatctcaccgtcagcgagaccttccccctcgaggtgcgtgcgctggcgatcgcggtgttctatgcggtcggcaccggcatcggcggcgtgatcggaccggcactgttcggtgcgctgatcgacacggggtcgcgcaacagcgtgttcgccggctatctgctgggggcggccctgatgatcgtggcagcgatcgtggcggggcgctatgccgtggcggcggagcgcaaatcgctcgaacagatcgcgcgtccgctcgcctttatggagtag

SEQ ID NO: 4985 - DNA, 819 bp, BradyrhizobiumColbertium
atgaaatcggaacttgcggacatggcgatggaccagaagcgcaccataccggacggcgatgcaccggatgcggtgccggtgccgcatgcgctcgtcccgcatctcgatgaacttgccattttgctcgacattgacggcacgctgctcgatctgatgccgacgccgcgcgaggtatgggtgccgccgggcctgtcggaaacgctgaagcatctgaccgagcgcacctccggcgcgctggcgctggtcagcggtcgctccctcaacgacatcgacctgatctttgcgcccgacgtgttccgcgccgtggccggtcacggcgccgagatgcggctgtcggcggacaatgaagcggaggccgtgcacgcgccgccgttggacaaggagctgaagcggcggctcgcggcgcttgccaaactcagtccgggcattctgctcgaggacaagggctattcgctggcgctgcattaccgcctcgcgccgcatgcggaaaaggcgatctacgaagccgtttcgctggtccgcgcagagttgcccaatgcgccgatcgaggtgctgcctggcaagttcgtctgcgaaatcaagcattccggtttcacgaaggcaaccggggtatgcgagctgatgaagcacgagcctttcaagggacgtcgcccgatcttcatcggcgatgatgtcacggacgagaccgtgttcgcgatcatgcccgacatggatgggctcgcgttctcggtcggtcgccgcgccatgggcgtgaacggtcacttcgatgcgccagccgacgtccgtgcgttcctcgcgcgcctgctcgatccaaggtga

SEQ ID NO: 4986 - DNA, 1464 bp, BradyrhizobiumColbertium
gtgaacttagttgtcgtttcaaaccgcgtcgcccgcggcaagccgaacgagcccatgacgggcggccttgcagcagccttgcttccagttgtggaacattccggtgcgatctgggtgggctcctccgggcgcgtgcgggatggacaccagaaagaacctttcgccgaaatcgaggcgctcgggacgggtgcaatcgcgacgctggatttgccggcggcacattacggcggttattacgaaggcttcgccaattcggcgctgtggccggcgctgcactcccgcagcgatctgatccgtgtctcgcgggacgattatgtcagctatcgcgaggtcaacgccttcatggcgagggccttgatgcgtttccgcaagccacagactgcgttctgggtgcaggattaccatttcctcgcgctcggcgccgagctgcgcgacctcggcgttgatgacccgatcggcttcttcctgcatacgccgtggcccgttaccaccgtgatgcagggcgtgccgaaccatcgcgagctggtcacggcgatgctggcctacgatctgctcggcttccagaccgaggaggatcgccagaacttcctcggctatgtcggcggcgagctcggcctcgcgatcgaggacggcgtcgcgatctcgcagcaggggcgcacccgctgcgaagtgtttccgatcggcatcgatgcggagaagtttgcggcctacgccgcgaagtcggtctcccatcccgacgtatcgcgcctgcgccgcagcctcaatggcgagcgcctcgcgatcggcgtcgaccggctcgactattcaaagggcctcctcaaccgaatcagtgctttcgaccggctctggaccgagcatccgcagtttgcgcggggcatctcgctgctccagatcgccaatccctcgcgcggcggcatcgaggcctatggcaatctccagaacgaggtcgcccgcctcgtctcggacgtcaacggccgccatggcgaggtcgactggacgccgatccgctatctgaacaagggcttcagccaggccgtgctcgcgggtctgtaccgcaccgcgcagatcggcgtggtgacgcccctgcacgacggcatgaatctcgtcgccaaggagtatgttgccgcccagaacccggccgatcccggcgtactggtactgtcgaagttcgcgggcgcggccaacgagctcgacgccgcactgctggtcaacccgcacgacatcgacggcatggcccgcgcgatcgcggtcgccgcatccatgccgttgaccgagcgcaagatgcgctgggacgcgatgatgaagaagctgcgttgccacacgatccagcaatggtccgccgatttcgtcgccaagctcgagaagtgccggaccgagaaggctgccgttgccccgctcgcagcccaaccgccgcaggcgctgcgttggctgaagtcggcaatctctggcgtgcggttgatctga

SEQ ID NO: 4987 - DNA, 342 bp, BradyrhizobiumColbertium
atgcccgtcagcaagaccatggccgccctgggcctgattttgaccctcggctccgtcctcgcagtacccgccgccgcacaggtctgcagccggcaaggcgccgacgtcagctgtgacgacggccggcgcgggatgctctcgggcgatgccatcctctggccagatggcacgcgctcgagctcgacgccgcatcagagcgtgatcatcggcaacaagagctccgtgcatgtgggccccggcgtgttcgtcggccagggcaagggcgtggtgccgctggacaatccgaacgcgccgaacaagcggcaatgcgcgattctggatggcgtatcgtattgctattga

SEQ ID NO: 4988 - DNA, 87 bp, BradyrhizobiumColbertium
ggagagatggccgagtggcttaaggcgcacgcttggaaagcgtgtgtgcgggaaaccgtaccgtgggttcgaatcccactctctccg

SEQ ID NO: 4989 - DNA, 1119 bp, BradyrhizobiumColbertium
gtggtgatccgcgccatggtccgacctatccttgcgctggcggcggctcttgccactgccttggcgcctgtcatttgtctcggcgaaagcagcaagcccttgccggccaaggcaacgagagaactacccgctgagctgctcgcgctgcttgagcagaagaagatgccgaaatattcacctatcgtcgtacgtattttcaaggaggaggccgagctcgaggtctggaaacaggacgcgaccggccgcttccagattctcaagacctatccgatctgtcggtggtcgggagatctcgggccgaagctgtacgaaggcgaccgacaggctccggaagggttctatacgattacacctgagttgatgaatcccaactctaacttctacctttcgatcaacctgggctaccccaacgcattcgacaaggcgcacaagcgcaacggcagcttcctcatgatccacggcgactgctggtcgagcggttgctatgccatgaccgacgaacagatcagcgaaatctattcgttggcgcgcgactcattcctcggcggccgcccgtcgttccaggtccaggcctatccgttccgcctgacgccggcaaatctggcgcggcatcgaaacagtcccaacctgaccttctggaaaatgctcaaggtcggcaacgatcatttcgagacgacgcgtctcgaacccaaggtggatgtatgcgaccgccgttatgtattcgatgcgcaaccacctccaagttcgcggcaccctctcgcattcagcgcaaacgaaaaatgcccgcccttcgtcgtcaatcccgaaatcgcgcgagcggcgtggcaaaagcagcacgccgacgaacgcgcatacgcgcaattggtcgaagacaatgtgccggcggccccgatctacagcggactcgacggcggcatgaacaaggctttccatgcgcggtttcccggccgagtaacgcttgcgaaagtgatgccgtatgcgtcctacctgccgcagctcccaccgatcccgtggaccgaccgtgacggctcattgacgagcaaatggtttgggagttcgttcgccgggtcggtcgtgtgtgatgcggctgctggcggctcgccgtcgggccgctgctga

SEQ ID NO: 4990 - DNA, 225 bp, BradyrhizobiumColbertium
atgaacagagagctgcgggagtttcgacggcttgaacgggtctgcctggagcaggccgccctctccaccatggatctcacgcgaagcgggctgctcaaggtcgcggacgattgtcgcatcgccgccgagaccatcgaggcacaattgcctcgcgggccattcgcagaggccgtccaggcgctcaagctcgccttgggcgccaagacgaggtcctggcggcactag

SEQ ID NO: 4991 - DNA, 957 bp, BradyrhizobiumColbertium
atgtcctcaacccgcatgatcaaggccaacgggatcgagctgttcatccgcgaagccggccagggtccgctggtcgtgctttgccatggctggccggaactatcctattcctggcgtcaccagatccccgcgctggccgcggccggctttcacgtcgtcgccccggacatgcgcggctatggccagagcgccgcgccgcccgacgctgcggcctactcgatcttcgacacggtcggcgacatcgtcggtctcgtgcaggcgctcggagagcgcgaggcgatggtggtcggccacgattggggcgctccggtcgcttggcacgcggcgctgttccggcccgacatcttcacggcggtcgcgggactgagcgtgccgccgccattccgcggccgcggcaagccgctcgatctgttgcgccagggtggcatcaccaatttctattggcagtatttccagacgccaggcgtcgccgaagccgagctggagcgcgacgtcgctagcaccatgcgcatcgtgctcggcggacgcggcctcgccgatccgtccgcggccatgttcgtgcaggagggcaagggctttctcggccatgcgggcgccgaagagccgctccccggctggctgagcgaggctgacctcgcctatttcaccgaaagcttccgcaagtccggcttccgcggcgggctgaactggtaccgtaacatcgaccgcaattgggagctgaccgcgccctggcaggatgcccagatctaccagccttccctgttcatcgcaggctcgaaggacgcggtgatcacaggcctgatcggcgccaagcgcgtgaacgagctcgaacgcgtgctgcccaacctgaggcggaagctgatcatcgagggcgccgggcattgggtgcagcaggagcgacctgacgaggtgaacacggcgctggtgcaattcctgaaggcgagtgcggctcagtag

SEQ ID NO: 4992 - DNA, 1245 bp, BradyrhizobiumColbertium
atgcttcgttgcaaccggttcaccgccggcacgctggcgcgcggcctgatcgcggcggccttgatcgcaggcatggcctggggcggggcggttctggctgccaaccagagcgtccagggcgccaagaaagcggacgatgttggcttcgatggcgatgccccgacggcgatcctgatcgaggcctcctcaggcagcgttctgttcgagaagaacgccgacgagctgcgcgctccgtcgagcatgatgaagctgatgaccgcggaggtcgtcttcaatgctatcaagaagggcgacatcaagctgacggacgagtaccggatcagcgagaatgcctggcgccgaggcggcgcgccctcgggcggttcgaccatgttcgccgccatcaacagcaaggtctcggtcaacgatctcctgcatggcgcgatcatccagagcggcaatgacgcctgcatcgcgctcgccgaagccatggcgggcaacgagcggattttcgcggccgacttcatgaccaagcgcgcgcgagaactcggtctcaccagatcgactttcgccaactccaatggcctgcccgaccccggcaacaagatgaccgtgcgcgagctcgccatgctcgcccggcacatcattctcgacttccccgaattctacaaactgttcggcgagaaggagttcacctggaacaagatacgacagcagaaccgcaatccgctgctcaattcgatggaaggcgccgacggcctgaagaccggctacaccaaggagggcggctacggcatggtcggttcggccgtccagaacggcacgcgcctgatcgtcgtcgtcaacgggctcgacgattccgacgaccgcgccagcgaagcgaagaagatgctggaatggggcttccgcaatttcgagacgcgcacgctgttcgcggccgagcagccggtcggctacgccaaggtgttcggcggcgagagccgctccgtcaagctggtagccaagacgccggtgaaggtgatggttcacaagaacggcagcgacaagctgattgcgcgcatcgtctatagcggcccggtgcgtgcgccaatcgagcccgggcagagggtcggcgtggtcaaagtctggcgcagcggcaacgtcgccgtggagacgccggtctatgcggccgaggcgatcggcaccggttcgaccatgcgccgcgcgatcgacggcgccagcgagctcgtgatcggcatgttccgcgcaggcgccgagaagctctga

SEQ ID NO: 4993 - DNA, 687 bp, BradyrhizobiumColbertium
atggctgagggctcgctacagcggccgtccggacgcggacgcttcatcacctttgaaggcggcgagggcacgggcaagtcgacccagatcaagaagctcgcagaccgcctcaaggcggcaaagctgcgcatccgggtgacgcgcgagccggggggctcgccgggcgccgagatcatgcgtcatctggtcctgtcgggcatgggcaagctgctcggcccggaagcggagacgctgctgtttgccgctgcccgggacgatcacgtccgcaccgtgatccagccggcgctcagccagggcgtctgggtgctgtgcgaccgcttcgccgactcgacccgggcctatcagggcagccttggccgcgtgcccgatggcctgatcaacgccatgcagcgggtcaccatcggcgacctcaagccggacctcaccatcgtgctcgatttgccggtcgagatcggcctgcaacgcgccgccgcgcgccgcggcagcggcacgcccgacaggttcgaggccgagaagctcagcttccaccagggcctgcgcgaggcctatcgcaagatcgcagccgaggatcccgcgcgttgcgtgctgatcgacgccaattcggaccctgacacggtcgccgcgcgggtctggaccgcgctgcgcgagcgtctgcttcccacgccggcgtcagtggtgtcggcatga

SEQ ID NO: 4994 - DNA, 1047 bp, BradyrhizobiumColbertium
atgagcccacgtcaggccgagcgagaaaccgcagttacgcatccgcgcgagacgtcgctgttgttcggccatcgcgaggccgaggccgcgctgctgagcgcctatcgcagcgggcgcattcctcatgcctggctgatcggcggcccgcaagggatcggcaaggcaacgctggcctatcgcatggcccgcttcgtgctcgctcattcgcagccgctggcgcccgccgtgcagcgcgccgaagatcttgcgatcgatcctgacgatgccgtggcgcggcaggtggcggccggctcgcatggcggcctgctgacattggagcgtacagccaacgaccgcggtgtgatgcgcaccgtgatcaccgtggacgagacgcgggagacgattgcgttttttggctcgaccgctgcggccgaaggttggcgtgtctgcatcgtcgacaccgtcgatgaactcaatcccaacgcggccaacgcgcttctgaagattctcgaggagccgccgcagcgatcgctgttccttctggtgagccatgcgccggctcgggtgctcgccacgatccagtcacggtgtcgcaagctgcggctgcggccgctcgcgacggatgatgtgatcggagcggcttcttcagtcgccaacatcgatccgagcgatgccgcgctgcgcgaggcggcggaagcatccgagggcagtgtggcgcgcgccttggcgctgctcggcggtgatgcgctcaagctccagcagcgcaccgcggccctgctggcccgcctgccgcaggtcgacccgcgcgaattgcacacgctcggcgattcgctcggcaccagcgaccgcgtcgcgctcgccgccttcgtcgacggcatcgatcgctggatcgcggagcgcctgcatgcggacgacgtcaatgccaaccagaacctgccgcgccttgcgcgcttagctgaggtatgggaaaagatcgtccgcgccgcgcgcgacaccgaaacctacaatctggagcgcaagcccttggttttctcggtgttcggctggctggcggacgcaacgcgctag

SEQ ID NO: 4995 - DNA, 2058 bp, BradyrhizobiumColbertium
gtgcgcagcggctttccgaggggatcatgcgcaaatcaacaatcgaactcaggttcgtttccagatttcgagaagccggtaaaggaattcgtggtggcaacgcgagctaggaaaaccgtcaagagcaagagcggcaagaaggctgcgaaaaaagccgtcaagaaagccacgaagaaggccgtgagggggcgcacgcgcaagactgcgaagagtgcaaagaaggcagccaagtcgaagacggctcacgccaagaaaagcgctgccaggacggcaaggaaggccggcaagaaggctgctaggaagcagctggctgccaagaagacggtgaagagggcggccaagagagcagctggagctccggcgaagaaagtggccaggacggtgaggggcactgcgcctgcagtgatcgtcaagccagcttccgccgttacgccgccgaaggcagcgaagccgaagatctcgactccgaaggtgccgcgtgcgccgaagcccgcagcgcccgttgccaccccctcgcgcgacaacgtgttctacgtcacgacagctatcgcctatcccaacggcagcccgcatatcggccatgcctatgaggcgatcgcgaccgacgtgctggcgcgctttgcccggctcgacggcaaggacgtgttcttcctgaccggcaccgacgagcacggtcagaagatggtgcagacggcggccggcgaaggcatgtccgccgccgcgcttgcgacccgcaatgccggccgtttcagggagatggacgaacgcctgaacgtgtcgttcgaccggttcatccgcaccacggaggagcagcatcaccgctccagccaggagatctggcggcgcatggaggcgaacggcgacatctatgccgacacatatgccggctggtactcggtgcgcgacgaggcctattacgctgaggacgagacgcgcctgaacgatgatggcgtcaggcttggaccgcagggcacgcctgtcgaatgggtcgaggagaagagctatttcttccgtctgtccgcatacgaggacaagctgctgaagctctatgccgatcaccctgatttcatcggtccggactcccggaagaacgaggtggtgagcttcgtcaagagcggtcttcgcgacctctcgatctcgcgcaccaccttcgactggggtgtgaaagtgcctggcgacgaagagcacgtgatgtatgtctgggtcgacgcactgaccaactacatcacgggcgtcggcttccccgacgagcaggatgcgaactggcgctattggccggccgatgtgcacatcatcggcaaggacatcatccgttttcacgccgtgtattggccggcgtttctgatgtcggccgggattccgctgccgaagcgggtctatgcccacggcttcctgttcaacaggggcgagaagatgtcgaaatcggtcggcaatgtcgtcgatcccttcaacctcgccgagcagtacggcgtcgaccagctgcgctacttcttcctgcgcgaggtgccgttcgggcaggacggcaattacaaccacgaggccatcgtcgcgcggatcaatgccgatcttgccaacgacctcggcaatctcgcgcaacgctcgttgtcgatgatcgccaagcagctcggcggcgtgctgccggagcccggcgagttcagcgacaatgacaaggcaatccttgcgatggccgacggcatggttgccacgtcacgcgaagccatggcgacgcagcagatccatcaatggctgaacgccgtgtgggccgtggtcgcagaagccaaccgctactttgcgggagaggcgccgtgggcgctcgcgaagactgatcccgtcaggcagaggacggtgctttatgtcaccgccgaggtcgtgcggcagatcgcgatcctggcccagccggcgatgccgacggcctcgggattgctgctcgacagcctcggcatccccgcagacgaacgcaatttcgcgatgctcggtggcgccaagcggatcgcgcccggctcgatcttgccggcaccgacgccggcattcccgcgctacgtcgagccggcggcctag

SEQ ID NO: 4996 - DNA, 777 bp, BradyrhizobiumColbertium
atgttggtcgacagccactgccatctggattttccggactttgcggaagatctcgacgggatcgtgtcgcgggcgcgagctgccggcatcgtgcgcatggtcacgatctcgacgcgggtgcggcggctgaaggacctgctcgcgatcgccgaccgttacgacgacgtatattgctcagtcggcacccatccgcacaacgcggacgaggaagacggcatcgcgccggacgagcttgttgcattgacggagcaccccaaggtcgtcgcgctcggcgaggccgggctcgactatttctacgataacggctcgccggaggcgcaggcgaggggctttcgcacccacatcgccgccgctcgtgccaccggcctgccgctggtgatccacacccgcgaggccgacgaggactgcgcacgcatcctggaagaggaatcagcaaagggatcgtttcgcgccgtgctgcattgttacaccggcgggcgagagctggcgctgaaggcggtgtcgctcgggctctatgttggcttcaccggcatcctgacgttcaagaaatcggaggccttgcgcacgctcgccgccgaattgccgtccgatcgcatcctggtcgaaacggattcgccctatctcgcaccgggtaaatttcggggcaaacgcaacgagcccgcttacgtggtcgaggtcgcaaaggtgttggcagagactcgcggagtctcgctcgacgagatctcgcgccagacgaccgaaaacttcttccgtctgttctcgaaggtgaaagcttga

SEQ ID NO: 4997 - DNA, 798 bp, BradyrhizobiumColbertium
atgacgctgacattgacgatcctgggctgcggctcctccgccggcgttccccgcccggcgctcggctggggcgcctgcgatcccaacaatcccaagaaccgccgtcgtcgctgttcgctgctggtcgaacggatctccgagcatggcacgacacgcatcctgatcgacacctcgcccgacctgcgcgagcaattgctctcgaccaatgtcgaccacatcgacgcggtgttcctgacgcacgagcatgccgatcagacccacggcatggacgatcttcgctccgtcgtcatgcacatgcgccggcgtatcccgacctatttcaaccagtcgacggccaaagacatcctgtcccggttttcctattgcttcatttcgccagagggcagcgattatccgccgatcctgacccggcactcgattgaagctggcgaaagccagaccatcctggggaagggcggggcggtgacgatgaccgccttcctggtgcagcacggcaacattcccgcgctcggctaccgcatcggcgatgccgcctacacgcctgatctcaacgacatcccgcgcgagagctggggcgcactggaaaatctcgatctctggatcgtcgatggtctgcgctataccagccatgtcagccatttcagcatcaacgacgcgctgtcgtggatcgaacggttcaagccaaagcgcgcagtcatcaccaacatgacggccgatgtcgattacgaggtcatcaggcagtcgctgccggccggcgtggtgccagcctatgacgggctgcggctggagacgcattga

SEQ ID NO: 4998 - DNA, 549 bp, BradyrhizobiumColbertium
gtgcgccgcgctctggacctgctttatctcggcgcgggctacgccgcgggcgtcttcctggtcgcaatcttcgcaatcatgatggccatgtccgtcgggcgccagttcgcgatcaacattcccgccggcgatgatttcgcgtcttggtgcatggcggcgatggctttcctcggtctcgcgcacacattcaagcgcggggagatgatccgggtgggactcttgctggaacgcctgcacgggcggaccaagcagatcgcggagatcttggcgctcgggattgccaccgccttcattctctatttcacgcgctatgccgtgcagatgacttacgactcctggcgcttcaacgatgtggcccagggcgtcgtcgcacttccgctctggattccgcagctcggctttgccggtggcctcgcgatcctgtcgatcgcgctcatcgatgaattggtcaatgtcgccggcggcaatcgcccgagctacgagaagggctcgccggacgagacgccggacgaattcatcgagcgcatctcgcagggcggcggaggttga

SEQ ID NO: 4999 - DNA, 1314 bp, BradyrhizobiumColbertium
atggccaatctcggcatgatcgagctggcgttcgtcctgctcggcgtaatgattctgctgctgggaagcggcgtgtggatcgcagtctcgctcggcctcgtcggcttcgtagcgatggcgctgacgaccagcttgccgctcggcgccgtgctcgccaccacaacttggagcgccagctcctcgtggacgctggccgcgctgccgctgttcatctggatgggcgagatcctcttccgcaccaaattgtcggaagaaatgttccggggactgtcgccctgggttcagtggctgcccgggcggctcacccatgtcaacgtgatcggctgcggaatcttcgcggcagtgtcgggctcgtccgccgcgacctgcgcgaccatcggcaagattgcgctgcccgagctcgacaagcgcggctacgacaagagcctcagcctcggatcgctcgcaggcgccggcacgctcggcctgctgattccgccctcgatcccgatggtggtttacgcggtcaccgcgaatgtttcggtgcttcaggtgttcctcggcggattcctgccgggcgtcctcgtgatggtgctctattccggctacatcatcatctggtcgctgctcaatccgaacaaggtcccgccgcgcgatccgccgatgccgttccgacagaaattgcgagagtcggccaagctcgcaccctgcctgctcctgatcctggccgtctttctttcactcgtgttgggcttcgccacggccacggaatgcgcggcatggggcgtcacgggcgcgttgctgctggcatggtggagcggcacgctcacgcgcaagaatttcctcgagagcatcatgagcgcgacgcgcctcacctgcatgatcatgctgatcctggcaggcgcggcctacaccacggctgcgatggcctatacgggcattccggccgcgctcgccacctgggtgcagggccagcagctcacgccgagcatgctcgcactgtatctgagcatcatgtacatcatcctgggctgcctgatcgacggcatatcgatgatcgttctgactgccgtcatcgtgctgccaatggtcaggcaggccgggctcgatctggtctggtttggcgtttatctcatcattcacgtcgagatggcgcaaatcacaccgccggttggcttcaatcttttcgtgctccagaacatgagcggtcgtgatacgttcactgtagcgcgggcgacattcccgttcttcgtgctattgctggctgccgtattcatcatcacggagtatccgcagatcgtgatgttcttgcccaagcttgctttcccagactga

SEQ ID NO: 5000 - DNA, 978 bp, BradyrhizobiumColbertium
atgatgtctcgtttagttcgcgcatccttgatcgctggcgcgatgctggctgcaacccccgctttggctcagaccaaatggaatctgccggcagcgtatcctgccgacaatccgcactccgaaaacctggtggccttcgccaaggatgtcgaagccgccacttccggcaagctccagatcacggttcatcccggcgcctccctgttcaaagcacccgacatcaagcgtgcggtggtaaccgggcaggcgcagatgggcgaagtgctgttgtcgatccacgagaacgaggacccgctgttcggcgtcgacgtcgtaccgtttctcgcgaccagcttccccgacgcgatgaagctgtatcaggcgtccaagcccgcgatcgccaagaagctcgacgcgcagggtctcaaactgctgttcgtcgtgccatgggcgccccagggcgtctacgtcaacaagccgctcgcggcgatcgaagacatgaagggcttgaagtggcgtgcctacaatgtcgggactgcgcgtatcggcgaattggtgggcgcccagtcggtcacgatccaggcggccgagctgccgcaggcgctggcgaccggcgtcgtgaactccttcatgtcctcggggggcaccggctacgacgtgaaggcctgggagtcgctcaagtatttctatgacgtgcaggcctggattcccaaagactacaccttcgtcaacaaggccgcattcgaggcactcgacaaggcgacccaggaggccattctcaaggccgctgcgaccgcggaaacccgcggctggaaggcctggcaggacaagagcacctggtacctcgatcaactcaaggcgaaaggcatgaccgtcgagccgccgagcccggcgctcaagtccggcttccagaagattggtgagcagctcacggccgactggctcaagaaggccggggccgacggccaggctatcgtcgacgcctacaagaagatgtga

SEQ ID NO: 5001 - DNA, 1650 bp, BradyrhizobiumColbertium
atgagtgagcggcagaacccgtacaatgtcgggctcgacaagactccggccaactacgtgccgttaagcccgctgagctttctcgcgcgcagtgccgccgtctatcccgatcatgtcagcacggtctacgagggacgcagcttcacctgggcgcagaccgccgatcgctgcaagcgtttcgcgtcctggctctcgagcaagggcatcggcgttggcgacacagtcgcggccatgctgccgaacatcccggcgatgaacgaggcgcacttcgccgttcccatgacgggcgccgtgctcaacgcattgaacatacgcctcgatgcaccctcgatcgcgtttcagctcgaccatggcggcgccaagatcattctggtcgatcccgagttttcgggcgtcatcagcgacgcactggctcagatgagcggtccgaaaccgctggtggtcgacgtcgacgacgccgcgttcaaaggcggcaagcgcattggcgagatcgaatatgaggcggcggtcgtgcaaggggatccgaacttcacagcgatcccgccgcgggacgaatgggacgccatcgcgctcggttacacctcgggcacgacgggcaatcccaagggcgtcgtcacccaccatcgcggcgcctatctcaacgccgtcagcaacatccttgccggcaatctcggtcagcatccggtctatctctggacgctgccgatgttccattgcaacggctggtgctttccctggacgatcgcggccgccgccggcgtcaatgtctgcctgcgcaaggtcgagccgaccaagatcttcgagctgatcaagcagcacggcgtcacccacatgtgcggcgcgccgattgtctacaacacgctgatcaacgcgcccgatgcgccgaaaggaaatgctgtccgccgcctggtgggcctgatcgcaggcgcagcgccaccggtcgccgtgctcgaaggcgccgaaagcatcggcatcaagctgacgcatgtctacggtctgaccgaggtttacggtcccgcctccgtctgcgccgagcagcccggctgggacgagcttgcgcctgccgaacgcgcccgcatgaagcgccggcagggcgtgccctacccgctccaggaaagcgtcaccgtgatcaatccgcagaccatgcaggaagtcccgcgcgatggcgagaccatcggcgaggtcatgttccgcgggaacatcgttatgaagggctatctcaagaacgagaaagcgaccaaggaagccttcgaaggcggctggtttcacaccggcgacctcggcgtgctcgacgagcacggctacgtcatcatcaaggaccgttccaaggacatcatcatttccggcggcgagaacatctcctccgtcgaggtcgaggacatcctctacaagcacccggccgtcttgtttgcagccgtggtcgcaaagcccgatccgaaatggggcgaagtgccctgcgccttcgtcgaattgaaggacggtgcacacgcgaccgaggctgacatcattgcgttctgtcgcagccacatgtcggggttcaagaccccgaaggccgtcgtgttcgggccgatccccaagacctcgaccggcaagatccagaaattcctgctgcgcaacgaggttggctcggcgcaggcgatttcgagctga

SEQ ID NO: 5002 - DNA, 1890 bp, BradyrhizobiumColbertium
atggctcatgtcgggatcgaaatgaccgaactggcgggtgaggcggcggctcagtcccctcgccgaccttcgttgctggcttcggccgagcgcatgctcggtctcgtcgtcgaaatcccggcggcgatcctggtcgtcgccgagatcgtgatcctgtttgccggcgtggtcgcgcgctacggctttcaccggccgctgatctggtccgacgagctcgcttcgattctcttcctgtggctcgcgatgctcggcgcggcggtcgcattccgccgctccgagcacatgcgcatgacggcgatcgtcgccagcgccaggccggcgatgcgggcgtatctcgatctggtcgcgacctcggcggcgctggcgtttctattgctgatcgtctggccagcctgcgactatgcctatgaggagagctacatcacgacgccggcgctgcagatctccaacatgtggcgagctgcggcgctgccggtcggcatcggcctgatggcggccttcgccttgttgcgcctgctgcgttccgccgattaccggatggtcgccgcggcgctcgtcaccgtcgccgccgtgatcggcctgttctggctttcggagccgctcctgcggccgctcggcaatctcaacctcgtcatcttcttcgtcggcgtcgccggcttctgcgtctttgccggcgttcccattgcattcggctttggcctcgcgatcttcggttatctggcgctgaccacgcgcacgcccgtcatggtgctggtcgggcgaatggacgaaggcatgagtcacctcatcctgctttcagtgccgctattcgtgtttctgggcgttctgatcgagatgacgggcatggcccgcgccatggtggcgttcctggcaagcctgctcggccatgtcaggggcggcctgcactacgtgctggtcggcgcgatgtacctggtctccggcatatcaggcgccaaggccgccgacatggcggcggtggcgcccgtcctgttcccggagatgaaagagcgcggcgccaagccgggcgatctcgtcgcgcttcttgcggccacgggcgcccaaaccgagaccattccgccgagtctggtgctgatcacgatcggctccgtgacgggcgtctccatcgccgccctcttcactggcggcctgttgcccggtgtcgtgcttgcgatcacgctgtgcatgctggtttggtggcgctatcgccacgaggacatgagccatgtccgccgcgccacggcatccgagatcggcaggaccttcatcgtcgccctgcccgcgctcgcgctgcccttcgtgatccgctacgccgtggtcgagggtatcgcgaccgcaaccgaagtctccaccatcggcatcgtgtatggcgccctcgttggcctcctcgtctaccgccgcttcgactggcggcggatatttccgatgctggtggagaccgcatcgctctccggcgcaatcctcctgatcatcggcacagcgacgggcatggcctggggtctgacccaatccggcttctcgcgctcgctggcatccgccatgacgggattgcccggaggcgccgcgaccttcatcgccgtctcgatcctggctttcaccattctcggcagcgtgcttgagggcattccggccatcgtgctgttcgggccgctgctgtttccgatcgcccgcgccgtcggcgtgcacgaggtgcactatgcgatgatcattattctggccatgggtatcggactattcgccccgcccttcggcgtcggctattatgccgcctgcgccatcggacgcgtcgatccggccgaaggtatccggccgatctggggctacctgctggcgctgctggtgggattgatcatcgtcgcgatcttcccctggatctcgattggattcctttga

SEQ ID NO: 5003 - DNA, 1020 bp, BradyrhizobiumColbertium
atgagcttttcccgacgcacgcttctcaaggcctccgccgcgacggcggtcctgggcggcatcggtgcaccgcatgtggcccgcgcgcagagcgccgagttcacctacaaatacgccaacaacctgcctgacacccatccgcttaacgtccgcgccagggaaatggcggcagcgatcaagagcgagaccaacggcaagttcgacctccagatcttcccgaacaaccagcttggttccgacaccgacatgctgagccagatccgctccggcggcgtcgagttcttcacgctgtccggcctgatcctgtcgaccctggttccggccgcgtcgatcaacggcatcggcttcgcgttcccggactacgacacggtctggaaggccatggacggcgatcttggtgcccacgtgcgcggcgagatcaagaaggccggcctcgaggtcatggacaagatctgggacaacggcttccgccagaccacgtcctcgaccaagccgatcaccggccctgatgacctcaagggtttcaagatccgcgtcccggtgtcgccgctgtggacctcgatgttcaaggcgttcgacgcggcgcccgcctcgatcaatttcagcgaggtctattccgcgctccagaccaagatcgtcgagggccaggagaacccgctggcgatcatctcgaccgccaaactctacgaggtgcagaagtactgttcgctgaccaaccacatgtgggacggcttctggttcctggccaaccgcagggcctgggaaaagctgccccaggatgtgcgcacggtggtcgccaagaacatcaatgccgctgccgtcaaggagcgtgaggacaccgccaagctcaacgccagcctccagcaggagctcgcgggcaagggcctgaccttcaaccagcccgccgtcgcgccattccgggacaagttgcgcactgccggcttctatgccgagtggaaggggaagtatggcgagcaggcctggggcctcctggaaaaggccgtcggcaagctgtcgtaa

SEQ ID NO: 5004 - DNA, 147 bp, BradyrhizobiumColbertium
ttggaaaatcgcgcggtagtcgtacctcaattgccgtcgacctgtccgctctcgctcgacgatcttcttgacccggaattcgaccccggagcagcgacacaactcctatctgccgccatccaatcagtggccaagcacggcatctga

SEQ ID NO: 5005 - DNA, 885 bp, BradyrhizobiumColbertium
atgggcgtcggggaagacttccaaaaattcaaggacaactaccagatcacgactgagctaatcacatcgatttcctatcgttacaagcgcatcacccgtcagctcaacacagatttctggaacacgaattccgagacagcacatagtctctatgtcggctcttacggtcgtgacactgcagcccggggcctgagcgatctcgacatcggctttatcctgcccaacgccgtgtatcatcagtacaacgcccatcaaggcaacggacaatccgcgctgcttcagtccgtcaagcgatcgatccagaagacctatcggacctcggagagtttcggcgatggccaggtcgtggtcatctcgttcgacgacaatttgaccttcgaggtgctgccggcctttgagaaccagaacagcgatagctggacctatccgaacgccaacaatggcggcagttggaaggtgtgcaatcctcgagctgagatcgccgcaatcgacacacgcaacgccctcacgaacaagaaccttaaatatctaggccgaatgatgcgagtgtgggcgcgccactgtgcggtgccgatcagtggcattctcatcgacacgttggcgtatcagttcatcgagacatatccgcaccgcgacaagtctttcttgtatcatgacttcatggcgcgcgacttcttcgactacctcgcaaagcagaatcagaaccagaccgtctggcgtgcgcccggaagtggttctcacgtgcaccgcaagggtgtgttcgaattcaaggcgcgtagcgcatatctacgcgcgacggaggcgattcagtacaatgacgacaatcatcaatggtcccgaaggcagaaatggaaagacgtgtttggatccctctatcccggctga

SEQ ID NO: 5006 - DNA, 510 bp, BradyrhizobiumColbertium
atggccgagggctatgccgcgcgcctcacgcacataaaactcggccagatcgtgctgtccgcgctgaccacgggcggcgccgtcggcgtgatatttgatcgcaattcggtcttctacccctacgcaacggccctgctcgccatctctctcctcatcctcaacagctacgtcaaggacatcgatcccggcgaggctgcccaaaagcatcgcgaagcggcttccgacatctggaacatccgggaagcctatctcagcctgctcgcggacatacgcgacgcttcgatttcgctcgcggagctccgccgacgccgcgacgaactgcaggcccaactccacaagatttatcgcatcgcgccccataccgacgcgagggcttacggcaaggctcaggacgctctgaaaaacaaggaagatttgaccttcacagacgccgaaatcgacgccttcctgccggcaccgctgaagcggggcgccaataccgacctcattaagtctgaaacgaactcttag

SEQ ID NO: 5007 - DNA, 507 bp, BradyrhizobiumColbertium
ttgcgcggattggccctgaacgatttcatcgaccacgcgtccgacctcttcgtcgaaatcaacaacctccatcccttcagggaaggcaacgggagagcgcagcgcttatttcttagcgcgctcgccgaaaacgccggccatgaacttgctttcgacgtcgtcacgaaagagcgcatgatcgacattagcgtcgcgggaatcgacggcgacgtgtccggagcaaagcgtctgttccaggagatatcggatccaagaagggtgaaggcgctcagaaaagcgctcagcttcctccaaaaatcgcattcggtcccgtggaacgatctctacgtcgccacaacgaccgcaggccgagcctacgccggcgtgctcgtcggcattgccggcaacgactacatgatgcgcgtgtccggaaatccgcaggagtggatcgcgatcggcgatgccgacgacctcccagaaaattcgtccggaggcgacaccatcgttctgaccgccaagcggttctga

SEQ ID NO: 5008 - DNA, 582 bp, BradyrhizobiumColbertium
atggtcgctacggcattgaagacacacgtcgtcgctcccgaagaacgctcttcggcgaaaggcttgctggatcttctcgccgaggctggcggcggcggaatcggccaggtcaagctcgtgtttgaacccatcctcggccgaaagtcgacagtcgtggtgccagacgggttagtggatgtcatcaaagacttggcaggtctcatcgaaggaagccggcaaatcagcttgtttgccgacgatcccgaagttacgccggaacaggcatcggacctgcttggcatctcgcgccctacagtcgttcaacgtatcaagcagggtgatttgaacgctcggatggtcggagcgcatcaccgcattcgtatgtccgatctgatcgctttccggcagaatgaagctgaaaaggccaagaccgagttcgaagcgcgctccaaagccgctcggttcgcggtggccaataccgtcatcgagggcggccacgtgctgcccgaaaccgaggaattgatgaacgagtgggtgcggggagagatcgacgacgacgagttgatcgaacaaggcctcaagaggttcggccccggtgcctga

SEQ ID NO: 5009 - DNA, 1635 bp, BradyrhizobiumColbertium
atgcgcttgcggaatctggagaagtacaagacgggtggctctggcaacaacttgacgcttggcattccgctgccgaagacgccggatggccgggtgtaccggtattcacccaacgaagacgcacatccgcgcctctttcttctgggcgaccgagtatcggatttcactctacccgagacgttgacgtctcgcatgacgcacgcgcccggtacgccaggcacagtctgtccgtatagcggcgttctggacgacgacgagaactttacgcatcctgacgacctcgcggctgccaaggaaatcgtcgctcatgcctttcacgccgacgccgcggcggcaatccacggcatgttcgatgacctcgcccggaagaacgctggcaacaaatttttcaagataacgactggcgcacggccgtcgcccaaacccgcaccgcggttcgctcgaaacgatcttctccgcgagttggtatgcgacgagtgcggccgggactacggcgtctacgccatttccttgttctgtccggattgcggagcgccgaacattcacttgcactttgcgcgggaaatcgcgctcgtccgggagcaggtggaactcgcgggccaagttggctcggaaaggcatgaactcgcatacaggatgatgggcaatgcgcatgaggacgtattgacggccttcgaagcgaccttaaagacggtatacctgtacaaggcgaccactcggccgcccgacgtcgcggcgacgaagccggtcgccaacgacttccagaacatcgagcgcggccgcaagcgcttcgccgagttcgacttcgatccgttcgggactttgacggccgacgctctcgccgtcctgacgctgaacatccagaagcggcatgtcatcggacacaatctcggcgtggccgacgcgaagttcgccgaacatgccgcggaggcccgactgggcgaaacggtgcccctggtcggcgacgacatcctgcagttcgccgcgattggtcagttggtgatcgacggtctcgacggatggcttgctgcaggcgaagctccgccgccgactaaggtcaggctgagcattccgctgatcgcgccgccagcaaagaagaagtccgagttgaagatcggcgaactcgggccattggcgatccggataggattgtgggtatcggaacaatcccaaaagggcttcgactgcttcattcccgagcaagacctcatcgaggcgtttccggaatccaacatcgacgatttggcgtttgccgtcgccgagctcgaaagcgatggctatctgaaaacgagctcgatgatttccacgcggcttccgcggatgttcaccaccgcggagctttttatcacgttcgatccccataccgggcaaagcacccccgaaacggacgtggtggcgctcgtcgatcttgctctcggcaaatctgggaccgggaccgtcgatgcggaagaattgcatgcggcctccggctggccgcttcgacgcttcaatccacctttcgcctacctggtttcgcagatcgacgatagacgggtccttcatggaggcacggaagactatccatcacgcggctttctgatgaccgatggcgatcgggttacgcttcagcgcttcgcggcccgtttgcgccgatga

SEQ ID NO: 5010 - DNA, 888 bp, BradyrhizobiumColbertium
gtgatcgatatttcgaagctcttcgatccctattcacgacaggcgcgcctgtttccgggtttgctcacgctgtttccgatcatcctcactgcgatcgcgtggtttcctcggctggtcacctcgagctggggcgccacgctggtgaccatcgcgacgtcctgcgggctcctgtatggcttgagcgtcctgagcagatcgcgcggcaagaaggtggagaagcgtctcctggctgaatggggaggttggccatcgacgatctggctgcgccatagggaagaacatcttccgccgccggtgttggcccgataccacgcgttcttcgcgaagaatgtgccgttgttcgttacgccaagcgcggaacaggagagggcggatccgaaggccgcggacgccatgtacgcatcgggggtgaagtggcttcaggaacgttgccgcggaaaggcctatccgctcgtcgagaaggagaatgccgaatatggttttcgccggaacctgcgcggattgaaaccgataggggtcgctgcctgcttggcggctcttctgatttcagttctcaccgtcgtctggcgctacgacaacatcatcccagccgtgtccagtttctcgatgtcgtcacttctcacggcgttggcggccattaagcccgcagcgatcggagcgatctgcgtcgatctcgtcgcattgacggcctggtttaccgtcgtacgcgacgattgggttcgggacgccggcgatcagttcgcgcgggccctgctggcgtgctgcgacacgcttgaggtgcccgctgccgcccagcccgcggcggcctcatccgcaaaacgtacgcggcgggcagcgaccggcgaaaataggtcccggcgggctcgctcggaaggtgaggaatcatga

SEQ ID NO: 5011 - DNA, 2313 bp, BradyrhizobiumColbertium
atggcggcgatctccgcggcagacgacattcccatacccgtccgacgggcgctgcgcctcattgaggctcacccgtccgtcaaacgggtgaccgccgaacggatcgaaggaagcgacgccgtccgggccatggtggagatccggaccgaactaccgaacgcgtggagggccgcgggcgagagcccgtcgggcgtccgcgcggtcgagcccgtaacgttcatcttcacggcaggatatcccttgggggcgccgcttatccgcctccgcacggacttcaatcgcagtcatccgcacattcagccctcgaggaatggcagtccacctgaaccgtgtctcgtcgccggttcgccgcgtgaggttctgcgcgttcgcggaataggtggccttttcgagcaactggtcgactggctggacaaggctgcgatggcgcagctgatcgatccggagcacggctgggagccggtgcggcgtgacgggatcgacgacgtgatcgtcgcggatccgacctggttgacgggtctgcccaccagagagggcggctgctcggtcttcccggcgtggtactacgcttaccgcgaagcaactttgtctacctaccggatcggcatcccgcgcgccgctccggtaccgctggggccgcggttcgccggcgaatggcgatatgcgcctgtcggcgatgacgggcaaaccggcaacgctcacgcactgatcgcgtggtccggtaaactcccgaccggtcggccgttcgtggcggatcgctaccttccggaaacggtcacgacgattgacgagctcttgaagcgggcggccgaactaggctgccgcgaattcctggagccgaagctcggaatcctgcaggagcgggtttcgcaatcgaaattgaaggagaagcagccgatagccgtcattctgttggcgcgccgcccgttcgaggtgatcggcacgacttcgccgatcgagatatgcccctacgtcgtggaattgcgcggcggcgaggcgctctcgtcaggcagcggcaagctggtcaggaccgccacgcaccgagatgaggtatcccccgaattgctgcgacgcgctgcgggcgacgacgggcaggcgctgcgtccctggacgctcctcggctgcggaagcatcggatccaaactcgccgttcatctcgccaggtccggacggggacccgcggctctcatcgacgacggcatcctgcaacctcacaatttcgcgcgctacgccacgcttccgtctgacacgaaagtcgaaagcttctggtccattccaaaggcgcactacctggccgaggcactcgcgaccctcaagcagccgacggtgccgcacgtcgtggacgtcgtcgcgcgcgcattcgatgaccaatcgatcactcctttggtcgcccgagacagctttgccgtagtcaatacgaccggctccgcaagcgtgcgcgaggcgctggtcttgcctggagtcacgatcgaccggccccgggtggtcgaggcatgcatgctgggcatcggaagcgtcggcctgatgtcggtggagggaccggcggccaacccgtcggcgaccgatctgatctgcgaggcctatcgcctgatccattcggatcccactctcaggaacgaggtcttcaacacgaaggccgaagcgatcgcgatcggtcagggctgcgcggccatcacgatgccgctgtcggacggccgcttgtcctcgttcgcggcgccgatgtccgagcatattcgccggctccaacgcgacggtcttcccgagaccggcgaggtgctggtcggcagtttggcggccgatgggctgaaccagatatggcatcgcaaggatatccggccgcgcatcgtcgtaggcgacggcacggacagcgtcgtgcgccttagtccggaggtcgacgacacgatccggcgagaggtcgctgcgcgccgtggctcggagacgggcggcatcatcgtcggccgatattcggacgtcgccaacgtcttccacgtcgtaggcaccatgcccgcgccgcccgacagcaaattctcgcgcgacgagttcgtgctgggcaccgagggactgaggcccatgctggaagatctgatcgaaggatctggcggtgcactctacgcgctcgggacctggcacaatcatctcgtcccaagcggcccgtccgggaaggacgtgaagaccgccgctctgctttcgatccgccagtattttccgttgctgatgctgatccacacgccggctggatacgtccatttcaccgctgaagccttgtccggggccgccagctcgcacagcgccgtggtcaaggtggcaagatga

SEQ ID NO: 5012 - DNA, 1158 bp, BradyrhizobiumColbertium
atgggaatggcagttaaagcatcacttttcaaagtcgacaacggcgacatggtgctgttcgagaccgagtccggtcgccggatcctgaccgacatcaacatccgggaggcggccgacgacgaggatgacgacacccccaacgtggggaagcagctccggaacaagctcgatcgggacgataaggggaggctgttcgtcgatggctttctgaacacccatccggacgccgaccacatccggggcttggtcaagcacttccatctcggcgacccgtcgacctgggtgaaggccgacgacaagatcatcatccgtgaaatgtggtcctcgccgatcgtgttccgccgggcgaaggcgaaggacgaggatcacgtcctttgcgccgacgccgaggcttggcgcgacgaggcccgccgccgcgccaacaggttcaagaaggaacggaccgccgaggacggcaaccgcatcctgatcctgggcgaggacgtcgacggcaagaccgatgacctgacggaaatcctggtgaaggtcgacgaggtgttctcgaagatctgcggcgtacgggacacttccttcgaggcgcggctgctggcgccgatgcctgccgacgacgaagcggaggaggaggttctgacgaagaacaactccagcgtcatcatgcgtctggacctgaaggtgtccaaggtcacccgcgggcgcttccttctcggcggcgacgccgaggtcgcgatctgggaccgcatctgggagcgcaacaagaagtggcccgagcgtctgcagtacgacgttctgatcgctccgcaccactgttcgtggcacagcctttcctacgatagctggtccgaaaagggcgagaaagccaaggtgtccgagcccgcccggagcgccctcgggcagccgctggatggcgcgctgatcgtggccagcagcaagaccatcaaggacgacaagaacgatccgccgtgcatccgtgcgaagcgcgaatacatcgatatcctcgatcccgtgaagggagaattcaagtgcgtcgccgacagtccgggcgacgatccgctggcgatcgaggtcacttcggccggaccgcgcatcaagcgcgctgcggtcgccgtcagcgtcgccgccggcaccggtatcggaagccagccgctcgcccacggatga

SEQ ID NO: 5013 - DNA, 1590 bp, BradyrhizobiumColbertium
atgaacaggttcaagatgagcaagaacatcgtcgtctattccgacggaaccggccaagacggcggcgcgcgtccggagcagcgcatcagcaacatctacaagatgtaccgtgtgagccgtgaccacgcggacacggccatcgatccgtccaggcaagtggtcttctacgacgctggccttgggacggatatcggcgcgaccgccctcaccgctccggtgcgcttcgtccagaagatgctcggatccatcgcgggcgacggcatcaagcgcaacattgccgactgctacgaattcatcatcaaccactacgaagacggtgaccggatattcctcttcgggttcagccggggcgcctacacggtccgaagcctggcgaacctgctgatgctctgcggcgtccccaagaagacgccctccggcccattgatgcgctaccgcaaggccgtgaaggacatcgcttgggaagccgtggataccgtgctggaacacggcgcgggccacccgcgtgagcagttcgaggcggagaggctcgaactggcgcggcgatttcagaccaagtacggctccggcgacggcttggatgccaacgccgcggcatatttcgtcggcgtgttcgatacggtcgctgccctcggcgccagcggtccgcgacgccggatgatccaagccggcttgactctcggcgtcgctgccctcgccttcttcgcttcgctcgttccggccgcgatcatcggtgcgctgacggccatcgtctcggaggccggcctgctatggggcttcatcgtgccggcgtggctggtcacgcatctggcgatgctgattgccgtcatctggttctggaaacggcagcggacggtcaatctcaagaccatctacgacttcccgaacaagggcgatccgccgcgctctcataccgccgagtggacgggcaagaacttcgatcgccttctcagcaaacatgtacgttttgcgcgctcggcgaacgcgatcgacgagacgcgcaaggatttcgcccgggtcggctggggcggcaccgagccgtctgtgcaccccgcaacgccgggtgttccgcgtctcatccagctctggttcgcagggaaccactcggatatcggcggatcttatccggaaccggaatcgcgtttgtcggatatcgccctcgcctggatgtgcgagcaggccacgtccatcccggacggcttgatcaccgggccgatctacgtggacgggatcaggatgccgaagactgatgacaacggaccggcactgaacgtcttccccggcgcgaacggcgttcagcattgcgagatcgcgggcatgcgcgacacgctcgacgcctacgccgccagtctgccgaaatggcgatggctgcaaaacctcgtcggcaccaggaactgggaagtcgaagtccgcgagatcaaccaccaggcgccggtacatccgaccgtgcgcacgcgcttcgacctgccggaagtcagacaatgtgctggcgtcggcgcatatcgcccaaacgcattggcgagccatgacgacttcaaacgctactatccgcaggtggagtcgacagcacagtcgaccgggtccgcctga

SEQ ID NO: 5014 - DNA, 546 bp, BradyrhizobiumColbertium
ttggtcgcgcttgccgacatcaaagctgacctgccggattggccggacgacgtggtggatcaatggctattgaagttggcgaaccaggagggcatgggctggcccccaccggtccccttcaacggccatcggtggcagtacgtcatcgtgaagccggtatcgtggtggaagaaggtcacgtggacgaaggaatcgcgcgactgtagcttcgacgagctgtcgcttaattcccgcaagatcatgaattccatgttcgaggcgttggtcctcggaatcgagaatggctatggcggcgacaacagcaagaagcgctttgaatcttgcgtgagctatctggcggtgaaaggacagttcccgcgcgtgcctgtcaccatgccgatagaaacgggcctaagtatcctcgacggcaatcatcgagtctactcgctcactttcctgcaaagcgttcctgagccggaattgaagaagcaagccatcactcgcccttccgtcatccacgatgtttgggcggcgaagcacgccgatggagaggttctggatagctga

SEQ ID NO: 5015 - DNA, 627 bp, BradyrhizobiumColbertium
atggccgaagatcgcggcatacggactttggatgaccttctccgggtcgtccgcgccttggccttcgaattcaacacggacaacgtcttcgtcgtcggcagccaagccattctggcatcgatgcccgatgcgcctgagccggctagagcatcgccggagatcgacgctttcccggaaaacgctaggatctgggagctggaagagaatgccaagtcgccgggcgatgatccgaacgttgcgtcggagcacatcgacggcttgttcggtgagagcagccaattccaccgtactcacggcttctacatcgacggcgtcgacgagacgacggcgaaactgccggcgggctggcaggttcgcgcgatcaaagtaaggaccgaagtcgcaggacgaagcgtgtacggcatagcgccggctccggaggatttgatcgcctccaaacttgcgcgactggatgacagggacaagcaattcgtcgaggcgattcatgcgcaacgcccgcttgaccttgacctcgtcgaacggcggatccatgagacaaatctggatccggcactccagcaacgagcgattgcctatatcagaagtttgaggcccgagaaaaagccggaagcaccgaagttgccgtag

SEQ ID NO: 5016 - DNA, 387 bp, BradyrhizobiumColbertium
atgggcgacgggctaaatgaaggcatagttggcgacaccgcgaagctgatgatgcatcggctgatcgtgcggatgcttcgccgcgacccgtcattggtcgagaaggcgaagttggctcatgagcgccaagccagtcagttcgccggctggcccttcgtgcgcgagtggcaggaactgcttgcgctaccgcccaaggaactagcctctaaactcatcagccgcgaccgcgagatggtgcggctgcgcaatacctcgccgttttggctcgccgagggagtcgattttggcgactaccatgcccgtgtccgcttgaggaaggcggcgagacggatcgtcaaacgcagcctgtctgcgcagcctgacttccttgttccgggaggtccgtga

SEQ ID NO: 5017 - DNA, 1881 bp, BradyrhizobiumColbertium
atgtggcccgataacgagaccgagcgggacttcctgaacttctccggcgtcgccgaaaccgtggccgagatcattgtgcaggccaagggacgcccgatctcgatcggcgtgtctggcgcctggggcatcggcaaatcctcgatgatcaagctcacccgctcggcgatcgccgccaggaaggacgagagcgggaagaaggccgccgacaagtacgtcttcgtcgagttcaatgcctggctctaccaggggtatgacgacgcgcgtgctgcgttgatggatgtgatcgctgacaagctcgcgaaggaagcggagagccgacagacggcactcgataaggtcgcgtcccttgccaagcgcgtgaaatggctccgggccgcgaaactcgcagcgacctcggccgcctcgatctatttcggggtgcccccggtcggcgcggtcggcgagatcttcgagctcgccaagaaggtctggtccgaaggggtcgggaaggaaaccggcgaagccgccaagaaagctgcggcggacgcggcgcaggaaggtggcgaactgctgaacccgaaggaggaaacgtcaccgccgaaggagattcaggcgctgcgcgacgcgttcgaacaggcgctcgaggagctcgggataactttggtcgtcctgatcgacgatctcgaccgatgcttgccggagaccacgatctcgaccctggaggcgatccgcctctttctgttcctcaagaacaccgccttcgtgatcgcggccgacaacgacatgatcaagcacgccgtccggaagcacttcgtcggggtcagcgacgacctgctcgtcaccaactacttcgacaagctcatccaagttcccattcgggtgccgcagctcgggacccaggaggtccgcgcctacatgatgctcctgttcgtggacaacagcgagttgtccgacgacgacaaggagaagatccgcgctggcatgattggccagctcaagcggacgtggcagggaaagaaggtcgaccgggccttcgtccaatcgcttggcgtgaagttgcccgagcatcttgtcggtcaattcgacacggccgagaggctcgcctcgctcatgacgacggcgtcggggattctgggaaatccgcggctgataaagcgcttcctgaacgcgctctcgatccggatgacgatctcgaaagcgcagggcgtcggcgtcgacgaagcggtgctcgccaagctgttgcttttcgagcgcatcggcgacaccgcagcgtatgccgaactggtcaagaacgtcagcgcctcgggtgagggaaagcctacgttcctccaagaatgggaagacgcggcgacagcggggggcgatctcgatctgaaggcgccgtggaacgctcccttcgtgaaggaatggttggcgctctcaccgccccttcacgaccacgacctgcgcggcgcgctctacgtcggccgcgagcaggcgccgcttatcacgcccgaagaccgcctgtcgtcggaggcggccgagttgctcacggccctgctcgagcaccccgacatggcccaccagctcaaggacaggctgacccgggtctcgcgtatcgaagtcacggtgatgatggatcgcctgctcgagcgcgccagaaaggagcaggactggggtgtcccgcctatcctcaacgcctgcatcgctctcgcagatgccgacccaccacaaggagcccgtctcgctgcattcctcgcggaccgcccttcgcaacagatccaaccgaacatcgtgccgaagatcggcgaccgtccatggtcgagaagtgtcctcgatgcatggaattcgtctcctgacgtttcgcgcccggtgaagacggcgatcagaaagacgagagagcatgggaacgtcgcaatctag

SEQ ID NO: 5018 - DNA, 306 bp, BradyrhizobiumColbertium
atgggccggcgcagggcaggccgccagcgcatgagcaccggtcacatccgcaacacgcacgcgatgtcggcaagcccgcgctgcggcgcccgcacacgcggcggcttcgcctgctccgcgcccgcgatacgcggcaagttccgctgccgcatgcacggcggcgcccggggatcgggtgcgccgcggggaaaccgcaatgccgaaacgcacggcgcgttcacacaagaggggatcgctgagcggcgggcgatccgggcgctgatcagtgacgcggagacgctgctggcgaagatcgcgtccgactag

SEQ ID NO: 5019 - DNA, 636 bp, BradyrhizobiumColbertium
atgacgacagccctccagcccctcaacacttcgccgctcgcggcaagcgatggcagcagccccgccgcgaacccgcgcgtcaaactctacaagcgccgcatcgcgatcagccatcccgacccgcaagcgggcgagcggctgctggccgaggcgctgggcgcggccgaccgcgatgcgctgcacggcatgctgaggcaattggtcaaggccagcgctgtcgggcagaagcccgacgaggccaatcttgccttcatgatctcgacgatcaggagcatcgccccgaaggattccatcgaggcgatgctggtgtcgcagatggtgtcggtgcacatggcggcgatgcgctgcgcatgccgcctggcctgcaccgacgatcttccgcagcaggagggcgtgacccgcgctttgacgcggctcgcccgcaccttcgccgcccaggtcgaagccttgaatcgccaccgcaacagcgacgaaagcgcgatcacggtgcaaaacctctcggtgcaggacggcggacgagcgatcgtgggcaatctgacgcaacatgcgcatctgatcggcaccaatccggacgccgcgtctcgcgcagccggcgaccccgaatgggccggcgcagggcaggccgccagcgcatga

SEQ ID NO: 5020 - DNA, 984 bp, BradyrhizobiumColbertium
atgcaacgaacggctcgcgtgctggcagtcatcgccggattatgcgctttggtgctcgcgacagaggctccggcgcagaaatatccgtcgcggccggtcaagatcatggtcggcttcagcgccggcgggccggtcgacgtcgtcgcacggatcgtcggggatcgcttgagcaacaagctcggccagcccttcgtcgtcgagaaccgggccggcgccaacggcatgatcgccgccgagggcgtggcgcgcgccgatgcggatggctacaccatcctcgcctgcaattcgtccacgatcacgctcaacaagacgctgttcaaggatatccgctacgatccgcaagccgactttgcaccgctgaccacggtggtgtcggcgccgctcgttctcgtcgtcaatcccgagaaccccaagacggccaacgtcaagacggtggccgatctcgttgccgcggccaaggccgcgcccggcgcgctcgcttacggttcgggtggtaacggcaatctggcccatctcgccatggagctgctcagccagaaggccggcatcaagatgatccacgtgccctatcgcggcggctcggccgccgaggtcggcgttctcgcgcaagaggtgctggcggtgttcgatccgctctcggccgtgccgctggtgaaggccggcaagctgcgcgcgctggcggtatcgtcggccgagcggctgccggcgctgcccgatgtgcccaccgtcgcggaagccggctatcccggcttcgacatctcgttctgggtcggcttcttcatgccgaaggcaacgcccgcgccgatcctggagacgctgcaccgggagatcttggcagccgccaaggatccgacggcccaagaaaagctcggctcgcagggtgtcgtcagcgtgctcagccagaccgaatatgccgcgaagatcgcgaaggagaccaaggagcttgccgaggtcgtgacggcggcgaacatcaaggcggagtag

SEQ ID NO: 5021 - DNA, 459 bp, BradyrhizobiumColbertium
atgccatccaagagtgccgggatcatcgcctatcggaagcgcggcaagctcgaggtgctcctcgtccatcccggcgggccgttctggcgcagcaaggatctcggcgcctggtcgatccccaagggcgaatatgccgacgacgaagacgcggaagtcgcggcgcggcgggagtttgccgaagagctcgggctcgagccgtccgcgccgctgatcgcgctcggtgagatcaggcagcgcggaggcaagctcgtcaccgcgttcgcggccgagctggatgtcgacgtgcgcagcgttcgcagcaacacgttcgagatggaatggccgccgcgcagcggcaggcggcaggcctttccggaagtcgatcgcgccgaatggtttgcgctcgacgcggcccgggagaagatcaacgccggacagcgcccgctgctcgaccgcctggagcagctgatcggcggatag

SEQ ID NO: 5022 - DNA, 921 bp, BradyrhizobiumColbertium
gtgcgacctcgatccgtcgacgtcgcggcaaacccagctcccgacaccgccgttctcaagaacaatcacgcctcgccacttgttcctgtggtcgagctcttccttgccagcgtgcaggccatcgacgtcgccaacgcgcgcgcggcgtatgaggaaacacccgcgccgccgcgcgcgaacgagcccggcgccgaggaaccggtttcaccaactgagaagctctgccacgctctgcgcgaagccgcggagtccagcggcattccggtgccgttcttcgcgcgcctgatctggcaggagagccgcttcaagcccaacgaggtcagccatgccggcgcgcagggcgtcgcgcaattcatgccgggtacggccgccgaagtcggactcgatgatcccttcgatccgatgaaggcgctgcccgcatcggcgaagttcctgcgcaagctgcgcgacgatttcggcaatctcggtctcgccgcagccgcctacaatgccggtccgggccgcgtccagaagtggcttgcgagagagggccagctgccgcgcgagacccgcgattacgtccgcatcatcaccggcacccaggccgaagactggaccgagcgcgccgaggcgctcgcgatccggatcgacctgccgcgcgaagcaccctgcgagggcatcggcagcctctccaaggccaaggacgtcgcctgggttccggtgaacctgacgacttcggttgcgagcatcattcgcaaggccgagcaggtcgccgcccggtcgacgacgaaccgtgcgcgcaagcggtttgcaacccaattgcggaacaatgcggcggcccagcgcaagggacgcagcatgatcgcggcacgcgcggccggcaagagcgcgaaggcgcgcgccgttcgcttcgcatcgggcgaacggccgtccggttcgtga

SEQ ID NO: 5023 - DNA, 1035 bp, BradyrhizobiumColbertium
atgatgcgatggatgcttggcgtggtgatgtcgctgtggctgatcagcccggtgctcgcgggcaatctcgatgcgaaagcggtgaacgatgcgccgcgtcccgtgaaagagccgtccgctgacaagctcaatcctgcagtcgtgaagcttcaggtactgctcgaccgcgcgcaattctcgcccggcgagatcgacggcaagctgggtgagaacgcgcagaaggcgctcaaggcattcgcggagcagaacggcatcgcattcgacaaggccatatcgcaggagctctgggacaagctgacattggcgagcgaagctcccgtcctcctcgactacaagatcgacgatgcagacctgaaggggccgttcatcaagaagctgcccgccaagctcgacgacatgaagtcgctagaggcactgggctacaccagtccgctcgaagggctcgcggaaaaattccacatgagcgcggatctgctcagggccctcaacccgggcaaggccttcgacaagataggggagacgatcgttgttgcaaacgttccggcccggcgagagctgccgcgcatggttcggctcgaggtcgacaaggagaacgggaccttgaaagcgttcgacgcaagcggcgctttgctggcgttctacccggcgtcaatcggcagtccggaccgtccgacgccgagcggtacgctcaaggtgaccggcgcgcacgagaatccgacctaccgctacaatcccgactacaggttcaagaacgtcaaatccaaacggcccttcgacatcaagccgggtccgaacaaccccgtgggagcttattggatcggcctgtcggcgcagggctacggcatccatggtacggccgagcccgacagggtcagcaagtcggcgtctcacggctgcgtcaggctgaccaattgggatgcgcgcgtgatcggcgagaacgtcaagcgcggcacgcccgtggtcttcctcgagccgccgacgggtacgtcctcgacgagacagggcagccccgtacagaagcgcgcctcgaactag

SEQ ID NO: 5024 - DNA, 276 bp, BradyrhizobiumColbertium
atgttcaaagagggatcgccgatcgcctatgacgcgccggccgagctgaagaagtggccgtcgctgaatggcgagcgacagaaggaccgcggtccgccctatctcgtctacaacggcacgctcgccgaatgcgtccgcgagctcatgggcaagccggtcaagggcatctcgctttacgacatcatgacgaggccgcaaccggctttcgaccaggccgtgctgtcgccgggcgacgccgccgagatcgcgatgcgcaaggattttcccaaggactag

SEQ ID NO: 5025 - DNA, 858 bp, BradyrhizobiumColbertium
gtggccctcaagaacgtcatcggtatcgaccacgcggtggtcatggtgaaggacctcgacaaggccgccgagaattatcggcagcttggcttcaccgtgtccccgcgcgggacccacagcgtccatatgggcacgggcaattacaccatcatgttcgaccccgactacatggagctgctcggcgtgctcgctgcgaccgagctgaacgctcccgcgcgtgccttcctcgacaagcacggcgagggtatcgagcgcatcgccttcaccgcggtcgattccgcagccggcgccgaggagatccgcgcacgcggcctggagccgatcggcccgaccgatttcgaacggccggtgacgctgcccgatggcacggtctcggcagcaaaattccgcactttcctgtggccgaccgcggaggcgcccggcggcgtgcgcattttcgcctgccagcacaaaacccgcgagaccgtctggattccggaactgataaagcacgccaatgcggcgaagcggatcaagcagacgctgatcgcaacgccggaccccgcgaaggaagccgcgcatctcggccggctgatcgaccgcacgccgacggccgatgcggacggcgcggtcaccgtgccctccggcggagatcgcgccgacttcgtctatctgacgctgcaacagctcggcaagcgttatcccggcgtgccgctcgccgggctttccgagcgtggcggcgctgcgctggtgctcatcagcggcgatctcgcggcaacggaaagagcgctgggttcggctgccgtgcgaagcggcgatgcgatctgcgtgccgccggccagggccaacggcaccctgctcgccttcgtgtccggctga

SEQ ID NO: 5026 - DNA, 1329 bp, BradyrhizobiumColbertium
gtgaagaacagaatttggtcaattgcgatttgcgccgagctgctggttgcggctggcgcgcaggccgagccggcattgcagggcaaggatgcttacggcgactggcgggccgacaagcccggtacggtcaggctgatccgcccgcaggatctggtgaagccgggcgctacacggtcggttgccagttccgcgcgcgtggtgccgcgtccgcgagacgcctctccccaggtgccggctggtttcaaggtcgaactgttcgccgaaggcctgcgcgcgccgcgcatcatccgcgtggcgccgaatggtgatgtcttcgttgcggagacgcggaccggcaatatccgcgtgctgcgcccaggcgaaggcggcaaggttgcgaccaatgaggtgttcgccagcggcctgcggcaaccattcggcatcgccttctttccgagcggcgacaacccgcaatgggtctacattgcgaacaccgacagcgtcgtccgctttccttatcaggccggtgatctcaaggcgcgcggcaaggccgagactatcgtgtcgagcctgccgcatgacggcggccattccacccgcgatatcgtctttacgcccgacaacaagcgcatgctggtttcggtcggctcgctcagcaacgtcgctgagggcatgggcacgccgccgggcggactggaggcctggtcgaaagcgcaaccgcttggcgccacttgggcgagcgagaccgagcgcgccgccgtgctcgctttcagccctgatggcaaggaacggaagatctacgccaccggtatccgcaactgcgtcggcctcgcgatccagccgcagacaggccagccctggtgctcgaacaacgagcgcgacgggctcggcgacgatctcgtgcccgactacgtcaccagcgtgaaggagggcgcgttctacggttggccttggttctatatcggcaacaatgaagacccgcgccatgccggtgcgcggccggacctcaaggacaacgtgacggtgcccgacgtgctgatccagccgcattcggcttcgctcgccatgacgttctatcaaggcacgcagtttccgccggagtaccagggcgacgccttcgccgcccagcacggttcatggaacaggtcgaagcgaaccggctacaaggtgatccgcatcaggatgaaggacggcaagccgaccggcgagtatgaggatttcgtgacgggcttcgtggtgagcgacacggaggtgtgggggcgtccggtgggcgtggcggtggcaaaggatggatcgctgctggtctcggaggatggcaacggcacgatctggcgggtgagccggcagtaa

SEQ ID NO: 5027 - DNA, 801 bp, BradyrhizobiumColbertium
atgcgcctgaaggacaaggttgcgatcgtggtcggagccgggcaaagccccggcgaaggcatgggcaacggccgtgccaccgcgctcaccttcgcgcgcgagggtgcgaaggtcttttgcgtcgatcatcatctggactcggcgcaggaaacggtcgcgatgatcaccgcccgggaaggcaccgccacggccttcaaggccgacgtgaccaaggccgccgacatcaacgcgatggtggcagatgcgcaaacacgctggggacgaatcgacgtactgcacaacaatgtcggcgtcagcctcgccggcggcgatgccgagttgctgcagctgaccgaagaggcgttcgaccgcgtcgtcgccatcaacctgaagagctgcatccttgccgcgaaggaggtgatcccgatcatgcgagcgcaacgcagcggcgcgatcatcaacatctcatcgatggccgcgatcacgacctatccttatgtcgcctacaaggcgacgaagtcggcgatgatcgccttcaccgaacagctcgcctaccagaacgccgaatacggcatccgggccaatgtcatcctgcccggcctgatgaacacgcccatggcggtcgacacccgcgcccgcgaatggtccaagacgcgcgccgaggtcgaagccgagcgcgacagcaaggtgccgctgcgcaggaagatgggcaccggatgggacgtcgccaacgcggcgctgttcctggcatcggatgaggcgaacttcattacaggcgtgacgctgccggtggatggcggcgccagtgtaaggcgggggtag

SEQ ID NO: 5028 - DNA, 834 bp, BradyrhizobiumColbertium
atgaatctgctcgatccgcaagggcccgtggctgctggcaacagcacgatcctggtcgattccgtcttcatcatgctcgtgatcgtggtgccgaccatcttcgcgattctcggctttgcgttctggtttcgcgcgtccaacccgagagcacgatatcggcctggtttcgtctactccggtcgcatcgagatggtggtgtgggcgatcccggcgctcaccgtcatcctgctcgggggcgtcgcctggatcggctcgcaccagctcgatcctgccgcgccggtgccggggaccggcagcccggtgcgcatccaggccgtctcgctcgactggaaatggcttttcatctatcccgatcagcgcatcgccaccgtcaacaccctcacggtgccggccggtgccgagctgaaattccagctgacgtcgtcgagcgtgatgaacacgttcttcatcccgcagctcggcagcatgatctacaccatgaacggcatggtgacgaagctgaacctgcgcgccgacaatgaaggcaagcttcagggcctgtcggcgcatttctccggcgacggatttcccgacatgatgttcgacgtcaacgtggtctcgccgctcgcttttccggagtgggtcgcgaccgcggcgaagacggatgccgtgctcaatgagaacagctacaggaaattgatgcagcagggcatcgagaaagaccggccggtgtaccgcctcgaagacccgcgcctgttcgagctgatcgcgacccagcacattccgccgggacccgggccggagcgaatctccgatgccggccgtccgcacagtggaggccacgatgctcggtaa

SEQ ID NO: 5029 - DNA, 2001 bp, BradyrhizobiumColbertium
atgctcggtaagctcgattggtcggccattccgttggatcagccgataccactcattgcgggcgccgtggtgctggtcgcgatcctcggcgtcctgacgtgggtcgtggtgaagggtcatcttagctatctctggaacgaatggatcaccagcgtcgatcacaagcgcatcggggtcatgtatgtgctgctggcttcggtgatgctgctgcgcggcggcagcgacgccatcatgatgcggattcaacaggccgtcgcctatcagtcgcagggatatctgccgcccgagcactacaaccagatcttctcggcgcacggcaccatcatgatcttcttcgtggcgatgccgttcgtgatcggcctgatgaacctgatcgtgccgcttcagctcggcgtacgcgacgtcgctttcccgacactgaattcggtcggcttctggctgaccgcgagcggagcactgctggtcaacatctcgctcgtggtcggcgagttcgcgcgcaccggctggctcgcctttccgcccctgtcggaactgtcctactcgcccggcgtcggcgtcgactattacgcctggtcactccagatctccggcatcgggacgttggtggccggcatcaatctcgtcacgaccgtgctgaagctgcgcaccaagggcatgaattatctgcgtatgccgatgttctgctggaccacgctggcctcgaatcttctcatcgtggcagccttcccgattcttaccgccaccctggcgatgctgctgctcgaccgttacctcggcttccactttttcaccaacgaggccggcggcaacgtcatgatgttcatgaacctgatctgggcctggggccatccggaggtctacatcctggtgctgccggccttcggtatcttctccgaggtagtctcgaccttctccggcaaggcgttgttcggctatcgctccatggtgcttgcgacgatggcgatctgcgtcatctccttcatggtctggctgcatcacttcttcacgatgggcgcaggcccgaacgtcaacgcaatcttcggcatcgccagcatgatcatcgcggtgccgaccggcgtgaagatctacaactggctgttcacgatgtatggcggccgcatccgcttcgcgacgccgatgctgtgggcggtcggcttcatggtgacgttcattatcggcgggttgacgggcgtgctgcttgcggtgccgccggctgatttcatccttcacaacagcatgttcctggtcgcccactttcacaacgtcatcatcggcggcgtgctgttcggcgccttcgccggcttcgaatactggtttccgaaggcgttcggctttcgcctcaacgaacgctggggcagggctgcgttctggttcacctttctcggcttcttcatcaccttcatgccgctctacatcgtcggtatgctcggcatgacgcggcggatgcagcattacgacgtcgcagcatggcggccctggatgatcgttgcggcggtcggcgtggcagtgctgacgatcggcgtgatctgtcagatcgtgcaactcgtggtcagcatccgcaaccgggaggccttgcgcgaccggaccggcgatccctgggatgggcgttcgctggaatgggcgacttcgtcaccaccgccggtcttcaatttcgcgttcaatcccgacgtgcgcggcgaggacgcctattggcacatgaaggcccgtgccaaacaacaatcgcccgagcgcgacgggccggaatatcaggacatcgagatgccccggaactcgccgaccgggttcgtctgcgcgttctttgccaccatcatgggttttgcgctgatctggcacatctggtggatggtgatcgtgggcggcctcggcgcgtgggcgaccttcgtcgtgtttgcctggcgcgaccatgacgagtacgtcattccggccgaggaggtcgcagtgatagatcgcgtcaatctcgagcagcggcgcggcctcgtcagcatggcggaggttggctga

SEQ ID NO: 5030 - DNA, 642 bp, BradyrhizobiumColbertium
atgtcgatcacggccactgccggccatgcgcacaccgatccccatcagatcggcgtcctgatcgagcatcctggacccgccccgaagcggatcgtgaccgcctacggcttctggatcttcctgctctccgatatcgtgatgttctcctgcttcttcgcggcccacgccgtgctggctggccagaccgccggaggcccgaggggatcggagatattcgagccgagctacgtcgcgatcgagacggtttgcctgctgctgtcgagcttcacctgcggcatggccagcatcgcggccgatgtgcgcaatcggctgtggttccatgtctcgatggcgatcacctgtgcgctcgggctcgtgttcctcgtgctcgagttccgcgagtttgccgatctgatcgcacgcggctacggtccctcgcgtagcgctttcctgacctcgttcttctcgctggtcggttgccacgggctgcatgtctccgcaggcctgctttggctcctcaccatgatggcccaggtcttcgcaaagggctttcgtgccgacatcctgcgccggatgacgtgctttgcactgttctggcatgcgctcgacatcgtctgggtcgctgtgttctccgttgtctacctgctcgggagcgcgccatga

SEQ ID NO: 5031 - DNA, 387 bp, BradyrhizobiumColbertium
atgagtgatcagacgcatgggatgggcaggaatgacctcgcaccgggcgaggaggagcagcacagtgtcggcgcccgcatcctcggctacgtcgtcggcctcgttctggcgctgctgctcacggcaacatcgtttttcatcgccggaacggatctggtctggcagccatcgatcccggtcgcgctgatcgtgcttgcgatcgcgcagatgggcgttcatctggtgttcttcctgcacatcaccacgggtcctgacaacaccaacaacgtgctggcgctcgccttcggtcttctggtcgtcttcctcgtgatcggaggcaccatctggattatggcaaatctgaatgccaacatgccgcccatggatcacatcctgcggatgcagtga

SEQ ID NO: 5032 - DNA, 789 bp, BradyrhizobiumColbertium
atgtccttccagaacttctttgccgacgcccgcgcttttgcgctcgctttgtttttcacctcgtccggatttctggcctcctccgggcccgtctccgcgctgaccggtgccgcaacggtgcgtgacggcaactctgtccagatcggcgatgtcacttaccggctcgacggcatcgacgcacccgagctggaccagatctgcatcgacgatcacgccgattcctggacgtgcggcatcgaggcccgcgaccagctgacgaagttgattaacaaacggacggtgcgctgcgacgacgtcgggccggaaaagagctttggcaagcgccatcgcgcaatctgcacggccgaaggcgacaaggccagcctgaacgagcagctgatcaagctcggctttgccctcgcgcgcgagccgatcaaggccaacgtcaagcaggcagccgctgaggccaaggcggctgcggccggaatctggaagggctgctttgttgcaccgcaagattttcgggccggcaagaaggacggcgcgctgctgggcacggcctgccgcccggatcgcgacaaggagatccgcgccgtgctgtttccggaggagctgatcatgccgccgggctgcagcatcaaaggcaagctcgcggtgcgcgcgcgcgtcaccggcaatgtcggcatctatcatctgcggggctgcccaagctatcccgcgaccaccaatccggaccgctggttctgctcggaggacgacgcccaggcggccggcttccgcaaggcctacaattgccgtcggccaaggtga

SEQ ID NO: 5033 - DNA, 1599 bp, BradyrhizobiumColbertium
atgaaagaccccgtggacgtcctgatcatcggcgccggcgcttcaggcgcggcggtggcgtggtcgctggccgagaccaagatgcacatcctctgcatggagcagggcggctggatgaacccagcggaataccccagcaccgggcgggattgggaggccaagttctacggcgaatggtcgtcgagccccaacgtccgcggccggcccgaagactatccgatcaacgacgacaactccccgatcaaggtcgtcaactacaatgcggtcggcggctcgacggtgatgtacacggcgcactggccgcggctgcatccctccgacttcaaggtgaagacgctcgacggcgtcgccgacgactggccgatcgattacgacgccttgaccccgttcttcgaggagaacgatcgcatgatgggcacgtccggtctgtcaggcgatcctctctcgccgttgacgcatccgccgatgccgcaacagccgctcgggttgtccggcgccatcatcgcgaaagccatgaacaagctcggctggcattggtggccctcggacacgacggttgcgaccatggactatgagggccgggcgcgctgcatcaatctcggccattgcacgccggcctgcgcgcaaggcgcgaaatcctcgaccgacattacctactggccgcacgccatccgggccggtgtcgagctgcgcacccattgccgggtgcgcgagatcacaaccgacgagaacggcatggcctcgggcgtggtctattacgacaaggacggcgtcgagcagtttcaacccgcccacgtcgtcatcatcgcctgcaacggcgtcggcacgccacgcctgctattgaactcggcttcgggacgctttccgaacggtcttgccaattcgtccggcctcgtgggcaagaacctcatgttccatccctatgcgcagatctacggattcgtgaaggagccgacggacagcaatcgcgcgccgccgacctgcctgtggagcaaggagttttacgacaccgacctatcgcgcggcttcgtgcgcggctacgccatccagttcggccgcggcgcggggccggtgttcgaggcggtcgcgagcgagcagaaaggcattctgccatggggcgccgaccatcatggcgtattccgcaggcttaacggtcatcggctcgcggtgtcggcaatctgcgaggatctgcccgaggagcacaaccgcgtcacgctcgatcccgtgctgaaggacagtcacggaatccctgcgcccaagatcgactatacaatcagcgagaacagccggaaaatgatggagcacgggttggcgcgtggccgggagattctcgaggccgccggcgcgaccgacatctgcatcaacaatccgatcccgtggggtggctggcacctgctcggcaccgcgcgcatgggcaccgacccccaacgttccgtcgtcaacgaatggggccgctcgcacgatgtgaagaacctcttcatcgtcgacggcagcattttcgtgacctcgggcggcgtgaacccgacctccaccatccaggccctcacgctgtacatcgccgaccagatgaagcagcgtttggccaatctgttcgattga

SEQ ID NO: 5034 - DNA, 450 bp, BradyrhizobiumColbertium
atgtccgcagacactctattgacacgcaggcagcgcgacgatctccgaaccgtcgccgcgatgatcattcccgcgagcgacgaatacaaggtgcccggcgccgacgatcccgcgatccaggctgacatgctggcaacgcttggccgcgataccaagttggtcgcggcggcgctggatcatctggcacggctcgccggcgcgccgctcgccgagctcgatgccgccaggcgcgatgccgtggcgcaggagtttcgcaagcaaggcggtgccgccgccgcaacgctcgtccgcgtcgtgctgcaatgctattaccgcgacgaccgcgtgctgcgctcgctcgggctcgagctgcgtgcgccattccccagggggcacgtgctcccggatggggactggtcgctgctcgacccggtcaaggcaaggggaggatcgctgaggcgggcgccctag

SEQ ID NO: 5035 - DNA, 1020 bp, BradyrhizobiumColbertium
atgttggatttcacctcggacatcatcgatgacgcttcgtcatcgcgaacgactccatctgccccggttgacgacgggccgctgctggatgcctattccagtgccgtgatcgacgtgaccgaccgcgtcggtcccgccgtcgtgcgcgtcgagaccgggccgaaagtgccgaacggccgcgagcgcggcgggctcggttcgggcatcgtgatctcgcccgatggactcgtgctcaccaacagccatgtggtcggctcctccaaggagatccggctgcgcgacgtcgagggccatgccggcgatgcgcaggtgctcggtgtcgatcccgacaccgatcttgcgctcttgcgcgccaacggcgttcgccacttgccctatgccgcgctcggcaattccaagacgttgcggcgcggtcagctcgtggtcgcgatcggcaacccgctcggcttcgaatcgaccgtgaccgccggcgtggtctcggcgctcggacgctcgatccgctcggtgagcgggcgcaccatcgaggacgtgatccagaccgatgccgcgctcaatcccggcaattccggggggccgctggtgtcgtcgaatgccgaggtgatcggcatcaacactgccatcatcaacggcgcgcaaggaatctgcttcgcggtcgccagcaacacggcgcaattcgtactgtcggagatcatccgccatggctatgtccgccgcgcctatatcggggtcgccgggcagaccgcgccgatcccgcgacgacatgcggtgctggccggggtcgagaacaagatgggcgcccttctgatgcagatcgagccagacggacctgcggcgaaggcgagcctcttgcccggcgacgtcgtgatcaggctcgacggcgtcgagatcaacggcgtggacgatctgatccgcgtgctcgaccgcgaccggatcggccggcgactggccatggacgtgttgcggctgggtcggctgcgggcgatcgacatcgatccgatcgaacgcaaaccggcgcgctag

SEQ ID NO: 5036 - DNA, 3477 bp, BradyrhizobiumColbertium
atgacgctgttgcaagtcgagctggatgacaaataccggctcgaatcgaagcggatcttcctgtccggcacccaggccctcgttcgactacccatgttgcagcgcgaacgcgaccggcttcagggcatcaacaccggcggcttcatctcgggctatcgcgggtccccgctcggcatgtacgaccacgctttgtggcgggcgaaggcgcacctccagcagcacgacatcgccttcgtccctggcctcaacgaggatctggccgcgacggcggtctgggggagccagcaggtcgggctgtttcccggcgccaaggtcgacggcgtgttcgggatctggtacggcaaggggcccggcgtcgaccgctcggtggatgcgctcaagcacgccaatgcggccggcacctcgcgcaatggcggcgtgctggcgcttgcgggcgacgaccacggctgccagtcctcgacgctggcgcatcagagcgagcaggtgttcgcggccgcgctcatcccggtgatcaatccggcgacgctccaggactatctcgatctcggcctctatggttttgcgctgtcgcgcttctccggctgctgggtcgggttcaaggccatcagcgagacggtcgagagttcggcctcgatctacagcgatccggaacgcattcagatcaggctgcccgacgatttcgagatgccgcccggcggcctcagcatccgctggccggatccgccgctcgaggccgagaagcgcctgttcggcccgaagatggcggcggtgcaggccttcgcccgcgccaaccagctcgatcgcatcgtgctcgattccaagccggcacggctcggtatcgtcgcgaccggcaaggcctatctcgatctgcgccaggctctcgccgacctcggcatcaccgacaaggacgcgcaggacctcggccttcgcatctacaaggtggcgatgacctggccgctggaggaaagcggcgccaagcgcttcgccgaaggtcttcaggacgtgctggtggtcgaggagaagcgcggcttcatcgaagaccagctgatgcgcatcctctacaacgtcgatgcgtccaggcgcccgacggtcacaggcaagcgcgacgagcgcggtgcgccgctcctgccgagcgagggcgagctgacgccgaccatcgttgcgtccgcgctggtggcccgtttgcgcaagctcgggcatcacagcccggtgctggaacagcgtctcgcccggctcgaagcgttcgaccatcctgtcaccacgagcgcgccgatcaagctcgcgcggacgccgttcttctgctcgggatgcccgcacaacacctcgacgcgcgtgcctgagggcagccgcgccatggccggcatcggctgccacggcatggccctgagcatgcccacccgccgcaccgatctgatctctcatatgggcgccgaaggcgtgaactggatcggccagtcgcccttcaccaccgagacgcacatcttccagaatctcggcgacggcacctacacccattccggccttctcgcccttcgcgccgcctccgctgccggcatcaacatcacctacaagatcctctacaacgacgccgtggcgatgaccggcggccagccggctgaaggcgccttcaacgtcgcacagatcgcgcatcaggtctgggccgagggcgtcaagcggctcgcgatcgtctccgacgatccgagcaaatacccgcaaggcaactacttcccgcaaggtgcgaccatccaccaccgccgcgagcttgacgccgtgcagcgcgagctgcgcgacatcaagggcctcaccgtcatcatctacgaccagacctgcgccgctgagaaacgccgacgccgcaagcgcgggctttatcccgatccggccaagcgcgccttcatcaacgagctcgtctgcgaaggttgcggcgactgctcgcaggcttccaattgcgtctcggtgcagccgctggaaaccgagttcggccgcaagcgccagatcgaccagtcgaactgcaacaaggacttctcctgcgtcgagggcttttgcccgagcttcgtcaccgtgcatggcggaacgctgaagcgcatgaagacctcggcggtcgattccggacagctgttcgccgatctgccgctgccgcccgcgcgagagctcgacgggccctacaacatcctcgtcaccggcatcggcggcaccggtgtcattaccatcggcgcgctgctcggcatggccgcccatgtcgacggccgcgggtgctcggcattggatttcaccggcctgtcgcagaagaacggtgcggtgatgagccatgtccgcatcgcgcccaggccggaggacatctccgcggtccgtatcaccaccggcggggccgacgtcatcctcggctgcgacatgatcgtctcggcaggtccttcggcgctcagccgcgccgaacgcggcgtgacgaaggcctacatcaacgccgatttgctgccgaccgcgagcttcgtgcagaaccccgatctcgatttcgagatgggcacgatgcaaaccgtgctgcgcgatgccatcggcgacaagaacctcgacatcatcgatgccacgggcatcgccgcggcgctgatgggcgacagcatcgccaccaatcccttcatgctcggctttgcgttccagaagggcgcgttcccgctgtcgctggaggccctgctccgcgccatcgagatcaacggcgccgcgatcgagatgaacaagctcgccttcacctggggccggctcgccgcccacgacatgtcgcgggtgcgcagcgtgctccagttcaagagccgcgcatccgcgccgacgaaatcgctcgacgacatcatcaccacccgcgccgagttcctgacctcctaccaggacaaggcctatgctaaccgctatctcacggctgtcgccaaggtgcgcaaggcggagagcgccgtttcgcctgccgctacggagctgaccgaggcggtcgcgaagaacctgttcaagctgatgtcctacaaggacgagtacgaggtcgcacggctctataccgacggcagctttgccaacaaggtgtcggagaagttcgagggcgacttcgcgctgaagtaccacttggcaccgccgatcttcgcaaggcgcgacaagacgacgggccggctgcagaagcaggagttcggcagctggatgatccacgccttccgcgtgctggcaaagctgaagttcctgcgcggcggtccgttcgatccgttcggccgcaccgaggaacgtcggaccgagcgaaagctggtcgcggactatctcagcatgatcgatcagcgaatcgcgggcttgaaggcggagcagctcccgctgctgacgcgcctcgcgcgcgtgccagagagcatccgcggcttcggccatatcaaggaatcgaacatcaagctggcggccgccgagacggcgcggctggaagcggagctggagaacagccgcttcgcagcggcggcggagtag

SEQ ID NO: 5037 - DNA, 954 bp, BradyrhizobiumColbertium
atgaccgtaaacgcattcgacgccgagatcactgacaccgccgaggcgctgatcgggccgtggcgcaagccgcgccagatgctgcaagcgcaaatctacgacgcgcacgcctccatccacgacgacgccaccgcgcagaagctcggcttcaagggcggcaccatcgaagggccgacccacttcagccagttcgcgccgctcggggaacggctatggggacgtgcctggttcgagacgggttgcctttccgcgcattaccgcagcgtctgttacgaaggtgaggaggtgcaggcgatgctgtcgaagccgctgtcgggcaccagccagtgccagatccagatggtcaagcgcgacggcaccgaggtgctgcgcggtactgcctcggtcggcgatgcgccggttgcgacggcgctcgagacgcgtctcggcgagctcaagccgctgacggatcccgtgatcttgcgcgatgtgaaggtggcgaagacgggcaaacgccagtcggtccgcatggccttcgaacagaacatgggcgacctctatccgttttccctccggcagaagctggccgtcatcacggagaactcgccgtactactcgggcacggaaaatccgtggggcaagcccatcattccgatggagatgctgagcgtgctgttccagtatcgctccaaggacgatccgctacccgccaaggggccggcggtcggcctgttcgccgatcaggagatccgtctggtcaagggaccgctctttgtggacgaggagtacgaagttgagcgtgaggtggtcgcgctctccggcagtcgccgcaccgaaagcgcctgggtcaagacgcgcgtgttcgacaaggcgaatgcggtggtcgccaccatgctgctcaacatggcgacgctgaaggactcgtatgcgccgtatgaggaggagtatcggcagttgtatggagcagggcactag

SEQ ID NO: 5038 - DNA, 714 bp, BradyrhizobiumColbertium
atgttgaactcacccgagccgacaaggggcgtcatcagcgccgagcccgagccgatcgagctcgactggtccaagagcgcgcttctcatcatcgacatgcagcgtgattttctcgagcccggcggcttcggcgaaacgctcggcaacgacgtcagccagctttcgcgcgcggtgaagccgatcggcgcggtgctgacggcggcgcgcgacgccggcatgctggtcatccacacgcgcgaggggcatctgcctgatctgtccgacgcgccaagggcgaagatcgaacgcggtgcgccgagcctccgcatcggcgatgccggcccgatggggcgcattctcatccgcggtgaggcgggtcacgacatcatacccgagctgtatccgctcgacagcgagatcgtgatcgacaagccgggcaagggcgccttccacgccaccgagctgggcgaggtcctcgagaggtacgggatcgagaatcttctggtgtgcggcgtcacgacggaagtgtgtgtgaacaccacggtgcgtgaggccaatgaccgcggctatcgctgcgtcgtcatctccgacggctgcgcatcctacttccccgagtttcatgcgatgggcctgaagatgatcaaggcccagggcggcatcttcggctgggtcgcgagctcagccgcagtcttggaggcgatgacgagttcgaccactttgggggcaacatcatga

SEQ ID NO: 5039 - DNA, 1668 bp, BradyrhizobiumColbertium
atgagcacattgacggggacgaccggcaagtctgaaatcgatgcgtccgggttcaagccggcgctctggacatcgggcgactggaacgcgcttttcggcttcggcaccaacattctcgtcaacatgctggtgctcacgggactcttgcgcttcgtgctgaagatgcccgacagcctcgtgttcggcggcatcctgccggcgctcgggctgatgatgtgcctgtcgaccttctactacgcgtaccttgcctaccggctggcacagaaaacgggccgcaacgacgtctgcgcgctgccgtccggcgtcagcgtgccgcacatgttcatcgttaccttcgtgatcatgctgccaatcacgctgaaaaccggtgacccgctcaagggctggtcggctggcctcgtctgggtgttcttccagagcttcattctcatgatcggcggtttcatcgctccgttcatccgcagaatcaccccgcgagcggcgctgctcggtacgctggccggtgtctccgtcaccttcatttcgatgcggcctgcgctcgaaatgtacatgacgccgcagattggcttgatctgcttcgccatcatcctggtgagctggttcggcggcgtgaaatactggcgcggcattccagcgggcctcgtggccatcgccgtcggcatgatcatcgcatggggctcgaacctgttcggccttggcctcggcggcatgagcatcgcaggcgtaggcgcggcctttgccaatttcggcttctcggtgccaattccagcgctgggttatgtcttctccggcttcgaattcctcggcatcatcctggtcaccgccattccgttcggcatctatgacctcgtcgaagccatggacaatgtcgagagcgcggaggctgcgggcgacgactacccgaccacgcgcgtactgacggcggatggcgttgtcagcctgatcggctgcctgatgggcaatcccttcatcaacgcagtttatatcggtcatcccggctggaaagcgatgggaggtcggatcggctactccgcggcgacaggcatcatggtggtcgtgctgtcctggttcggcatcatttcggtgctgctggcgctcgtacccgttgtcgcgatctcgccgatcctgctctacatcggcatgctgatcggtgcgcaggcgttccagaccacaccggtcaagcacgcgcccgccatcgtgctggcgctgaccccgcatctggccgcctgggccaagctccagatcgacacgatgctcggctccaccatgacagcagcagccacggttggaggcttggcggccgacaaggccgacgcggtcaaggcggccgcgattgccgccctgccgcagcagggcgtgttctatcatggcctcgaggtgatgggcgggggatccatcctcggcgggctgatcctcggtgcgatcggcgtcttcatcatcgaacgcgatttcgagaaagcgtccgcctttgcgctggtcggggcgatcctgacctacttcggcttcatgcacggcgaggccgtcggcatcggcggcggcttcggcgtgacgcccgcggtcgcactggcctacgccgtgatggccgccggcctgttcgcagccggcaagctcggcaccagcgagcattacgtcgcgcatccggagatgacggccgcgccggcggagtag

SEQ ID NO: 5040 - DNA, 780 bp, BradyrhizobiumColbertium
atgagcctccggcgcgcgatagcggcggccacattgttcgccgcagctcctgccctgctcgctggtgaaattccaccggatgcacgccgctccggctacgccttcatgggcctggagacgcgcgccatgcaggatgacgacaccagcaaccccggcatgctgttcgtgctcgacggcgaagcgctctggacgaagaagacaggggtggctgacaaggcctgcgcggattgtcatggcgatgcgcgcagcagcatgaaaggcattgcggctcgctatcccgccttcgacaaggcgcttgcgcgccccgtcgcgctcgaccagcgcatcaatctctgtcgcaccaatcatcagcaggcaacgccgctgcctcacgagagtcgcgaccttctggcgctgtccgctttcgtcgcccatcaatcacgtggcactccgatcagcgtcggcgaagacccccaggtaaaacccttcatcgaccggggccgcgcgcttttcacacagcggcagggccaactcaacctcgcctgcaccaactgccacgacgacaacttcgacaaacgtcttgccggtgcgccgatcacgcaaggacagccgacgggctatccgctctaccggctggaatggcagacgctgggatcgctcgagcggcggctgcgcagctgcatgaccggcgtccgcgcccaagcctatgactacggctcgcccgagttggtcgcgctcgagctctacctcaagtcgcgggcgcatggcctgccaatggagacgccggcggtacgtccctga

SEQ ID NO: 5041 - DNA, 318 bp, BradyrhizobiumColbertium
atggccgccctcatcaacgttccggccaaagccaggcgcggcgacatcatcgagattcgcacgctgacctcgcacatcatggagacaggcttccgccacaccgtcgatggaaagctggtgccgcgcgacatcatcacgacctttgcctgccgttacaacggcacggaggtttttcgagctgatctgtttccggcgatcgcggcgaacccatatttgtcgttcttcacggtggccaaggagagcggcaagctggacttcgagtgggtcggcgacaacggctattcgtcgactgcatcggcgtcgattattgtcgaatga

SEQ ID NO: 5042 - DNA, 468 bp, BradyrhizobiumColbertium
atgccgaccacgcgacgacgattcctcagccttgccggtagcgtgacggccgcgggcacgatcccgatcgtcaccctgcggccggtcgaagcgacgccggccatgctcaccgccgcaatccgcaacgtcgtcggtgaggcgcagttgcgcaccggcaaggtcaagctcgacattccgccgctggtcgaaaacggaaacaccgtgcctatgacggtgagcgttgcgagcccgatgaccgcggacgatcacgtcaagtccatccacatcttcaacgagaagaacccccagccgaatatcggcaatttctatcttggcccctcctccggccgagcccaggtctcgacgcgcattcggctcgccgacacccagaaggtcgttgcaatcgcgcgtctctccgacgacacgttctggcaaaccgccgccgacgtcgtcgtaacgttggccgcctgcaccgaggagatgaactga

SEQ ID NO: 5043 - DNA, 291 bp, BradyrhizobiumColbertium
gtgctcgcgcgcgccacgacctgcatcctctgccattccggtccgtttccggaaacgcggttccagggcgatctcgcgcccgacctcgccggatccgggaaccgatggactgagagccagttgcggcttcgactggtcgatgcctcgagattgaattcggacaccatcatgccgtcctattatcgcaaggacggcctcgtcagggtcggacgtaacttcgccggcaagccgatcttgtcggctgcggagatcgaggacatcgtggcctttcttgcaacgcttcgggactag

SEQ ID NO: 5044 - DNA, 1272 bp, BradyrhizobiumColbertium
atgaatgcgccggtgacacgacggaatgccgtcctcggcatagccgtcgcggccacatcgctcgccgcgccttcgatcctgcgcgcgcaaccggcgggccggatcgtcgtagtgggcggcggcttcggcggcgcggcttgcgcccgcgcgctcaagcgcgccgatccaaaattggtggtcaccctgatcgagccgaacgagactttcatctcgtgtccgttcagcaacgaggtgatcgcgggattgcgcgagatcgaggcgcaacaattcggctacggcaggctcgccgccgaaggcatcgccgtcgtcgttcaggcggccaagatgatcgatccgcacaagcggatcgtgaccacgtcagatggcgccgcgctgacatatgatcgcctcatactctcgcccggcatcgatttccatctcgatgccctgcccggctatgacgacgccgcatcgaagacgatgccgcacgcctggaaggctggcgcgcaaacgcttctgctgcgcaggcaattggaggcgatggcggacggcggcaccgtcgccatcgcaatcccggccaatccctcccgttgcccgcccgcgccgtacgagcgcgccagtctgatcgcgcattacctgaagacgaagaagccgcgctcgaaggttctgatcctcgatgccaaggacagtttctcccagcagcggctattcgagaaggcgtggaaggagctctacggcgacatgatcgagcgcgtcgcgctgtcgcaaggcggccgcgtcacctcggtcgatcccgcgacaagaaccatcgtcacggagttcggcaactacacccccgatgtcgccaacgtcatcccaccgcaacgcgcgggacgcatcgccgggatcgcgggcgctgcggatgcgaccggctggtgcccgatcgatcctgtcacgttcgagtcgaaacttgtcccgaacgtccacgtcattggcgacgcctgcctcggcggcggcgttcccaagtcggcctccgctgcgagctcgcagggcaaggcctgcgctaacgcgatcgtcggcctgctcgccggtcgtaaaccggaggcgccacgactcacaggggtctgctacagcaccgtcgcgcccggctacggcttctcgctcgcgggcaactaccagcccaggggcgacatcttcgccgaggtcgaaggcggcgctaccagcccggtcgaagcgccgcgcgagctgcgcgcccgcgagtcggctgaagccgagcgctggtttcagaccatcacggcggagacgtttggctag

SEQ ID NO: 5045 - DNA, 2187 bp, BradyrhizobiumColbertium
atgaacaagcacgtctctcccaggatgaaccgtcgcgctttcgtgattggaagcgccaccctcggtgccggcctcgcaatcggcctcgacattcccttcggcggccccgccgtggtgcgcgccgccgacggctcgccggagatcggcgcctgggtcgtggtcaggccggatgacacggtagtgatccgcgtcgcccgctccgagatgggccagggttcgctcaccggcctcgctcagctcgtcgcagaggaactcgaatgcgactggaccaaggtcacgactgaatatccgactcccggccagagtgtcgcccgcaagcgcgtctggggcgatttctcgaccggaggcagccgcggcatccgctcctcgcaggactatgttcgcaaaggcggcgcaactgcgcgcgtgatgctgatccaggccgccgccgatgcgtggaaagtgccggcgtccgagtgcacggtgtccagcagtgtcatcacccatacgccgtcgggccggacaacgacctacggcaaggtcgcagaggccgccgccaagctggctccgccgccggatgtcaagctgaaggatccgaaggactggaagctgatcggcaagggtgtgaagcggctcgacaccgtcgacaagaccaccggtgccatgatctacggcgccgacgtcaagctgcccggcatgctcaatgctgcgatcaaggattgcccggtgttcggcggcaagctgaagagcttcgacgaagcgaggatcgccggcatgaaaggcgtcaagaaagtggtcaaggtcggcgataccgcggtcgcggtcgttgccgatacctggtggcacgccaagaccgcgctggacgcgttgccgatcgcctgggacgagggcgataacgccaaggtctccagcgcgtcgatcgcgaagtggctggccgagggcctcgaggattcgcagccggcctatgtcggcaacaagaacggcgatgccaaggcggcgatcgccagcgcagccaagaaagtggaagccgtctactcctatccctaccagaaccacgccaccatggagccgatgaacgccaccgcgctctatacggcagacaaatgcgaggtctggtgcggcacgcaaaatggcgaggcggccttcgcggctgtgctggaggcgtccggccttccggccgagaagtgcgacgtgcacaaggtgatgccgggcggcggcttcggccggcgtggccagaccgactatgtccgccaagcggtcatgatcgccaagcaaataccgggcacgccaatcaagctgttgtggtcacgcgaggaggacatggcgcagggccggtatcacccgatcagccagtgcaagatgacgggcgcgctcgatgccaacaataatctcgttgcgctgcactaccgcctgtccgggcaatcgatcctgttctcgcttcgcccggaggcgctgcaaagcggaatggatcccatcgcattccagggcgtggcccaatccggagaggccgcgttcggctattcggtgccgaacctgctgatcgagcatgcgatgcgcaacccgcacgttccgcccggtttctggcgcggcgtcaacgtcaatcaaaatgcgatctacatggaatgcttcatggatgagctggcccatgccgcaggccaggacccgctcgagttccgccgcaagctgatgggcaatcaccccaagcaccttgcggtgctcaatgccgtggccgagaagatcggctgggacacgccggcgccgcagggagtctatcgcggcatcgcgcaggtcatgggctacgggagctatgtcgcgggcgccgccgagatctcggtgacagatggcagcaagatcaaggtgcatcgcatcgtcgcctccaccgaccccggctacgtcgtcaacccggcgcaggtggagcggcagatcgcgggatccttcgtctatggcctctccgcgctgttctacggcggctgcaccgtcaaggacggcaggatcgagcaaaccaacttcgacacctacaactcgatgcgcatcagcgagatgccgaaggtcgaatcggtgatggtgccgagcggcgggttctggggcggtgtcggcgagccgaccatcggcgtcgcggccccggcggtactcaacgcgtacttcgcggcgacaggcaagcgcattcgctcggtgccgctgcgcgaccagaacatcaccttcgcataa

SEQ ID NO: 5046 - DNA, 450 bp, BradyrhizobiumColbertium
atggcaaacctaacaatcaacggaaaaaccttcaccctcgacgtcgagccggatacgccgctgctctgggcgatccgcgagaatgcaggcctgaccggcaccaaatacggctgcggcatcgcacaatgcggcgcctgcaccgttcacctcgatggcgtggcgatgcgctcctgtggaatctcggtcagcgaggccgagggcaagaagatcaccacgatcgaagggctcgcatccagagattcgctgcacaaggtacaggaagcctggatcgcccaggacgtgccgcaatgcggctattgccagagcggcatgatcatggcggtagcggcgctgctgaacgagaagccgaagccgacagacgccgatatcgacgaggccatcaccaatatctgccgctgcggcaccttccagcaggtgcgcgaggcgatccacatgatcgcaagcgcgtag

SEQ ID NO: 5047 - DNA, 1620 bp, BradyrhizobiumColbertium
atgaacgtgccgagtccctgcaacgtactgatgctctacccgctgttctcggcggagtccttctggaccttcggcgaatcctgcaaagtcatgggcgtcaagcggcccgccgcccccttgggcctgatcaccgtcgccgcgatgttgcccaagagctggacggtccggctgatcgattgcaacacggcacccttcggcgaggaggatctcgcctgggccgatgtcgtcttcaccggcggaatgatgccgcagcaggccgatacgctgcgcctgatcgaggtctgccgcgcggccggcaagcctgtcgtcgtcggcggccccgatccaacgtcgagcccgcatctctatgaacgggccgacttccgggtgctcggcgaggccgagagcgtcatcgacgatttcatcgcggcctgggaaagcggcgcgcgctccggcaccttcaccgcgccgaagttccaggccgacgtcaccaagacgccggtgccgcgtttcgatctgctcaagttcgaagactatctctatctcggcgtgcagtattcacgcggctgtcccttcacctgcgaattctgcgacatcatcgagctctacgggcgcgtgccgcggaccaagacgatcgagcagatgttcgtggagctcgagacgctttaccagatgggctaccgtggccatctcgacttcgtcgacgacaatttcatcggcaacaagaagtcgctgcggcaattcctgccgcaactcgcagaatggcagcggacgcacggctatcccttcgaattctccacggaagcctcggtcaacctggccgacgatccggaactcttggatttgatgggcgcggccaatttcttcggcatcttcgtcggcatcgaaagtccggaccctgcgacgctcatcgcgatgcgcaagaagcagaacacgcggcgcaatatcgccgagagcatccacaagatctacgccgccggcatgctcgtcaccgcgggctttatcgtcggcttcgacaacgagaaggtctcgatggcggaggccatgatcgaattcatcgaggaggcggcgattcccgtcgccatggtcggcctgctctatgcgttgccgaacacgcagctcacgcgccggctggagcgtgaggggcggctgcatgccggccacgacgtggcgccgaccatcggcgccgatcagtgcacggccggcatcaacttcgatccggtccgcccgttgcgcgacattctgatggattacaagcgggtgctcgagcacgtctacagcccggctgcctatgcgggacgcgtggaccgcctgatgacgctgctcgaccgctccaggcagcgttccgagctcgccgaaggagatatccgctccaagctcggggcgatggaaaccgtgcacaaggtggtcaccgcccttcccgaggcgcgggggccgctctggcagactttcatgaactgcgccaagcgcgacacctcatctgcgcgcattgccgtgcagatgatcgcggcctatgcgcatctcgggccgttctcgcgcaaggtcatcgcggccatcgatgagcgcctggcggcgctggacgggcacgtgccgaatcccatcgtggctgcaggcccggctgaagagcgacatctggcctga

SEQ ID NO: 5048 - DNA, 2187 bp, BradyrhizobiumColbertium
atggtcacgaaggtggtccgctggtcgattgcactgattgtcctggccgcgctggtcctcacctatctgccttcctacatcaccgattccatttacaagaacgtcgaggacatcacggacggtgagatgcccgccaccgtcactgcctttcaatcggggccggacgtcgtcagcaccattggtggcagcggcgaaggcttgaattgcagcctgccaccctgggccaacatattgttcgatagcgagggggattcccgccagaagcgccatctcgtcctgcagcgcttcaggcaggcctgcgtcttccacgacctgtgctatcggcatggccttgcgacctatggctataaccagaacgattgcgatcgcattctgcagaatgcggcctttcggctctgcgtctacattcgcaacggcagtcatgacagcggtgcggcgcgctgtcagtccgattccaaattggtgctggccggtgtgagcctcggaggctacgaagcctatcgcggctgggatcgatcgacctatttcgaattcgactcggacccgtcgcggtcgaacgggtttcaggtcagccgcgtggtcggtcatcccttcaaggcgatcgtgccggccaaatacgccggtgaccctgatcaggtcattctcatgttcgagaaccttcgttccaatcttgcggtgacctgcatcacctgcgcggaagttcccattctcgattggaccaccgatcccaatgccgtcagcgctgagctgcgctcggtcggcgtgacgcggttgccggacgtgctgctcaggcgcgtgcccatgcttacggaaaccatgccggtctggttgccacctcgccggcggcacgcggctccgcatctcctggtcgatggaacgggcagggaccatctgatctggatgagccggaacaactcggagaacagcgtatcctgcatcgtcggcgccgatgctgcgcgtctcctcaccaatacttcaccgatccgggatctctgctcggtcgatgcggggccatcgctcacccgcgtggagatcgacatgttcgcgagctctccgcttccgatggaagtacccggcagtcctgacatcatttatgcgacgtcgatcagcccgcagaagacgagggagcacgatctgagcttttgttcgcgttccgcgtccaggaaggtcgaggggaccggcgacgaccggtccaaatgcgtcaccttcaccgaagcggaggtccgcgacggcgcggggctcggtgcatttcagaactttccgctggttcgccggggacagcagatctatttcgcgcgggacctcgcgcagcggacggactcgccgctgactgcggcctggcagcgcgcctttggcaataccttttcgccggacggcgcgctgctggtgatcgacgtggcaccgccgcccgtcgatcgagggcccctctcggccaagctgaagaagatcgtccggttcgacatcgacgatcgcttcgatccgatgatgccgatcacgcgcaaggtggacgatttgcgattcctgagccttgaggcgacgaagtcgagcgtgcaccttcgcatgatcgatttcgccaaggacaacccctccgtcggcaatgtgcagctgatgatgagtaacggcgaagtggacctggaccgctcctgggcgcagaggccgatgctggtggtggagacccgcgacgcgcgacccaagaccaggctcgtgttctcgcgtggagagatcgcggccgaaccgggcaagcccctctccgcgacgacggaggcgttgacgctccagactttggtattcgagcgtgatgccgctgccccctcgaatacgcctttcgtgaaatcggcgggagcggcatgccggatcgtctacgagttcgaaccggaccgcaccgattggccgtgctaccgcgcgttcgaccccgagcgcaccatgcgggcctcgccggccacgcggatgcgggcatcccagatgctggtcgggcggttcattcaaggcgagggccatggcatcgcgtttccagatctctgtttgaagtcggagccgatcgtgctgaagccgcaaggaagtacgttcgtgccgctgagcgagaccgcgggctggaagggaccgccaaggtttcaacggacgatcacttgcgagccgctcgatgccgcgtccgtcgtgagccatcccatcacgcagaaagcgccgtga

SEQ ID NO: 5049 - DNA, 1389 bp, BradyrhizobiumColbertium
atgacaatcacgttacctgctgcggcgcgcgagcccgaccagccgaccgccgacggccttcccaccgggcagcggcgctgggctatcgccgcgatcttcacggcgctcgcgatggcctcgctcgacaccgcgatcgccaacatcgccctgcccgccatcgccgccgatctgcgtgtcacgccggagcagtcgatctgggtcgtcaacgtctaccagatcgcgctggtggcgacgctgctgccgctcggagcgctcggcgagatcgtcgggcatcagcgcatctatctgggcggcctgatcctgttcaccgtcgcgtcgttgttctgctcggtggcatggtcgctggacagcctgctcgtcgcgcgcacgctgcaaggcctgggcgcgagcggcatcatgagcgtcaacacggccctggtgcgccacgtctatccgggccggatgcagggccgtggcttcggccacaacgcgctggtggtcgcgacggcgttcacggtcggcccctcggtcgcctccgccatcctcgcattcgggccatggccgtggctgttcgccgtcaacattccgttcgggctgattgcgatctgtatcggctttgcgatgctaccgaagacgccgcgcgccggtcacgggttcgatctgctcggcgcggtcctcgccgccgcctgcctcggcctgttcatcacgggcatcggcagcgccgcgcacaacctctcgccgaccgtcgtgggcgccgagttgatcgccgccctcgtgctcggcttcatcctgacgcgccgccatgccgatcatccggcgccgatgctgccgatcgacctgttcagccggccgatgttcgcgctgtcggcagcaacggccgtttgcgccttcgcagtccaaggtctcgccttcgtctcgctgccgttctatttcgaggacgtgctcggccgctcgcaggtcgagaccggcttcttcatgacaccatggccgctggtggtcggcatcatggccccgatcgcggggcgcctgtccgaccgccatgcggtcggcctgctcggcgggatcggcctcgtgctgctcggcgtcggcatggcgcttctcgcgatgctgccccccaatcctgcgattcctgacatcatctggcggatggtgatctgcgggatggggttcggcttcttccaggcgccgaacatgaaggcggtgatgtcaagcgcgccgccgcaccgcagcggcagtgcctccggcatcgtcgccactgcgcgcctgaccgggcagacgactggagccgcgctcgccgccgcctgctttgcgctggccggacacggcggcgcgaccttggcgctggcgctcggcgcaggctttgccgcgctgggcagcgtgatgagcttcttgcggctcgcggtgaagtag

SEQ ID NO: 5050 - DNA, 747 bp, BradyrhizobiumColbertium
atgcaagatcaaaaggtcgttgtcgtcacgggcggcacttcaggtatcggacgggcagcggcgctgcgcttcgcgaagcagggctaccgggtgctcatcaccggccgccgggcgggcctgatcgaggagacgatgctgcaacacccggatatcgcgggaatgacggcggatgcggcgtccgccgacgatgcccagcgaaccgttgcaaaggcactcgacaaatggggccgcctcgatgcgctggtcaacaatgccggcgccggcgcaatcttgtcgcttgccgatgtcactgccgatcgcatcacagatatctccgccgtcaacgtgctcggtcccagtctgctcgcgtccgcggcacttcctcatctcaaggccacgcgcggcacgatcgtcaatgtctctagcactttcgggcacaaagcggcggcaaggctatctcactacgcagccagcaaagccgccgtggagcatttgacgcggtgctgggcgctggagctggcgccgttcgggatcagagtgaacgccgtcgccccaggcccgacgcagacaggcgcgctgaccggcatgatgggattgtcggctcaacaggccgcggtggtcgaggaacaggagcgcgtcagcataccgctcggtcgccgcggcgcgccggacgatgtcgctgaatggatcgtccaactcgccgggcccgcgtcggcgtgggtgaccggtcaggtgatcgcgatcgacggcggcctgggattggcatga

SEQ ID NO: 5051 - DNA, 912 bp, BradyrhizobiumColbertium
atgaacctgcacaacatctccattgcatcgaaacccgaagagctcgtcccgtcgcgctatgcagtgcgcatcggcgacatcgacgtgctggtgatcagcgacggcgtgctaccgctgccaaccgccatgctggcgcacaatgctgagccggctgcacgggccagttggttgaaagacatgttcctgccgccggacgcgttcgactgggccctcaatgcggtgatggtgcgcagcggcgaccaaaccatcctcatcgatgccggactggggtccgatccggacttgcatttgccgcgcgcaggccaattgatcaagcgcctggaagccgccggcatcgatctggcatcggtgaccgaccttgtgctcacccacatgcacatggatcacgtcggcggcttgctggtcgagggcgtgaaagaacggctgcgcaaggatctgcggatccacgtggcggccgccgaggtcaagttctgggaatctccggatttcacttacacgaacatgccgcgaggattcccggatgcgcttcgagccgcggccaagcagttcgttggaatgtacggcagccagatacgacaattcgacgagcagcacgaggttgcacctggtgtcgtcgcccgtcgcaccggtggtcacactcccggacacagcgtggtccgcgtggcctccgccggcgaggcgctgacatttgccggcgatgccgtgtttgccgtcgggttcgaccagcccgactggcacaacggcttcgagcacgaccctgaggaggcggcgcgcgttcgcatccacctcttacgggagctcgcagagagcggcgagctgctggtggccacgcacatgccgttcccatcggtcggtcatgttgcggccgccggcgacgccttccgctgggtaccggtcttctgggactactga

SEQ ID NO: 5052 - DNA, 1206 bp, BradyrhizobiumColbertium
atgcgcatcgtcatcattggcgccggcttcgccggcatgtatgccgccctttccgccgcccgcctgcgcgacatccagggcgctccgcccgacgaactcgagatcgcgctcgtcgcgcccgagccgacgctggtggttcgcccgcggctctacgaaccgaaccccgagaccctgacggcaccgctgcaggacgttctcgaggcgatcgacgtcgtctatgtcaggggtcatgccgaggcgatcgataccaggtccaaaatcgtcgaggtcgctgccgcgcagggcgcgcgcaagaagctgtcctacgaccggttggtggtcgccaccggtagccggctgtttcgcccgaacgttcccggcctcgccgagcacggcttcagcgtcgaccaactcgatgatgcgatcgcgctcgatcgtcacctgcacgggctgtcgaaccgtccggcttcgctggcacgcaataccgttgtcgtcgcagggggtggattcaccggtatcgaggcggcaaccgaagtgccgtcgcgcctgcacaaaattctcggcaaggacgcccggctgcgcgtggtcatagtcgaccgcaatgagacgatcgcccccgatatgggcgcagggccccggccgatcatcgaggaggcgctgcagaagctcggcatcgagaccaggctcggtgtcggagtggcctccctcgacaagtccggagtcacgctctccagcggtgaacggatcgaatgtgagacggcgatctgggccgccggcatgcgcgcggctccgttgacggcacagattccggctgaacgcgaccagtttggccgactgctcgtcgaccgtgatcttcgcgttccatcggtaagcggtgtcttcgccactggcgatgccgcgcgggccgcatgtgacgatgtcggcaattacgcgctgatgtcgtgccagcatgcgacccggatgggcgccttcgctggcaacaacgccgccgccgagctgctgggcgttccgaccagatcctatcaccagaaagcctacgtcacctgcctcgaccttggcgaagcgggcgcgctgttcacgcgcggctgggagcgcacggtcgcgatggtcggcgatgtcgccaagaagaccaagcaggagatcaacactgtctggatatatccgcccaaggctgaacgtgccgcagccctcgcctcggccgatccggagcgcgtcaccgctctttaa

SEQ ID NO: 5053 - DNA, 870 bp, BradyrhizobiumColbertium
gtggagatcgcggccctctcgaccggcaggaacgacggcacaggttctgtcaccaccagcgacggcgcaaagatcttctacaaggactggggaccgaagtccgcacaaccgatcgtcttccatcacggttggccgctcagcgccgatgactgggatgcccagatgctcttcttcctcggcaagggctttcgcgtgatcgcccatgaccgccgcggccacggccgctcgagccatgtcggcgacgggcacgacatggaccactatgcggccgacgtcgctgcccttgtccagcaactcgatcttcgcaacgccatccacgtcggccactcgacaggcggcggcgaggcagcgcgctacgtcgcacgtcatggccgcgatcgcgtggccaagctggtgctcatcggcgctgtgccacccctgatgctcaagaccgagtccaatcccggcggattgccccttaaggtcttcgacggcttacgcggtcgactcgcagccaacaggccgcaattctatcatgaattcgcgagcggccccttctacggatacaatcgtccgggtgccgagccttcgcaggcgacgatctggaactggtggcgtcaaggcatgatgggtagcgccaaggcccattacgacggcatcaaggccttctccgagaccgacttcagcgaagacctgaagagcatcgctgtgccgacgctcgtcctgcatggcagcgacgaccagatcgtccccgtcgcagactccgcaccgctgtcggcccggcttctgaagcacagcaccttgaaaatctacgacctgctgccgcacggttgttgcacgacccatcccgacatcgtcaacggcgacttgctcaggttcgtgacagcgtag

SEQ ID NO: 5054 - DNA, 951 bp, BradyrhizobiumColbertium
atgagcaaggtcgtcttgcgcgaatccgcgaatgacatcctcgccgcccctcgtgggcagcgggacgttgccctcgtaggcgaccggtcagttgccggtgaggagatggctcgcgtgctccggacggctccctttcgcatggcgttggactcctccggcgccggaattgctcactggaagcacgacccattgcacgatgtcgtcgagcccatgagccaccacgtcatcatggcctataatggcacggtccagcgcatggagcgacggtccggacggtcgatcgcgatcgggacgtttcgtcccggcgtcgtcatcgtcattccggagggatcgacctcccgatgggacatcccaaaacccgtcgatgtcgttcagctctacctgccgcagacaacgctgaagcgcgtggcggacgaagcggcaaccggatcaccgactgaactcctggagcgcaccgcgcatccagatcccgtgacttcccgactgttgctgagtgccgcggatgtgctggaagggcacgaagcgctggatacgctcttcaggcaacaactcatggatttgctagcgacacgtcttctggctgcgcacaccggttcgccaagcgcgatcgcgccgacgaggggcggattgtcgcctaagacactgcttcgcgcaatcgagcggttgcgctcggacagtgatgccgacgtctcgctcgcagctcttgctgccgacgccggcttgtcgcgctttcatttctgccgtgcattcaaggactccacgggactgtctccccatgcctggctgcgtcagcatcggctcgagcaagccatgaacatgctgcgcgacaccgatgcgtcagtggtctcgattgcggctacgctcggctactcctcgcagaccgcttttgccgccgcgtttcgaaagctcaccggggaatcgccgagcgattggcggcgacgcgcacgttag

SEQ ID NO: 5055 - DNA, 156 bp, BradyrhizobiumColbertium
atggattcggggtccgaaggcaatccgtcgaggttcgatgccgcagatttgcgggttctaggcggcgcggaaatctgcgtctttcctattgctgccgtgttttgcctgatcctgctctgcggacacgaggagcgcgcggtccgcgtgcgtttgtga

SEQ ID NO: 5056 - DNA, 930 bp, BradyrhizobiumColbertium
atgaccaggacaggcgcttacggtgaacggctcgcagagttccttcgcctggaggaagcccctcccactctgacgacggggtcgctgcgcagcaccaagattgcggtcactgaaacgcgccacgacagtcccgtgccgggcctttccggttcgttcgccgcggaagatgcctatctggtcagtctgaagctgcgcgactatccggagtgcgagatctgggagcaggggcgtcacatcaaaaaggcggatgtccacgccggcacgacgtatctctatgatctcaaggtcgacccgcgctacctgatcaacaagccattccactctctgcacttctacgtgccgcgttccgcgctcgatggtctcgctgatcagtcgggcgcacggcgcatcgatacgctcgactgcagcccaatcgggcacgatgatgccatcgttcgtcacatcggcgcctccttgcgcgagggactgcggcggccggacgaggcaaatcagctcttcgtcgaccacatcatgctggcgcttgccgcccacgtcgctcaagcctatggcggctttcgaaacaaggtcgagagcagccgcggcgcgcttgcgtcatggcagctcgcgcgggcctgcgacaaactcgaagcggatctcagcgggaagctgccattggaggcgatcgctgcggagctaggcctctccgtcagccatttctcacgcgcgtttcgcgcggcgaccggcctgccgcctcatcgctggcttctgcatcatcgcgtgagaaccgcaaagcgtctgatgagcgagcccggcccatcattgtccgaggttgcgatctctgccggctttgcgaaccagagccacttcacgcgggtcttctcggcaattgccggcatcagcccaggtgcatggcggcacgatgtgctgggaacagcaagccgcgaacggtga

SEQ ID NO: 5057 - DNA, 276 bp, BradyrhizobiumColbertium
atgcggcgaattcttgattggttcttccggaaccgcgaaaccggcgccatcaccatcgcccagtggcccaacctcgttctgtggatcgtcatcgtcgcgggaattctgctctggatatggccgtccgcaggcaaggccagcctcgccttgacgatcgtcgtgaagggcgggctcatcatctggggcgccgacgagatcattcgcggcgtgaacccctggcgacgctgtctcggcgctgccgttgtgctctatgagctcatgacgcttctgccgtaa

SEQ ID NO: 5058 - DNA, 432 bp, BradyrhizobiumColbertium
atggccaagaaaccgctcgccgatacctcaagggaaatggccggaatcgacatcgccattctctcgacccacgccgagaacggcgagattgcgaaccgtccgatgagcaacagcggcgacgtcgcctacgccggcacctcgtattacttcacctacgaacaggcgcggacgggatcggacattcaacgaaatccaaaggcagcgctcggattctcatccgaggcggggcttttctccaagggaatctacctcgccgttgaaggcagtgccgaattgatccgggacaagacggccttccagcagcactggacgagcgatctcgacaaatggttcgaccacggcatcgatacgcccggcctcgtcctgatcacggtcagagccaaccgcatggcctattggaaaggtcgtgaagagggggaggtcgagctctga

SEQ ID NO: 5059 - DNA, 1737 bp, BradyrhizobiumColbertium
gtgagcggttggacgcgttgggtgccggggatcgagacgcttcgccactacgaatctgattggcttcggaacgacgtattcgcaggtctcgtgctggcgaccatgcttgtcccggtcggaattgcctatgccgtggcgtctggcctgccgggcatccacggcctctacgcaaccatcgtcgctcttctggcctacgcggtgttcggtccgagccgcatcatcgtgctcggacccgactcggcgctggcagctgtcatcctcggtgtcattgcccccttgtccggtggtgatccggtccgcgccgcaatgcttgccgccatgatggcgctcgtttcaggagctgtgctcatcgtggcgggcatcgcgcgattgggcttcgtaaccgagcttctctcgaagccgatacggtatggctacatgaacgggatcgcgctgaccgtcctgatcagccaactgccaaggctgctcggtttctcgatcgagagcgaagggccgctgagaggcctgtgggcgatcaccatcgggatcagcggcggcaagatgaactgggccgcattcacaatcggactcggcacgttgatggtgatcctgctgctcaaggatagcaaacgactgccgggaatcctgattgccgtcgtcgcagcgacccttgtcgtcgcactatttgatctcggaagcggtcatggtgtggaagtcttgggcccacttccgcagggtctgccggcgttctctattcccaggattggttacagcgatctgatcccggtgctgaccggcgggtgcgccatcgctctcgtttcgttcgccgataccagcgtgttgtcgcgaacctacgctgcgcgattcggcgataaagtcgatccgaaccaggagatggtgggtctcggcgcggccaatctggcgactggtctgtttcagggcttccccatcagcagcagttcatcgcgcacgccaattgccgaggccgccggcgcgcgcacccagctggcgagcatcgtcggcgcgctcgtcatcgccttccttctgctgtttgcgccgaatctgctgcagcacctgccgcacgccgcattggcagcggtggtgatctcagccgcaatcagcttgatcgagatcagcgatctcaagcgaatctaccgaatccagcgctgggaattctggttgactgtgctgtgtttcgtcggcgtcaccgtgctcggcccgatcccgggaatcggccttgccatcgccgtggccattgcggagtttctgtgggatggctggcgtccgcactccgcgattctggggcgggcacacggcgtcaagggctatcacgacatcacgagatatcccgatgcccggctgatcccgggactggtcctgttccgctgggatgcgccgctgttcttcgccaatgccgagttcttcaaggagcgaattctggccgccgtcgcgacatcgccaacacctgtgcgctggttggtcgtcgccgccgaaccggtcacgagcgtcgacgtcaccgcttgcgataccgttgcagaactgaacgaggcgctccgagccaggggcatcgaactctgctttgccgagctcaaggacccggtgaaggacaagctgaaacgatttggtttgtacgcccaggtcggcgaggcccacttctttccgaccatcggctcagccgtttcgagttacctggacacgaacaatgtcgcgtggagggactgggaagacgaggtcgaggttggtcgtaacatcggatag

SEQ ID NO: 5060 - DNA, 804 bp, BradyrhizobiumColbertium
gtgagggaaacacgaaagaaaaaggcgcgagcgatggtctgggatccgcagcaatatctgaagttcgccggccaccggctccggcctgccgtcgatctgttgatgcggattccggattttgcgccgcgcgcgatcgccgatctcggcgccggcgccggcaacgtgacgaagctgatcaaggagcgctggcctgatgcacgcgtggtcggtgtcgagggctcggccgagatggtcgacgcgggccggaaggccgcgcctgacgtggaatggtcacatcaggatctcggccattggcgtcccgccgggcagtatgacttgatcttttccaatgccgcactgcactggctgcccaatcatgcggcgctcttcccgtcggtcatggagaaggtgcgtcccggcggcatgctcgcggtgcagatgccgcgcaacttcaccgcgccctcgcatgtgctgatcggcgagacggcgttgaatggtccgtggcggtccaaggtcgagcatctcgtcaccccgccgcccgtcgaggggccgtccttctatcacgatctgcttgcgccgatgtcggccaacatcgacatctgggagacggaatatcttcaagtgctcgaaggcgagaaccccgtgaaggaatggaccaaggggacctggctgacacgctatctcgacgtcctgcagggcgaggagaaggccgcgttcgaggccgcttatggagcgcgggtcgccgaggcctacccgaagaatgcggcgggacagacgcttttcccgttccgccgtctcttcatgattgcgcagcgcaaaggctga

SEQ ID NO: 5061 - DNA, 1002 bp, BradyrhizobiumColbertium
atgcgcaagctgcttgttgcggtcgccgccgcggctgttctcttgacgcccggcatcgccgcggctcagagccccatcgtcataaagttcagccacgttgtcgccaacgacaccccgaagggcaagggtgcgctgagattcaaggagctcgcggagaagtataccgacggcaaggtcaaggtcgaagtctatccgaattccacgctctacaaggacaaggaggagatcgaggcgctgcagctcggctcggtgcaaatgctcgcgccgtcaaccgcgaaattcgccccgctcgggatcaaggagtttgaggcgctcgacctgccctggctgttcaaggacgaccagacctattccaacgcaatgaagggcacgatcggcaagtggttgttccagaagctcgaggccaagggcatcatcggcctcgcttattgggacaacggcttccacatgctctccgccaaccgtccgctggcgaagccgaccgatttccagggcctcaagttccgtatctccggatcgaaggtggccgaccaatatcttcgcatcatgggctcgatccctcagatcatggcgttctcggaagtttaccaggccttgcagaccggcgtggtcgatggctgcgagaacaccgcatccaactatctgacgcagaagttctacgaggtgcagaaggacatcaccgtgtcctaccacgcgcatctgcaatatgcggtcatcgtcaactcgaaattctggtccggcctgccgcccgatatccgcgcccagctcgagaaggcgatggcggaggcgaccgactacaccaactcgatcgcgcgccaggagaacgaggacgccctggccgagatcaagaagacgggcaagaccaatctgcattatctcaccgatgccgaccgcaaggcctggcaagaagcgatgcagccgacctataaatgggcaaaggggcgggtcgggcaggaggtgctcgatctcgtcgccaaggaactcgacgtcaagatgaactga

SEQ ID NO: 5062 - DNA, 2034 bp, BradyrhizobiumColbertium
ttgctgcgtgcgctgaaccgggtgctcaatcatctcgaggaatggctgatcgcgacgatgatcgcggcggcgacgtcgctcatcttcgttgcggtgctgcaccgctacggcgccgggctctccatcgacatcgccaaatgggcggaggcccgcaacctggccttccttgccgttccggcgcgagcggtgttcgtctggcttgccgcgctcgacctttcctgggcgcaggagctctgcatctacatgttcatctggatggcgaagttcggcgccgcttacggcgtgcggaccggtatccatgtcggcgtcgacgtgctcgtcaacctccttcccggcggctcgcgccggcgcgtcatcaccttcggccttctgtgcggcgcgctcttcaccgccatcgtgggctatttcggggccgccttcgtcagccacatgtggcagagcggccaacagtccaacgacctcgaagcgccgatgtggatggtctatctcaccatcccgctcggctccgccttgatgtgcttccgcttcctgcaggtcgcctggtcgttctatcgcaccggtgagcttccgcatcacgacatggccggcgtcgagggcgtcgaggcggatccggtgcatccggcgccggtcacgcacagccaggtcgtccgggacgagcgcagcccgctcggctggattctgatgctgctgcctgtcctgatcgttgcgttgtgctttgcgcatgcggcccacgtcatcacgctgccgcagggcctgcgtgtcttcatcgtgttcgcgcttctgctctcgttgatgctgacaggcatgccgatctcgatcgcgctgggcctgaccgtgctcagcttcatgttcacgctgaccgatgtccggacggaatcggtggcgctgaagctgttcaccggtatcgagaatttcgagatcatggcgatcccgttcttcatcctcgccggcaacttcctgacccatggcggcgtcgcgcggcgaatgatcaccttcgcaacgtcgctggtcggccattggtacggcggtctggcgctgtcgggcgtggtcgcctgcgcgctgttcgctgcgatttccggctcttctccggcgaccgtggtggcgatcggttcggtgatcctgcccgcgatggttgcacaaggctttccgaagcggttcggggccggcgtgatcacgacgtcaggctcgctcggaatcctcattccgccgtcgatcccgatggttctctatgccgtgtccaccaacagctcggtcggcaagctcttcatcgcgggcatcgtaccgggccttgcgctcgcatcgctgctcggcgccacgacgttctatcgcgcctggcgcaacgactatccgcggatgcggaaggccaccttcctcgagcgtctcgatgcgttccgcaaatcgatctggggcatcctcttgatcgtgatcgtgatcggcggcatctacagcggcctgttcacaccgacggaggcggcagcggtcagcgccgtctatgccttcatcgtcgcggtgttcatctacaaggacctcaagctgcgcgatgtgccgcgcgtgctgctgtcatcggcgaatctttcggcgatgctgctctacatcatcaccaatgcggtgctgttctcgttcctgatgacctacgagaacgtcccgcaggcgctggcgcaatggatgatcgaccagggcctgggatggatcggcttcctgctgctcgttaacgtcctgctgttgatggcaggcaacgtgatggagccgtcctcgatcatcctgatcatggcgccgatcctgttcccggtcgctgtcaagctcggcatcgaccccattcacttcggcatcctgatgacggtcaacatggaggtcgggctgtgccatccgcccgtcggcctcaacctctacgtcgcctcgggcatcgccaagatgggcatcaccgagctcacggtggcagtgtggccgtggctgctgaccatgctgggattcctcgtggtggtgacgtattggcccggcctgtctttgtggctgcctcgcttgctgggcatgtag

SEQ ID NO: 5063 - DNA, 837 bp, BradyrhizobiumColbertium
atgttcttcaacagaatggaatccggaccggcgtcgatttcggacgccgttcatttggaagtcatcacgggccttcacggcacgatgatgcccaccattctcgcggccgcctgccaggcgatggtcggcgccatcacgacctacgagaccggtgacatgatgacggccggcctgacggtcgctggcgtggtggtggcggttgttcgtcttgccgagatatttgcatttcgccgccgcctcgcggctccgccacggctcggccgggccgaggccgtgcactgggaacggcgctacattgccggcaccgtggtaacggccttcgtgctcggcgtgtttgccgcgcgcagcatcgtgctgggcgatgcgctctgctccgtgatggcgatcggaatcggtttcggcttcggcgccggggtggtggcgcggctggcgctgcgtcccgtcgcggcgttgctcgatctcgccgcgatcgccgcgcctgccgcgatcgtgagcttcatgcaacccgatctccgccatgtcgggctcggtctcctcatcctgatgtacgtggtcgcgagcttcgagatggttcggctcagcttcaacgcctcgatcagccagatcacgctcaagcgccagttcgagcagcttgcgcgctccgacccgatgaccggcgtgtccaatcgttcggtgctggcgagggatctgcccgtgatgctgtcggccggtataaattgccgtccatacgctggatctcgaccgtttcaaggaagccaacgatcggttcggccaccctgccggcgatgcgctgctgaagcaggttgccggacggctcaaggcgctggccgctcctga

SEQ ID NO: 5064 - DNA, 315 bp, BradyrhizobiumColbertium
gtgatccgcatgggtggcgacgagttcgtcctggtgcagcgcgccgcgtccgacgcggaggcgatggcacggcggatcgtgcaatcgatcggcaggccgtacgaggttgatggacaggtgatcgatctcggtgcgagcgtcggcgtcgccgtcgcgccggacgacggccgaaccgcagaggcgctgttgtcgcgctcggacaaggcgctgtaccaagccaagcagaatcgtggcggctacgtggtggccagcgagctgcggatggcggacaaccccacggcatcgcgcgagcccgttgaaggcgtagctgcgtag

SEQ ID NO: 5065 - DNA, 1986 bp, BradyrhizobiumColbertium
atggcaatcgaccgcaagatgcggttagatgccgtgcatcaggcggggaggagcaacatgacggaatccagcagcgagccgaaggacgcgtcgccgtctgtcatcgcgcagcatgatgcgatgctgaacgcactgccgttttccgacacacgggatttcgacgatgccgcgcgcggcttcctcggcacgatcgagcatgcaacgatcacgactccgcaagggcgaacggtctggagcctcaagccctatggcttcctgtccgccgaagaggcgccgcccacggtcaatccgagcctgtggcggcagtcgcggctcaacatgcatcacggcctgttcgaggtcgtgcccggcgtctaccaggtgcgcgggctcgatatcgccaacatgacgctgatcgagggcgacagcggtgtcatcgtcgtcgacaccctgacctcgatcgaaggcgcgcgcgccgcgctcgatctctatttcaagcaccgcggcggccggccggtcgcggcgatcatcttcacccatacccacgtggaccattggggcggcgcgcgcggcgtgctgcaggaggatgcgctcgccaccggcagcgtgccgatcatcgcgccgaatctgttcatggagcacgccgtctccgagaacatcatcgcagggcctgcgatgctgcgccgggcgcagtaccagttcggacctctccttgccaagggcgtgcgcgggcaggtcgattgcggcctcggcaagtcgatggcggctggatcggccgggctgctgcgccccacggatctgatcatggcgaccggcgacacgcgcgtgatcgacggcgtcgctttcgaattccagatggcaccgaacagcgaagcgccggcggagatgcacttctgcgtgccgcgttacaagttgctgaacctcgccgagaattgcacgcataatttccacaatctgctgccgttccgcggcgccgacgtgcgcgatgccctggcctggtcgaagtatctgggcgaggccctgcagctctgggacggcaaggcggaagcgatgtgcggccagcaccattggcccgtgtgggggcgcgagcgcatcggaacgatgatccggcagcagcgcgacctctacaagttcgctcatgaccagaccatccgcctgatgaaccacggcttgaacgccgcggaaattgccgagacgatccagctgccgaagagcctggagggtgcctggcacggccgcggctattacggccacatccggcacaatgtgaaggccatctaccagaaatacctcggctggtacgacgccaatccggtcaatctcgatccgctcccgccggtcgagtcgggcaggaagtatgtcgaatacatgggtggtgcggacgccatcctggcgcgggcccggacggatttcgacaagggcgagtttcgctttgtcgcgcaagccctcggccatctcgtcttcgccgagcccggcaatgcggcggcgcgcgcgctcttggctgataccctcgagcagctcggttatgccgcggagagcggtacttggcgaaatgcctacctcttcggcgcgcaggaattgcgcgagggcatgccgaaagtgccggcgcgtccgcccatgccgcgcgagacgctggcggcgctgcgcacttcccagctctgggatgtgctcgccatccggctcaacgggccgaaggcggaaggcaagcacatcgtcttgaactggagcttttccgacaccggcgagacgttcgtgctcaatctggagaattgtgcgctcacttacaccgaaggtgtgcaggcggagaatgcggatgccagcttcacgctcgcgcgcgcaacgcttgatgaggtggtcgcaaagctgacgagcttcccggaggcggtggctgcaggcaaggtcaagctcgccggcaacccaatgaagctcgctgagctgatgggcctgatggatgaatttccaaggatgttcgagatcgtcgagccaaagcgggccgtggtgatgtag

SEQ ID NO: 5066 - DNA, 1071 bp, BradyrhizobiumColbertium
atgcgcatcgcgcaggtagctccgttgacggaggctgttccacccaagctgtatggcggcaccgagcgggtggtgcattggttgacggaagagctggtggccctcggacacgacgtgacattgttcgccagcggcgattcgcaaacgtcggcaaagctggacgcgctgtggccgaaggcgctccgtctcgacggttccgtgcgcgatcccaatgcgctgcacatggtgctgctggagcgggtgcggcagaaatgtgacgacgaggagttcgacttcctccacttccacctcgactattatccatggtcgctgttccaccggcagccgaccccgttcgtgaccacgctgcacggccggctggatctgccggagcatcagccggtcttcaacaccttctccaagatgcccgtcatctcgatctccaatgcgcagcgccgccctgtcccgcaggcgaactgggtgaccacgatccatcacggcctgccggagaatctgctgacgccgaagccggctcgccaggaatatctcgccgtgctcggccgcatcgctcccgagaagggcgtcgaccgcgccatcaagatcgcgacccattgcggcattccgctgaagatcgcggccaaggtcgatcgtgccgaccaggactattacgacgagctgatccggccgatgatcgagaacaatccgctggtggagttcatcggcgagatcagcgaccacgagaagtcggacttcctcagcggcgcgctcggcctgctgctgccgatcgattggccggagccgttcggcctcgtcatgatcgaatccatggcctgcggaacgccggtggtggccttcaaccgcggctcggtgccggagatcatcgacgagggtctcaccggcttcatcgtcgaggatgtcatcagcgctgcgggggtggtgaatcggcttccgcagctcgaccgcaccgcgatccgcaggcagttcgagacgcgcttcaccgcgcgccgcatggcgctcgactatctcgcggcctaccgcagcctgaccgaggcacagacgccgcggatcaagctggtgagcagcgcggaatag

SEQ ID NO: 5067 - DNA, 342 bp, BradyrhizobiumColbertium
atgaatgttgaagcccccgcctgtacggcaccggcaatgccagacggaggaacgttcccgcacctgcgaagttccttcctccgatcgttacatgttcgccacgtctgcaggccgtctcgatgctgccacttcatcttctcatatcgtccgcatccgcatgtcgtgatcgccaagcctgggaacccaggcgaagagatcgatgttcagtcgatcggtaacaaacaaaacgaaaagccagccaacggggcgacagttatatggatcagctttctggatacgcgcgcaggccatttgcctttgtcttgcgctatcttcggatgcgaatggcatcgcatctggtga

SEQ ID NO: 5068 - DNA, 1704 bp, BradyrhizobiumColbertium
atgcgaatggcatcgcatctggtgatcctcaccgcggtcgtcggagccgttgcctgctccgtaggtacccagtacggggtcaaatcccttgtcgacgccttgtctgccggaccctcgcaagggggcggtgtatggctcgcattcattctgctcatgtcgctgattgccgccgacaacttcctgtggcggatcgcgagctggacggcgagcttcaccttcgtcagggtaacgggcgatttacggcgtgacatatttcgtcatctgaccggacacgcaccgagttatttttcggaccggatgccggggatgctgacgagccgcatcaccgcgacctcgaacgcggtgttcacggtcgaaaacatgttcgtctggaatgtgttgccgccgtgcattgccacaattgcggcaatcgccttgatcggaaccgtaagcccttatatggcgctcggcctgaccgtgatcgccggcggcatggtcatcgcgatgttccgcctggccgctgccggaaagccgctgcatgacgacttcgccgacaaagcggctgcggttgacggcgagatgatcgacgtcatcagcaacatgccgctggtccgtgccttctgcggcatcggccacgagcatgagcggttcgatgccacggtcaacagggagctgaccgcgcgaagccgcagcctgcgttacctggaaaagctgcggctgttgcatgcagccataacggtgctcttgaccatcgcgctgatggcctgggccatcacgctctggcagaaaggccaagcgacgacgggcgacgtcgtgctggtctgcacgctcggcatctcgatcctgagcgccacgcgcgacctcgcggttgcgctggtcgacgtcacccagcacgtggcgcggctgaccgaggcgatcgccacgctgctggttccgcacgaattgcgcgaccaccccgaggccgagccgctggtgaagagcggcgcggccatcgcattcaataacgtcacgttcggctatcccggcgccgacaagatcttcgagcggttcagcctgcggctgcagcctggtcagcgcgtcggactggtcggccagtccggcggcggcaagtcgacgctgttcacgctgctccagcgcttctatgacgtcgacgagggtaacatcaccatcgatggccaggacatctcgaaggtcacgcagctcagtctgcgcgaggcgatttccgtggtgccgcaggacatctcgctgttccaccgctcgatccgcgagaacatccgctacggccggccgaatgcgaccgacgacgaggtgttgcgcgcggcgatcgctgcgcgctgcgacttcgtcgagagcctgcctggaggcctcgacaccatggtcggcgaccgcggcgtgaagatgtccggcggccagcgccagcgcatcgccatcgcgcgcgccttcctgaaggacgctccgatcctgctgctggacgaggcgaccgccgcgctcgacagcgaatccgaggaggccatccgcgaggcgctgtcgcggttgatgcgcggccgcaacgtgatcgcgatcgcgcatcgcctcgcgacgctgcgcaatttcgaccgtgtggtggtgttgagacatggtaagatcatcgaggacggctcgcccgagcgcctgatgcagggacacgggccgtatcgtgagctggtcacgcaggaaatgagccggctcgcgcaagccgccgcctaa

SEQ ID NO: 5069 - DNA, 2205 bp, BradyrhizobiumColbertium
atgtcggccgaaaccgtagcccagttcgcctccgtgacgcggacctcggagcaggtcgcggaacaacccttctacattccgatgaccggaccgtcggcgcggccgcggcgttcactcaagcatgacgatactttcatcgtgctggacagtcatggcgacatcggcgcgtccgccggcgggccggacggcctgttccatcacgatacgcgctacctcgcgcggctcgaactcgtgctcgacgatctccagccgctcctgctcggctcgaacctgcgcgatgacaattcggcgctgaccgtcgatctgaccaatccggatatctatcgggaaggcagcctcgttctacaaaaggacctgctgcacatcgtgcgcacgatcttcctgtggcgcggcagggcctatcagcgcattggcgtgcagaaccatgccgagcggcgtaccagcttcaacctgacgctgctgttcggcaacgacttcgccgatctgttcgaggtccgcggcgagcggcggccgcgccgcggcatcggaacgagccggctggtcgggccgaccgacgtcctgttcgaatatcgcggtctcgacgatgccgagcgcaccaccgggctgcatttcgatccgcgtccgacgcggctctcggcggacgcagcgacgtgggagctcgacctggagccgcatcaggccaagtcgctgttcgtggccgtgtcctgcaaccgcccgggcacggaaaggccggttcgtttctttccgggtcttctggcgcatcgccgcgagatgaggcggtcgaccatgggcgcggccagcatcgagacctccaacaacatcttcaacgaggtgctgtgccaagccatggccgacctcaacatgctgatgaccgagacgccgcagggacgctacccctatgccggcattccctggtactcgacgaccttcgggcgcgacggcctgatcaccgcgctccagatgctctgggtcgatccgcgcatcgccaagggcgtcctgcgccggctcgcgcatttccaggcaaaggcgatcgatccgcgcgcggacgccgcgcccggaaagatcctccatgagatgcgcggcggcgagatggcatcgctcggggaggtgccgttcgcgcattattacggcagcgtcgattcgaccgcgctgttcgtgctgctcgcgggaagctatttcgagcgcaccggcgacgaggccacgttgatcgagctgtggccagcgatcgaggcgggattagcctgggtcgacggcgctggtgatcctgaccaggacggtttcgtcgaataccagcgcgccaccgagaagggtttggccaaccagggctggaaggattcctacgatgcgatctttcatgccgacggccggctggcggaaggcaacatcgcgctcgcggaagtccaaggctacgtctttgctgccaagcagctcgccgcgcggtgcgcgctgcggctcggcaagccggatcgcatgcgcaagctcgacaccgaagccagggaactcgccgagcggttcgagaaggcgttctggtgcgacgagctcggcacctatgcgctggcgctcgacggcgagaagcggccctgcaaggtcaggacatcgaacgccggccaggtcctgttcagcggcatggtccgcgaggaccgcgcccgcctcgtcgctgccgatctgatgggcccgcatttcttctcgggctggggcatccgcactgtcgctcaaggcgaggtgcgctacaatccgatgtcctatcacgacgggtcgatctggccgcacgacaatgcgctgatcgcgcttgggctcgcccgctacggcctcaagcattcggtggcgctggtcttcaagggcctgttcgacgcggctacctacatggatctgcgccggctgccggagctgttctgcggcttccggcgcgagaagcggcgtggcccgacgctctatccggtcgcctgcgcgccgcaggcttgggccagcgcgacgcctttcacgctgctggaagcggcgctgggcctggaatttgacgtggctcgccgcgagattcgtctgcgtaatccccatctgccggcattcctgaatgaggtgatcctgcgcgatctgcgcctgggcgagtccagcgtggacctgcgtgtcggtcgtcatggcgacgacgtggcgctggaggtgatgcgcacacgcggccatatccaggtctcgatcgtgctggcgcgctag

SEQ ID NO: 5070 - DNA, 522 bp, BradyrhizobiumColbertium
atgcgtgcgattggagcttcgatcctgggcgcggcgatggtgatggccctggccgcggcgccctcgcgcgccgcggaggatccgcccgccggccggaatgaggcggctgtgccgccagcggcacagccgcccgtctcgaccgttccggtgacgcccaaggatgcggcgccgccgccctcggtgaccatcatcggcgcgagcgaagcccacggcgtgctcggccgcgacgttcgtagcgccgccggcgaggacatggggcgcatcgtcgacgtcatcgtcgatcgcaccggccatgtccgtgccgccgcgatcgattttggcggctttctcggcgtcggcagccgcaagatcgtggtggactggaatgcgctgcgcttcggcaagatcgccaacaagaaggacagcatcacgctggaactgaccaaggcgcaggtcgcggccgcgccggaatacaaggaggacacgccgatcgtcgtgctcggcgcgtccggcagccttcagccgctgcaagcaatccagtga

SEQ ID NO: 5071 - DNA, 1287 bp, BradyrhizobiumColbertium
gtgctgttgttgaggaagccgaaccatgcggatcgcgaccgcggcgtcgaacaggatcacgttgccgcgccgccggccgcaagccttccggcgccctcgcggcagagcctgcgcgggctcgattggttcatcttcttcctcgccgacgtgcagaccggattcggccccttcatcgcggtctatctgacgacgcagaaatggacccagatcgaaatcggcctcgtgttgtcgatcggcggcatcgtcgcgttgatcgggcagatgccgggcggcgcgatcatcgacgccgcgaaatcggagcgtctggtcgccgccctcgcgatcatgacaatcggcgcttgtgcgctggcctatgccgcgatgccgatcttccccgtcgtggtggccgcggctaccttgcacgcggcggccagctgcgtgctcggaccggcgatcgcggcgatcagcctcggcctcgtcggcccttttgcgatcggcgagcggctcggccgcaacgcgcgcttcgcctcgctgggcagcggcatcgcggcggccgtgatgggcacggtcggctatctgctgtcgagccgggcggtcttcctcgtgaccttcctgctcgtgatcccgaccctcatcgcgttgtcgcgcatccgcgagaacgaggtcgatatcaggcgctgtcacggcgagatgccgccggaggccgccgaccgcgccgataccaatatctggcacctgatccggcagcgcccgctcatcgtctttgcggtcagcgtaatgttgctgcagctcgcgaacgccgcgatgatgcccctgatggcgagcgcgctgacggcgcggtcgagccaatgggccaccgtgctcgtcgccgcctgcatcatcgtgccgcaggccatcgtggcgctgctctcaccgacggtcgggcgccaggcgcaggtgtggggccggcggcccttgctcttgatcggattcggcgcgctggtgatccgtggcctgctgttcgcgacggtgcgcgatccctatctcctggtgctggtgcaggtgttcgacggcctcaccgcggcggtattcgcggtgatgattccgctgatcgtcgccgacgtcgcttttggcagcggtcacttcaacctggcgcagggcatcgtcggcaccgcaacgggcatcggcgcatcgctgagcaccgtgcttggcggttatgtcagcgacaagttcggcaacgccaccgcgttcatcgggctgtccggcgtcgcagcgacggggctccttctcatcctgctggtgatgccggaaacccggcgcacggcatga

SEQ ID NO: 5072 - DNA, 699 bp, BradyrhizobiumColbertium
atgctgacccagacaatcaagacccaggcaagcaacacccaaatcggtggcaagattgctcctgccaatcccgttaccgaccagttcggcgcgatcacgggccatgtcggcctggtcgccaccgagttctcctacggcaaggacgaggagatctatggcgaggacgaagcggccgagtatgtctaccaggtcgtcaccggcgcggtgcgcagctacaagcttctttccgacggtcgccgtcagatcggagccttccacctccccggcgacgtgttcggcctcgaatccggcgccacgcatcgcctggccgccgaagccatcatcgacaccaccgtgcgtctggtgaagcgtgcgagcctcgaaaaggccgccggcaccgacgtgcaggtcgcccgcaagctctgggcgatgaccgcctccgagcttcgccatgccgaggaccacatgctgctgctgggccgcaagaccgcgatggagcgcgttgcgaccttcctgctcgaaatggaccgccgcctcgccgtcgccggcatgatggcgctgccgatgtgccgtcgcgacatcggcgactatctcggcctcacgctcgaaaccgtgtcgcgcgcgctgtcgcagcttcacgcccagggcattctcggtttctccggcgctcgccagatcgtgctgcgcaaccgccagcgcctgcacaatctcgacgcctga

SEQ ID NO: 5073 - DNA, 357 bp, BradyrhizobiumColbertium
gtggtcgacgatgatgccgccgtcctgggatccctgcggtttctgctggagaccgacggctttgccgtgcggaccttcaggagcggcacggccctgctcaatgtcagcggtgctcccgggccggactgctatgtcatcgactacaagatgcccgatatcaatggcatcgagctgaccggccgcttgcgcaagtccgaccgggacgcccctgtaatcctgatcacgggctatcccgacgagaacatctcggcccgggccgccacggcgggaatcaaagacgtggtcttgaagccgcttctcgacgaaaacctggtcaaatgcatccgccacgccatcaaggatcgccccagcgcctga

SEQ ID NO: 5074 - DNA, 618 bp, BradyrhizobiumColbertium
atgacaaccaagggaaatgtctacgtcatcgacgacgacgcagcgatgcgggattcgctgaacttcctgctggactccgccggcttcgccgtcaccctgttcgatgatgcgctcgcctttctcgaagccctgcccggcctcgatttcggctgcgtcgtctccgacgtgcgcatgcccggtctcgacgggatcgagctgctgaagcggatgaaggcgcagcaaagcccgttcccgatcgtgatcatgaccggtcatggcgacgtgccgctcgcggtcgaggcgatgaagctcggcgcggtcgatttcctggagaaaccgttcgatgacgaccggctcaccgccatgatcgattcggctatccgccaggccgagcccgccgccaagaacgaggccgtcgcgcaggacatcgccgcccgcgtcgcgtccctgagccccagggagcgccaggtcatggaaggtctgatcgcgggcctctccaacaagctgatcgcccgcgaatacgacatcagcccgcgcaccatcgaggtctaccgggccaacgtcatgaccaagatgcaggccaacagcctctccgagctggttcggctggcgatgcgcgccggcatgctcaaggattga

SEQ ID NO: 5075 - DNA, 1440 bp, BradyrhizobiumColbertium
gtgggcacctgggatctcaatctccagacgcgcgaacttgaatggtcggaagtcgccaagcggctgtttggcctcgggcgggatcaggccgtcaactatgatctcttcctgtcgttgctggagccgggcgatcgggaccatctcctgaaggcgatcgggcgcacctcggaaggcggcggtgagcttgacctctccttcaaggtcgccggcggatccgggaacggccaatggattcgggccagggccggagtgatccgggacagttcgggcacgccacgtcatctcaccggaatcttcctcgacatcaacgaggaaaaggagctcgaggaggccctgcgctcccaggagaaccatctccgctcgattctcgagacggtgcccgatgccatgatcgtcatcgattcacgcggcatcatgcagctcttcagcagcgccgcggagcggctgttcggctacagcaggcaggaagccattggtcggaacgtgagcattctgatgccggagcccgatcagtcgcgtcatgacagctatctcgaccgatatctcaggacgaatgatccgcacatcatcggcatcggccggattgtcacgggcaaacgccgcgacggcacgactttcccgatgcacctgtcggtggggcagacgcagcgcgccggcgagccctatttcaccggcttcgtgcgcgacctcaccgagcaccagcagacgcaggcgcggctccaggaactgcaatccgagctcgtgcacgtgtcgcggttgaccgcaatgggcgaaatggcctccgcgctcgcccacgagctcaaccagccgctggctgcgatcagcaactacatgaagggatcgcggcgcctcctcgccggcagcagcgatcccaacacgccgaagatcgaaagcgcgctggaccgagcggcggagcaggcacagcgcgccggtcagatcatccgccgcctgcgcgactttgtctcccgcggcgaatcggagaagcgggtcgagagcctgtccaagctgatcgaggaagctggcgcgctcgggctcgccggcgctcgcgagcagaacgtgcagctccgcttcagcctcgatcccgacgccgatctcgtgcttgccgaccgggtgcagattcagcaggtgctcgtcaatctgttccgcaacgcgctcgaggcaatggcgcagtctccgcggcgcgagctcatcgtcgccaacacccgggtcggcgacggcatgatcgaggtggaggtctccgacaccggcatcggcttccgggaagacgtcattccaaacctgttccagaccttcttcaccaccaaagacaccggcatgggcgtggggctgtccatcagccgctcgatcatcgaggctcacggcggtcgcatgtgggccgagagcaatgcggctggcggagcgacattccgcttcaccttgccggcaaccgacgagagctga

SEQ ID NO: 5076 - DNA, 834 bp, BradyrhizobiumColbertium
atgacatacgcgaccgtcatggtcagcttggcgctggatcagtccaacgaggcgcgtcttcaggtcgcgggggaactcgccgaacgattcgaggccgccattatcggcgtcgccgcggcgcagttcgcgccgccgctctatttcgccgatggcgccgaggcacaagggctgatcgacgaaggcgaggcttcggtcaagcggcggctggccagcctggaagcacagttccgtgcggccgtgaagaaccggggagggcatgtggagtggcgcagcgccctggattttccggcgcgattcgtcctggcccaggcgcgttgcgccgacatcatcgtcagcggggggcagagccccgccttttccgatgctttctcgctcgtgagccccaaggatctggtgatgcaggccggccgcccgcttctcgtcgttcccgaccggaccaattggctcgacctccgcaacgtgctggtggcgtggaaggacacgccggaggcgcggcgggcggtgaccagcgcgctgccgatgctgcgcaaagcgagggacgtcaccatccttgagattccagagcagggcgacgaccgctcggccgtgatggccggcgtcaccgacgttgccgcctggctcggccgtcacggcgttaccgcgaccgcgcgcgtctcggaggccgcaggacgcgaagcgcccgcggcgcagctggagagagtcgccggcgacgtcggcgccggcctgatcgtcgcgggcgcgtatggtcattcgagattccgtgagctgatcctgggaggcgtcacccagcatctggtcacgcaaaccgcccgcaacgtgctgttgtcgcactga

SEQ ID NO: 5077 - DNA, 426 bp, BradyrhizobiumColbertium
gtgtataaatttcttgaacagaccgtcgacggcttcatgacgcgcaacgtcaagacggtgcagcgcagcctcgacttattccatctcagcgagatgttcgagaccgacgatttcaactcctatccggtcgaagacgacgggcaagtggttggcatcgtcaccaaattcgacatcctgaaatgcttcgccttcacgccgagccagatgttgccgcgctacgatgacctgatgagccgcaagatcggtgacgtcatgacgcccgagttcatctatgtcagccccgatacgcggctgacgcgtgtgctccagatcatggtcgagcaccgtatccggagcatcatcgtgctcgacagtgcacagaagctggtcggcatcattgcccgcgaggatgtcatcgcggcgctgaaggcgagcgccggcgactga

SEQ ID NO: 5078 - DNA, 1650 bp, BradyrhizobiumColbertium
atgagccagccctccatttcaaaatcaatgaccatcggtgaaagcggcttggctgtcgtattcgcagtcaccgctttcttttgcgtcatcgcctcggccaaggcgctcgatgcgcccttcgccttccacgccgcgctcagcgcggcggcgagcgtggctgcggtgttcgtcatcgtcaaccgctacttcgagcggccggcggcgttgccgccccaggaaatcaacggccgcccgaactacaacatggggccgatcaagttctccgccttcatggccgtgttctggggcattgccggcttcctcgtcggcctcatcattgcttcgcagctggcttggcccgcgttgaacttcgacctgccctggaccagcttcggccgcctgcggccgctgcacacctccgccgtgatcttcgctttcggcggcaacgtgctgatcgcgacgtccttctacgtggtgcagaagtcctgccgcgcacgcttggccggcgacctcgcgccgtggttcgtggtggtgggctacaatttcttcattctgatcgccggcacgggctatctgctcggcgtcacccagtcgaaggaatatgccgagccggaatggtacgccgacctgtggctcaccatcgtctgggtcgtctatctgctcgtcttccttgccaccatcttcaagcgcaaggagccgcacatcttcgtcgcgaactggttctatctcgccttcatcgtgacgatcgcggtcctgcatctcggcaacaatccggcgctccccgtctcggtgttcggctcgaagtcctacgtcgcctggggcggcatccaggacgccatgttccagtggtggtacggccataacgcggtcggcttcttcctgacagcgggcttcctcgccatcatgtattacttcgtgccgaagcgcgcagagcggccgatctattcctatcggctctcgatcgtgcacttctgggcgctgatcttcctctacatctgggccggcccgcaccatctgcactacacggcgctgccggactggacgcagacgctggggatgaccttctccatcatgctgtggatgccctcatggggcggcatgatcaacggcctgatgaccctgtcgggtgcctgggacaagctgcgcaccgatcccgtgctgcggatgctcgtggtctccgtcgccttctacggcatgtcgaccttcgaaggcccgatgatgtcgatcaaggtggtcaactcgctcagtcactacaccgactggaccatcggccacgtgcattccggcgcgctcggctgggtcggcttcgtctccttcggcgcgctctactgcctggtgccgtgggcctggaaccgcaagggactctacagcctcaagctcgtcaactggcacttctgggtcgccacgctcggcatcgtcctctacatctcggcgatgtgggtgtccggcatcctgcagggcctgatgtggcgcgcctacacctcgctcggcttcctcgaatattccttcatcgaaaccgtcgaggcgatgcatcccttctacatcatccgcgccgccggcggcggcctgttcctgatcggctcgctgatcatggcctataatctctggatgaccgttcgcgtcggcgaggcggaagtccagatgcccgtcgctcttcagccggcggagtga

SEQ ID NO: 5079 - DNA, 735 bp, BradyrhizobiumColbertium
atgtcattctggacacgccaccaagtcttcgaaaagaactcgatcatcctcgtcgtcggcatcctgctggtggtcgcgatcggcggtctcgtcgagatcaccccgctgttctacctcaagagcacgatcgagaaggtcgacggggtcaggccctacacgccgctcgagctcgcgggccgcaacatctacgtccgcgagggctgctatctctgccattcgcagatggtgcggccgctgcgtgacgaggtcgaacgctacggtcacttctcgctcgccgccgagagcatgtatgatcatccgttccagtggggctccaagcgtaccggacctgatcttgcccgcgtcggcgccaagtattccgacgactggcacgtcacccatctgaccaacccgcgtgcgatcgtgccgcagtcggtcatgccaggctatccgttcctcagcaagaccgaggtcgacccggatgcgatcgccggcgacatgcgcgcgctgaagaccgtcggggtcccctatagcgacgagcagatcgccaatgccgcggccgacctgaaagcccaggccgatccggacaatgccggctccgacgccttcacgaagcgctacgccaaggccgtcgtgcgcaacttcgacggcaagaccggcacgccgaccgagatggacgcgctcgttgcgtacttgcagatgctcggcacgctggtcgacttcaagatctacaatgagaaagccaatcttcgctga

SEQ ID NO: 5080 - DNA, 165 bp, BradyrhizobiumColbertium
atgaaagccatcctgacagtccacaatctagcgtccgatctcgtggcgacgatctggacaccggtgttcgtcgcgatctttctcgcgatcatcgcctacgcattttggccccgtaacaaggctgcgttcgacaaagcagcgcacctgcccttgcgggaggagtga

SEQ ID NO: 5081 - DNA, 876 bp, BradyrhizobiumColbertium
atgaccgatcattctagcgacatcgattccctctccgggaagtccacgaccggacacgagtgggacggcatcaaggagctcaacacgccgctcccacggtggtgggtgatcaccttctacctcaccatcctctggtcgatcggctactggatcgtctatccggcctggccgctgatctccagcaacaccataggcgtgttcggctactcctcgcgcgccgacgttgcggtcgaactcgccaacctcgagaagatccgcggtgacaagatggcggcgctgggcacggcctcgctcgccgacatcgagaaggacccggctctgctggcgcttgcgcgcgccaagggcaagaccgtgttcggcgacaattgcgcgccttgccacggcacgggtgcgacgggatccaagggctatcccaacctgaacgatgacgaatggctgtggggcggctcgctcgaccagatcatgcagacgatccagttcggcgtgcggtcgggccatgccaagagccatgagggccagatgctcgccttcggcaaggacggcgtgctgaagccggacgagatcgtcaccgtcgccaactacgtccgatcgctgtcgggcctttccacccgcaacggctacgacgccgccaagggcgagaagatctttgccgagaattgcgccgcctgccacggcgatgccggcaagggcaacccggagctgggtgccccgaacctgaccgacaagatctggctctacggctccgacgaggcgagcctggtcgagaccatcagccaaggccgcgccggcgtgatgccggcctgggaaggccggctcgatcccgccaccatcaaggcgatggcggtctacgtccattcgctcggcggcggcaagtag

SEQ ID NO: 5082 - DNA, 1467 bp, BradyrhizobiumColbertium
atgaacaagaccgtaaatccgaacgaactgaagcctgcggatgacaccgggccgctctatgcagcccgcaagaaggtctatccccagagcgtctccggcacgttccgccggatcaaatggacgctgatggcgatctgcctcggcgtctattatttcctgccgttcgtgcgatggaaccgcggtctcggcgcgcccagccaggcggtgctgatagatcttcccaacagccgcttttacttcttcttcatcgagctgtggccgcaggaggtctactacttcaccggcctgctgatcgtggccgcggtggcgctgttccttatgaactcggtcggcggtcgcatctggtgcggctatctctgtccgcagacggtgtggaccgacctgttctatgccgtcgaacgtctggtcgaaggtgaccggcgcgagcggatgaagaaggacaaatcgtccgatccgctgaagctcgagcgcatctccgagatcgtgctcaagcattcgatctggctcatgatcgcgtggtggaccggcggcgcctgggtgctctatttcaccgacgcgccgaccctggtgaaggagctcgtcacgttccaggcgccgatgatcgcctatatctggatcggcatcctcaccgcgacgacctatgtcctcgccggcttcatgcgtgagcaggtctgcacctatatgtgcccatggccgcgcattcaggccgcgctcacggacgaatgggcgctcaacgtcacctatcgctacgaccgcggcgagaagcggacgtctgtcaagaaggcggccgagctgcgcgcgctcggccagcaggtcggtgactgcgtcgactgttatcaatgcgtcgcggtctgtccgaccggcatcgacatccgcaacggaccgcagctcgaatgcatccaatgcgggctgtgcatcgacgcctgcgacaacgtgatggcgaagatcggccggccgaagcggctgatcggctacgacaacgacatcaacatccaccgccgccaggaaggcaaggcgccgatctaccgcatcgtccgcccgcgcaccatcgtctacagcgcgatcatcgtggccatcggcggcttcatgacttatacgctcgcgacccgcagcctgctcgacgtcaacgtgctgcacgatcgcaacccgatcgcggtcaagctcagcgacggctcgatccgcaacgcctacacggtgcggctgctcaacaagagcggttatgaccgcgtcattgcgatcgacgccaacgggccggccaatgcgacgatccatgtcatcggcgtcgattcggtaacgcctgatcggccgatgatcgtgatcccacgcgactccaccagcgagctgcggctgctcgtcaccgcgccggcagagaacaatccggagaagtcgatccccgtccgtttcctggtcaccgatatcgggctcggcgaggtcgcttccgcaaccgacaatttcgtctcaccttga

SEQ ID NO: 5083 - DNA, 486 bp, BradyrhizobiumColbertium
atggcatccaagccgctgaccggaaccaaggtcttcctgatgctggtcgctttcttcggcgtcgtgatcggggccaacttcaccatgatgaagctcgcgatcgcgacgctgcccggcaccgacgtcgacagtccctatgccgcaggccttgtctacgatcgcgagatctcggcggcgcaggaccaagctgcgcgcaagtggaaggtcaacgcgcatatcgagcgccgcagcgacggcggcgcctcggtccagatcgaagcccgcgatgccggcggccagccgatctcgggactgaagttcggcggccggctggagcggccgaccgacaagcgcgccgatctcgccgtcgagctcacggaatccggcattggtctctatcgcggcagtgccgcggacgtcgcgccgggccaatgggacctggtgatcgagggcgaggcgcggggaacgcgcgtgttcctgtcgcgcaatcgcgtgatcctgaactga

SEQ ID NO: 5084 - DNA, 2190 bp, BradyrhizobiumColbertium
atgcacatcacgcgggatttttcgcactacgttcggagcgcgggcgagggcgtccagcacatcgatctcgcggtcgagggcgttcactgcgccgggtgcatggccaagatcgagcgcggcctgtcagccattcccgatgtcacgctggcacgcgtgaatctcaccgaccgccgcgtcgccctggaatggaaggcgggcacgctcgatcccggccgattcatcgatcggctcgaggaactcggttacaaggcctatcccttcgagaccgaaagcgcggaggcggccgaggtcgccgaatcgcgtttcctgctgcgctgtctcggggtcgcagccttcgccaccatgaacgtgatgatgctgtcgatcccggtgtggtcgggcaacgtctcggacatgctgcccgagcaacgcgacttcttccactggctctcggcgctgatcgcattgccggcggcggcctatgccggccagccgttcttccgttcggcctggcgcgcactgtcggcgaagaccaccaacatggacgtgccgatctcgatcggcgtgatcctggctctcggcatgtccgtggtcgagaccatcaaccacgccgagcacgcctatttcgacgcggcgatcatgctgctgaccttcctgctggtcggccgcttcctcgaccagaacatgcggcgccggacgcgcgcggtcgccggcaatctcgccgcgctcaaggcggagacggccgcgaagttcgtcggtcccgacgagatctcgcaggtgccggttgccgcgatcaatgccggcgacatcgtgctgctgcgaccgggtgagcgctgcgcggtcgacggcaccgtgatcgaggggcgttccgagatcgatcagagcctgatcaccggcgagacgctctatgtcacggcagagcagggcacgccggtctacgcggggtcgatgaacatttcgggcacgttgcgggtccgggtctcggccgcctcggaggcgacgctgctcgcggagatcacgcggctgctcgacaacgcgctccaggcgcgctcgcgctacatgcgcctcgccgaccgcgcctcgcggctctacgcgccggtcgtgcacgcgaccgcgcttctgaccatcctcggctgggtcatcgccggcgcgagctggcatgatgcgatcgtcaccggcgtggcggtgctgatcatcacctgcccgtgtgcgctcggtcttgccattccgaccgtgcagacggtcgcctccggggcgatgttcaaagcgggtgtgctgctcaatgccggtgacgccatcgagcggctggccgaagccgaccatgtcatcttcgacaagaccggcacgctgacgctgcccgatctcgaagtcatcaatgccgccgacatccccgccgacgtcttcgatctcgccggccggctcgcgctgtcgagccatcatccggtggcggcggcggttgcgcaggccgccggtgcgaagtctccgatcgtcggagctgtcgaggaatccggtcagggcgtccgcgcgagcgtcgacggcgtcgagcttcgcctggggcgcccgtccttctgcggcgccggggcgttggtcggcggcgccacggtggatcccgaagcgtcgatcgtggctttcagcaagggcagcgagaagttcatcctttccgtccgccagggcttgcgccccgatgcgcgagccgcgattgcggcgctgaaggcgcgcaacatgggcatcgagatcctgtccggcgaccgcgagccggcggtgaaggcggcggccaatgcgcttggaatcccggaatggcgcgccggcgtgacgcctgccgacaagattgcaaggatcgaggagctgaagcagcgcggcgccaaggtgctgatggtgggcgacggcatgaacgatgcgccttcgctcgcggcagcccatatctcgatgtcgccgatctcggccgcgcatctcagccaggcgaccgccgatctcgtcttcctcggccggccgctggccccggtcgtcgccgccatcgacgcatcgcgcaaggccttgcacctgatgcggcagaacctctggctcgccatcggctacaacgttctggccgtgccggtcgcgatcagcggtgtcgtgacgcccctgatcgcggcagccgccatgagcggttcgtcgatcctggtcatgctgaactcgctgcgcgcccgcagcgcctcgcgggagatcgtgtga

SEQ ID NO: 5085 - DNA, 168 bp, BradyrhizobiumColbertium
atggagatcctggtcattctggtcccgctggcgctgatgctgggaggtgcgggtctcgtcgccttcctctggtcgctcaggagcggacagtacgacgatctcgacggtgccgcctggcgcgccatcgccgatgacgagccgccgcaggaagcaccggcgaaacgctag

SEQ ID NO: 5086 - DNA, 1203 bp, BradyrhizobiumColbertium
atgatcgatctttcggctcccatcaagccgggcgcgatgacgatggaggcgcatccccccggtttcgcgcttcgctcgatcgtgatcggcctcaccgccttcctgaccgtcgtcgatctcttcgcgacgcaggcgatccttccctcgttgacacggcattacggcgtcacccccgcagcgatgggctttgcggtgaatgccagcaccttcggcatggcccttgccggtctcgtcgtcggtatcttcagcccgcatatcgaccggcgaacgggcatcctgctcagcctggcatttcttgcgatccccaccagcctgctggcctccgcgcccaatctggccgtcttcaccgccctgcgcgtcgcgcagggcctgtgcatggcctccgccttcgcactcaccctcgctcacctcggcgagcagtgcagcgccatggacgccggcagcgcgtttgcggcgtacatcaccggcaatgtcgccagcaacctcgtcgggcggctgatctcggcggcgcttgccgatggcctcggcctcgcctggaacttctacgtcttcgccgggctcaatcttgccggcgcactgctggtctatttcaccatcaagcgcgtgccgccgatgcatgcgatgaggcctgcgggatctccgctggccgccatgatcgcgcattggcgcaatccgcggctgcgcgccgcctacggcatcggcttctgcattctgtttgctttcatcggcaccttcactttcgtcaatttcgttctggtgcggccgccactgtcgcttggcatgatggatctaggcctcgtctatttcgtcttcctgccatcgatcgtcacgacgcttctcgcgggcaaggtggccgcgcggctgggaacgcggcccacgatctggagcgcgctcgcagtcgccgggctcgggctgcccttgatgctggcgcagcatcttggcacggtgctcgccggaatggtcctggtcggcgtcggcacgttcttcgcccaggccgccgcgaccggctttatcggacaggcggcagccgacaaccgcggccttgccagcggcacctatcttgcgtgctatttctgcggcgggctcgtcggcacggccgtgctcggccggctgttcgatgctttcggctggcaggcctgcgtcgccggcgtgggcgtggcgctcgcgctggcggccgtgctcaccttcgccctgaaacgctag

SEQ ID NO: 5087 - DNA, 480 bp, BradyrhizobiumColbertium
atgtctaggcatctcacagcctcccgcgtggtgtggacaggcgttgccgttctcggggcgctgacgtttgcgacgccggttttcgccggcgagtgcccggccggcaagatcaagccgaacgcgcagcaaatggtcgaccacaaggccgtcggcgtcaccgacgttacgctcggcgcgatcgatctcggcaagcagcctgcccgtatcgagggccgcgagctgcgcttccgcaagctgaccatcgcgcccggcggcatcgtgccctggcacagccatgatgaccgcccggctttgatcttcgtgcaacaaggcgagatcgtcgaatacgcctccaactgcgtcgatccgatcgtgcacaaggccggcgacatccgccccgaagtctacggcacctcgcattggtggaagaacctcggcaaggagaccgtcattctctacgtcggcgacgtccgcaaggatcccaacgaccatcacatgtaa

SEQ ID NO: 5088 - DNA, 285 bp, BradyrhizobiumColbertium
atgacgcaattttccaagaccctgatcgcgaccgccgcctttgcggtcatcgcaacggcggccttttcgcaagccgcatgggacttcaagcccggcatggcctatgtctatggcggacccggcaagatgtccgcgatggccatggccccggccgagaagaaccacgaggccatgatgaagcacgcgaagaaggtgcccgacaacaccgtgttcttcatggacaatggtacgttgtactctgcctccgggcggctcgatcccaccggcaatttctacgtgaactga

SEQ ID NO: 5089 - DNA, 717 bp, BradyrhizobiumColbertium
atgacctctctctcgccagccgacgccgaacagctcaggctcgccttccagcgctgccgcgacatggacggcacgctgaacgaacagctccgcgcctatgccgacgccagccgcaaggtctttcccgcctatggcgaggcggtcgatcgcctggtgatgcgattgagcggaaatggcggcggcgagacggcgccgcgccggggcgaccccatgccgtcgttcatgctgcctgacgagggcgggcatctcgtttccttgccttcgctgctgaggagcggccctgtcgcggtgatgttcttccgcggtcattggtgcccctattgccggctcaatgttcgtgccgtggtccaggcgctcgatcgcatcaaggcatttggggcacaggttgtcgcgatcatgccggagacgcaggaatacacgcggcagctcaaggccgaatcccgcgcgccatttccgatgctgaccgatctcgataatggctatgcgctgtcgctcaacctcgcaatctggctcggcgtggagatccagcagttgctgtcctatcaggacatggcgaaattccacggcaacgacggttggctgctgccgatcccggccgtattcgtggtcgggcgcgacggcatcgtgaaagctcgcttcgtcgatcccgattttcgcaagcggatggagatcgacgatctgatcgaagcgctggagagcgccagccgggagaactga

SEQ ID NO: 5090 - DNA, 888 bp, BradyrhizobiumColbertium
atggaaatgcaccaggtccgctatttcctcgcggtggcgcagctcttgaacttcacgcgcgcggccgaggagtgcaacgtcacgcagccgtcgctgacgcgcgcgatcaagcagctcgaggccgagctcggcggcgatctattccgccgcgagcggccggcggcacaattgaccgagctcggccagcgcatgcatccgctcctgaagcagtgctatgacgccgccgccggcgcacgctcgctcgcctcctcgttcaagagcggagagatcggtgcgctccgcattgcgctgacccatgcgatcgacctcggcttgctcatcccgcatctcaacgagatcaaacggcagttcaaccgccttgaattccgcttcctgcgcggcaccagccgggaggtcggcgacttcctgaagaagggcgaagccgaactcggcatcgccgcggagatcgacgaggcctgggaccgcctcgacgtttggccgctgttcaccgagagcttcgagctggtcgtcggcaacggacaccggctggccggccgcagttcgatcgacctggacgacttgcgatcggagcagctgctgaaccggaccttctgcgaacacgcgcgccgcatctccgtgagcctgcgcgaacacggcatcgacatcgagcatggccccgaggtctcgaatgagcgcgatctgatcgagctggtcgaggccgacatgggcgtcgccatgatgccgcacacttcgccggtgccggatcggttgacacgggccgtggtcgcggggctggacgcccgccgcaccgtcaacctgtatggcgtcgccggccgtcaacgcaccgccgtgggcaatgccgtgatgcgcatgctgcgcggcgcagactggcggcaaatcgcagggtag

SEQ ID NO: 5091 - DNA, 825 bp, BradyrhizobiumColbertium
atgaacatgccgctggagccgcagacccagcagcccggacgcgcgctggccggaaaggtcgcgctggtcacggggtcgaccagcggtattggcctcggtatagcacgagcgctggcggccgccggcgctgacgtcgtgctgaacggccttggtatcgcgagcgagattggccgggcgcgcgagcagatcgccgccgagttcggcatcaaggcgagctactcgcccgccgacatgacgaagccgaaatcgatcgcggagatggtcgcggccatcatcgcccaatcaggccggctcgacattctcgtcaacaatgcgggcatccagcatgtcgccccgctcgatcagtttcccgtcgagaaatgggatcagatcctcgcgatcaacctgacctcggccttccacacgacacggctcgccctgccggcgatgcgccggagcggcttcggccggatcatcaacgtcgcctccgcgcacggcctggtcggctcgccgttcaagtcggcctatgtcgcggccaagcacggaatcgtcggtctgacgaaggtcacggcgctggagaccgcggaggagggcatcacctgcaacgcggtctgccccggctacgtttccacgccgctggtcgaatcgcagatcgaggcgcaagccaaggcgcacggcatctcccgcgatcaggtaatccgcgacgttttgctggcgcaacagccgaacaagcgttttgccacggtcgaggagctcggcgcgctgacagtgttcctgtcaacggatgcggcggcttcgatcaccggcattgcgcttccggtcgacggcggctggaccgcgcattga

SEQ ID NO: 5092 - DNA, 1149 bp, BradyrhizobiumColbertium
atggacgatatgcagaacgacatgcagagcaaggttacggacctgccgggacaggtcgtgctcgtgcttcagggcggcggcgcgctcggctcctatcaggccggggtctaccaggcactgcacgaggccggcatcgagccggactgggtcatcggcacgtcgatcggtgcgatcaatgcaagcctcattgccggcaacaggcccgagcaccggctcgcgcgattgagggagttctggaaacgaatggagcagcagccggtctgggactggcgagccgcgtttcccggcttcaacgagaagctcgcctattggtcgaccgtgacccacggcattcacggtttcttccggcccaatccactggcgcatgccggcgattcctatcctctcggcgccgatcacgccggctattattcgaccgctccgctggagaagacgctgagcgaactggtcgacttcgatcttgccaatcgctgcgcgccgcgcctgacggttggcgcggctcacgtcggcaccagcgaaatgcgctatttcgacagccgagacggcgagctcacggtgaagcatgtgatggcttcgggcgcgctgccaccggctttcccggccgtacgtatcgatggcgagctctattgggacggaggcatcttgtcgaatacgccgacggaggcggtgttcgacgacaatccgcggaggaattcgctgatcttctccgtgcatctgtggaatcctgtcgggcccgaaccgacgacgatggcggaggtgctgaatcggcacaaggacgtgcaatattccagccgcatcgcgagccagatcgtgcggcagcaacaggcgcatcggctgcgtcacgtcatcaaccagctcgcggcgcgactgcccgaaagcgagcgtagcgaccccgccgtgcgcgaactggcgagctacggctgcccgacccgcatgcatgtggtgcgcctgctggcaccacagctcgagcgcgagacccataccaaggatatcgatttcagtccgtccgggatcacgcggcggtggcatgccggctatgctcacacgaaatcggtgctggcgcgcaagccctggatcggcgaatttgatccgctcgccggcgtggtgctgcacgagcatatggacgagatgccgatggcggccgagtag

SEQ ID NO: 5093 - DNA, 951 bp, BradyrhizobiumColbertium
gtggtgtccgccagcgatctggaatccgctctcgatcgggtccgcgccaatgcggcgggaccggttgccggcgtgttcggacctgacacggtcacctggcggatcgaccgcgaggccgtgatctttctcggcgccggccgagcgctgctcatgcagctggcccatccctgggtggcagccgcaatcgccgagcattccaagacctttgccgatccgatcggccgttttcatcgcaccttcgacatcgtcttcgccatggtgttcggctcgcttgaccgggcactgttggcgtcgcggcaactgcaccggcgccacgacatgatcctcggcgagatgcccgagacggtcggcccgttcgcggcaggctcgcgctaccgtgccaatgacattccatcgctacgctgggttcacgccacgctggtcgagaccgcgttgatggcccacgatctcgttctccagccgctcccaggggaggagcgtgagcgctattgggccgagagccgcatgttcggcgcgctgttcggcctgacgggagacgacttgcccgcggactggtccgggttcgccgcttacaccggggcgatggtggaatccgacacgctgacagtcagcccggcggcacgcgagatcgcgacgcagatcttcatgggcgcgcgtccatggctgcggccatcgcgatggtatcgtgcgatcacggcaaggatgctgcccgagcggttgcgggccgggtttgggtttgagctcgatgcgcgcgagatccggtcagccgacaatgcgctgagatggatacggcgcgtctatccgaaattgcccgaccggctgcgctatgtcggtccctaccaggaagcgcaggcgcggctgcggggtgagatgcagccggactggatgacacggtgtctcaaccgggcctggatcggacggccacggatggatgtgcgcgggaaggggtga

SEQ ID NO: 5094 - DNA, 1389 bp, BradyrhizobiumColbertium
atggacgacttcgtccgcgtcggcggattgggcgccgtttccgccgcgcttccccgtgcacttcgctccttcgccgatatccggatcatgttgcccggctatcgcgacatcatcgagcaactcacgcatatccagatcgttggccgctgccctgcattcgcggagatgccggcctgctcgctcggccgggccgcgaccaaggacggaatgccggtctacgtgctgttgtgctcgcagctctacgaccggcccggcaacccctatggcgatgagtccgggcgcgactggcccgacaacgacatccgcttcgcgcgctttgcctcggccgccgctgagctggccatgggcacgctggacaagaattgggcagcagacttgattcatgccaatgactggccggcctcgctcgtgccggcgtatcttgcctggcgcggcgccaagctgccgtcgatcctgaccatccacaacctcgcctatcagggcctcttcccgaaggactcgctgcgtcggatcggcgcgccggagagctccttccacatcgacggcgtcgagttctacgaccaggtctccttcctcaaggcgggccttgtctacgcctcgcacctcaccacagtcagcggcacctacgcgcgggagatcaccaccgcggaattcggctgcggcctcgagggtctgctccgtctgcgctccgacgccgccgagctcaccggcatcctcaacggcatcgacgagagttgggacccgcgttcctgcgcccagctcgcgcagcagttcggcgccggcgattgggccgggaagagagccaacgcggattacgtgcgtaagcagtttggcttagcggtctcgcgcgggccgatgttcggcatcgtcgcgcgcctcgtgcaccagaagggcatcgacctcgtgctgtcggcggccgacgagatcgtcgatgccggcgggcagatcgtggtcaccggctccggcgagccggcgctcgagcaggctctgatcgacgcgcatcgccgccgtcccgacgcaatcggggtggcgatcgggttcaacgacgcccaggcgcgccgcatcttcgccggcagcgacttcacgctgatgccgtcgcgcttcgagccgtgcggcctcagccagatgtatgcccagcgcttcggctcgctgccgatcggccaccagaccggcggccttgccgagaccatcagcgacggcgagaccggattcctgttctcaaaaccctcgcgcgaatccttcctcgggggcgtgcgccgggccttctccgccttcatggcgcacgaccagctcgacgccatgcgccgcagcgccatgggacgatcgttctcctggagcatctcggccggcagctacagcgcgctctaccgcaagctggcatcggtgtga

SEQ ID NO: 5095 - DNA, 1197 bp, BradyrhizobiumColbertium
atgcagctagcagataagcatgagggaacgacgacaaaggccttcgcgggcctgcgcgtcctggatttttcgacgacgatcgccggcccccattgcacacgcatgctcgccgacatgggcgccgaggtcatcaagatcgagaccgagggcggggagacgatgcggacccggcctcccttgcgccagggatgcagcaccgtgttcggtcagctcaatgtcggcaagaagagcgtcgtgctcgacctcaagtccgaggacggcagggagacggtccgccggctggccgcgacggccgacattctggtggagaatttccgcccgggcgtgatgcaccggctgcggctcgactacgaccggctgcgcacggtcaacccgaggctgatctactgctcgatctccggctacggccagaccggcccctcggccgagctgccggcctacgcccccgtgatccatgcggcgtccggctacgacatggcgcatctggcctatcagccgggccgcaaccgtcccgattattgcggcatctatcacgccgacgtcgtcaccgggacctacggcttcggcgcgattgcttcggcgctctatcagcgcagcgtgaccggcctgggccagcatatcgacgtctccatgctggaatccatgctgagcttgacggtgatcgagctgcagagctcgcaattcgcggtgaagccgccgccgcgcccgatgttcggcccgaccgagacggcgagcggctatgtcatgatcacggtcgcaagcgagaagacgtttcagggattgatggccgtgatcggacgccccgaatggatctccgatccacgctttgccacctacgcggcgcgccgcgagaactgggctgacctgatggacggcgtcgagatctggtcgcgtcagctcaagaccgatgcgtgcctcgccgcgcttggcgctgccggcgtgccggcctcggcctaccgcaccgtggccgaggcgctggccgacccgcagcttgcgcaccggcaggcgctctccgaggtgcgggacgagggtggctccttccgcgtgctcaatctgccgttccggatgtccggcgcggacaccgcgcccggcaagatgatcgccgtgctcggcgagcacaccgacgcgctgcgcaacgagatcggcatcgccagcgacacgtcaattccgccaggcaaaacagccgcgacgaactga

SEQ ID NO: 5096 - DNA, 1650 bp, BradyrhizobiumColbertium
gtgcggcgctcggacttctgttcgttcctcttgcggtggcgggcatttgtcgtcaatctcgccctcaagtcgttcaacgatccgaaacatcggacgagcgatccgggaggaaccatgacgaacatcgctgccgcggcacgcaagcgcgcgccgcttctcctcgttgcggcctttgcgctggccgcgccggcgcaggcgcagaaaccgggcggcagcatcacggtcggccaggagctggagatcgcaggcttcgatccgctcaaggtcggcgtctacgacacctcgaccttcaccgcagccgccgcgatcttcgacacgctgacgacgctcaatgaaaagggagaagccgcgcccaagctcgcggtgtcctggacccactccgccgactacaagacctggaccttcaagctgcgccagggcgtgacattccacgacggcacgccgttcaacgcgcgggctttcaaggagaatttcgaccggcaaaaggatcccgccaacaagtgccgctgcgccttctacatcagcaacgtcaaggaggtgctggcgccggacgatgacaccatcgtctataatctcaccgacccttcagtgaacctgccggcggtgatcaccatccagagccagaacaacgtcgttcactcgcctacggcctggaagaccaagggcgacgactacaaccgcaatccggtgggcaccggtccctacatcctgaaatcctggaccgccggcgaccgcatggtgctggagaagaaccccaactattgggacaagggtcgcccctatctcgaccgcatcatcctgaaaccattgcccgacgcgcagtcgcgcttcgcttcgctgcaatcgggcgaagccgacatcatctgggacgacgagaacgacgccgacaacatcatgagggcgcagaaggacccgaagctcaccgtgcacacctacaagggctcgggcgctgcggtctatgccttcaataccaaggtcgcgcccttcgacgatgtccgcgtgcgccaggcgctggtgatggcgatcgaccgtcccaagatgtcgcaggcgatcagcaacggtctgagccggccggcgagcaatccctacggcgacggctcctgggtcaagtgcaaggacgacggcgcgctgccgttcgacgtcgagaaggccaaggcgctgatcaaggattacggcaagccggtcgagttcaagatgctggtgacggcgacgccgcgcggccgcatgatcggccaggtgctgcagcagttctggaagcgcgtcggcgccaatatggagatcgagcaggtcgatcaggccaccattccctcgcgcgccttcacccgccagttccagctgacgccgtggcgtatcgtcgatctcgccgatccagatccgcagatgtacgcgaacttccgcagcggcagcccgctggcgctcgccggatactcgaatcccgagctcgacaagcttctcgaccatgcacgcgtgaccgccgagctcggccagcgcaccgaggactattgcgcgatcagccgcctgatcaacaaggaggcgatctggttctggaccttccagaatacctattacgcattgtcgagcaccaggctgaagggctttccgaagatctacaacggcgtgatcgacgtctcgaccacctggctggaatga

SEQ ID NO: 5097 - DNA, 951 bp, BradyrhizobiumColbertium
atgctgaacttcgtcgttcggcggctccttgccatgctgccggttctgcttgccgtgtcgctcctgacgttcctgatcgcctcgctgctgccgggcgatctggcactcgtcatcctcggcgaccaggcgaccccggagaacgtcgcggcactgcgtcgcgacatggggctcgaccagccgctgtggtggcgctacctgagctggctcggtcaggtgatgcagggggatctcggccgttccttccgcaccgggcagacggtgctgcaggcggtcgccgagcgcatcccggtctcgctgcagctgatgttgatggccgagttcatcgggctcctgatcggcgtgccgctcgcgatcgtctgcgccgcgcgggccggcggcgcgttcgaccgcttcatgaccggcggcgccttcgccatgctgtcgatgccgtctttcctcactgcaatcctcctgatctatctgtttgcggtcgagctgcggtggctgccggcgaccggatatgtgccgttcaccgaggcgccgctcgccaacttgcgcttcttcgtgctgccggccctgacgctcgcgctcgcggaatggccgggcatcatgcgcgtgctgcgctccgacatgatcgcgaccttgcaggaggactatatcgcgctcgccaaggccaagggcctcaagcccgcgcgcatcctgttcgtgcatgcgctgaaaccctcgtcactgacgctggtgacggtgaccggcatcaacatcggccgcctgctcggcggcacactgatcgtggaatcgatcttcgcgctcccgggcatcggccggctgctggtcggtgcgatctacacccgcgatctcgtcatcctccagggcgtggtgctgctggtcgcctgcggcttcgtcatcgtgaatttcatcgtcgacatgctatacgccgtgctcgaccccaggatccgccatggccacgcttga

SEQ ID NO: 5098 - DNA, 870 bp, BradyrhizobiumColbertium
atggccacgcttgagctgtcagttcaggacgaggtggcatccgcgcccgttcgcggcaacaagttcggcttcctgttctgggtcgcgggcggctggcttgccatcatcctttcgctcgcaatacttgcaccggtgctgccgctgcagaacccggtcgacatggacatgctggagcgccgtgccaccttctcgagtgagcattggctcggcaccgacggactcggtcgcgacgagctcgcccggctgatcttcggtgcgcgcgtgtcgctgacggtcgggctgatcgcgccgatgatcggcctcgttatcggcggcgcgctcggcctcgttgccggctattttcgcggccggttcgagacggtggtggtcggcagcatggacgtgctgctggcctttccgccgctgatcttcgcgctcgccgtgacggcctatctcgggcaatccgttcccaatctcaccgtcatcctgggcgtgctcggcattcccgccttcatgcgggtggcgcgtgcggcgacgctgacgttggcgcggcgcgagttcgtgatcgcggccgaggcgttgggcgccagccatgcccgcatcctcctgcgcgagctgctgccgaacgtgatcctgccgctgctcgccttcttcctgctcggcgtcgccgtcaccatcgtggtcgagggcgcgctttcctttctcggcctcggcgtgccgccgccaatgccgagctggggcagcatgatcggggaaggacgcgagagcctcgacgttgcgccgcggcttgccttcctgccggcggcggcgctgttcctgaccgtgctggcgttcaacctcgtcggcgacaccttgcgggcgctgaccgacccgcgtcagggggcgctgtga

SEQ ID NO: 5099 - DNA, 993 bp, BradyrhizobiumColbertium
gtgagcgcgcctcttctgaccatcgagaacgtcgcggtcgacctgccgaccccgcgcggcaatctgcgcgccgtcgatcatgtcaatctctcgctggaaggcggccgcacgctcggcatcgtcggcgaatccggctgcggcaagaccatgctgtcgcgcgcagtgcttcagttgttgccgaagaaggcgaagctcgcgggacgcgtcattttcgacggccaggatctggtgcggctcgacgcagaacgcttgcgccggctccggggacgcgatctcgcggtcgtgttccaggatcccatgacctcgctcaatcccgtgctcacgatcgggacgcagctgatggagacgatccaggagcatctcgaactcgacgcgccggtcgcgaagaagcgcagcatcgagctgctggcagcggtcggcatccccgcgccggagcaacggctcgcgcaatatccgcaccaatgttccggcggcatgcgccagcgcatcgcgatcgcgatcgcattgtcctgcgagccgaagcttctgatcgcggacgagccgacgaccgccctcgacgtcacgatccaggctcaaatcctcgatctgctcgcgcgcgagcagcgccgccggcacatggcgatgatcatcatcacccacgatctcggcgtggtcgccggccgtgccgacgaggtcgccgtgatgtatgcgggcagggtggtggagcgcgcgccgacgtctgcgctcttcaagcgcatgcacatgccctacaccgaggcgctgctggcggcgatcccgaagctcgacactgcgccgcatacgccgctgccggccatctccggccgtccgcccgatccgacgcggccgctgaagggctgctcctttgcgccgcgctgccgctatgccgctggccgctgtcacgaggccaagccggaactgatggatgcggagacgcccgggcatcggtacgcctgtttccatccaatccggatggcggaggggatcggcgcatga

SEQ ID NO: 5100 - DNA, 972 bp, BradyrhizobiumColbertium
atgatgcagcttgccgtccgccccgagccgcttctggaggtcaacaatctcgtcgtcgaatatggtctcggcaacaagacggtgcacgccgtctccggagtcagtctccaggtcgcgcgcggcgagacgctgggactggtcggcgaatccggctgcggcaagtcgacgctgggacgcgcggtcttgcagctgcgccgcgccaaatccggccgcgtgctgttcgacggcgaggacctcacggccatggagggcgaggcgctgcggaaaatgcgccggcgcgtgcagctgatctttcaggatccgatcgcctcgctgaatccgcgccggcgcatcggcgacatcgtggcggagccgctgatcatcgccgggatcaaggatgccgccgaacgcaagcgtagggtccacgaggtgctctctgcggttgggctcgatcccgatctcgtggcgggacgtctgccgcatgaattttccggcgggcaatgccagcgcatctgcatcgcgcgctcgctggtgctcaatccggagttcatcgtctgcgacgagccggtgtcggcgctcgacgtctcaattcgcgcacagatcctcaatctgctggaggagatgaaggtgcgcttcggtctgacgctgctgttcattgcgcatgacctcgcagtcgtcaaagccgtcagcgaccgcgtcgcggtgatgtatctcggtcggctctgcgaggtcgggccctcggagcaattgttcgcaaggcccgcgcatccctacaccgggctgctgctgcaggcgattccggtgcccgatccggacgtgcgtcccgcagagagtgttgcgaccggggagccgccatcgccgattgcgccgccgtccggttgccgcttccgtacccgctgcccgcgggccgatcagcgatgcagcgcggagataccggagttgcgcgaggtcgttcccggccagttcgcggcttgccaccatccgctggcctga

SEQ ID NO: 5101 - DNA, 1068 bp, BradyrhizobiumColbertium
atgaagagtttcaaggtcgccgatttcaaagcgccgttgaaggagttcgacgaggccacgccgcagccgtcgggcacgcaggtgctgatcaaggtgaaagccgcgggcgtctgccatagcgatctccacatctgggagggcggctacgatctcggccacggccgcaagccgctgtcgctgaaggaccgcggcatcaacctgccgctgaccatgggccacgagacggtcggtgaaatccttgccttcagtcccgacgtgaagccgaccgaccagggcgatctcaagctcggcgatgtcggcctcgtctatccctggatcggttgcggcaaatgcgccacgtgccttgccggcgacgagaacatgtgcctgacgccgcgctcgctcggcgtctattgcgacggcggctatgccgaccacatgctggtgccgcatccgcgttatctgctcaatctgaaaggtctcgaccccgcgacgaccgcgccctatgcctgctcgggcgtcaccacgtatagcgcgctgaagaaggtcgagcagcacttcgacacgcccatcgtgatgttcggcgccggcggcctcggcctgatggcgctgtcgctgctcaaggcgatgggcggcaagggcgccatcatggtcgacatcgacgtgaagaagcgcgaagccgccgagaaggccggcgcgctggcgaccgtcgatcccaaggcgccggatgcgctcgagcagcttgccaagaaggcgggaggccccatccgcgccgtgatcgacctcgtcggcaacgccgcgacgacgcagctcggcttcgattgcctgaccaagggcggcaagctcgtcatcgtcggcctgttcggcggcggcgcgacctgggcgctgccgctgattccgatcaaggcgatcacgatccagggcagctatgtcggaaacttgcgtgagacgcaggaattgctcgacctcgtccggacgaagaaggtgccgccgatcccggtgacgacggccccgctcgccaaggcgaacgatgcgctcttgcaactgcagcagggtgcggtggtcgggcgcacggtgttgacgccgtaa

SEQ ID NO: 5102 - DNA, 1080 bp, BradyrhizobiumColbertium
atgtccgcaaacaacgccttccatatcgccgtgctcgccggcgacggcatcggccccgaagtcatggcgccggcgctcgaagtgttgcgcaaggtcgagcagaagtccggcctgagcttccgcttcaccgaggcgccggccggcgccaacaactatctggccactggcaagtcgatgcccgactcgaccatcaagctgtgcgaggaggcggatgcgatcctgctcggcgcctgtggcctgccctcggtgcgctaccccgacaacaccgagatcgcaccgcagatcgagctgcgcttcatcttcgatctctatgccggcgtgcgtccggcgcggctcattccgggcgtgccgagcccgatcgtcggcgccgaccagcgcggcatcgatctcgtcgtcattcgggaatcgaccgaaggcctgttcgcctcgatgggcaagggcgtcgtcacccacgaggacgcgcgcgagaccatggtgatcacgcgtcgcacctccgagcgcctgttcgaattctcgtttcgcctcgcggagcggcgcaaggcgcgcggcaggccgggcgcgctcacctgcgtcgacaaggcgaacgtgttcaaggcgtttgcgttcttccgcggcattttcgacgagatcgcgaagaagcatcccgaggtgaagaccgaccggctctatgtcgatgcctgctcggcgatgctggtgaagcggccctgggatttcgacgtgatggtgatggagaacatgttcggcgacatcgtctccgacatcacagcgagcctgatcggcggcctcggcatggcaccgtcggccgatatcggcgatgaatatgcggtgttccagccgtgccacggcaccgcgcctgacatcatggggcagggcaaggccaatcccaccggcatgatcctgtcggccgcgatgatgctggactggctcgccgacaagcacggcctcgagagcgctgcggaagccggcgagaccatcgagcgtgcggtggaccagatctatgccggcggcatcaagccgatggagttcggcggcagcaacggcacggcggatattacaaaggccgtgctcgcggcgctgtaa

SEQ ID NO: 5103 - DNA, 282 bp, BradyrhizobiumColbertium
atgacactgaaatttgctgttcttggtctggctgccgtcggcggtgtggcgctcgcctccggacaggcacttgcggcaatgccgaacggcattccgcaagcggacaagattgcaagcggtccgcccgccgaggtcgagcaagtgcgctgggtctgtaacccctggggccgctgctggtggcgcccgaactattaccgcgcctacggctactatggcggcccgcgcttctatggcccccgtccatggcgctggcgtcatcaccatcactggcgccgctggtga

SEQ ID NO: 5104 - DNA, 822 bp, BradyrhizobiumColbertium
atgcccgacatgttcagcacgaccggaatgccttacgccgacggcaggatcctccagcacgcggccggcggcgtcggcgtgatcaccttcaacaatccggacaagcgcaacgcgatgtcgctggagatgtgggagggatttggcatggcgctgaccgccttgcgcgacgacgacgacgtgcgggtcgtgatcctgcgcggcgccggcggcaaggcattcgtctctggcgccgacatcagccagttcgagaaggccaggcacaatgcagcggcatccgaggaatacgccaggcgcagcgccgcccagcgcgcgctgctcgccgactatcccaagccgacgatcgcctgcatcgacggttactgcctcggcggcggcatgcaggttgcgatgctcgccgacatccgcctcgcctcgcatgggagccagttcggcatacccgcagccaaactcggcatcgcctacggctatgacggcctgcggcatctggtgtcgctggtcggtccgtcctgggcgcggcttctgatgtacacgggaatgcgcatcgatgccgcagaggcgctccgcattggcttggtcgagcgcgtgttccctgtcgacgagctctggggcgagaccatgatgatcgcagagacggtctcgcagaacgctccgctcgcgatcaaggccgcaaagatcaccatcacgcaggtgcttgaggatgaaagccggcgcgacatggaggcggtcaaggcgatcggcaatgcctgcatggactcggaggatttccgcgagggccggcaggccttcatggaaaagcgcaagccgcaattccggggccgctga

SEQ ID NO: 5105 - DNA, 237 bp, BradyrhizobiumColbertium
gtgcggcgcaggcgccgccatggtcaacccgggcaagggcgggcagcttgcatccgcccgtgcttcggttgcatgcgcgaagctcgacgaaggtggcggctgaccgccaacaaaaaggagcggccaggccgccccgagacagaccccgcgcaggggcacgggcgcagacatatttcgtccggtctcgttcaatccagccgcgcccccttgacgcggtggattgaacgtcggccgtga

SEQ ID NO: 5106 - DNA, 393 bp, BradyrhizobiumColbertium
atgaaagcagcggcaaaaagaatgaagcagcgcagcgccgggaagccggacatcgagctcggcaagcggattcggctgcggcgcgtcgagatgaagatctcgcaggccgagctcggcgagaagctcggagtcagcttccaacaggtccagaaatacgaaaagggcgtcaatcgcgtcggcgcggcccgccttcagcagatcgcctccgccctcgacgtgcccgtgaccttcttctacgacggcgacaacaaggcgcgcgaagtcgagagcctgctcttcctggattcggccttcagcctccgcctgctgcgcgcctacagcaagatcaaggaccagacggtgcagcgtcagctcgtctcgctgatggaatcgatcgcggccaacgagagctga

SEQ ID NO: 5107 - DNA, 1050 bp, BradyrhizobiumColbertium
atgcactccttagcggaaaggggcgttcctccagcggaacgcccaaagacaaatctcagcggcctctcggattgggatgcggcccgcatatttcttgaagtcgtccgatgcggaagtttccggtcggcggccgaacgcttgtcgctgtcgatcaatgccgtgcgccggcgaatcgacggtttcgaacgccagaccggcacgaccctctttacccgcgacgttcacggcacccatcttaccgacgagggcgccctggtggtctccgccgtcgagcgcatggaggcggccaccttcgacgtgctgcgcgccagcgattcgatggccaacgccttgtcgggcgaggtccgggttgccgtcaccgaggggctcggcacgttctggctggcgccgcgcctcgtcgaattccagcaggcctatccgaagatcctggtggatctgcattgcgcgatgcgttcggccgacgtctcgcgccacgaggccgacgtcgcgatccacctgtcgcgcccttcggcgctcgacatcaagctggtgcggctcggccgcatgcatctgatgttctgggcctctgagaaatacatcgcaaagcatggcgcgccgcggtcggcggcggaattgatcaagcatcgcctggtgctgcaattcgccgacgaactcgccgccaaggaaaccttcgagagcttcttcccgggcgttccggaacgtgaccttctggtcatgaagaccaacgtctcaagcgccaattattgggcggtcgcgaatggcgccggcatcggcgtattcccgagctacgccatcgcgcttggcgggaagttaattccactggaggtcgagctgaaccgaccgctggatatctggctgtcctaccaccccggtagcggccgtattccgcgcgtgcggcacatgattgactggctgatcgacgctttcaatccggctcgcttcccgtggtttaaggaagaattcgtgcacccgcatgaattcaaggactcgtacatgggcgaacccctgacccagctcttcgggggattttcaaccgaagaacaaaggtga

SEQ ID NO: 5108 - DNA, 171 bp, BradyrhizobiumColbertium
atgttgtccatcgtcatcctcgacgtgcggatgaaactgaaaggaatcgacggtgccgatctcaaggcgctgtgcgacgagatgctgcggagcgctgcgagcgagccgccgaccccttccaagcagacgcaggaccagccccggcgtccgctgctccgcgtggtgaaatag

SEQ ID NO: 5109 - DNA, 732 bp, BradyrhizobiumColbertium
atgcaaaatgtttcgatcccggcggcgctgattgccggcctcgtcagcttcctctcaccctgcgtcctgcctctggtgccgccctatctggtgtatctcacgggcgccacgatcgagcacgtcgagagcgacgagccagcagaggcctccaagcgcgcaatcctgctgtcggcgctgctgttcgtgctcggcttctccacggtgttcgtggcgctcggcgccagcgcctcgttggtcggcgggctgatccgtgcatggtcggcggagctgtcgatcctcgccggcatcgtcatcatcatcatgggactgcattttctcggcctgacgcgcatcggccttttgatgcgcgagggacggctgccgatccccaggccggtcggcctctggggcgcctatatcatgggcctcgccttcgccttcggctggacgccttgcatcggcccgatcctcgccgcgatcctctcgatcgcggcggcggaagccacggtggcgaagggcgctggcctgctggcggtctattccgcgggcctgggcattcccttcctgatcgccgccctgatgatcgagcagttctccgcgctgttcgcgcgcatgaaaggccacctcgtcaatatcgagcgcgccatgggcgtcttgatggtgatcaccggcatcggctttctcaccggcgcggtctcgaatgtgagcatctggctgctggagacgtttccggcgctgcagacgatcgggtag

SEQ ID NO: 5110 - DNA, 1044 bp, BradyrhizobiumColbertium
gtgttgcttggactagcgcttctcgccggcctcgtgccggcaagcgcccagacgctgacgaagctcaaggccggcatggtgaccggcatcgatcagatcggcctgccgatcgcactcgagcgcggcttcttcgagaagtacgggctcgatgtcacgatcgcgcgcccctacgccaccggcgtcgacgcgctgaacgcgttgcaggcgggtgagagcgagatcgtgcaggtcggcgtgcccatgatcggcgccgtgctgcgcggcatggacctcgtcgcgctcggcaattacagcggcaatgccaccaaggccggctccgacgcgaccatggcgatcgtcgcgcgcgaaggttcgggcatcgtcaagggcgacctgtcgaccttgaagggaaagaagatcgcggcctccttcggcacgatcaaccatctctacatcctggcgacgctcgagaaggccggtctgaagccagatgacgtgacattggtcaacaccccgccgccggacatgaccgtggccctgctcgccaagggcatcgatgcgttctcgggctgggatccgtggccgatcgtcgcgggcaaggacgtgccgggcgcggtcgagatcatccggggcggcgacgtgatttcctacatcggcttcaacgtcgcgctccgcccctgggtgcaggccaatggcgagaccatcgagaaattcctcgccgccgtctccgaggccgaccaatggatgcgcaagaacccgaaactggcggcgcaggtcgccacacgctggattcccggactcaagcaggaggtcgccgagactgcgatgcagttcaacatccagcaggcggaccgtcggctgtcggcgaacaactaccgcgcactgtggagcgctgaggaccgcctctctcggctgggcatcctcaaatcgaccttcgacgtcaacgcgcatatcgagccgaagcacattctcaaggtcatgaaggaccgcccggagctgttcgccgatctgccgccgatcccggaggcggcggcgatcacgccgggctacgtgttcaagccctga

SEQ ID NO: 5111 - DNA, 333 bp, BradyrhizobiumColbertium
atgagcatcgcctccgaagccttgcgatcacccaagctgcgcatcgcgctcggcgcgatcgcggcttgggcgctgtttcagctctggctgaccatcgcggcgccggcaaagatctcgcccgagctcaagggcacatcggagaaggtgaacgtgcagatcgagctgccgttcacgccggagcgcttccacgtgctcgcgttccagcaatacggacgcgtctcgggtacggacgagcattcgatcgaactgcgtggtgtcaaaagaacggacctcaacgccgtggcccggccctattgggtgacggcagtggggccgataaaagagggaggctga

SEQ ID NO: 5112 - DNA, 759 bp, BradyrhizobiumColbertium
atgaagacgctttcgctgcgcaatctcggcaagacctatttcgacccctatgcgggcgcgcatgtcactgccgtccacgatgtctcgctcgacgtcgagccgggcgaattcatttcggtggtcggtccctccggctgcggcaagacgacgatcctgaacatgatcgccggcttcatcccctactcgaagggcgacatcctgctcgacggcaagccggtgcacgggcccggccctgagcgcggcgtggtattccagtcgttcgcgctgtttccctggaagacggtgctcgacaatgtcggcttcggcccgaagatgcgcggcgtgccgaaggccgagcgcgaccgcattgcgcgcgaatatctcgcgcttgccggactctcgcacgcggcgcaccgctatcccaatgagctctccggcggcatgcagcaacgcgtcggcgtggtgcgcgcactcgcaaacaatcccgacgtcctgctgatggacgagccgttcgccagcgtcgatgcgcagacgcgcatgaccctccaggaggaactgacccgcatctggcaggagcgcaagccgacggtgatcttcatcacccatgacgtgccggaagcggtgtttctcgctaaccgcgtggtcgtgctgtcgaagggacgcgtgctcgaccagatcgcggtcgacctgccgcgcccgcgggtgtgggacgagctcgtcaaggacgaccagttcaagcagctctcggcgcgcgtgctgcagatggtgcgcgcggcatga

SEQ ID NO: 5113 - DNA, 807 bp, BradyrhizobiumColbertium
atgaatctgatgctgcaaatctgggccggctatgcccgcctgacccggcgctggccgggattcgccgcgatcattccattcatcccggtgcttgcgctgtggaccgcggtgagcgaggccggcttgtttccgcgcgcgttcttcccgggaccggccgatgtcttgcgcgcgttcgtcacgctcacctacaaggggatcctgcccgactacctccaggacagcctgatccgtctcgcgaccggcgccgcagtctgcatggcgctcggtattcccctggggattctgatcggcaccagccgctgggcacatcggatctgctggccggtgctgctgttcttccaggcgatcggcgacatcgcctggctgccgatcctgttgatctggttcggcttcgggctgacgacgatgaccttcgtcatcgtctacacggtgctgttcccggtcgtgctcaacaccgtgctcggcgtcggctccgtgccgcgtgacctctcgcgcgccgccttgagcctcggggcctcgcgggcacgcgtgctatgggaggtgacgctgccggccgcgctgcccaatatcatcacgggcctgcgcaacgggctcggttacggctggcgcgcgctgatcgcagtcgagatgatcgtcggcacctccggcatcggattcatgatgttcgacgcccgccgcgccggctcgaccgtcgagatcatcctcggcatgatcattctcggattgctctggtacatcgtggatgcctggatcctcgccccgctcgagcgtgcgaccggccagcgttggggattggtgacatcatga

SEQ ID NO: 5114 - DNA, 822 bp, BradyrhizobiumColbertium
atgcaggtgacgggcagtgtgaaaggtcgatcgtcgcggctgatccgcagcgtcagttcgctggcaggagccgcgatgttcgtcgcgccgctgatcgcgctcgtggcgatctgggccatcgtcgtcccgctgttcaacgtcaatccgcgcgtatttccctcggtgggagcggtcggcaccgccgcgctggattccatccgcgacggcacgttgttcgcccatgtcgccgccagcctcttgcgcgtcggcctcggcacattgatcggcatcgccaccgccgtgccgctcggcatcgccatgggcgtcagcccgacggtggcggcctttctgacgccgctgttccgcttcttttcggtgctcgccggcatcgcctggatccccatcgcgacgctgtggttcggctacggttttggcgcgatcgtcttcgtgatcttcaatgccgtcttcttcgtcgtcgcctacaacactctgctcggcgtcaggaccatcccgcactcgctgcgcaatgctgccgcctcgctcggcgccggtcgctggacgctcctgaccgaagtgctggtgccgggcgcgctccccaacatcgtcaccggcattcggacgggcctgggcttcgcctggcgcggcctgatcgccgccgagatgatcgcgaccaatgtcgggctcggctacatgctgttcgtcgcccgcgacttctaccgcaccgaggtgatcgtgttcggcatgatcgtgatcggcgtgctctggcttctgatcgaccgtctgctgctggtcccgctggaacgcgcgaccatcgagcgctggggcatggtgaggcgcgcatga

SEQ ID NO: 5115 - DNA, 822 bp, BradyrhizobiumColbertium
gtggcaagagcgcgcccgagccccgtcgacaagctgatcaagcccggccgcattcgcgccgtgctgacgacgctcggccgcgagatcgcccaggatctcattcccgtcgggacgaccctgccgccagaacctgaactcgagacccgtttcggcgtcggacgcggcgtggtgcgcgaggcaatcaagacgcttgccgcaaaaggcctcgtcagcgttcggccgcgccacggcacgcaggtgctgccgcgtcacgaatggagcctgctcgaccgcgacgttctgagctggctcgtcggccaggacgagccggatcgcgatcttctgctggcgatccaggaggtgcgctcgatcatcgagcccgccgccgcagctcttgccgccgaacgcgcgaccaagaacgaccgttggcggatcgacacggccctggccgcgatgcagactgcaaaggaccaggccagcgccctcgcagcggacaaggctttccatcttgccatcctggacgcgacccacaatcccgtcctccagggcttccgcggcgcgatcgacaccatcctgagcaccgtcttcaccgtcgccgtcgtgagccccggcggctggttcagggacaatctgccgaaccacgtcgcggcggcgcgggccatcgaaagcggcaaccccgagaaggcgcgcgccgcgatggagcgcctgctcggctacacccgattgaagctgtcgaaccggaagacggtcatcgccgcggcgagccgcagagcgggcggaccgaaccagcgcgtcaccaggacgtcgggcgtcaaacgtaagagaaaagcccatggagcgtga

SEQ ID NO: 5116 - DNA, 1473 bp, BradyrhizobiumColbertium
ttggtcgcgggaacgatgttgccgctgatcgtgtttgccgtcggccttgcctactccaactatcgccaggatcgcagcgaggcgacccggcgggtgctggagaccgtacgaagcatgcgccttgtgctcgactccgaggtgcagcgcatgacgggcggcttgcaggtgctcgcgctcagcaattctttgcagagcggcgattttgccgcctttcggcgcctggctgccgagttcacggggcaatatggcgacgacagcgtgctgctggtggccgacagatccggcgaccagctcttctcgtccgtgactccgggagctgcgaacttgccagcgcgcaacaaccgagagatcgtcgagcgggtgtttgcacgcaaggcgccgcaatattccgatctgttcgtcggctctaccaagaaacagccgatcgtgacagtagaggttcccgtgctgcgcaatggcgaggtcgcctatgcattgtccttcagtccgccgatcgcgctgttccaaagactggtcgagcagcagcgtccaaacgatcaatggacggtatcgctgctggacaccaaggctcgcgtgtttgcgcggacgcccaatccagtcgacacgttcggcaagcaggcctccggcgcgctctacgatgcgatgtcccgcacgccggaggctgcgctttcgacaatatcgctcgacggcgtccctctgtcgtccgctttcaccaaatcacagctgaccggctggacggtggtggccggcatcgccgagagctcgttgatcgccccgctctggcgcaacgtcgcgatcacgagcctgatcggcggcatcctgctgctggtcggcctcacctttgcagtccggatggcagcaacgatcgcgcgcggcgagatgctgcacaatctcctgatcgaggagctcaatcatcgcgtcaagaacacgctggccctgatgcaggcaatcgcggtgcagacctttcgcagcgccagccgtgacgagcggatcaagttcgagggccggctcggcgcgctggccgaagcgcataacctgctgagtcaggagaaatgggcgggctccgagcttcgggacgtgatcgcccgtgcgctccagccgttcctgctaagcaatcccgaccgcatccgcatggctggaccgcctgtcccgctgtcgccgcggctcgccgtggtgctgtcgatgatcgtgcacgagatcgccaccaatgccgcgaaatacggcgcgctgtccaacgagacgggccgggtgacgctgaactgggagatcatcgctgatgcgccgaagccgcggctgcggctgatctggaccgagagcggcgggccgccagtgacggcgccggtgcagcgcggcttcggctcgcgcctgatcgagcgcagcgcgcgcgatcagctcggcggcgaggcaaccgtcgacttcctgccgcggggcgtggtctgcacggtgatctgcacgctggacgaggcgccctga

SEQ ID NO: 5117 - DNA, 999 bp, BradyrhizobiumColbertium
atgaagcgaaggtcatttctcgctggtatcggtgcgaccagtgcggcggcgacgatcggcatgccgtcgatcctcagggcacaaggcgcgatcacgctgaacggcgcagtccagttcaacgacgaccacgccttcaaccgggcgctgatccggttcgaggagctggtgaagaaatactacggcaagcccgtcaacttcacgctgcacaagaactcctcgctcggcctcgaaaagcagtatttcgagtacatgtcgcagggcaaggcggtcgattacggcatcgtctcgccggcacacatgtcgaccttcgcgaaggcggccccgttcatcgatgcgccgttcgtgttcaagggcatcgagcacatgaacaaggtcgttgaagccaacattctggcgccgatcgccgacgaggttgccgccaaggccgaggtcgttctgatcggttatgctgggggcggcatccgcaacatcttcgccaacaagccgctcaagaacctcgcagatctcaaggggctcaaggtccgcgtgcagggcgcgccgatctggtcgaagacgttcgcggccgtcggcatgagcccgactgtgatcgcctataacgagatctacaacgcgatccagaacggtgtgatatcggccggcgagaacgaggcggccggcgtcgaggccatgaagttctacgaagtggcgccgcacctcaacctgacccagcacgcggtatcgatccggccgatctgcttctcggtgaagacactgaaggccttgccgaaggatctgcaggacgcgatcatgaaggccggcaaggaggccggcgactacggtcgtcagcttgagtcgagcgaagaggtcgtcaagctcgacgcgctcgagaaggccggcaagctcaagcgcgttcccttcgaggagcgggacgccatgaagaagctcgccgatcccgtgatggcaacctacgcgaaggagatcggcgcggaaggcattttcgagaagatcaacgtcgtctga

SEQ ID NO: 5118 - DNA, 516 bp, BradyrhizobiumColbertium
atgtccgaaatgcacgtcccgtccacaccgtcgctgtggcgtcgcctcacggcggcctatgcgaaattgttggaattcctgctggccgtctgcgtcggtgtccttgttgtcccggtcacgttgcaaatcatctcgcgctacacgccgttcattccgtcctacatctggacggaggaaatggcgcgcttcctgttcatctggacgatcatgatcggcgccatggtgggtatccgggaggcgcagcacttcgaggtcgacgtgtggcccgacctgtcgcggcgatcggaggccgcggtgcggatcattgcgcgcgtcggcgtgctggcgctggccctggtgtttgtgtgggccgggatcgaattcacgcgctttgcctggaacaggacgtcggagctcgccgatctgccgctctggctgatccaccttgcctggccggtggccggcgtgacgtggatcgtgtttgcgggcgaacagatggtcgatgaactgcgcgttctgtttggggctgggcgatga

SEQ ID NO: 5119 - DNA, 1320 bp, BradyrhizobiumColbertium
atgaacgggaccgtgctctctgccggccaggctgcgatggtgctgttcggcgtcttcgtcggcttgctcatcgtgcgcgtgccggtcgcttttgcgcttggccttgcctgcgtgccgatcctgctgatcgagccgcgcctgtcgctgatgatgctcgcgcaggagaccttcaatgcgtacaattccttcatcctgctcgcggtgccgttcttcctgctgacggcgaacctgatgagcatcggcggcatcaccgaccggctggtggcgctgtcgcgctcgatggtcgggcattggcccggatcgctggcacagatcaacgtcgttttgtcggtgttctttgcaggtatttcgggttcctccacggccgatgccgcgagccagtccaagatcttcatcgatgcgcagaccaaggagggctacgatctctccttctccatcgccatcacggcggcgtccgcggttctggcggtcgtcattccgccttccatcctgatgatcgtgtggggcgggctgatctcgacctcgattgcagcgatgtacctggcgggtatcgtgccgggcctgctgatcgcgggcgcgcagatggcgactgtgcacgtctatgctgtgcgtcgcggctacccgacctatccgaagtcaggctgggtcgagatgcgatgcgccatctggcggtcgataccggcgttgatgacgccgttcatcatcgttggcggcattctgctcggctggttcaccgcgaccgagtccgcctgtgtcgcagtgctctattccgtcgtgctctcggcgttcttctaccgcgagacaggcatacgcgaactgtacagggccttgctcgacaccgggcgccttgccggcgtggcgctattctgtgtcggcaccgcgagcgcgttcggctggctgctcgcctactacaggattccgcaggagctgctggccaacgtctcgacatggggaatgggcgccgttgcggccggcttcttcatcgccttttgctttctggtggttggctgtttcctggacgcaatcccggccatcatcatcgtcgggaccgtgctggagcctctggccaagtccgtcgatctccatccggtccagttcgcgatcatttccatcatatcgctggcgttcgggctggtgacgccgccctacggcttgtgcctgatgatcgcctgttcgatcgccggcgtgcggctgcgctacgccctgaaggacacggtgatcatgctgatcccgatgctgctcgtgctggcggccgtcatcgtctggccgagcgtgtcgctgttcctgccgcgtctgatcgtgccggagatgctcaaatga

SEQ ID NO: 5120 - DNA, 1275 bp, BradyrhizobiumColbertium
atgctcgctcccacccctgcctcgcccgaatccgtcggcatgtccaaggccgccctcgaccgcgtcgatgcgcatctgaagagccggtacatcgatgccggccgcttcccgggcacgcagctcctggtctaccgccgcggaaaggtcgctcacagctcggtgcagggctttgccgacgtcgagcgcaaggtgccggtgaaggacgacacgatctaccgcatctattccatgaccaagccgctcaccagcgtcgccttcatgatgctggtggaagaaggtctcgtcgcgatcgacgagcccgtcgccaaatacattccggaatggaaggatctcggcgtgttcgtcgccggcacctacccggccttcctgacccggccgccctcccggccgatgctgatcgtcgacctgctgcgccacacctccggcctcacctacggcttccagcagcgctccaatgtcgatgccgcctatcgcaccgaaaagatcggcgaggtcgagaaatcaggcacgctgcagaccatgatcgagagcctggccaagatcccgctggagttctcgccgggcgaggcctggaactactcggtctcgaccgacgtgctcggctacctcgtcggcaagatctcggggatgccgttcgagcagttcctcaaacaacgcatcctcgatccgctcggcatgaccgacaccgatttccacgttccggcctccaaggcgcatcgcttcgccgcctgctactcggcggaccccggcggcggcatgaccttccatgccggccagcggcgagagggcctgacgctgcaggacgatccgaccacgagctcgttcctgtccccgccctccttcatctcgggcggcggcggcctgtgctcgacagtcgccgactaccttactttctgccgctcgctgctcaacggcggcgaactcggcggcgtcaggctgatcgggccgaagacgctggcgctgatgacgagcaaccacatcccaggcggacgctccctacccgaggtctcgcgctcgctgttctcggaagcggcgtataacggtatcggcttcggcctcggctttgccgtgaccatgcgcccggccgagacgctgattgccggcagccccggcgagtacaattggggcggcgcggctacgacctcgttctggatcgacccggccgaggagctgatcacgatcttcatgacgcaggtgctgccgtcgagcgcctatccgatccgtcgcgagctgcgcagcatggtctacgcggccatcaccgaaagcaatctgtag

SEQ ID NO: 5121 - DNA, 918 bp, BradyrhizobiumColbertium
atgactcagttcaacgagaccgagctcacggaagccgtcgtcaggagcttcgaccagacgcctgataggcgggcaaaattcctgctgcaggaattggtgaagtcgctgcacgattacgtgagcaagaccggcctcaccttcgaagaatgggaatacgcgatcgatttcctgacccgcaccgggcaaaaatgcacggacacccgccaggagttcatcctgctgtccgacgtgctcggcgtctccatgctggtcgacgccgtcaatcaccgcgatcgcgacggcgccaccgagacgaccgtgctcggcccgttctatgtcggcgagcacaaggtgaccgcccatggcaccgatatctcgccgaacaatcagaccggcgagaagatgttcgtgcagagccgcgtcaccgacctcgagggcaagccgctcgcgggcgttcccgtcgacgtctggcacgccgacgatgatggcttctatgattcccagaagcccaactatgacgaggtcggcgcgtccgcacgggcgcgcttcattacggacgatgacggccgcttcttcttccgcacgatactgccgtgcagctatccgatcccgaccgatggtcccgtcggcgagatgatcgtgcagaccaagcgccacccgatgcgtccggcgcatgtgcacttcctcgtcaacgccaagggccatgaaccgctgatcacgcacgtcttcatcggtggcgacaaatatctggattccgacgtcgtgttcggagtcaagaacgatctcatcgccaacgtcgagccgcgcaacgatcccgaaatgcccgatggcaccaaggcgaacgggcaatggcacctgatgacctacgaatttcacctcaagccgggcggcggcatggcgccgaagccgctgggaaccaaggcgatcgagccggcgtga

SEQ ID NO: 5122 - DNA, 1746 bp, BradyrhizobiumColbertium
ttgccggtgatgacgatgacccgcggactcctgatttcagtcggccagcactccgacaagggtcgcaagcccgtcaaccaggactttcacggcgtcctcattccggaggagccgctgctcagcctgaagggcatcgcggccgtcctcgctgacggcatctcctccagcacggtgagccagatcgccagcgagtcggcggtcaagagcttcctgatggactattactgcacgtcagagtcatggacggtgaagacctccgcccgccgcgtgctcgacgcgaccaattcctggctgcacgcgcagacgcgcaagagccaatacgcctatgaccgcgacaagggctatgtctgcaccctcagcgccatcgtcatcaaggcgaccaccgcacacatcttccatgtcggcgactgccgcatctaccgcgtcgccggcaaggcgctggagcagctgaccgacgatcaccgcatcatcgtgtcgtcggagcagacctatctcggccgcgcgctcggcatcaatccgcagctcgagatcgactatcagaccgtcgaggtccaggccggcgacaccttcctgctggcaacggacggcgcgtatgagttcgtcgatgcccgcttcgtcacgagcgcgatcaacgaacatgcaggcgatctcggcgccgcggccaggaccatcgtcgaggaagcctaccggcgcggcagcgacgacaacatcacggtgcaggtcctgcgcgtcgatgcggtaccccagcgtgagccggcggatattctcagccagaactcgcagcttccgctgcctccgctgccggagccgcgggcgatcttcgatggctacaggatcgtcagggaaatccacggcagcagccgcagccacatctatctcgccgtcgatgtggagaccgacgagccggtcgcgctcaagctgccgtcgatcgacctgcgcgacaacgccctctatctcaaacgcttcttgatggaggaatggatcgcgcgccggatcgacagtcccaacgtattgaagccgctgtcgcgatcgaagcgtcgcagctacctgtacgtcgcgaccgaattcgtcgaggggcagaccctgaagcaatggatgaccgacaatccgcgccccgatctcgaaaccgtccgccgcctcatcgagcagatcgcggcgggcctgcgcgccttccaccgcatggagatgctgcaccaggacctcaggcccgacaacatcctgatcgacaagaccggcaccgccaagatcatcgacttcggttcggtcagggttgccggcgtcgcggaggccgcgccttgcgaggaagccgacgaaatcctgggaacggttcagtataccgcgccggagtattttctgggacagggcggctcaccgcgctccgacatgttttcgctggccgtgatctgctaccagatgctgacgggaaagctgccttatggcacacaggttgccaggatccggcgcaaggcggacgtgcgcaggctccagtatcgcccggcggacgacgaccgcaatgtgccggcttgggtcgatggcgcgctcaaacgcgcgctccatcccgatccctacaagcggcacgaggacctgtccgaattcgtccacgagcttcgcacgcccaatccagcctatctcgacacgcggatcacgcccctgttggagcgcaacccgttgatgttctggaaggtgacgtcggcggcgctcgcctgcgcggtcatcgtgctgctggcgctgctgcactcaggctag

SEQ ID NO: 5123 - DNA, 840 bp, BradyrhizobiumColbertium
atgtcgtatctcgcgccttcggaattcgtcaccaagatggtggatgcgggcgagtccaagatcttcatgtccacccgggataccatcatccgcgcctacatggccggcgccatcctcgcgctggcggcgtggttcgccgtcacgatcaccgtcaataccggccagccgctgatcggcgcgctgctttttccggtcggcttcgtcatgctctacctgctgggtttcgatctgctcacgggcgtgttcgtgctctcgccgctcgcgctgatcgacaagcgcccgggcgtcaccttcggcggcgtgctgcgcaattggggcctcgtcttcgtcggcaacttcgccggcgccttcaccgtggccttcatgatggccttcgtcacgacgttcggcttcacgcaggcacccgacaaggtcggtgcggccatcggcaatatcggcgagggccggaccctcggctatgccgcgcacggcgtggcaggcatggcaacgctgttcatgcgcggcatgctctgcaactggatggtctcgacgggcgtggtcggcgccatgatctcgacctccgtgcccggcaaggtcatcgcgatgtggatgccgatcctggtgttcttctacatggtgttcgagcattccgtcgtgaacatgttcttgttcccgtcgggcctgttgctcggcgcgaagttctcgatcatggactatctgatctggaacgagatcccgaccgtgctcggcaacctcgtcggcggcctcgccttcaccggcatgacgctctacgcgacgcatgtcatgaccctgccgaagcgccaggccggcaaggccactcggccgcgcgtcgcggcctga

SEQ ID NO: 5124 - DNA, 1320 bp, BradyrhizobiumColbertium
atgaccaagcgcacccgccggccctcggaaaccactggcctcagccgccgtcaattgttgaaggccaccggctcgaccgccgcacttctcgctgctgcaaagctgagcttccctgccggcgctttcgcgcaggacgcaggccctgaggtcaagggcgccaagctcggcttcatcgcgctcacggacgccacgccgctgttcgtcgccaaggaaaagggcttcttcgccaagtatggaatgcccgatgtcgaggtgcagaagcaggcctcctggggcaccacgcgcgacaacctcgtgctgggctcggaaggcaatggcatcgacggcgcgcacatcctcaccccgatgccgtatctgatctcggccggcaaggtgacgcagaaaaaccagccgacgccgatgtacattctggcgcgcctcaacctgaacggtcagtgcatttcggtcgccaaggaatacgccgatctcaagatcggtgtggataccgcgcccttcaggccggcactcgagaagaagaagtcgtcaggcaaggcggtgaaggcggcgatgacctttcctggcggcacacatgacctttggattcgctattggctcgccgctggcggcattgatccggacaaggatatcgaaaccatcgtggttccgccggcacagatggtggccaatatgaaggttggcaccatggactgcttctgcgtttgcgagccctggaatctgcagctgatccatcagaacatcggctacaccgcgatcaccaccggtgagctctgggacaagcatcccgaaaagtcgttcggcatgcgcgcggcctgggtcgacaaatacccgaaggcagcgaaggcgctgctgatggcggtgatggaggcccagcaatgggccgagaagatggaaaaccgcgaggaagccgcggtgatctgcgccaagcgccagtggatcaattgcccggtcgatgacatcaccgaccgcatgaagggcaagttcgactacggcacaggccgcgtcgtcgacaattcgccgcagcagatgcgcttctggaaggaccatgcctcctatccgttccagagccatgatctctggttcatgacggaggacatccgctggggcaagtacgacgccggcttcgatagcaaggcgctgattgccaaggtcaaccgcgaggacctctggaaggacgcggccaagaccctcggcgtcgcggctgccgacattccgacctccacctcgcgcggaaaggagaccttcttcgatggcaaggtgttcgatccggagaatcccgccgcctatctgaagtccctcgcgatcaagcgcgtcgaagtctga

SEQ ID NO: 5125 - DNA, 897 bp, BradyrhizobiumColbertium
atgaacatgactgccacgaagatcgaggtcgagaccgcgacgcccgccgcaaccgcagcgccggtcgtcgcgttgatgcccaagcgtcccccgcgcactgaagcctacgcgcgcatggtacgggagacggccgtgcgggtgatccccccgcttgtcgtcatcgcgcttctgacgctgatatgggagctggtctgccgccgcgcgggctcggcgctgccgccgccgtcgaaggtgttcaaggataccaaggaactgatcctcgacccgttcttcgacaatggaggcatcgacaagggtctgttctggcatctctccgccagcctccagcgcgtcgccttcggctattcgctctcggcgatcgccggcatcgcgctcggcgtgctggtgggacagtcggtctgggcgatgcgcgggctcgatccgctgttccaggtgctgcgcacgattccgccgttggcctggctgccgctctcgctcgcggcgttccgcgacggccaaccctccgcgatcttcgtcatcttcatcacctcgatctggccgatcatcatcaacaccgcggtcggcatccgcaacatcccgcaggactatcgcaacgtcgccgcggtcgtgcagctcaatccgctcgagttcttcgcaaagatcatgattccggcggcggcgccctacatcttcaccggccttcgcatcggtatcggcctgtcctggctcgcgatcgtcgcagcggaaatgctgatcggcggcgtcggcatcggcttcttcatatgggacgcctggaattcctcgcatatcagcgagatcatcctggcgctgttctatgtcggcatcatcggcttcgtgctggaccgcctgatcgcgggcctcggcaaggtcgtcacccgcggcaccgcgcagaactga

SEQ ID NO: 5126 - DNA, 795 bp, BradyrhizobiumColbertium
atgaccgcctatctgaagctcgaccatatcgacaaggtcttcacccgcggtgccgccaccacggaggtgctgaaggacatcaacctcaccatcgaggaaggcgaatacgtctcgatcatcggtcattccggctgcggcaagtcgaccctgctcaacatcatagcagggctgacccgcgccaccaccggaggcgtgctgctggagaatcgcgaggtgaactcaccggggcccgatcgcgccgtggtgttccagaaccacagcctgctgccctggctgaccgtctacgagaatgtgaagctcggcgtcgacaaggtcttcgccaagaccaagtcccgcgccgagcgcgacgcctgggtgatgcacaatctcagcctcgtgcagatggcccacgccagggacaagcgtccttccgagatctccggcggcatgaagcagcgcgtcggtatcgcgcgggctctggcgatggagccgaaggtgctgctgctggacgagccgttcggcgcgctcgacgcgctgacccgtgcccacctgcaggactccgtgatggccctgcatcagaagctcggcaacaccatcctgatgatcacccacgacgtggacgaggcggtgctgctgtccgaccggatcgtgatgatgacgaacgggcccagcgcgcgcatcggcgaggtgctggacgtgccgctggcgcggccgcgcaagcggctcgagcttgcgaccaacgccgcctatctgaaatgccgccagcgcgtactcgaattcctctacgagcggcatcgcttcgtcgaggccgcgtaa

SEQ ID NO: 5127 - DNA, 471 bp, BradyrhizobiumColbertium
atggcgcggacgaaggcagaccgaaacagacaggagaacatcatgacgcccgagcaagtcaccctcatccagcagagtttctcgaaggtcgcgccgatctcggagcaggcggcggtgctgttctacgaccggctgttcgaggtggctccgtcggtgcgcgcgatgtttcctgaggacatgaccgagcagcgcaagaagctgatgggcatgctcgcagccgtggtcggcggcctgtcgaacctggagtcgattctgccagcggcttctgcgctcgccaagcgccacgtcgattacggcgccaaggccgagcactaccccgttgtcggtgcgaccctgctgtggaccctggagaagggccttggcgaagcctggacgcccgagctcgccaaagcctggaccgacgcctacggcgtgctgtccggctacatgatttccgaggcctacggcgcgcaagcgcaggccgccgaatag

SEQ ID NO: 5128 - DNA, 1218 bp, BradyrhizobiumColbertium
gtgagtgagccgctggtcatcgtcggtaacggtatggcggccgcgcgtcttgtcgacgaactcgccaagaccgccctcggccgctacgcggttgccgtgatcggcgaggagccgcggctcgcttacaaccgcgtgctgctctcctccgtgctggccggcgagaccggctcgcacgagatcgaactgcgtccggcggagtggtggcgaaatcgcggtgtcaccgtgcgctacggctatcgcgttaccgaggtcgatctcggtcggcgcgagcttaagatcgcgggcgaggagagcatggaatattccaagcttgtgcttgccaccggctcgacgccgctgcggctcaacgtgccgggcgccgatctcgccggcgtgcacacttttcgcgatacgcgcgacgtcgacctgctgctgacgctggctgcggccaggaagcgcgtggtcgtggttggcggcggcctgctcgggctcgaagccgcctatggccttgccaaggccggcgcgcccgtgacactgctgcatctgatggaccggctgatggagcgccagctcgatggacccgcagccgacctgctcaagaccctggtcgagcgcaagggcatccgcatcctgctcaatgcctccaccgctggcatccacggcgatggtcgcgtcgaggcgatcgagctcgccgacggcagccgcatcgaggccgacgcggtgatcttcgctgctgggatcaagccaaatgtcgcgctggcgaaagaggcggggatcgcggtcaatcgcggcgtcgtcgtcaacgacgtgatgcggacctcctcgtccgatgtcttcgcgctcggcgaatgcgccgagcatcgcggcatctgctatggcctggtcgaaccggcctatgaacaggcgcgcgtgctggcgcgccatctggccggccgccccgccgcctatgagggcagcgtgatctcgaccaacctcaaggtctccggcgtgagcctgttctccgccggcgacttcatgggcggggagggcagcgaaagcctcgtgctgtcggaccgcagccgcggcacctacaagaagctggtcatcgcggacggtcggctcaccggcgcggtgctgatcggcgataccgccgacgcgctctggtatctcgaactgatacgtaatcgcgacaaggtcgcggcgatccgcaccggcatgatgttcggccgcgcgctggcgttgccgtcgaaggcggcttga

SEQ ID NO: 5129 - DNA, 2706 bp, BradyrhizobiumColbertium
atgacggcgatcaatccgaacctccgcaccatcaggacgacctgtccttattgcggagtcggctgcggcgtgctggcgacacccgacggcaagggtggtgcggcaatcgctggtgaccctgagcatcccgccaatttcggccggctgtgctccaagggctccgcgctcggcgagactatcgatctgcaaggccgcttgctctacccgatgatccgctgcaagggcgtgctggagcgcgtcgcctggagcgacgcgctcgatcacgttgctcatcgcatgcagcacatcgtggcgcgcgacggcgcggacgcggtcggattctatctctccggtcagctcctcactgaggactattacgtcgccaacaagctgatgaaggggtttgtcggcacggcgaatgtcgataccaattcccggctctgcatgtcctcttcagttgcgggccatcgccgcgccttcggcgccgacaccgtgcccggctgctacgaggatctcgaccaggccgatctgctcgtcttcgtcggctcgaatgcggcctggtgccatcccgtcctgttccagcgcatgctgaagaaccggcaggagcgtggcgcgcgcatgatcgtgatcgacccgcgccgcaccgacaccgccggcgatgtcgacctgttcctcggcctcaagcccggcaccgacacggcgctgttctcgggcctgttcgtccatctcgccgattgcggcgcgctcgatcgggcttacatcgcgcagaacaccagcggatacgacgacgcgctggcgcgtgcgcgcaacatcgccggcagcgtcacggcgacggcgctcgccacgggcctgtcggagcaggacgtcgccgccttcttcaagatgttccgtgacaccgagaaggtcgtcacgctctactcgcaaggggtcaaccagtcagcgcagggcaccgacaaggtcaattcgatcctgaactgccatcttgcgacgggacgcatcggcaagcccggtgcctcgccattctcgcttaccggacagcccaacgcgatgggcggccgcgaggtcggcggcctcgccaacatgctcgccgcccatatgggcttcacgccgcccgacatcgatcgtgtcaggcggttctggaaagcgccgcgtatcgccacgcatgagggcttgaaggcggtgcagctgttcgaggccatcaaccgcggcgaggtcaaggcactgtgggtgatgggcaccaaccccgcggtgtcgttgcctgacgccgacatggctcgcgatgcgctgaagaagctcgagctcttcgtggtctccgagaacgtgctctgcaacgacacggtcgcggccggcccgcatgtgctgttgccggcgctggcctggggcgagaagtcgggcacggtgaccaactccgagcgccgcatctcgcgccagcgcgcgttcctgccggcgccgggcgaggcgcgccccgactggtggatcctgagcgagaccgcaaggcgcctcggcttcggcgacagtttcaactacaagtccgccgccgacattttccgcgagcatgcagcgctctcggcgttcgagaacaacggaaatcgcgacttcgacatcggcgcgctgacctcgctctcggacgaggccttcgatgccctgcagcccgtgcagtggccggtgcggggcggcggcgaccccgtcgagcgcttcttcgcgcaaggcggcttcttcaccaacgacggcaggggccggttcgtcgcgcccgaggtgccggcgctgcgcggagagaccggtccgtcgcggccgctcaggctcaacaccgggcggattcgcgaccaatggcacaccatgacgcgtacgggtctcagcccgcggctcggcgcgcacctgcccgagccgttcgtcgagatcaatccggacgacgctggaaaatacggcatcgcccatgacggctatgcccgcatcaccaccgattacggccagtgcatcctgaaggccgtggtcagcgaacggcagcagcgcggcacgctgttcgtgccgatccactggagcgcgatgaacgcctcgcacggccgcgtcggtgcgctggtgcactccttcaccgatccgttctcgggccagccggaatcgaaggcgacgccggctgcaatcgcgccttatgaatttgtcttccgcggcttcgcgttgtcgcgcaagcagctcgaacttccctcgaacctgttgtggacgcgcgtcacggtctccggcggtttcggctatctcttcgcggacaacggcgatctgtcgcggtggcccgcctgggtcgggaccgttgcgggcgaggatgtcgccgaataccgcgacatcggcggcggcgtctatcgtgccgcctcattcgctggtgaccgcatcgagacctgcctgttcgtcggacctgcgcacgatgccggcgactgggaagtggtgaagggcgcgtttgcggccgatcacgtcaccgacgagcaacgccgcatgctgctgtcaggcaagtccagcgaaggcgccgcctcgaccggcccgatcgtctgcgcctgcttcggcgtcggccgcggcaccatctgcgacgccatcgttgccggcgcatgcacggccgccgagattggcgcgaaactcaaggccggcaccaattgcggctcctgcatccccgagctgaagcggctgatcgcggccacggacgcggctccggcgaaagagaccaagctcgcaaacgtggcaggttag

SEQ ID NO: 5130 - DNA, 132 bp, BradyrhizobiumColbertium
gtgcgatatgggcaaccgctctgcagagcatcgccgaaagggatgctgctgcgtccggagcacgacatcgtggccttcgcacagcgcatccacgccgtcattgcgagcgcagcgaagcaatccagaccatag

SEQ ID NO: 5131 - DNA, 840 bp, BradyrhizobiumColbertium
atgaacaccaatcccttcggcaagaccggcgtcaacgtgtccgtcatcgggcagggcacctggtacctcgaccacggtgaccgcaagcgcgcgatcgcggcgcttcagcgcgggctcgatctcggcatgacccatatcgacaccgccgagatgtatggcgatgccgaactggtcattgccgatgccatcgccggccggcgcgacgaggtgttcctcgtttcaaaggtgctgccgagcaatgcctcgcgccgcgggaccatcgccgcctgcgagcgctcgctgaagcggctcaggaccgaccggctcgactgctatctcttgcactggcgcggctcctatccactggaggacaccgttgctgcattcgaggaactggtgaaatcaggtaagatcaaatcctggggcgtctccaatttcgacgcggacgatctcgacgaaattcttgacgttgcgggcgaaggccggatcgcgtgcaaccaggtgctctatcatctcaaggagcgcgcgattgagcatgccgtgatcccgtggtgcgagcggcacggcgttgccgtcgtttcctactcgccgttcggtcatgatgatttccccgcaagcagcagcaagggcggcgccgttttggcccgtatcgcggaggcgcgtcgtgcgacaccgcgtcagatcgcgctgggcttcctcacccgtgcgactacggtattcgcgatcccgaaggcctcgtctgcggagcacgccgccgagaatgcggcagccggcgatctcgtgctgacgaaagacgagattgatgcgctggatgctgcctttccgcgcgggccgaagccgcgcggcctgcccatgctgtag

SEQ ID NO: 5132 - DNA, 1053 bp, BradyrhizobiumColbertium
gtgaacgcggcgcatttgtcgttttttacgaccgttctcgattcgcatttcgcccgggttcctgccgtgacaccgccgcccgccgcagccgcaaggctcgacactattcccatgcccgttccggagaagaagcaggagactcgccgcgcgcctgcgcgcgtcgatcatccgttcagagggattgcactggtcctgctgtcgacgatattcctcggctgttccgacgtcaccgcgaagtatctgtcgacaagcctgccgtcgatcgagatcacctggatccgcttcctcaccttcacgctgctgttcacgccggtgatgctgccggccacgccgctctacgcgatgcgcaccaggcgtcccggcctacacgtcatgcgcggggcggcgctgctcggctcctcgctgttcttcatcacgggcctcggcttcctgccgatcgcggaagcatccgccaccggcttcgtcgcgccgctgttcgtcaccgcgctctcgatcgtcttcctcggcgagaaggtcggcatgcgccgctggctcgcgaccgcgctcggcctcatcggcgtgctcatcatcctgcgaccgggcaccagcgcgtttcacccagccgcatcctttccattgatctcggcggcatgctgggccggcaccctgatcctcacgcgcatgatgagcgggcgggaagccgtcgtcaccaccatggcctattcgtcgctgacgggcctcgtgatcctgacggcgctggtgcccttcgtctgggtgacgccgtcgtggaccgcgatcgcgctcggcatcttcatcggcgtggcctccacggcgggccagtggatcgtcgtgctggcctatcgttacggcgatgcgtcggtgctggcaccgttttcctacacgcagctgctctgggtcagcattctcggctacttcatcttcggcgaagtgcccgacgtcttcaccatcaccggcgcggccttcatcgtcgccagcggcctctacatcgcccatcgcgagcgtgttcgccgcgcccagctcctggtgctggaagagcgttctccgaacgcctga

SEQ ID NO: 5133 - DNA, 1080 bp, BradyrhizobiumColbertium
atgcgggccgcgattttcaggaacggagagatcgtcgtcgaccggatggccgagccgaagcccggcaacggccaggtgctggtcaagacgctcgcctgcggcatctgcggctccgacctgcacgcccgccagcacgcccatcgcatggtcgacatggcgcggaaggtcggccgcaagccgatggacctcagccgcgacgtcgtgttcggccacgagttctgctgcgagatcgtcggctacggtcccggctccgaacgcaggctcaagcccgggacccgcgtatgctcgctgccggcgctggtgacgccggaaggcatccagggcatcggctattccaacgacaacgccggcggctatgccgaagcgatgctgctgagcgaagcgctgctgcttgaagtgccgaacggccttgcgcccgaacatgccgcgctcaccgagccgctggcggtcggcgtccacgcggtcgcgaaagccgatatcagcggaggcgaggtgccgctcgtgatcggctgcggtccggtcggcctcgcggtgatcgccgcgctgaagctgaggggtctgcatccgatcgttgccgccgactattcgccggcccggcgcgcgctcgcggcgaagctgggcgcggacgtcgtggtcgatccccgggtctcgcagccctatgcgacctgggccgagcatgcgcagatgtcggaggcggagaaggcagcacgatcgccgttccgggccatgctgccggcgctgaagccggcgatcatcttcgagtgcgtcggcgtgcccgggctgctgcagcaggtgttcgaaggcgcgccgcgggacgcgcgcatcgtcgtggtcggcgtctgcatggaaaccgacaagagcgagcccatgctcggcatcatgaaggagctcaatgtccagtacgtgctgggttatacgccggaggagttcgccgcctcgctccgcctgatcgcggaagggcaggtggacgccgcggcgatggtgacggccgaggttggcctcgacggcgtcgccaaggcgttcgcggacctcgccaatcccgagatgcacaccaagatcatcgtgcagccgtggcggtga

SEQ ID NO: 5134 - DNA, 1626 bp, BradyrhizobiumColbertium
atgcaaggattgatgatggacatgccgcttttgatcagcggcctgatccagtatgcggccgattatcacggcgaagccgagatcgtcgcgcgcgagatcgaaggcgacattcaccgctatacctatgcggatgcgcatccacggatcaagcgcatggcgctgaccttgaagcggctcggcatgaagcccggcgaccgggtcgggacgctggcctggaacacccaccgccatttcgagatgttctatgccgcgcccggcatgggctacgtgctgcacaccgtcaatccgcgcctgtttccggagcagctcgtctacatcatcaaccacgccgaagatcgcctcctgttcatcgaccgcgccacgctgccgctcgtcgaggcgatcgcgccgcagctcaagacgatcgagagctatgtcgtgatgtcctcgcgagagcggatgccggagacgaagctcgcgaacgtgcattgctacgaggaattgctggagcgagaggacgattccggtttcgcctggcccttattcgacgagaagtccgcctcgaccatctgctacacctcgggcacgacgggcaatcccaagggcgtgatctactcgcatcgcgccgcgatcctgcagaccatgacctgctgcaacttcgacttcctgccgggccatatcgaaggcgtgcgcgaggtgatgatgccgatggcgccgctcttccacggcaacggctggaacatgccgttcacggctccctacaccgggtccaagctggtactgcccggccgcaactacgagcccgacaagctctatgaactgctcgaaggcgagaaggtgacgctgtcggcgggcgtgccgagcttctggctgatcctgctcgactggctgggccgcaccggcaacaagttcacgacgctgcgcgcgacgctgtcgtccggctcggccccgccgcgggcgatggtcgagaaactcaagcgcgagtacaatatcgactacatccaggcgtggggcatgaccgaggcgctcggctgctcgatgccgggcctgcggcccggctcggagcatcttagcgagaaggagaagttcgaccgccgtcaggtctcgggacgcgcctgttttggcaccgctttgcgcatcgtcgacgatgccggcaacgagctgccgcgcgacggcaagaccgtcggccatttgcgcgcccgcgggccctgggtggcatccggctacatgaagctcaacgaaggcctcgaccgcgacggctggctgatcaccggcgacatggcggtgatcgacccgcagggtcacgtcacgctgactgaccgctccaaggacgtgatcaagtccggcggcgagtggatctcctcgatccagctcgaggacatcgcgctgtcccatcccgacgtcctgcaggcggccgtcgtcgcgatcagccacgagaaatggcaggaacgccctctgctcctcgtcgttcgcaagaagggcgcgaccgtcgacggcaagacgctgctcgaccacatgcgcccgaagatcgcgagctggtggatgccggatgcggtcgaattcctcgacgaatttccgatgaccggcaccggcaaggtgctgaaatccgctctgcgcgagagattcaaggaatatcgcgtcacatga

SEQ ID NO: 5135 - DNA, 1854 bp, BradyrhizobiumColbertium
atgtcagcggaaagacgcaagaccggtacaagcggcgcatctacggtcgatgtttccgcgctccgcgcccgctatcgcgatgagcgcgatcgtcgtctgcgcgccgagggcaaggcgcaatatatcgaggtcacaggcgagttcggccgctacctcgacgacccctgggcagatcccggatttgcgcgcgacgccgtcagcgaagcgactgaagttctcatcgtcggtggcggcttcgggggtctgttgtgcggcgcgcgattgcgcgaggccggcatcgacgattttcgtatcgtggaaaaggcggccgacttcggcggcacctggtactggaatcgttatcccggtgccgcctgcgataccgagagctacatctatctgccgcttctggaagagactggctacatgccggtgcgcaagtacgcgcgggcgccggagatctacgagcactcgcgccgcatcggccgtcatttcgggctttaccagcgcgcgctgtttcaaactgtcatctcgaggatgacatggcaggagcgggaggcgcgctggctggtcgagaccgatcggggcgatcgcatccgcgcgcgcttcgtcattttggccggcggtccgctgagccgtccgaagctgccgggcattcccgggatcgaaacgttcaaaggccacagctttcataccagtcgctgggattacggctacaccggcggcagtgcggatggtgatctgacaggtcttgcggacaagcgcgtcggcatcatcggcaccggcgccaccgccgtgcaatgcgtgccgtacctcggccgttcggcgaaggagctctatgtctttcagcgcacaccgtccgccatcggcgtacgtgatgaccgtccgacggatcaggcctgggcgcagagcctcaagccaggctggcagcgcgagcgcatggacaattttacggccgtgatttcaggcgagccgttcgaacgggacctggtgcaggacggctggaccggcctgctcggagagatcctgctggcgccgcgccggcagcagcagccggtgacctcgatggaggaggcgctgaaggtgatcgagcaggccgattaccgcaagatggaggagatccgcgctcgcgtcgatgcggtggtcaaggacgaggcgactgcggctgcgctcaagccctggtacaaggcattctgcaagcggccgtgcttccacgacgaatatctcgacacattcaaccgctccaacgtgcatctcgtcgataccggagggcacggcgtcgaacgcatcaccgagaacgccgtcgtcgccggtggcaaggcccatgagctcgactgcctgatctatgccagcggtttcgaggtcggcaccgattatgcccgccgcatggggttcgaggtctatggccgcgacggcatgagcctgtccgagcgctggcaggacggcgtcaagacgctgcatggcttctacagccgcggcttcccgaattgcttcctgatcgtcacggtgcaggccggacagagcgccaatttcccgcacatcatcgacgagcaatcgcagcacatcgcctatgtcatcaagcaggcccgcgagcgcaaggtccgcaccctggagccgacgctcgccgccgagaacgcctgggtcgaggaggtggtcaaggccgcactcggccggcagacttatctcgccgaatgcacgcccggctactacaacaacgaaggcgtgttcgatccgatcgcggcaagaaacagccaatattggcgcgggccggtggcattcctgcgactgctcgacaaatggcgcaaggagggcaatctggaaggactggaattgtcccatgatcaggtcatggagtcgccgccttccaccggctaa

SEQ ID NO: 5136 - DNA, 819 bp, BradyrhizobiumColbertium
atgatcaggggcagggttgttgcgggagcggttcttggcgcgatgacgctgctcgggttcctggcatcggtcgccgaggccgcgcaatgcggcagctcgccggcgggttttgagacctggaagcgcgaattcggcgcggaggcgcaagccaagggcatcggccccacggcgctttcggcgctgatgcagacgaactatgccagcgccacgatcgcggccgaccgcggccagcgaagtttttcgctgacgctcgaccagttccttgccaagcgcggcgccgccaccatcgttgccaagggacggcagctcaagcagtcgcaggctgccttgttcgcctcgatccagcagcgctatggcgtcccgcccggacccttgctcgcgatatggggcatggagaccggtttcggcagccagcgcggcaaccagaacatgctgtcgtcgattgcgacccttgcctatgattgccggcggcccgaattcttcaccgaccagctttatgccgccctgaagctgatcgaccgcggcacgctatcggcatcgacccgcggctcgatgcatggtgaggtcggccagacccaattcatgcccaagagcatcctggcctacggcaccggcaatctcgaggttgctgccaatgcgctgaactcgacggcgaatttcctcaaggcccatggctggaaagcaggagctggctaccagccgggcgagccgaatttcgccgcgatcgaggcctggaatgcggccggcgtgtatcagaaggcgatcgcgctgatgggccggcagatcgacgagggcggcggggcggccgcgttgcgctag

SEQ ID NO: 5137 - DNA, 222 bp, BradyrhizobiumColbertium
atggctacccagatcgtgatggaccagacaggcgacacgcgccacgagtttgatcccggcaatgccgaagcgctggcgcgcgccgaacgccgctttcgtgagctgaccggagccggcttcaccgccgctcttcgaaccgggcccggcgaagtcacgcggatccgatcgttcgatccgaccgcccaggaaacgctgttctatccccgcctggtcggcggttga

SEQ ID NO: 5138 - DNA, 423 bp, BradyrhizobiumColbertium
atgatcctggcagtctggctccgcgcgccggcgcgtgcacgcctgcacgcgctgcgtgagctctatcgccgcttcttcggcgagaacacgcctgacgcccgcggccggcggctgcttgctgaatggctgtcgccgaagcagcgcgctcaattcgaggagcaccggtatttcgacgtcgttgggtgcgacaccggcagaacctatcgcatccactacggcacagccgccaatgtccacgagatcgactgcgacgggcgtccgacgacggggtggtgcttcgtcccatcaggcttcctggtgcccggcgacgtcatgcttgcgcagaagattgcgctcgagactgacgagaggaatgccttggcgctcgcgaaccggtttccgccggcgacgcactcggagcacttttaccggcggcctttttag

SEQ ID NO: 5139 - DNA, 468 bp, BradyrhizobiumColbertium
ttgcgaggcaagatcatgacgcaggtcgaatggttcgatgatctcaccgtcggaatgcgcttcaagtcccccgaatgtctcgtcacagaggctgacatcaagcgcttcgcgatagagttcgatccccaacccatgcatctcgatcacgaggccgccaaggcgacgctgttcaaggggcttgccgcctcgggatggcacaccgctgcgatcgcgatgaacctcgcaattcaggcccggccgttcggcccgcacccgctgatcggtgccggtgtggacggactgcgctggacgatgccggtacggccgaatgaccgcctgcatctggtcggcgaggtcatgagcctgacgccgtccaagtcgaagccgcagggcatcgcgctggtgaaatggaccatgttcaaccagaacggcgaggaggtttacaccttcacgccgatcgcgatcgtgccgcggcgagactctcgctga

SEQ ID NO: 5140 - DNA, 3189 bp, BradyrhizobiumColbertium
atgaatctctcaaaattcttcatcgatcgcccgatttttgcgggcgttctctccgtcctgattttcctggcggggctcatctcgctgttcgcgatgccgatctcggaatatcccgacgtggtgccgccctcggtcgtcgtgcgcgcgacctatcccggggccaaccccaaggtcatcgccgagacggtggcaacgccgatcgaggagcagatcaacggcgtcgagaacatgctgtacatgtcgagccaggcgaccaccgacggcgcgatgacgctgacggtgacgttccgcctcggcaccgatcccgacaaggcgacccaattggtgcagaaccgcgtgcagcaggccgagccgcgcctgccagccgtggtgcgacagctcggcatcatcaccaagaagtcgtcgcccgacctcaccatggtcgtgcatctcctgtcgccgaacggccgctacgacatgacgtatctgcggaattacgccgtgctcaacgtcaaggaccggctggcgcggatcgacggcgtcggcgacgtgcagatctatggcgcgggcgattattcgatgcgggtatgggtcgatccgcagaaggccgccgagcacggcctgaccgccagcgatatcgtgagggcgatccaggcacagaacgtcgaggccgccgccggcgtggtcggctcctccccgaacgtcaaggggatcgacctgcagctctccgtcaacgccgaaggccggctctcgaacgaggagcagttcggcgacatcgtggtcaagacgggcacgcgcggcgaagtcgtgcgcctgcgcgacgtcgcgcgcatcgagctgggggcgtccgaatacggcctgcgttcgctgctcgacaacaagcaggcggtggcgcttccgatcttccaggcgcccggctccaacgcgctgcagatttcggacaacgttcgcgccaccatggccgagatcaagaagaacatgccggagggcgtgtcgttccagatcgtctacgatcccacccaattcgtgcgctcgtcgatcgaggcggtcatccacacgctgctggaggcgatcgccctggtggtgctcgtcgtgatcctgttcctgcagacctggcgcgcttcgatcattccgctgctcgccgtgcccgtttcgatcgtcggcacgttcgcggtgatgcacgtgttcggcttctccatcaacgcactcagcttgttcggcctggtgctcgcgatcggcatcgtggtcgatgacgccatcgtcgtggtcgagaacgtcgagcgcaacatcgagtccggcctgtcgccgcgcgatgcgacctaccaggccatgcgtgaggtctcgggcccgatcatcgcaatcgccatggtgctgatcgcggtgttcgtgccgctcgccttcatttccggtctcaccgggcagttttacaagcagttcgcactgacgatcgcgatttcgaccgtgatttcggcgatcaattcactgaccctgtcgccggccctgtcggcactgctgctgaagggccacaacgatccgaaggaccggctgacgctcatcatggaaaagagcctcggctggttcttccggggcttcaacaaagccttcacacggtcttcggagaattacagcggcagcgtcggcaaggtaatctcgcgcaagtccgccgtgatgggcctctatgtggtgctggtcggactcactgcgtttctgttccagcaggtgccgggcggcttcgtgccgggccaggacaagcaatacctggtcggcttcgcccgcctgcccgatggcgcctcgctcgaccgcagcgaagaggtgatccgcaagatgagcgacatcgcgctgacccagcccggcgtcgaaagctcggtcgccttccccggcctgtcgatctccggcttcaccaactcgtccaatgccggcatcgtgttctcgacgctgaagcccttcgacgaacgcaaggacccctcgctcagcggccccgccatcgcagccgagttgaacaagaaatatgccggcatccaggaagccttcatcgccatgttcccgccgccgccggtcaatggcctcggcacgatcggcggcttcaagctgcagatcgaggaccgtgccgggctcggctacgacgccctgaacgaggcgacgaacgccttcatggcggcgatgcagaaggcgccggagatcgccggcgtgttctcgagcttccaggtcaacgtgccgcagctgttcgccgacatcgaccgcaccaaggcgctgcagctgggtgtcccggtcaccgaggtgttcaacacgctgcagatttacctcggctcctattacgtcaacgacttcaacaaatttggccgcacctattccgtccgcgtccaggccgacgccccgttccgcgctcgggccgacgacatcaggcagttgaaggtgcgctcgtcctccggcgacatggtgccgttgtcggcgctgctcacgatccgccagagcgcgggcccggagcgcgcgatccgctacaacggcttcctgtcctccgacatcaatgcggcggccgcgcccggcttctcatccggccaggcgcaggaggcggcaacgcggatcgcggcggaggtgctgccgccgggctttgccttcgaatggaccgacctcacctatcaggagttcattgccggcaattccggcatctgggtgttcccgctggcaatcctgctggtattcctggtgctggccgcgctctatgagagcctgaccctgccgctgtcgatcatcatgatcgtgccgatgggcttgctcgctgcaatgttcggcgtctggatctccaagggcgacaacaacgtcttcacccagatcggcctgatcgtgttggtcggcctctcggccaagaatgcaatcctgatcgtcgaattcgcgcgcgagctcgaattcgccgggcgcacgccgatccgggccgccatcgaggcgagtcgcttgcggttgcggccgatcctgatgacgtcgatggccttcattatgggcgtgttgccgctggtgctctcgaccggcgccggctcggaaatgcggcgcgcaatgggcgtcgccgtgttctccggcatgatcggcgtgaccgtgttcggcctgttcctgacgccggtgttctatgtgctgctgcggaccgtcaccggcatgaagccgctgacgcatcatgggagccagaccagcgcggcgccggtccagggccttgccgaatga

SEQ ID NO: 5141 - DNA, 1242 bp, BradyrhizobiumColbertium
atgcccccctcccaacatacctcccgcaccggccgtttccgccgccttttggcaggcgttgccatcgtgggtgccctcgccgcggccggctcaattgcgaccggccgctattttcatgcggcgcaagcgaccgcgccggccgccgccgccgaacaagccgtctccgttaccgtcgcgacgatcgagccccgccggaccgtgctgtgggacgacttctccggccggcttgaggcgatccagcgcgtcgagctccgcccccgcgttgcgggcgcgatcatgtcggcgaacttcaccgagggcgcgctggtgaaggccggcgacgtgctgttcaagattgatcccgccccctacgcggccgaggtcgacaaggctgcggcccagctcgaagccgcgaaagcgcgcgtcgtgttcacacagagcgagctcgagcgcggcgcgcagctcgtcggcaacgccgtggtgacgcggcgcgactacgaccagcgcgaaaacgccaaccgcgaagcgatcgccaatgtgaaggcggccgaggcgacgctgcagacagcaaagctcaatctcgactacactgaagtgcgcgcgcccgtggacggccgggtcggcaagatcgaggtcaccgtcggcaatctcgtcgccgccggcacggcgtcgccggtgctgacgtcgctggtctcggtcaatccgatctacgcttcgttcgacgcagatgaagaggtcgtgctgcgcgcgctgaattcgattgcggatgcgtcgggccgacgcggcaagctcgaccagatcccggtcgagatgacgacctcgggcggtctgtccgcgaagggccacatccagctgatcgacaatcaggtcaatggccagagcggcaccatccgtgtccgcgccgtattccgcaacgacgacggacggctcattcccggccagttcgcccgcgtgcgcatgggccagccgaagcaacaggcgctggtgatgatcgacgagcgcgcgatcggcaccgaccaggacaagaagttcgtgatggcggtcggcgacgacaatcgcgccgtctaccggctagtcaccctcggcggctccgtcgacgggcttcgcatcgtcacgtcgggcctgaagtccggcgagcgtatcgtcgtcaacggcctgcagcgtgtgcgcccgggagccctcctcaagacggaggtggcagccatgggcgcacgggggcaacaggcatccaaccacagcaagcaggacgtggtgcagcgctag

SEQ ID NO: 5142 - DNA, 606 bp, BradyrhizobiumColbertium
atgggcatgggacgcccccgcgaattcgacgccgaaaaggcgttggatcaggcgatggaagtgttttggcgccatggctatgagggcgcgacgattgcccagctgacagaggccatgggtatcaacccgcccagtctctacgcctgcttcggcaacaaggaaggcctgctgaaggccgcgctcgaccgctacacgaagttgcgcaacatctggatggatgaggtggtggcagcaccaaccgcccgcgcggtggccgagcggatgctgatgggcatcgccgagaagcagactgatcccgccaatccgcccggctgtctgctcgtgcagggcggcgtggcctgcggcaccggttcggagaacgtgccgttcgagcttgccgcccgccgcgcccagaacgaagagcaactgcgcgagcgcttcattcgcgccaaggccgaaggcgatctcaaaccgagttgcgatcccgctgcgctcgcgcgctacgtctccgcggtctccgtcggcatgggcgtgatggcgtcctcgggcgcggatcgcgaagcgctgcggcaggtcgcgagcgtggcagtgcaggccgtggaggcgcagtcggagcgcgcccgataa

SEQ ID NO: 5143 - DNA, 906 bp, BradyrhizobiumColbertium
gtgacgtttgacctgacgtttcttgggacatcggcaagcgttccttcggcggagcgcaaccatccggcgcttctcgtggaggccgcaggcaagcgcgtcctgatcgattgcggcgagggcacgcagcgtcagctgctgcgcagcggtgccggctttcgacgtctcgaccgcatcctgctgacgcatgctcatctcgatcacgtgctcggcatccccggcctgttctcgacgctgggattgcggcaggcttccgacgcgatgaccatccatggcgggcaggggacgctcgacatcgtcatccgcatgctcgcgggactatggggcgtcggcagggcgccgatcgcggtccagttcgaagggctcgccgagggacaggtcctggcttgcggtgagtttaccatcgactgttttccggtccgccaccgcgacaccgacagtttcggctttgtcttccaaatcccgcctcgccgtcatcttcggcctgaccgcctcgtcgcgcttggcgtgcccgacggtcccttgcgcggcgagttggccgcgggccgaccggtcgtgctcggcggccgaacgatcgatccgggagacgtccagggcccgccgagcggcggcaggaagctcgtcgtgatcggcgacaccgagacaaccgaggggctgtcgcaatatgcggccaacgccgacatgctggttatcgaggcaacgttcctcgaacgcgacgcgtccaccgcgcgaaattacggccatctcaccgcggccgaagcagcttcctttgcggccgcgaacaacatcggacagctcgtgctgacgcatatgtccggacgctaccaggacgaggagattctcgccgaggcggcaaagatcttcccgaacacccggatcgccgcagatttcgatcgcgtcgtcgtctag

SEQ ID NO: 5144 - DNA, 1005 bp, BradyrhizobiumColbertium
atgtccgcgattgatcggtgcggcctctatgaagtcgtgcctgccggattcgacctgctcaaagcgtctcccgccgagctcgatcgctatggcattccgcagaagccggatgtcatcacggagcccgagctgttcgagttctggactgagctcgtttcggcgccttttgccgcaaagcagccgacgttcgccagcatccatcccccgtcgctgggaggagcgctgcagtcgatgctgaactggtcgggtgcgcttatttccacgccctggccgcagcagatcgtgttcgctgcaggggcatggaatgtcccgcacgtgcgccggccatcggtatcggccctgggtacgcccgcggacgatccaaagtcgctggtctgggtggggctcgacggccgcaatggcacgctgccgaacgtctccctgcctcaaatcggcaccggtcactggcccgaccgcaagcccaaccactttgcctggtgggattggtggcacaacgcgcggcccgacgaggcgaccaccgagtcggcagcgcctgcgaagccacaagcgatcacggtgatcgacaacctgctcatcgagacgggtcacaagattctcgcgggtctggcggtccaggtcagcggagacattctgtacttcatcaagaaccagcgcaccggagagtttcgctcgtttctcgccccgccgccaagcggagagatcgaaccgctcggttcatcagcggaatgggtgatggagcggccgacggacccggaaagcggcgccctgtttccgcttcccgactatggtgccgtcgacttcagctactgcgtggcgcgagccgcggatggagcggtcgggtcggggcgcatgatgacgctcgccgacaacgcactcctgatcgagatgcgcgagacgttcgcaaatccagatcgtacggtgattgtgtcccgcccggcgctacggcaggaacacgccgaggccccgatcggcgtcagatgcactttccaggacccggtcgcctga

SEQ ID NO: 5145 - DNA, 978 bp, BradyrhizobiumColbertium
atggcaggcggatacggaggatatggcggttacggcggctatggcggatatggtggctacggaggctatggaggatatggcggctacggcggcaacgcgggcggatcaggcggtgccatgttcagcgatcgcgtcgatcgtccgttcataaccgagcgcgacgtcgccggcgccagatttgatgcgggcggcttcggcatgaagctttggtcgacccgctggtatgcctgggtggtgatgtccgatctcgccagccgggcagattggctcgaccggctcggcgggtttgcactgctcggcgccggcccaactccttgggcgggcgcaatcgaggacgatatcagcgccctgagaaacatggccgttcatgagcgcgctgcggccctcggcgacatcgtatcggaggccgacgagttcatcagcaagttcctgcatctggtgtccgcgacgccgacgacgcatccggcgacatcacgcatgctgatcgtcgccgacgcgcttacggcgttgatcacgatgcactacaaggctcatttcaatcgtccgcgtccaacccaggtcgtccccggcctcatgtcgccgatccagcacggcggacatgcgtcattcccaagcggtcacgccactcaggctcacgtcttcgcggcgttgctgacgaaagtcattccgccgtctctcggctttccggcccccgcgccaggagccgcgggcagaaccacgatcggaaagtcgctcggcgccctcgccgacagagtcgcacgcaatcgcgagatcgccggcctccactatcgttcggataccgtggccggcgtgaaactggcaggcgccatcatcgacaggattctgttggacaggacatatctgccgaagttcacgaagctcgtcgacaacgccagggacgagtggcagcacacgggcgtcttcgatgaagggaaggaagccggcatctccgtgggagagaagaatgtccgcgattga

SEQ ID NO: 5146 - DNA, 2280 bp, BradyrhizobiumColbertium
gtgctcgcaagtcgcatttcgatcattccgcaacccttggccatctctcgaccgaagatgtacgattctggcattgcagcagccccggcgggctgcattcccgaactcaccggtcattggcttcgcagaccaagcgaacctgccttttgcgttctgccaagtctggccacccgcacccggccctcctacactgtcctcgacacgatcgaccagggatgggacgagatgtcgggagtcaacggcgacaaggcggttggcaagggcggggccaaccgactgaccctcaagatcatcggagcattttcagcgtccgtggacgggcaagaggtcgggctcggccggaaggcacaagcgcttctcggctatatgatcctctcctcctcacgccagctgccaaggagcaagttggtcggactgctctggagcgagaaggacgacgtgctcgcaaaggggtcgctgcgccaatcattgagccagattcagcgcgagctaagagcgctgggctgctcacatttccacgcagaccagattcacgtggcactcgatgtcgagcacgtgacatgtgatctcgtcgagatcatctcggatgccgagcgcggcatggtccatccactgctgctcgcacgcgaacgcctgaccgacgacatccttgacgacctggaaagcgtcgatccggcattctcggaatggctcgcggagacgcgaacactgatccacgaacggctgatccacgcgctgacgaggctgctgcccgatgagagcgacgcagtcgtgacgccaacggctgaagctgccgcgaaggcgattcaccggctggattccgagaacgagcgggctattcgtgttctcatcaggagtcacctcgcctctggaagtatcggcgctgccctcgcgatctatgcgcgcctctggcgccagctcgaagacgcctacgacatcgaaccgcacaagctcacgcaggacctgattgccggcgtgcgacagcagcagcctgaggccgtggcacgcccggtcccgttctccatggcagcccccgctgtcgcctcgaacggatccgacgtcagccgaccgtcgatcgccgtactgccctttcgcgcgcttacccccgctctcgagcctcaattcacgatcggcgtcgtcgacagcgtcgtccaggctctgtcgggcttaaaggagctgttcgtcatttcgcgcggttccacgatgatcccggtctcgcagacgccggatctgcgcgcaatcggccgcgatctgaatgcgcaatatctgcttcatggcagcattcagcgcgctggcgaccagatccggatctcgaccgagctcgtcgcaaccgaaaccgtcgaggttgtccgcgtcgatcgcctcagcgggactgcagccgacgtcttcgatttgcaggatcgcatcgccgtcgaggtcatacgctcgctggcgccccaagttcgcgaccgggagctacatcgcgcgatgcagaagagaccagacgatctcgacgcgtatcagctggcacttgtcggttacgatcagatgttcagcccggactacacgacgttcgtgacggcgcgaaccaatttcgaacgggcacatgtcctcagcccgaactgggcgcctccgctttcctacagcgccatctggcacatgcagcgcgtcgcgcgcgggtggtctgcgaatgcattgaacgagcgcgacacggcgcgtgctctcgccgaaagagcgcttgagcgcaactccgaagacccgctcgccaacgccgtcggcggttacacgctatcgcagtgcaagcatgaccacgtcggggccctcgggcagctcgaccgcgcgatcgagatcacgccgaaccttgcgctcgcattcgcttaccgggccgcggtgcatgtccgctgcgagaactacgacgacgcgctccgcgatgccaccgtcaatctgcgtctgtcgccgagagaccggcacgcatggttcgccgaaatgatcttggctcaggcctactttgccatgcaggacctcgcatctgccgtcgaacatgcgcggcgtgtcgcgacgcaattacctaacaatcaggtgaacctgcgcgtcctcgttgctgcgctggtggagagcggacgcctccacgaggcacaaaccttcgcacggccgctcatgcccgaaggtgagctcgatctgaagtggatctcaacatcgccatggccgaagccgaccctggcgcgcgtcgaagcagctctctcgcgcctggcagcggcacttcggcacggaaacagccagagcgataccgacaaatcctaa

SEQ ID NO: 5147 - DNA, 321 bp, BradyrhizobiumColbertium
atgactgtcctgctgagaaacaccttcagggcctggatcgattgcgtccccggcgcaccgcccaagctgatcatgatcggcgacgtgcgggtgccggccaacggctggcaagcccggctgaccaggcgctcaccgcaggggatcaatccaaagatcctgatcctcgacgtaaatgcccaggagccgagcggtgaagcccggcaggagatcaccacgatcccgcttcgttacgaggaaagtccgccgcaggacgaatacggccaggtgatgatcgcgaacggcaaaggcgagatcgtcgtccacgtcggccgcacgcattga

SEQ ID NO: 5148 - DNA, 71 bp, BradyrhizobiumColbertium
tggggaatggtgtaacggtagcacaacagactctgactctgtttgtcttggttcgaatccaggttccccag

SEQ ID NO: 5149 - DNA, 363 bp, BradyrhizobiumColbertium
atgccctatgtcgatggcttcattctcgccgttccgaaggacaagatcgaggcctacaaggcgctggcgaccaccgcctgcgcgctctggatggagcacggcgcgctcgattatgtcgaatgcatcggtgacgacgttccctatggtgagctcacctcgtttccgcgcgcggtgatggcgaaagacgacgaggtcgtggtgttcgcctggatcgtctatcgcgatagggagagccgcgacgccatcaacaagaaggtgatggaggaccctcggatgaagttcgagggcatgcctttcgacggcaagcgcatgatctatggcggcttcacgacgctgctccgggcgaacgacgttgttggctga

SEQ ID NO: 5150 - DNA, 561 bp, BradyrhizobiumColbertium
atgcccattcagttcaaatttgtcgccctcgccgccgccctgttgtcggcgggcgccgcacatgcccagcagggtgcaaagaagaacgccgctcctccggtcgcgcagcccgcacctgccccgacgcaagcacaggcggagggcactcccggacagcctggttggatcgtccgctgcaccagtgcgagccgcgaggcgccgctcgaatgcgcgatggagcagaacgcggtcctgaccaagaccggccagaccgtcgtcctgatcaacatccgcattgcgccggacacgcgcacgccgatcgcgctcctgcaattgccgctcggcctcaaccttccggtcggcgccaagctgcaggtcgacgaaggcaagacattcgacctccagatccagacctgcgaaaaccgcggctgctacgcctcgacgccggtcgcgcccgacctgctcgccgccttgcggtccggcaagcagctcaaggtctccttccagaacatggccaaggagacgatcgcgatcccgatgccgctcgtcgacttcgcggcggcttacgacaagatcaagtaa

SEQ ID NO: 5151 - DNA, 3141 bp, BradyrhizobiumColbertium
atgatgggcggcgggatttcggcacctttcatccgctatcccatcggcacctcgctgctgatggccggcattctgttcgttggccttgtcgcctatccgctgctaccggtcgcaccgctgccgcaagtggactttccgaccatccaggtcaccgccaacctgcccggcggcagccccgagacgatggcttcgtccgtggcgcagccgctcgaacggcaattcgcgcagattcccggcatcgcgcaaatgacctcgacgagctatctgggaaccgcgtcgatcaccatccagttcgacctcaaccgtagcatcgacgctgctgccaacgacgtgcagagtgcaatcaacgccgctggcggccagttgccgaagaacctgccctcgcccccgacctaccgcaaggtcaacccggcggacgcgccgattctgatcctgtccgcgacgtcggacacgctcccgctcaccactgtcagcgacaccgccgatacccagcttgctcagcagatcagtcagatttctggcgtcgcacaggtcttcatcggcggtcagcagaagccggcgatccgcatccaaatcgatccggccaagctcgtcgccaagggcctgtcgctggaggacgtgcgcagtcagatcgcgatcaccacagtcgacagtccgaagggcaacatcgacggggagcggcgcgcttacacgatctacgccaatgaccagttgacggacgccaaggagtggaacgacgtcattgtcgcctaccgcaacggcggaccattgaggatccgggacatcgggcaggcgatcagaggtcctgaggacgcaaagcaggccgcctgggccaacgggaagcgcggcgtattcctcgtcgtgttcaagcagccaggcgccaacgtcatcgagactgtcgaccgcatcaaggcaacgctgccgcgcctggtcgccgcaattccgagcgccatcaaggtcgaattgatgagcgatcgtacgcaaacgatccgcgcttcggtagatgacgtgcagttcactctgctgctcaccgtcttcctcgtggtgatggtgatcttcatcttcttgcgcagtttctgggcgacggtgatcccggcagtgaccgtgccgctcgccctgctcggcgcttgcgccatgatgtgggttgcgggctacacgctcgacaatctttcgcttatggccctcacaatcgcggtcgggtttgtcgtcgacgacgccatcgtcatgctcgaaaacatatcgcgctacgtcgagcagggcgaatcgcccatggccgcagcctaccggggcgcgaaggaaatcggcttcacgatcgtctccatcagcatctcgctggttgcggtgctgatcccgctgctcttgatgggcggcatcatcgggcgactgttccgagaatttgcggtcgtgctggcgatgacgatattcgtgtcgatgttcgtctccctcacgctaacccccatgatggcttctcgcttcctgcgcgcgcatggcgaagtcaagcacggccggatcttccagtggagcgaacgcgggttcgaggcgctgttgcgcggttacgcttacgtgcttgacatcgcgctgagctggaggcgcaccacgcttgccgtcttctttgcgacactcgcgctgtcgatctatctcttcgtcctgatccccaagggcttcttcccgcagcaggataatggattgatcaccgcggcctccgaggcctcgcaggacatttcgttcaaggagatgcagaggaagcaggaggcgctcggccagatcgtcctgtccgatcccgatgttgcggcggttgccagcgtgatcggcggcagtggccgcgccggcaacaacggcgccctgtatatcaccctgaagccacgcaacgagcgcgaggcctcggcacaacagatcatcgcgcggcttcgtccgcagttcgacaaggtcgagggcgcccgcctctacatgcaggcgtcccaggacgtccgcctcggcggccgaccaacgcgcacgcagttcgagttcaccttgcaggatgcggatctcgctgagctcaacgagtgggcgccgaagatcctcgccaagatgcaaacgctgcccgagttgcgcgatgtcgccagcgaccagcagacgcagggcacgacggtccagctcaagatcaaccgcgacaccgccgcccgctacggcattcagccccagttgattgacgacacgctctatgacgccttcggacagcggcaggtcacgcagtatttcacccagctcaacacctacaaggtgatcctggaggtcctcccggaactgcagggtgatctcgagacgctgaacaagttgtatctgaaatcgccgctgacgggcgatcaggtgccactgtccaccttcgcgacctggaccacagacccggtccgcccgctctcgatcagccaccagggccagttcccgtcgattacgatcagcttcaatctcgcccagggcgttgcgctcggccaggcaaccgaggccgtgcagcgcgcgatggccgagctcggcgcgccgccgacgctgaactcgagcttccagggtaccgctcaggcgttccagcagtcgctcggcaccgtgcccctgttgatcctcgccgcgctcgtcgtggtctatctgatcctcggcattctctacgagagctacatccatccgatcacgattctctcgacactgccctcagccggcgtcggtgcgctcgcgatcctgatggcggcgggctttgacttcagcctgatcgcgctgatcggcatcatcctgctgatcggcatcgtgaagaagaacggcatcatgatggtcgactttgcgattgccgcagaacgcgacgagcacaagacgccggaggaatcgatccgccaggccgcgctgctgcgtttccgcccgatcatgatgacgacgatggccgcgcttctgggcggcgtgcccttgatgctcggccacggcaccggcgccgagatccgtcagccgctgggctatgccatggtcggcggcctgatcgtcagccaggcgctgacgctgttcacgacgcccgtcgtctatctctatctcgacaagctcaataactggttctcgacctggggccgctcgggcgacggcgacgagaccctcgagcacggcagcgtcaaggaagccgccgagtaa

SEQ ID NO: 5152 - DNA, 1173 bp, BradyrhizobiumColbertium
atgaaaaagtcccggccgatcctctggcttctgatcatcgcggccgtggcctccgcgggttattatgcttggcagaagtttggctcgtcccaggctggaaaaacccaggctgcggagaagggcgcccctcgcccgtccgctgtccccgtcagcgtcgcagcggtgcagaagaccgacttcccagtctacctgaccggtctgggcacggttcagggcttcaacaccgtccaggtccgcagccgggtcgacggccagatcatcaagctcgagttcaaggagggccagatcgtcaagcagggtgagcttctggtctcgatcgatcctcgtccctatcaagccgcgcttgaccaggcgaaggccaagaaggcacaggacgaggctagcctcgccaacgccaatctcgagctgcagcgagccatgaggctcggcgagtttgcgaccgcacagcgcgtggatacccagcgctcgacagtcgcccagctcacggctcaaatcgccgccgacgaagccgcaatcgccaacgcccagacccagctcgattacactcagatcaaggcaccgatcaccggtatcgccggcctgcgtcaggtcgacatcggcaatatcgtgaacgcctcgacgcagacgggcatcgtcacgatctcgcaggtcgagccgatctcggtcatcttcacggcgccgcaagaccagctcccctatatcagcgaaggccagaaagccggcgcgctcaaggtgatcgccttcaccacggacggtaagaatatgctcgccgagggtaagcttgcggtcatcaacaatcaggtcgacacaaccagcgggacgatccggctcaaggcggtgttcgacaataaggaccacgtattgtggcccggccagtcggtctcgacgcgcctgctggtgcgaacgctgaaggatgcgaccgtggttccggatgaagcggtccagcgctccaccaacggcctctacgcgtacagcgtcaatcaggacaacaaggccgaactgcacaagatcaaggtcagctatgccatggctggccagtctgtcatcgaggaaggcttgagtccgggccagcaggtcatcgtcggcggtcagttcaaggtccaacccggaagtctcgtctcgacgacggtggcaagctcggatcgggccgagagcaaggtacgacaggaatga

SEQ ID NO: 5153 - DNA, 240 bp, BradyrhizobiumColbertium
atggacgagctgaacggcaagctgatcgcgtgccagattctgatcacggggttgatcgcgcgtgtcgcaaacgagcagcgcgatcccttgcgcttcctcaccgattttcgtgatgagatcaaagccgtcgtgaacggcgtccacatcgccggcatggacaacaccgatcgcgtgcgcgccgtcgcgcagaaaaccgtcgacgaattgttctcgctgatgaagccgccgagcagcgactga

SEQ ID NO: 5154 - DNA, 2397 bp, BradyrhizobiumColbertium
atggggcaggtggtcgcaccgaaatcgttgcgttcggtcgcagcattcgattcgttggatgagaggttcgtaggcgtttccggcaaaaaggtatcggcagtcgcgagcttgatcgcggtggcgtcggtttcaagcggcgcgcaggcgcagcaatcggacctgccgccggtgacggtcgatgctccggtcgagcgcccgcgtccgacggcctcgaggccctcgcctgagcagatccgtgcccgcaacgcgcttcgccgcgccgcgcagcgccagcaggcgcagcagacggctcccgccacgccctcgggcgcgcccgacggcaatccctatgccgatccggcggcgccctacaaggtcgaccacgtccaggcctcgggcaagtttcccgagaagatgctgaacacgcccaagagcatcaccgtgctcagcaaggaagtgctcgaggacaagaacgcgacgacgctgaaggagatcggacgctcgaccgccggcgtgacgctcggctcgggcgagggcggcaacgcgttcggcgatcgcttcttcatccgcggcttcgatgcacgcaatgacgtcttcatcgacggcatccgcgatcccgccgtgtccatccgcgagaacttcttcaccgagcagatcgagattctgcgcggaccggcatcttcctatgcgggccgcggcaccgccggcggcgccatcaacatcgtcaccaagcaggccggcgacgtcaatttcaagcgaatggacaccgagttcggcaccgatcagaccaagcgcgtcaccctggacgtgaaccaggtgatcgatcccaccttctcggtgcgcaccggcggcctgttccaggacgccaacgtcgccggacgcaactacgtcaccgacaatcgctggggcagcttcatctcgaccaagtacaccccgaccagcgacatcaagatcacgacgaactacgtccataccgatctcagcggttatcccgatttcggcgtgccttattacaagcagggcaacgttccggtgacctcggcgggcattccgcgcgagaactggtacggctttcttaatcgcgatttccagacggcgcggcaggatttcggcaccggaacgattgagtacaaggtcaacgaagccatcacgctgaccagcaaggtgcgcggcgagcactcgctgctcaactacatcggcacgctgccgcagaacccgaataccaccaatcccaatccgctgctctggacgaccacggcgagcgcgcagagccgctatcagaccgtggacgtatgggccaaccagaacgaggccacgttcaagctcgacaccggcggggtcaagcacaccgccgtgttcggcgtcgagtattcgaacgagaacgtctcaatcgaccgctacgcgggcttggcgtcggaactgtccggctccgctttcaccagcaacggcgctgtccagaacgtcaatctctattcaccccagtataccaacattcctttcggcacgccgtcgctgaccggaaatccgacgcgctatggcgtcaacaccaccagcgtctatgtcatggacactgcgaactggcaggacacaatcatcgtcaatggcggcgtgcgttacgacggctacagccagagttcgtccaccaacgcggcttatctgaagcagaatgccgatctggtgaattacaacgtcggtgccgtctacaagccgatgccgatcggcagcctttatgcggcctatgcgacctcggcgaatccgttcggatcggagcttgatgcgaccggtaccgactacggcggcgttccgcccaacacggccgtcctgctcgggcccgagcgcaacaaggcgatcgaactcggcaccaaatgggagctcgctgaccgccacctgctcgtgaccggtgcattgttccagaccaccaaggacaatgcgcgcgagaccgtcaacggcttgttgacgtcgggcgctgcctacaggatccagggcatcgacatcgaagccgagggcaagatcaccgatcgctggagcatctttggcggcctggtgctgatgcagtccaaggtcacgcagagcggcgtcgcttcgaatataggcttgcaacttgccaacatcgctcaccagtcgttcagcatgctgaccaagtacaagttcgacggggggtgggagctcggcgggcaggcggtctaccgctcaaaagtctatggcggcacgttcgcggccaacaccaacgagctgccgagctactggcgcttcgacgcgttcgtcgagaagaagatcgaccagaactggacgatgaagttctacgcgcagaacctcaccaacaagctctattacgactcgttctatcgcagcaacgtgccgttcgtggcggttgcgccgggacgggcattctacgtcgtaacgacagcgaagttctga

SEQ ID NO: 5155 - DNA, 690 bp, BradyrhizobiumColbertium
atgttgacctgcctacctggcgttctcagcaaggatgatgtggcggatttccgccgcatcatggacgccagcgaatgggaggacggccgctccaccgccggcgcgcagtcggcgatggtcaagcgcaacgagcaattgcctgcggacggcgaggtcgcgcgcaagctgggcaaccgcatcatctcggcactgacctcgaacccgcgcttcattgcggcggcgatcccgctccagatctttccgccgctgttcaaccgctatgcggcgagtagcggccatcatttcggcctgcacgtcgacaatgctattcgcggcgaccgtctgaccggccttcgcatccgcacagacctgtcggttacgctgttcctcgccgagccggaagagtacgacggtggcgaacttgtgatcgaggacacttacggctcgcacgaggtcaagttgccagccggtgactgcgtgctctatccctcgaccagccttcatctcgtcactcccgtgacgaggggaacgcgggttgcgtctttcttctggctgcagagcatgatacgggacgatcaagcccggagcatgatcttcgacctcgacaccgcgatacaggcgctggtggaacggctcgggcgtgacgatcccgaaacggtcaaattgacgggtatctatcacaacctcattcgctactgggccgaagtatga

SEQ ID NO: 5156 - DNA, 960 bp, BradyrhizobiumColbertium
atgaagaccatgacctcaagagcaagcctggccgccgctgcgatgctggcggtcgcctggctcgcatcccctgtttctgcccagacacagaccccgccgtcgccggcgacgcagcaaacggctgcgccgcctgcggccagcccggctccggcagctgccccctcggcagttgcccgctcggaaactgcgcccgcggcctcggccgcaccgcccgtggtcacaacgccggcgccggcaaagtccgagtccgcggccggcgttgcgcctgccatgaaggaattgtcgccctggatgatgttcatgtcggcggacatcatcgtgaaggcggtgatgatcgggctcgccttcgcgtcgctcatgacctggaccgtcttcatcgcaaagtcgatcgagctgtcggtcgcttccaccaaacttcgttcggccctgaagaagattggggacgcgcgctccctctccgaagcgcagatggcgctcggtgccaaggagggcatcctgccgtccttcctggcggcggccctgcgcgaggcgcggatgtcggccggcctgtccagcgatgccggcatcaaggagcgcgctgcatccagcttttccgagatcgtgcgtgcggaacagcgccgcatccggatcggcatgggcgtgctcgccacgatcggctccacgtcgcccttcgtcggcctcttcggcacggtctggggcatcatgaacagcttcatcggcatctcgaagtcgcagaccacgaaccttgccgtcgtcgcgcccggcatcgccgaggcgctgctcgccaccgcgatcggcctcgtcgctgcgattcccgcagtcatcatctacaatcacttttcgcgcgtgacgaagggctatctcgagctcgtcagccgcgcctcgggcgcggcggggcggctgctctcgcgcgatctcgaccgcagccacggcagtgtgcattcgcgcgcggcggagtga

SEQ ID NO: 5157 - DNA, 459 bp, BradyrhizobiumColbertium
atgggtgtttcgctcgcagacaacgacggcgaagacgacgatttctcggaaacgcatgacatcaatgtcacgccgttcatcgacgtcatgctggtgctgctgatcattttcatggtcgcagcgccgctctcgaccgtcgacctgccgatcgatctgccgacatcgagcgcgacgccgcagaagaagccggacaagccgacttatctcagcatcaagcccgatctgacgctcgcgatcggagagaacccggttcaccgggccgagttgatagggacgctcgacggcctgtcagacatgagcaaggacaagtatgtcttcctgcgcgccgatcgttcggtgccgtatggcgagttgatgggagtcatggagctcttgcgctcgggcggctatacgcgggtgaagctggtcgcgctggaaggtgctccaggggcgcccgcggcaggccccgctcagccttaa

SEQ ID NO: 5158 - DNA, 774 bp, BradyrhizobiumColbertium
ttggcggccatggcggcgctcgcgctgcatctgggtggggcagcgctcgcgctggctcacttgcgcgtcgatgacgacggcgacggccttggtgcggtcggcgccgagttcgccgtggagatggcgtcgccaaaggcgcccgaaaccgaccttccacccgggccagacagcgaggccatgcaggagcagcaggcgcttcccgagcagaaggccgagaccaaggaaacggagcttccgaaggatcaggcacaggaggtcgaggatcccgaccgcgtcgtgaccgagaacgacgcgaagaagccgagcgaagacgatccgaagattcaggcggtcgagactccggccgctgaagcgtcgccgaaatcggtggcgaccgctcgtcagacgctggaggaggacgcgcgcgaggccgagaaggcgatggcgcctgtcatcggtatcggcaaggacatcctgaagctgacggccgactggaaccgcaagatcagcgcgcatctcacgctgcacaaggtcaatcctgaaggcaaggtgcccaacaaccagaaggtcaaggtgagcttcgccatcaaccggaagggcaacgtgctttcagtggatgtcgtggaatcgtcgggggacgcggcctacgatgcggcagcgatatcgatcgtccgcaagtcggaccccattccgcagccgcctgccggactgaccgacgaccggttcgaacgtaccgtcgacatcatcttcaccccgccggacgcgaagaagaaaaggaggactcagcgccagtag

SEQ ID NO: 5159 - DNA, 441 bp, BradyrhizobiumColbertium
ttggtcaaagctgccgatatgctcatcgcgcgacgcgccgacacccgcgcccgtgccgattttgccacctggaagatgatggcgaagctcaacgggtcgtccgcactgccgccggaggcccaggagttcctcgccagctacaagaacctgctggcgcaaatgagcgagggcgaagccaccgaggccaccatcggagcgatctacaaggcctattatgccgaaatgggcggcgcaggaaccccaccggacgtccgcccacgcccacccgaaacggcggcggacaacgttaccgcattccgccgcccggcgccgaagcagaagaagtccgcctccttcgcagcatcggcattcgccggcccccagaaacggccccttccggtggcgctgatcttcgcctgtctggtggtggtctacgtcggaattcggctctactggcgctga

SEQ ID NO: 5160 - DNA, 681 bp, BradyrhizobiumColbertium
gtgaatatatccttttatgacttgtcggtatgggttcttccgctcgtgctcgccatcaccttccacgaggccgcgcacgccttcgtcgcggaccggctgggcgacaacacggcctcgcagctcggccgcgtcagcttcaacccgatcaagcatatcgacccgttcggcaccgtgatcctgccggccatgctgctgttcgcgcattcaccgttcctgttcggctacgccaagccggtgccggtgaacttccgtaagctgaacaatccaaggctggacatggtctgggtggcgctcgccgggccggcgaccaacatcctgttggcgctcgccaccgctctcgccttccatgccttgcccctggtgcccgcgagcgcggcgaaatgggttgccgacaacctcaagaatgcgctcatcatcaacgcggtgctggccgtcttcaacatgatgccgatcccaccgctcgatggcgggcgggtcgcggtcgggctactgccccgccccctcgccgtgccgctggcccggctcgagccgttcggaatgctaatcctgatcagcctgttgatcctgctgccgcttgcaggttcccagttcggtctaaatcttgatgttatttccgcaatactgcggacgttgaccggttatgtgattcaggctgttctcttcctgaccggcaacgcgtag

SEQ ID NO: 5161 - DNA, 459 bp, BradyrhizobiumColbertium
atgccggcccggctcggcgaagcttatgatctcgtcattgccatgcatccggaaggacacggcgacggcgaactgctgcggcgcgagcggccggtctgggccgcaggcgcgtcatacccggtcgccgcaccgcacgacatcctgcccgtcgcgctctatccgccgggctgcctgttccggcaatgggctattgaggccctcgatgcggccgcccggccgtggcgccttgccttcgtcagccggacacttgcggcggtggtagcgatcgcggcacagggcctcgcaatcacggtcgtgaaggtgggcaccctgcctcctcgcctgcgcgtcctgcgcgacagcctgccgccgctgccgaccgcggacatccgcctccatcgcgcgcgtaatctgtcgcgaccggccgcactgctggcggaccatttgcaacgggcaatttcggaattcggcgccatataa

SEQ ID NO: 5162 - DNA, 393 bp, BradyrhizobiumColbertium
atgaccgcggccgacctcgaccccgaccttctgaaggccttcctcgccgttgcggagcatcggtcgttcacgcgcgccgccacgatcctcaaccgcacgcaatcggcggtgagtgtccagatcaaacgtctcgaagaccggctggacgtcaggctgttccatcgcacgaggtcgggcgtggcactgagcgcagcgggtcaggagctgcttgtctatgccaagcggcttctcgacctcaatgcagaggcagtcgatgcgctccgcccgcgcaggcgcgaagccgtcgtccgcctcggggcaatggacgactacggtacaatcgtcattccacctttgcttgcgtactttgccagaagctatccggagatccgggtcgagatagataccggctaa

SEQ ID NO: 5163 - DNA, 912 bp, BradyrhizobiumColbertium
gtggccgagatccttggcgtttttgctgcggtgttgtcgagcgcgctgggtgggacctccatcggtgccacgcgttatctcgtcgggagcatcgatccgctcgcgatcggctcgttccgcttcggcatcggcttcctcctgctgttgcctctcgcgctgctgcgcgccgatcactggcccaagcgagaggactgggccgccgccgtcggcctcggaattctattcttcgccctgtttccgatcctgttcaacgcctcgctgatcttcacgaccgccccgcgtggcgcgcttgcgttgtcgacgctttctttgttgtcgctcgtgatcggggccgctctcggcgccgaagccctgacctggcgcaagtcggtgggtgtcgtgatcgcgacgtttggcgttgcggtggcgcttctctccgatctgacttcggccccgtcgggagcctggcgcggagatctcctgatgacagcggctgcgctgtgcatggcgctctatggcatctggtcgaaaccgctgatccgccgctccagctcgatcgccttcacgaccatcagcatggcggcgggtgctgcctgcttgatcctgctctcctgcgtccgcggcagttttgccccggtcgcgaacttcggtgcgccgcaatggctggcggcgctctatctcggcggcttcggtgcggcgctgaccttccatctctgggccttcgctctggagcggacgacgccgacgcgcgtcgcgatctcagtgacggtcaatccgatcacggcatcgctggtcggagcctggctgctgaacgaaccgctgcgctggaatctcgcggcgggcatcgttgcggtctttgccgggatctggatatcgacgacgaccggacggcgcgatcggccgggaggcgcgtccgcctcacaccagacctga

SEQ ID NO: 5164 - DNA, 420 bp, BradyrhizobiumColbertium
gtgggcgcgcaacctattaaggtcatcatgatccgggaaggcggatgcctgtgcggcgcggtgcggttcaaggcggaaggcgagccgctcaacgtccgcatctgtcattgccgcatctgccagaaggcgatgggctcgccctacttcgcccgcgcgcagttcgatcagcgcgcgctcagcgtcgagggtgagaccgcacgctacgcctcctccgagaacatcgaccgcgtgttctgcaagcactgcggcacgcgcctgttcgcatggcggcgcaacggaacgctggcgggggtcgccctcgccactttcgatgatcgcaatgctttcgccccgaccgagcacatctgggtgagcgagaagctcacctgggtgaaggtcgatgacggattggtgcaatatccgggaacgatcccgacataa

SEQ ID NO: 5165 - DNA, 747 bp, BradyrhizobiumColbertium
atgaacaagatcgatctcgacggccgcgtcgccattgtcaccggcggtgcgcagggctttggccgcgccatcaccgagcgcttcgtcgcctcgggcgcaaaggtcgcgatctgggacttcgaatcgacgctggcggagaagacggcaagcgaagtcggtggcgagacgaaagtcttcaaggtcgacgtcaccgacacccaggcagtcgatcaggcccgcgatgcaactctggccgccttcgggaagatcgacattctcgtcaacaatgccggcatcgccggtgtcaacaagccggtctgggagaccgacctggaggaatggcgcaaggtgttgcgcatcaacctcgacggcccgttcatcgtaagcaaggcgatcgtgcccgtgatgctcaagcagaaatacgggcgcatcgtgaacatcgcctcgatcgccggcaaggaaggtaaccccaacgccgcacactattcggcctccaaggccggcctgatcgcgctgacgaaatcgctcggcaaggaactggcggcacacgacattctcgtcaatgcggtgacgccggcggcggcaaagaccgcaatcttcgaccagatgactcagcaacacatcgatttcatgctgtcgaagatcccgaaaggccgcttcgtgctcgtggaagagctcgccgcgatggtcgcctggctcgcatccgaggactgcgcattctcgaccggcgcggtgttcgacatttcgggtgggcgcgcaacctattaa

SEQ ID NO: 5166 - DNA, 732 bp, BradyrhizobiumColbertium
atggcagaccgcctcaagggcaagcgcgccgtcgtcacggctgctgcggctggaatcgggcgcgcctgcgccatcgcgttcgcgcgcgagggcgcaaccgtcatcgccaccgacatcaacgaggccgggatcgcgaccctgaccaaggaaggcatcactgaagtcgccaagctcgacgtccgcaacaccgccgaggtcaatgcgttcgccaagcgcgtcggcaggatcgacatcctgctcaacgcggccggcttcgtgcaccacggcaccatcctggactgctccgaagaggatttcgacttctcgttcgacctcaatgtcaagtcgatgcaccggaccatcaaggcgttcctgccggagatgcttgcggggggcggcggcagcatcgtcaacatctcgtcctgcgcggccttgaggccgcccgccaatcgctacgtctacagcgcatcaaaagcggcggtgtcgctgctgacgcgtgcggtcgcgctcgacttcatcaccaagggcatccgctgcaactcgatctgtcccggcaccgtcgagacgccctcgatgctcgaccgcgccgcagcacaagggccgcagggcaaggagatgttcatctcccgccagaagatggggcggctcggcaccgccgaggagatcgcggccatggcggtctatctcggcagcgacgagagcgccttcaccaccggcgtcgacctcgtggtcgacggcggctacatgctctga

SEQ ID NO: 5167 - DNA, 1830 bp, BradyrhizobiumColbertium
atgacaaagaagccaaccaatgggcatgccgccggcagcaacggctcccgccgccatcttcgctcgcaagaatggttcaacaacccgcacaatccgggcatgacggcgctctatatggagcgttacctgaactacggcctcacccgcgccgagctgcagtccggcaagccgatcatcggcatcgcccagaccggcaacgacctctctccctgcaaccgccaccacatcgagcttgcccatcgcgtccgtgagggcatccgcgaagccggcggcattgcgatggaattcccgacccatccgatccaggagaccggcaagcgcccgaccgcggcgctcgaccgaaacctcgcctatctcggcctcgtcgaaatcctctacggctatccgctcgacggcgtggtgctgaccaccggctgcgacaagaccaccccggcctgcatgatggcggcggccaccgtgaacctgcccgcgatcgtgctgtcgggcggaccgatgctgaacggctggcatgccggcgagcgtaccggctccggcaccatcgtctggaagtcgcgcgagcggcttgccgccggcgagatcgactatgaagagttcatggagatcgtggcttcctcggcgccctcggtcggccattgtaacacgatgggcacggcctcgaccatgaacgggcttgccgaagcgctcggcttctccctgcccggctgtgcggcaatccccgcaccctatcgcgagcgcggccagatcgcctacgagacgggcaagcgcatcgtcgagatggtctgggaggatctgaagccttcggacatcctgacccgcaaggcgttcgagaattgcatcgtgatcaattccgcgatcggcggctcgaccaatgcgccgatccacatcaatgcgctggcccgccatatcggcgtcgagctttcgatcgaggactggcagaaggtcggccatgacgtgccgctgctcgtcaacatgcagccggcaggcttctatctcggcgaggaattccaccgcgccggtggcgtgccggccgtggtgcgcgagctgatgaagcacaagcggatccacgaggatgcagtcacggtcaacggccgcggcatcggcgagaattgcaggaatgcgcccgcgcctgataacgacgtgatctgggcctacgacaagccgctggtgaaggacgccggcttcctggtgctgaagggcaatctgttcgattccgcgatcatgaagaccagcgtaatctccaaggagttccgcgaccgctacctcagcaatccgaaggacccgaacgccttcgaaggccgcgccatcgtgttcgaaggacctgaggactatcacgagcggatcgatgaccccgcgctcgacatcgacgagcactgcgtgctgttcatccgcggcaccggtccgatcggctaccccggcggcgccgaggtcgtgaacatgcagccgccggcagcattgatcaaacgcggcatcctgtccctgccctgcatcggtgacggccgccagtccggcacctcgggctcgccctcgatcctcaatgcttcgccggaagccgccgccaatggcggtctcgcgatcctcaagaccggcgacacggtgcggatcgatctcaacaagggcagtgccaacatcctgatctcggacgaggagctgaagaagcggcatgccgagctcaaggccagtggcggcttcaagcacccgccgaaccagacgccgtggcaggagatctaccgcaacaccgtcggccagcaatcgaccggcgcctgcatggagctcgccacccgctatcagaacgtcgccggtacgtttggcgtggcgcgggataatcactag

SEQ ID NO: 5168 - DNA, 171 bp, BradyrhizobiumColbertium
atgcccattggttggcttctttgtcattggtttctcctgcaatgcaaacgcaccggcgtccgtctcacggtagcggcatgtgcgatgcccaacggcgcgagcgatgatctgccgtcccgctggcggggtcgtttcctcataagtgcaatactagtcgtggctacttggtaa

SEQ ID NO: 5169 - DNA, 168 bp, BradyrhizobiumColbertium
ttgcacagacgacatctagctccctcctcgaaagtccacgacgcctccaagcgccgcgaccgtcttgttttttcagacttcaccgaacgaagcccgatcttagcgggcgacattgtcggtagtttgtgcggttttggcaatttgtctttggttagtcgttgctggtag

SEQ ID NO: 5170 - DNA, 1068 bp, BradyrhizobiumColbertium
atgtcgtctgtgcaaatccgcgacgtgcggaaatcgttcggcaatttcgaagtcctgcacggcgtgacgataccgatcgaggacggccaattcgtcgtcctggttggtccctccggctgcggcaagtcgacgcttctgcgcatgctcgccggtctcgagaacatcacctccggcacgatctcgatcggcgatcgcgtcgtcaacaatgtccagcccaaggagcgggacatcgcgatggtgttccagaactacgcgctctatccgcacatgacggtcgccgacaacatgggcttctcgctgaagctgcggaatgccagcgccgacgagatcaacaagcgcgtcaagcgcgcggccgagatcctggcgctgtcgccgctgctggaccgctacccgcgccagctctccggcggccagcgccagcgcgtcgccatggggcgcgccatcgtgcgcgatccgcaggtgttcttgttcgacgagcctttgtcgaacctggatgccaagctgcgcgtcgccatgcgcaccgaaatcaaggaactgcaccagcggctgaagacgacgaccgtctacgtcacccacgaccagatcgaggccatgaccatggccgacaagatcgtcgtcatgcatgacggcatcgtcgagcagatgggcacgccgctcgagctctacgacaagcccgacaaccagttcgtcgccggcttcatcggctcgcccgcaatgaacttcctcaaggggcatgtgcgcgtcaatggcgttgccaccttcgagggaccgaacggcgtcaagctgccgctcaagacggcgccgacggcgtccgacggccgtcccgcggtctacggcgtgcggccggagcatttcaccatcgccgacgatggcgccgaggccgagatcatcgtggtcgagccgaccggctcggagacgcaggtgttcgccaaggtcggtggcgagcaggtggtcgcggtcttccgcgagcgtcaccagttcaacccgggtgacaagatacggctgaagcccgacccggcgctggtgcacttgtttgacgacgcgacggggaaacgcctcaacgcgtag

SEQ ID NO: 5171 - DNA, 1320 bp, BradyrhizobiumColbertium
atgcaagactttacccgccgaacattgcttcaaggcggaacggcactggctgcgaccggcatgctgaccgggccggcactgttcgacttcgccagggcctgggcgcagagcgcgccctggaaagccgagcccggcgccaagctgaccgtgatgcgctggaagcgcttcgtgccggcggaggacgatgcgttcaacgcaatggttgcggccttcaaggctgcgaccggcaccgagatgaacgtgttcagcgaatccttcgaggacgtgcagccgaaggcctcggttgcagccaacaccggttcggggctcgatctcgcctggggcctgcacacgctgccgcagctgttcccgaccaaagtgctgaagatgaacgacgtcgccgattatctcggcaagaaatacggcggctggaccgacgcggccgccaagacctgcaagcagggaaatgactggctcggcatccccgtcgcgaccaacggcggttacatgacgtaccgcaagtcggcgctcgacaaggccggcttcaaggaattcccgaaggacttccccggcttcctcgagatgtgcaaggcgctgaaggcgaacaacacgccggccggcttcgcgctcggccacgcatcgggcgacggcaattcgtggctgcactgggtgctgtgggggcatggcgcgtacacggtcgaccagaacgacaagatcgtgatcaattcgccggagacggcgaaggcgctggaatactgcaaggcgctgtacgagagcttcatcccgggcactgcgtcctggaacgactcctccaacaacaaggcgttcctcgctggcgaactctattgcacagcgaacggaatctcgatctacgtcgccgccaagacggatgcgagcaagaaggagctcgctgcggacacctatcacgcgctctggccggtcggtccggtcggcaagccgactgagctgcagctggcgctgccgatcctcgcgttcaacttcaccaagtatccgaacgcggcgaaggcattcgtcgccttcatgctggagaaggagaactacgagaagtggctggatggcgcgcagggctatctgacgcagaccttgaacgcctatgagtccgcgccgatctggacagcggatcccaagaacgccgtgttcgcacaggcttcaaagcgcacgctgcccgcgtccggtatcggcacggtcggcgagaaggcggcaaccgcgatcgccgacttcatcgtcgtcgacatgttcgccaattactgcaccggcaccaaggatgcgaagggtgcgatggcggaagccgagcgccagctgaaacgcatctatcgctga

SEQ ID NO: 5172 - DNA, 954 bp, BradyrhizobiumColbertium
atggctgatgtcgcaattccccgggccaagcctcagttgagcgaggacagcgcctggatccagctcaaacacaatcgcaactggctcggcttctggttcatggtgccggccatggcgttcctgatcttcttcctggcttatccgctggggctcggcatttggctgtccttcacggacacccgcatcggcagggtcgggcaattcgtcgccaccgagaactatgagtggctctgggacgactctatcttctggttgtcggtattcaacacgctgctctacacgttcgtcgccagtgccttcaaattcggcatcgggctctatcttgcgctgctgctcaacgagcatatgccgttcaaggcgatgctgcgcgccatggtgctcatccccttcatcgttccgacggtgctgtcggctctcgccttctggtggatcttcgactcgcaattctcgatcatttcctggtcgctgaagcagctcggactgatcagccagaacatcaatttcctgggggacaccacctgggcgcggatctgtgtgatcttcgccaatgtctggcgcggcgttcccttcgtggcgatcacgctgcttgcgggattgcagaccgtctcgccatcgctctatgaggccgcaacgctcgacggcgcgtcgcgctggcagatgttccggcacatcacctatccgttgctgacgccgatcatcgcggtcgtgatgacgttctcggtgctgttcaccttcaccgacttccagctgatctgggcgatgacgcgtggcggcccggtcaacgccacccatttgatggccacgctgtcttaccagcgcgcgatcattgccgggcagctgggcgagggagccgcgatctccagcgcgatgatccccttcctgctcgcagccatcatggtctcgtggttcggcctgcagcgcaggaaatggcagcagggagagaacaatgactga

SEQ ID NO: 5173 - DNA, 936 bp, BradyrhizobiumColbertium
atgactgatctgccgaccaggtcgattgatctcaaggccaccctgtcggcgtcctctccgaccgcggcgaaggacgaccatagcgagggcatgagctatctgcagtcggtgccgcgcaggatggtgacgctgtatctgccgctcacgatcatcgtggtcgtcctgctgttcccgttctactggatggcgctgacgtcggtgaagcccgacgagcagttgctcgacctcgacaagtacaatccgttctggacttggaatccgacgttcaagcactttcacaagcttctgttcgagagctattacccgcactggctctggaatacgatgtacgtggccgtgtgcgcgacggtgctgtcgatctttgcgagcgtgctggccgcctacgcgatcgtgcggttgcgctacaagggcgccaatctcgttggcgggctgatcttcctcgcctatctggtgccgccgtcgatcctgttcattccgctcgccaccgtcgtgtttcagtacggcctgttcgactcgccgcttgcgctgatcctgacctatccgaccatcctgattccgttttcgacatggctgctgatgggttatttcaagaccatcccgttcgagctggaggagtgcgcgctgatcgacggggcaagccgatggcagatcctggtcaagatcgtgctgccgctcgcgatccccggcctgatctcggccttcatcttctgcttcactttgtgctggaacgagttcatctacgccctgacgttcctgcaatcgaccagcaacaagacggtcccggtcgcgatcgtcaacgagttcgtcgacggcgacatctaccgctggggctcgctgatggccggagcgctggccggctcgctgccgctcgtgatcctttacgccttcttcgtggagcattatgtgtcggcgatgaccggcgccgtgaaggagtga

SEQ ID NO: 5174 - DNA, 987 bp, BradyrhizobiumColbertium
ttgcacattctggttctgggcgctgccggcatggttggccgcaaactctgcgaacggctgctgcgcgacggccggctgggcaagagcgacatcaccaagctcaccatgcatgacgtggtcgaaccgaagaagccggagaacgccggcttcccggtcgagaccatctcgggcgatttcgcggtaccgggcgcggccgaaaagctggtcgccggccgccccgacgtgatcttccatctcgccgccatcgtctcgggcgaggcagagctcgacttcgacaaggggtatcgtatcaacctcgacggcacgcggatgctgctcgacgcgatcaggctcgcgggcggcggttacaagccacgcgtggtcttcacgtcctcgatcgcggtgttcggtgcgccgttcccggatgcgatcggcgacgagttcttccacaccccgctgctcagctacgggacccagaaggcgatcggcgaattgctgctcgccgactattcccgtcgcggcttcctcgacggcatcggcattcgcctgccgacgatctgtatccggcccggcctgccaaacaaggcggcctcgggtttcttctccaacatcctgcgcgagccgctggccggcaaggaggcgatcctcccggtgtccgaggacgtccgccactggcacgccacgccgcgctcggccgtcggcttccttctgcacgccggcaccatggacctcgccgccgtcggcccgcgccgcaacctgaccatgccgggcctgtcggccacggtcggcgagcagatcgccgccttgaagcgggttgccggcgagaaggtcgccgcgcgcatcaagcgcgagccggatcccttcatcgtcggcatcgtcggcggctggccacgcaatttcgatccgaagcgcgcacgcgagctcggcttcaccaccgccgagaagaacttcgacgacatcattcgcattcacatcgaagacgagctcggcggcaatttcgttccctga

SEQ ID NO: 5175 - DNA, 969 bp, BradyrhizobiumColbertium
atggcgagcgttgcttgcatcggcgaatgcatggtcgagctgaggcaggcgcaaggaggcgcatctgccgggcagggcggcggcctgtactcacggggcttcggcggcgacaccctcaacacggccgtctatctggcgcggctcgacatcaaggtcgattatttcaccgcactcggcgatgacggtctcagcgacgagatggtcgcggcctggaatgcggaaggcgtcggcacgcggcgtgtcgtgcggctggcaggcaagctgcccggcctctacatgatccagacggatgcaaagggcgagcgccagttcttccactggcgcgacagcgcggctgcgcggcagctgatgagcctgccggagaccgacgagatcctcaactcgctgatgagctatgacgtcgtctatctctccgcgatcacgctctcgatctacgacgcacccggacgcgagcggctgctcgccgcgatcaagcgcgcgcgcctgctcggcacccgcttcgtgttcgacaccaattttcgcgcacgcgggtggcccgatcgcgacgttgcgcgcgaggtgtttgccgcggcgcttgcgactgccgacatcgtgctgacctcgaccgaggatctgctcgcactctatccgggcgagagcgacgatcaactgatggcgcgcattcccagccccgagctggtgttccgcctggccgagccggtgagcctgctacgctttcccggcgggaccagcgaggttccggccgagccgatgaccaagcccgtggtggacacgactgccgccggtgacagctttgcggccgcctatattgcggcccgcctcggcggttccgatccggtcgaggcggcccaggccgggcatcgcctcgccggcgtcgtgatttgctatcccggtgccatcattccgggctatgccatgccgccgaagaaacggcaccggccggcgccctctcgccaagccaccaagtga

SEQ ID NO: 5176 - DNA, 651 bp, BradyrhizobiumColbertium
atgaccacgagtgcccaacagaatcacctcgtcgccctgttcaaggccgcgacggtcattcccgtcctgaccatcgagcgaatccaggatgcggtgccgctggcgcgtgcgctggtcgccggcggcgttcgcacgctggaggtgaccctgcgcacccccgttgcgatcgaggcggcacgggcgatgatggcggaggtgcccgaggcggtcgtcggcattggcacgatcctcaacccggccgacttcacccgtgtcgagaagcttggcgtggcgttcggcatcagtccgggcctgacccccgatctcctgaaggtggcgaccgacagctccttgcccttcgcgccgggcattgccacggcctccgagctgatgatggcgctgtcctacggtttcgacgtcgccaaattctttccggccgagcaggccggcggcatcaagggcctgcgcgccctcggcgggccgttcccgaacctacgcttctgtccgaccggcgggatcggtgaggccaatgcggcgacctggctggccgagcccaacgtggtcgcggtcggcgggtcctggctttgcccgccggcggagatccgggctgggaactgggccggcataactgccatctgcgagcggacagtcaaggcgctgaaagccgcgtga

SEQ ID NO: 5177 - DNA, 1170 bp, BradyrhizobiumColbertium
atgaccgccagcatcgtcggatgggcgcatacaccgttcggcaagttcgacacggagaccgtggaaagcctcgtcgtgcgggtcgccaatgaggcgctggccgacgccggcgtttcggctggtgatgtcgacgagatcgtgctcggtcatttcaatgccggcttctctccgcaggacttcaccgcctcgctggtgcttcaggccgaccccaagctgcgcttcaagccggcgacgcgcgtcgagaatgcctgcgcgaccggctccgccgccgtccatcagggcctgcgcgcgattgccgcaggggccgccaagatcgtcctggtcgtcggcgtcgagcagatgacgcgcacgcccggtccggagatcggcaagaacctgctcaaggcctcctatctgcccgaggacggcgacacggtcggcggcttcgccggcgtgttcggcaagatcgccagctcctatttccagaagtatggcgaccagtcagatgcgctggcgctgatcgcagccaagaaccacaagaacggcgtcgccaatcccttcgcccagatgcgcaaggatttcggcttcgacttctgccgcgccgagagcgagaagaacccttacgtcgccggtcccctgaagcgcacggactgctcgttggtctcggacggtgccgctgcgctggtgctggccgaccctgagacagccaaaaccatgaacaagtcgatcggtttccgcgccaccgcgcacgcccaggacttcctgccgatgagcaagcgtgacatcctccagttcgagggctgcacggtcgcctggcagcgcgcgctggaaaaagccggtgtgacgctctccgatctctccttcgtcgagacccatgactgcttcacggttgccgagctgatcgaatacgaagcgatgggcctgacgccgaaggggcagggcgcccgtgccatcaaggaaggctggacgctcaaggacggcaagctcccggtcaatccctccgggggcctcaaggccaaggggcacccgatcggcgccaccggcgtttccatgcacgtgatgaccgcgatgcagctggcggggcaagcgcccgaaggcatgcagctcaagaatgccaagctcggcggcatcttcaacatgggcggtgctgccgtcgccaactacgtctcggtgctggagccgctgaagtag

SEQ ID NO: 5178 - DNA, 207 bp, BradyrhizobiumColbertium
atgagcactgactacgaagactcgctgtcgatggacgcactcaacgatcgtattgcgatcctcgaggacaatattcgccagctcatcgagcaggccgcggcggcctcgggcgagcagagcgagtcgcgcatcgccgaccggatcacccagcagaacgacgagctcgatcggctcctcaagatccgcgaatcccgtcagaagaaatag

SEQ ID NO: 5179 - DNA, 1209 bp, BradyrhizobiumColbertium
atggggccactgaagggcgtcagggtcatcgacatgaccaccgtgctgatggggccctatgcgacccagatgctcggcgactacggcgccgacgtcgtcaaggtggaatccctggagggtgacgtcacacgcctgatcggcccgatgcgtcacgccggcatgggtccggtgtttctcaacaccaaccgcagcaagcgctcgatctgcctcgatttgaagaagcccgccgggcgcgaggccgtgctgagattgctgaaggacgccgacgtcctcgtctacaacgtccgtccgcaggccatggcacggctgcagctcggctacgacgtcgtctctgccatcaatccccgcctggtctacgccggcgtgttcggtttcggccaggacgggccctatgccgcaaaacccgcctatgacgatctgatccagggcgccaccgcgctgccggcgctgatggcgcagaccggcgacggcgtgccgcgctacgtgccgaacgcgctggtcgaccgcatcgtcggcctcaccgccgtcggcgcgatctgcgccagcctcgtccaccgcgaccgcaccggccgcggccagcgtctggacatcccgatgttcgagaccatggccggcttcgtcatgggcgaccacatgggcgggctcaccttcgagccgccgctcgacaaaggcggctatgcccgccacctctcgcgcgaccgcaggccgtacaagacctcggacggctatctcagcgtcatcgtctacaacgacaagcaatgggagaacttcttcaaggccacgaagcgcgacgatcttcgcgccgatcccaaattcgcaaccttcgccggccgcgccgccaatatcgacgtggtctacgccgagctcgctcgcatcttcgagacacgcacgacggcggaatggatcgagctgctcaccaaggccgacgtcccggtgatgccgatgcacgaccttgcctcgatgttgcacgacgagcatcttgaggcgacgaactttttcccggtggtgaaccatccaacagaaggcgaaatccgcagcatgaaggtgacggcgacgtggtcagagaccgaagccgagccatcgcgcctggcgccgcggctcaacgagcatggcgccgagatcctgcgcgagatcggttattccgccgacgagatcgcagccatggtgcgcgacggcgtcacgcgctcggcgccggaggaggagaggtag

SEQ ID NO: 5180 - DNA, 1137 bp, BradyrhizobiumColbertium
atgagcttcatcaccggcgtcggcctcacaccgttcggcaagcacgaaggctcgtcctcgctcgatctgatgagcaaggcggcgcaagccgcgctggacgatgccgggctgaagcgttcggatatcgacggcatcctctgcggctactccaccgtctcgcctcacatcatgctggcgaccgtcttcgccgagcactttggcatccgtcctgcttatgcccacgccgtgcaggtcggcggcgcgacggggctcgcgatgacgatgctcgcgcatcacctcgtcgaatccggcatcgtccgccacgtgctcgtcgtcgcgggcgagaaccgcctcaccgggcagagccgcgatgcctcggtccaggcgctggcgcaggtcggacatcccgactacgaggtgccgctagggccgactattcctgcctattatggcctcgttgccaaccgctatatgcacgaatacggcgtgaccgaagaggaccttgcccagttcgcggtgctgatgcgcagccacgcctgcacccatcccggcgcgcaattccacgatcccattacggtcgccgacgtcatggcctcgaagccggtggcgatgccgctcaagctgctcgactgctgcccggtctccgatggcggcgcggccttcgtcatcagtcgcgaacggaccgggcaagcgggcgtgcgcatccgcggctgcgcccaggcccacacccatcagcatgtcaccgcagctcccgccctcagcgagctcggcgccgagatctcgatcgcgcgtgcgaaggacgccgcgggcctggcgatctccgacgtgcgctacgccgccatctacgacagttttacgatcacgcttgcgatgctgctggaggacctcggccttgccgggcgcggtgaggctgccgcccgcgttcgatcaggccatttcggccgcgacggcgcgatgccgctgaacacccacggcggcctgctcagctacggccattgcggggtcggcggcgccatggcgcatctggtcgaagcgcatttgcagatgacgggccgggcggctgaccgacaggtgcgggatgcgtccattgcgctgttgcacggcgacggcggcgtgctgtcctctcacgtgagcatgttcctggagcgggtgcgatga

SEQ ID NO: 5181 - DNA, 357 bp, BradyrhizobiumColbertium
atgagcgagcgtctgacggactggaccaagggcgaagaggcgatcacctaccagacctgcatctcatgcggtcacgtgcagtatttccatcgcgccttctgcgcggcctgcggtgcatccggcccgcgcgcgcagcgcgccagcggcaagggcagggtgtacgcgacctcgctggtctgccgggccgccacatcagagacgcgggcgcacgtaccctacaacatcctgctggtcgattgtgcagagggttttcgcatgatggcgcatggcgacgacgatctcgccatcggcgattcggtcaccgcaagcttcaagccctttgccggccggctcgtgccgttcttcacgaggtcgtag

SEQ ID NO: 5182 - DNA, 528 bp, BradyrhizobiumColbertium
atggcccgtatcgactacagcgacccgtccaaggcatccgaccgcacccgcgagctcctcggcaagaaccgcaatgccaatatcttccgcatgatggcgcactcgccgagctatctcgagcagtactgccgccttggcggcgccatacgccacaagggcgagctcgacccgatcgtgcgtgagcttgcgatcacccgcaccggaattctgtgcgaggctccgtacgaggtcgtcgcgcacaagcgcatcggcaagaatgtcggcgtcaccgacgagcagaacgaggcgctcgagaactggcaggcggcgtcttgcttcgatgaggtgcagcgcgccgcgctcgccttcaccgacgagatcgtgaagctgcgcaagccgaccgatgcgacgttcaaggccatcgcatcgaagctgacgcccgctgcattggtcgaattgcagctctcggtgggcttctacatcatgacctcgaaattcctggagaccttcgagatcgatctccagcccgtcaccgaagtggtgggctga

SEQ ID NO: 5183 - DNA, 303 bp, BradyrhizobiumColbertium
atgacgatcgatgaatatgtggcctgggccgcgagcatagcgaaagtcgacgagcatccgtccaacgagcggctgtcctatctcggtcttggccttgccggcgaggccggcgaggtggccgaccacgtcaagaagctcttgcgagacggctggctggaccaggcgggcctcgtcaatgagctcggcgacgtcatctattattgggcctgcttgtgtgcggccaccgggcagcagccgtccgaagtgctgaaggcaagtgcggcgcggatcaatcgccggctgagcgaggccgcgagtcgttga

SEQ ID NO: 5184 - DNA, 1848 bp, BradyrhizobiumColbertium
atgaagccgcaatcgcctctcgccgccgcctggacccgctcgaagccgccactgctgcggtttctggaccattgcctcagtgaattctcggccgagacctcaggcagcgttgccgattacattcccgagctgagcaaggcggaccctgcctgtttcggcatcagcctggcgacgctggatggccatgtctatgaggtcggcgacagccgggtgcccttcaccatccaatcgatgtcgaagcctttcgtgttcgcgctggcgctggacctgcttggcgccggcagggtcgagagcgcgatcggggtcgagccctcgggggaccccttcaactcgatccggctcaactccgagaaccatccgttcaatccgatggtcaatgccggcgcgatcgcctgcaccgggctgatctacgacagcaggggcacggaggccttcgagcagatccgtgccgccctcagccgctttgccggccgcgaccttgccgttgacgaggcggtctatgcttccgagagccagaccggcgaccgcaaccgcgccatcggctatctcttgaagaccaatgcggtcatctcggacagcgtcgctggcgtcctcgacgtctatttccgacaatgcgcagtgctggtcaccgcgcgggacatcgcggtgatggccgcgacgctcgcgaaccgcggcattaaccccgtgaccggcgagcaggtgctcacgccttacgcgatctcgcgcacgctctcggtgatgacgtcgtcgggcatgtacgattatgccggcgaatggatctaccggatcggcattcccgccaagagcggcgtcggcggcggcattctcgcagcgctcccggcccggctcggcctcggcagctattcgccgaagctcgacaagcacggcaacagcgtgcgcggcatcaaggtctgcgaggcgctgtcctcgcattacgacctgcacatgctcaaccgcagcgatgacgcccgcaacgccgtcatagcggactacaacatcggcaagagcccgtcccgccgcgtgcgccggcctcaggagcgcgaaatcctggcggcgcatgagcaggaagtgcggatcatcgagctggtcggcacgctgtcgctctccgcggtcgattacgtctcgcggcggctcgccgggcgaccgcggccgcaattcgtgatcttcgatctccatcgcgtcacctcgaccacgcgcgccggggcgcggctgatcgccgaagcgttcgaggagcttgcggccttgaacgtgaccgtcgtgctgtcaggcgtcaggcgcgcctccaaggaatgggacaccttgcgggaatggacggcggagctgaagaacgtccgggacttctacctgctcgacaccgccattgaatgggccgaagaccagatcgtgtatcgctacggcggctcgatcgattttcacgagaccaccgagctcgccgagcaaccgctgctgacagggttgagcgaggaagaactgaccgatctggcctcgctctgcaccatcagggcctatccatccggcgcgaagattctcgcggccggcgaccccgccgataccctttgcttcctgcgcagcggcgcggtgcacgtcaccttgcccgacggcatccggctggcgacactcaccgccggcatggcgttcggcgaaatggcgctgctggagccgacaaggtcggccgatgtgtccgccgacctggcagcaacgacgtacgaagtgccgctgaaggatttccagcgcttccgcaagcagcacccgcgcgccagcgaatgcatcatgcgcaatctggcccagctgctggccgaccgcctgatcgtcgccaacgccaaggtcgacatattgacgtcgacgtag

SEQ ID NO: 5185 - DNA, 2073 bp, BradyrhizobiumColbertium
atgtctgtttcaatctccaccgccccgcaagacgaggccaagcgggtcgtcttcgacgatccgcacggtgccgccggcaacatgcaggaggcagaggtcacgcgcgtccgcacgcttcgcggcctctggcgatgggcgctggtcggcgcgacagcggcgaccatcctgctgtgcatcaaccagcagttctcgctgcgcttcttcatcggatacacccagctcaacacggagtatttctacctcctgatcgcgttgatgctgccgttcacgttcctgatcttcccaggggccgaacgagcgccgctcgatcgcattccctggtatgacctcgtcctgttcgtcgcgaccttcgcggcggcgctcatgctgatgaccaatgtgcgcaaggccgcggaggccggctgggaattcggcggcgcgccgaccagcgtaatcgccgccggcctcgtgatgtgggcgatgctgatggaggcgctgcgccgcaccgggggctggagcctgctgctgagcgtctttcccttcacggtctatcccttgttcgccgaggccggctggctcggaccgttccgcggcacgcagtcgacgctggagcaggcgaccgcctatcacgtgctgtccggcgaaagcctgcttggcatccccatccaggccttcgccgataccgtgatcggcttccttgtgttcggcaccgcgctgatgatgacgggagccggcaaattcttcatcaatctctcgttcgcgctgtgcggcacgttccgcggcggcgcggcgaaagtctgtatctttgccagcggcctgctcggcatgatgtcgggctcgatcatctccaacgtgctcaccgccggcacgatgaccatccccgtgatgaagaagagcggcttccgcgcctcctatgccgccgcgatcgaagcctgcgcctcgaccggcgcggtgctggcaccaccggtgatgggcgccaccgccttcgtgatcgcgcagtttctcaatgtcagttacgccgaagtcgcgctcgccgccgtcattccggccgtgctgtactacatcggcctgttcatgcaggtcgatgcctatgccgcacgccacaatctgaagggcattccgcgctccgagctgccgcggatcatggatacgatcaaggacggctggtactacgtcttcgtcatcgcgctcctgatcgtcatgctgctctacttcaagcgcgagagccacgcgccattctatgcgaccgcgttgctgcttgttctcaaccagttcttttccaaggacacgcgctggacatttgccacgatcggcagattcctggaggtgaacgggcgcaccttcgtggagctcgctggtatcctcgccggctgcggcctcctcatcggcgcattctcgatgaccggcgtggtctcgagccttgccaacgacctgctgcatattgccggcgacaacgccttcctgctgctggcgatgtgcgcactgaccagcctcatcctcggcctcgggctgacaacgacggcctgctacatcttcctcgccatcctggtcgcgccggcgctggagaagctcgggctcaaccgcatggcggtgcacatgttcatcttctactggggcatgctgtcttccatcacgccgccggtcgcgatcgcttctttcgcagccgcaggcatcgccggttcgccggcgatgaagaccggctgggagtcgatgtgggtcggcagcatcatctatttcctgccgttcttcttcgtcttgaatccggccctggtgctgcaagggccgaacccatatctcgcagctcttggcctgatgggccttgccgccttcggcacgctgttcatctgcggtggcatccagggctaccagcccttcgtcggcaatttgcgcgccgcaggggcgctggaatggccgatccgcgtgctgctggtgatcggcggcttcgtggtcgcgacccccggcggcggaatcatgccgctgtcgcagatgcaggtgacgctgctcggcctcgggatcctgctgccgacgatcttgatcgcgcttcttctggtccgacgccagcccgaggtgccggacgggttgcgcgcaccctga

SEQ ID NO: 5186 - DNA, 1179 bp, BradyrhizobiumColbertium
atggagggaaacatgcttcgtggattgttcatgctcgcacctgccgtggtggcaggcatttcttttgcgtctacacgctgttcgttcgccgaggacatcaagctgccggcgacactgaccttcacggcctatgacaccggtacggccggcttcaacatcgcggtcggcgtaggcaagatgatgaaggacaagtacggcaccgacgtgcgcgtacttcccgcgggcaacgacgttgcccgcctcgcgccgttgcgcgccaagcgcgcggcatcggccgcgatgggatcaggcacctatttcgcgcaggaaggcgtgttcgagttcggctccaaggaatggggcccgcagccgcttcagatcctgctctcgagcgtcgactgcaattgcggatcgctcggcgtggccgccgacaccggcgtgaaggagctgaaagatctcaagggcaagcgggtcggcttcgtggtcggctcgcctgcgctgaaccagaattcgctcgcggtgctcgccttcgccgggctgacgcagaaggacgtcaaggtggtcgagttcgccagctacggcgcgatgtggaagggccttatcaacaatgacgtcgacgccgccttcggcaccaccatcaccggccccgccaaggaagccgagacctcgccgcgcggcctgatctggccgccgctgcccgccaaggacaaggaaggctgggcgcggatgcagaaggtcggctcgttcttcttcccgcagcttgcgacctgcggcgccggcatctcgccggagaagccggtcgagctcggcaactatccctacccgatcttcgtcgcctacgcctcgcaaccggccgatcaggtctatgcgatgacgaaggcaatgatcgtgaactacgacgcctacaaggactccgcacccggcgccggcgggctcgcggccgaccggcaaaccaagaactgggtggtgccggtgcatcccggcgcagtgaaggcgctgaaggaagccgggcaatggagcgatacgcaggaagcgcacaacaacaagctgatcaagcgccaggaggtgctcgccgccgcgtgggccgattacggcaaatccagtccgccgtcggacgacaagcccttcctcgatggttggatgaaggcgcgcgccgccgcgcttgccaaggccggcatgccgaatgggttcgaggagtag

SEQ ID NO: 5187 - DNA, 168 bp, BradyrhizobiumColbertium
gtgcaagttggaggaaccgttgcagatggcgatgacgttgtaattgtcgaagcgatgaagatggaaattccggtgccctcgcccgcgagcgggaccatcacatctcttctggtgaagctcgacgacgtcgttgccgaaggacaagcgatcgcgatcgtcacgcggtga

SEQ ID NO: 5188 - DNA, 900 bp, BradyrhizobiumColbertium
gtggtgtcgcgcgcgttcgacgtgttgcgatgcttcgagggccacgatagcaggctcggcaatctagagatctcaaaccgctgcggtctgccgcgttcgacggtatcgcggctcacgcacacgctgacccgcatgggccagctggtctatttgccgcgcgatcaaaaatatcgcatcggcccgagcgccgtggcgatgagcgcctcgatgatgaaaggcgcgcagctgcgcagcatgattcgccagcggcttcaggaagtggccgagcaattgcctggcaccgtcggcttcgtcgtccccgatcgcttccatctcgtctatctccagttcgcgcgctcgccctccgcactcggcttgcacgagggcaccggcagccgcatcgcgatggcctcgaccgcagcaggcgcggcctacacggcggcattgtcgccggaagtcggcgatgccttcatcgccgagatggagcgcgaagcgcccgaggctgcaaagattctcaggcctcgcatcgaggccaaccggcagtcgttgcgcgagcgcggctatgtcgttgcctgcggcctctggagcccgcacatcaacggcctcgcggtgccgatctggtcgccgcaataccagaccttcgtcgtcatcacgatcggcctcttggctgccatgtatgacgagcagcgtctgcatgccgaagtcgccccgctgatgctggagcttggccgttcgctcggcagcctgatggaaggcgcagaaggcgacgccttcaacaaccgcatctcgcgcaaaccggtcgccatggccgtgcacaacaataacaagccgatcaactcggagggaatgaatgaactggaagccggaactcgacgagctcgcccggcgcgaagccttcgcgcgggagatgggcggcgttga

SEQ ID NO: 5189 - DNA, 1503 bp, BradyrhizobiumColbertium
atgggcggcgttgacaaggtcaagcgacagcatgaccagggccggctgactgttcgggaacgtatcgacaagctgatcgacaaaggcagctttcacgagatcggtgctgtttccggcatcggtgagtacgattccagcggcgagctgcagaagctgacgccggcgaactgcgtgttcggtcgcgcccgcgtcgacggccgcaccgtggtcgtggtcggcgacgatttcacggtgcgcggtggctcggccgatgcgtcgatctcggcaaagccgttgatggcggaggagatggcgcacgattttcgtctgcccatcgtccgcatcatcgagggctccggcggcggcggctcggtcaagaccatcgagaccaagggcgcggcgaacctgccgggcgggatcggcggcacgcgctggtatcgcttcacgacggaaaatctgtcgcgcgtgccggtggtcgcactcggcctcggctcggtagcgggcctgggtgcggcgcgtcttgccgccagccactattccatcataacccggaagtccgcgatgttcgtcgcagggccgccggtggtgaaggcgctagggcaggatcttaccaaggaagagctcggcggcgccgatatccagacccgcgccggcgcggtcgatcatgccgtcgacaccgaggaggaagccttcgcctgtgcgcgacgattcctttcttatctgccatcatcggtctacgagctgccgcccaccttgccctgcaccgataatccggagcggggcgacgaagcgctgatgaacgcggtgccgcgtaaccgcaagcaggtctacaaggtgcgacctatcatcgagtcggtcgtcgacaagggctcgttcttcgaggtcgccaagaattttggcaagcccattatcgtcggcctcgcgcggctcgagggcagggcggtcatggtgcttgccagcgacagcttccactatggcggctcctggaccgcggatgcctgccagaaggtggtgcgctgggtcgacttcgccgagaccttccatctccccatcgtctatctcatggattgccccggcttcatgatcggcctcgatgccgagaaggcggccaccatccgccatggggtccgcgccatggctgcggtcaaccagaccacggtgccctggtgcaccgtcatcctgcgcaacgccttcggcgttgccggcgtggtgcatcagccggctgaccgcttctcgattcgctacgcctggccctcggcctattggggctcgctgccgctggagggcggcatcgaggcggcctaccgcgccgacatcgacgcggcggaagacaaggcggcgaaactcaaggagatcgaggaccggctcaacaagctgcgctcgccattccgctccgccgaaaagttctgggtcgaggagatcatcgatcccaggaagacgcggtcgctgctgtgcgagtttgcgcggctggcggagccgctgcgcaaggccgggccgccggagaacttctcgatcaggccgtga

SEQ ID NO: 5190 - DNA, 1275 bp, BradyrhizobiumColbertium
gtgtacgacttcatcatcgtggggggcggctccgcggggtccgtgctggcgcaccggctctcggcaaggagcgccaacaaggttctgctgtgcgaagccgggcaggacacgccgcccggcaacgagccggccgagatcagggacagctatcccggcaccgcctatttcgatccgcgcttccattggactgaactgaaggtcaccacgcaggtcatcagccacaacaatccgaacgaagcgcgtcctcccttgcgcaaatacgagcaggccagggtgctcggcggcggctcctcgatcaacggtcagatggccaatcgcggcgcaccgaccgactacgacgaatggcaagcgcggggcgccgaaggctggagctggaatgacgtgctgcccttcttcaagaaggtcgagcgcgacctcgatttcgacggaccgtatcacggcaaggacggccgaatcccggtgcgccgcattccgcgggcgcactggacgcagcattcggaggcgttcgcgcaagccttccagcaggccggccaccagttcgtgcccgaccagaacggcgagttcgtggacggctttttcccggtgacgcattcgaaccaagccgagcagcgcgtctcggccgcgatgggctacctcgatcgcgacacccgcaagcgcaccaacctcacgatctccaccaacacgcaggtcagagagctgctgttcgagggcacgcgctgcgtcggtgtgaaggcgttggtggacgggcgcgagcaggaattccgcggacgcgagatcattctttccagcggcgccatccattcgccggcgcatctgctccgcgccggtatcggcccggttggtcacctcaaggatatgggcattcccgtcttgatggggctgcctggcgtcggccagcgcctgatggatcatccctccatctcgctgtcgtcctttgtccgacgcggcgcgcgcatgaacgagcacaccaggcgccacatgcagctcgggctgcgctattcctccgggctgccgggcgtcccgaagggcgacatgttcgtcgtcgtgctgagcaaatcggcctggcacgccgtaggcgcgcaaatcggctcgctgctgaccttcgtcaacaagacctattccgagaccggacaggtcaagctggcctcgcgcgatccctcggcggaaccgatcgtcgagttcaacctgttgtccgaccggcgcgacctcgatcgccttatgagcggctttcgcaagatggcggccgtgcagatgagcgaatggtcaggaaggtga

SEQ ID NO: 5191 - DNA, 438 bp, BradyrhizobiumColbertium
atggtcaggaaggtgacggacaagccattcccggcctcctacaccgaccgcgtccgcaagatcggcgtggtcaacacgacgaacaagattctgaccacgatcgccgccgcgttgatggacgggccggccgcactgcgccactacatgatcgacaatttcgtggtcgaggggttcacctttgaccaggtcatgagcgacgacgaggcgctggaagccttcgtgcgcaaggcgacgatcggcgtctggcacgcctcgtgctcgtgccgcatgggacgtgccgacgatccgatggcggtggtcgataccgagggccgcgtgaagggcatccagggcctgcgcgtcgtcgacgcctcgatcttcccggtggtaccgtgcgctaacaccaattttccggtgctgatgtcggcggagaagatcgccgccgcgatcatgcagtag

SEQ ID NO: 5192 - DNA, 207 bp, BradyrhizobiumColbertium
ttgaatctcgcgtcgaactggctgcgctttccgcggacgtcgccggcgccgggaatggttgcggcccgccgcggccatgttttcgttctggagcagcacctcggcggcgatatgtggatggcatatgatgccaattccggcggtcgcgcgacccgactgcatgcgcgctccctgcgaggttacacaatcgtcaacccgcgcgcctga

SEQ ID NO: 5193 - DNA, 1476 bp, BradyrhizobiumColbertium
atgccggccgccttcctgtcctccgatcccatcatcccgaccactcctttgacatccgagatgcgcgatgcgttgcgcgcgatcgtcggcgagaagggtctgatcgaggacgagcatggcaaacagcctttcgtgaccgattggcgaggattgttggttggtggtgccggcgccgtcgttcgtccgggcagcaccgaggaagtctcgaaagtcgtgcgactctgtcatgagcatggcatcgcgatcgtgccgcagggcggcaataccggtctgatgggcggggcgacgccctggcctgcgcataccggcatcgtcttgtcgctgggacggatgaaccgcgtgctggacgtcgatcccgtcggctattcgatgacggtcgaggccggttgcgtgctgcagacgcttcaggaaacagcggccgaacacgacagattcctgccgctcagcctcggcgcccagggctcctgcatgatcggcggcaacctttcgaccaatgccggcggcgtccaagtattgcggtatggaaatgcccgcaatctcgtgctggggctcgaggtcgtgttgcccaacggcgaggtctgggacggactgcgcgcgctcaaaaaggacaacaccggctacgacctcaagcacttgttcatgggagccgagggcacgctgggcatcatcaccaaggccgtgctcaagctatggccggcgccgaaggacgtctgcacctcatggctggcgattcgcgatccccgcgcggcactggagatcctgtccgaggcgcatgcggcgtccgaagacaatgtcggctcctgcgagctgatgagccgcagcgccgtcgacatggtgctgcgccatatccccggcacccaggatccgctcaaggcggagacgccatggtaccttctgctggaatggtcgtccgcgcgggcgcgacgcgatgggatggagggcatgtccgagaagctggagcagtttctcgccgatcagctcggggccggccgcgtgctcgatgccgcgatcgcgcatacggtcgggcagtcgcgcaacatgtggcgcatccgcgaaggtgtcgccgaggcgtcgcgggcggaaggacctgggctcagctacgacatttcggtggcaatctcccggataccggagttcatcgacaagggtaccagagccgtgctcgacattctcccgaccatcaggccctatccgctcggacacatcggcgacggcaatctgcatttttcgttcatggggcctggcggcatggatcagaagacgctgaaccagtacaagggcgccatcacccgggccgtgaacgatctcgtcacttccctgggcggatcgatctcggcggagcacggcatcggcatcgacaagctcgacgagctcagccgctaccgaccgaaaaccgagctcgacatcatgcgcgccatcaagcgcgcgctcgatccgcaaaacatcatgaatcccggcaaggtgctccggctgtga

SEQ ID NO: 5194 - DNA, 489 bp, BradyrhizobiumColbertium
ttgaagttttcggcggcgcacatgggcgttggcgcggcctgtctcgtgctcgtcggcatcagcccgttgcgcgcagagccggtgttcgacggtttggccggtgcttggtcgggcgtcggcacgatgaagccgtccgatgggccgcgtgagaaggtccgctgcaaagtggcgtacgacgtcaccaggccgggacggtccctgaccctcaatctgcgctgcgcaagcgatgcgtacaagatggtcctgtccgcaaacatcgagcagagcggaacggagctttccggcaactggttcgagagcgaataccgacaaggcggcaaggtctacggcacgaacaaggacggcctgatcgaggcacgaattgagggaaacacggtggccgcgctggtgacgatccagaccaagagcaatcgtcaatccttcctgatggaggcgccggggtcctggatgtcggaggtcgcgatcgaattgaacaaggattcgaagtga

SEQ ID NO: 5195 - DNA, 1290 bp, BradyrhizobiumColbertium
atgatctcgaactggctcgcggcagaactgtcccgccgcaacatccattatggctgggtgatggtcggcgtgaccttcctcgcggcactgatcagcgccggcacggtcggcgcgcccggtgtgttcatcgtcccgcttcaaaaggagttcggctggagcacggcggaaatctcctcggcgctgtcgatccgcttcatcctgttcggcctgatggcgccgttcgcggccgccctgctcaatcgctacggtctgcgcaacatcacgctcatcgcgcagctgattgtggtttgcgcgctcgtgctctctctcggcatgacggaagtctggcagctcatcgccctctggggcgtggtgatcggcatcggcaccggcatgaccgcgctggtgctcggcgcgacgattgccacgcgctggttcgcggcaagacgcggcctcgtggtcggcatcatgaccgcgagcgtcgccactgggcagctcgtgttcctgccgctgctcgcaagcctcaccgagcgctacggctggcggctcgcgctcggcctcgtctgcgtcatgctcggcgtctccgcactggcggtgctgctcgcgatgtgtgaccgtcccagcgatgtcggcctgcggccgttcggcgacgagggcacagaacccctgcccgcgccgccggtgagccacggctcgatcacgggcgttgcgctgggcacgctgcgcgatgcatcgagatcgacggcgttctggatcctgttcgccaccttcttcgtatgcggcgcctcgaccaatggcctcgtccaggtgcacctgatcccgatgtgcctcgatttcggcatcccgcaggtgcaagccgccagcctgctcgccgcgatgggcatcttcgacttcattggcaccatcctgtccggctggctgtcggatcgctacgacaatcgctggctgctgttctggtactacggcctgcgcgggctctcgctgatcttcctgccgttcagcgacttctcgttctacggcctgtccgtcttcgcaatgttctacggcctcgactggatcgccacggtgccgccgaccgtgcgcctcaccgcgcagaagttcggacccgagcgcgccaatctggtgttcggctggatctttgccgggcatcagctcggcgcgggcaccgcagcgtttggcgccggcttctcgcggacggtctatgagagctacctgcctgccttcttcatagccggcgcgctgtgcgtgttcgccgcgctgatcgtgctggcgctggcgcggcagcccaaaccgcagcccgtgatggcctaa

SEQ ID NO: 5196 - DNA, 1197 bp, BradyrhizobiumColbertium
atggccgaagccgccgatcccgtcgtcatcgtctccgccgcccgtacgccgcttggccgcttcatgggcgaattgtcgccgctgcccgcgcacaagctcggatcgcatgtgatcggcgcggcgctggagcgtgccaggcttgcgccagagaaggtcgacgaggtcttcatggggtgcgtgctgccggccggacagggccaggcgcccgcgcggcaagcggcacgcgccgccggtctgcccgactccactggcgcgaccacggtcaacaaggtctgcggctctggcatgaaggcgacgatgctggcccacgacatcatccgcgccggctcggccgagatcgtcgtctccggcggcatggagagcatgagcaacgcgccgtatctgctcgccaaggcgcgcggcggctatcgtgtcggccacgaccgcatcatcgaccacatgatgatggacgggctggaggacgcctatgagaccggccgctccatgggcgatttcggcgaagcgaccgcggaagcctaccagttcacacgcaaggaccaggacgcatacgcgatggaaacgctcggacgcgcccgcaaagcagtggaaggcggcgcgttcaaggcggagattgcacccatcacgctggccgaaaaggccggcccgcgcgtgatcgccaatgacgagcatccgctgaaggtcgatcccgcgaaaattcccgggttgaaaccggcgttccgtgccaacggaaccatcacgccggccgcctcctccgccaacgccgacggcgccgcggcgctggtgctgaccaagcgttcgctcgccgatcgcagcggtctgccagctctcgctgaaatcaagggtcacgccacccacagccaggagccgcaatggttcaccaccgcgccaatcccggcgatccgcaagctgctcgacaaggtgggctggactgcctccgacgtcgacctgttcgagatcaacgaggcgtttgccgtggtggcgatggcggcgcagcgtgatctcgggatcccccgcgacaagctcaacatcaacggcggagcctgcgcgctcggccatcccatcggcgccaccggcgcgcggctgatcgtgacgctgctgcatgcgctcgaggcgcagaacctcaggcgcggcatcgcggcgctctgcatcggcggcggcgaggcaaccgccatcgctgtggagcggctggcgcgctag

SEQ ID NO: 5197 - DNA, 153 bp, BradyrhizobiumColbertium
gtggttcggatgagatttggtcgatcagtcctcgccgtcattgtccgcctggtgcgcaattgcgcaggggcgggcaatccggtatttcccgaggcggcgcggctggatccgagaaaccgcggcgcctggatgcctcgcttccgcggggcatga

SEQ ID NO: 5198 - DNA, 771 bp, BradyrhizobiumColbertium
atggaaatgctcaacaaccactgcggcgtgacgcgcgatgagcgcggcatcgtccatgtcacgatctgcaacgccggtccgctcaacattctgggttcgccggtgaccgaggcggtgcgcgaaggcctgcagcagctcgcgtccgaccgcagcatccgtgtcgtggtgctgcgcggccagagcgagaaaagcatgatcggcggtgccgacatcaaggagatggccaagctcgaccagaagtcggccgaagccttcatcagccgcctgcgcgatctctgcgaggccgttcgtcagtttcctgccccggtgatcgcacgcatgcccggctggtgcctcggcggcgggctcgaagtggcggcggcctgcgacttccgcatcgccgcgcacgatgcgcatttcggcatgccggaggtgcgcgtcggcatcccctcggtgatccacgcggcgctcctgccgcgcctgatcggctgggcccgggcgcgctggctggtgatgacggcggagaacatcgatgcgtccacggcgctggcctggggcctggtcgacaaggtcgccgcgccaggagaactggatgcggagatcgagcgcaccgtcaaggcgctgctcgaatgcggtcccgaggcactgcgatcgcagaaggctctgctgcggcgatgggaggaattgccgctgaccgaatcggtgaatctcagcgtgaaggtgttcggcgagtctttcctgacggacgagccgacgcggctgatgggcgctttcgtgaaccggaagcgatag

SEQ ID NO: 5199 - DNA, 528 bp, BradyrhizobiumColbertium
atgaccgacatcgatcagttcaagcttttctcaccggcgcagcgacgcgagcgggtggtggactggcaggtgcctgcgccggtcgcacgagccgccatgacgctttcgggcatggacgccatgcgcgccattcgcgacggccggctgccgccgccgcctttcgcaaagctgatcgggttcactatggccgcggtcgagccgggccgcatcgtcatggaactggagccgcgcgaggatctcgaaaataccatcggccttctgcacggggcgacggcggcggcgctgctcgataccgcgatgggatgcgcgatctcgacccgtctggaggcggggcagagctcggtgacgctcgacctgaagatgaccttcctgcgtccgctgtcggttcgctcaggcctgatctcggccgaggggagggtcatcaagctggggcgtcagaccagctacaccgaaggcttcgtccgcgacggcaaggaggcccttgcggtccatgcaactgcaaccttttcgatgatcggtgcagcttaa

SEQ ID NO: 5200 - DNA, 618 bp, BradyrhizobiumColbertium
atgcgctattccccggaacacaagcaggaaacccacgaccgtatcgtgaggaaggcctcggtgcggctgcgcgaaaagggagcccatggcatcggggtcgccgatctcatgaaggaggcgggcctcacccatggcggcttctacgcgcatttcgactcgcgcgaagcgctggtgatcgaggccttcggctatgccatggaccgctcgatggagcattggcgcaagatcaccggcgaggtgtcgccggagaagcggctggcgctgatcgcagaggcctatctctcggcgttgcaccgcgataatcccggccatggctgctcgattcccgcgcttggcgccgagatcgcccgggagagcccgaaaacgcgaaaggcctttgccggcaagctcgaggagatgatcgagcggctggccgactgtgtcccgaaccagccacgcaaggctgctcgcaagcaggccatcgcgacgctggcgacaatggccggcaccatgctgctggcgcgcatcgccggatcgggcgaattgtccgatgaggtgctgaaggcgggccgcgacagcgtgctcgagggagccaagcgcgagccgaaggtcggggcggcgaagaaggcgaagacttag

SEQ ID NO: 5201 - DNA, 909 bp, BradyrhizobiumColbertium
atgccggatcaaggcgctatcgactgggacgactttcgcttcgtgctggccatcgtgcggggcggctcggtctcggctgcggcaaaacagctgggcgtcgaccacgccaccgtgattcgccgcgtcgatcggttggaaaagcacctttctgcaaaactgtttgaccggcgcaagaccgggtatctcctcaccgaagccggccagcgtgtcgcagacagtgcggaagcgatggaatcgaccatcgtcgccaaccaggaacaggtcggcggctcggtggcgcggctgaccggcacggtgcggatcggtgcgcccgacgggttcggcaccgcgttcctggcgccgcggctcgcccccttcgccgaccgttatcccgacctcgatctacaacttgtagctactgcgcgactgttcagtctctccaagcgcgaggccgacatcgcgatcagcctgaccatgccgaaggaaggccgcatcgtcgggcgcaagctgctcgactatcgtctcgggctctatgccgcgcctggctatctcgatcgcttccctgagatcacatcgcggcaggacctgacgcagcaccgcttcgtcggctacatcgaggagctcttgttcaccccggagctcgattatcttccccaggtgtcgccgcgcatttccgcacgcttccgcagcgccaacctgatcgctcagctcaatgccaccctctccgggttcggcatcgccgtgctgccgcaattcatggcgagcgactatccgcagctcgttccggtgctgccggaggaaatttcgatcacccggacgttctggatgctgatgcacgccgacagcaaggatctggcgcgaatccgggcggtggccgattacatcggcgagatcgtggagcgggagcgggcgttgttttcggggcggtag

SEQ ID NO: 5202 - DNA, 1497 bp, BradyrhizobiumColbertium
atgcgttcaatcggacatttcatcggcggcaaggaggtcaagggcacctcgggccgcacggccgacgttttcgagccgatgaccggtgacgtgcaggcgaaggtcgcgctggcgtccaaggccgaggttcgcgccgccgtcgaaaacgcgcgcgcggcacagccggaatgggccgcgaccaatccgcagcgccgcgcccgcgtgatgatgaaattcctggagctgatccagcgcgattacgacaagctcgcggagttgctcgcgcgtgagcacggcaagaccgtgcctgatgccaagggcgacatccagcgcggcctcgaagtcgtcgaattcgcctgcggcatcccgcacctgatgaagggcgagtacaccgaaggggccggccccggcatcgacatctattcgatgcgccagccgctcggcgtcgtcgccggaatcacgccgttcaacttcccggcgatgatcccgatgtggaagttcgcgcccgcgatcgcctgcggcaacgccttcatcctcaagccgtcggagcgcgatcccggcgtgccgatgaagctcgcagagctgatgatcgaggcgggcctgccggccggcatcctcaacgtcgtcaacggcgacaaggaagcggtcgacgccatcctcgacgatcccgatatcaaggccattggcttcgtcggctcgacgcccatcgcgcagtacatctatgagcgcgcggcgcagaccgggaagcgctgccagtgcttcggcggcgccaagaaccacgccatcgtcatgcccgacgccgacatggaccaggctgtcgacgcgctgatcggcgccggctacggctcggccggagaacgctgcatggccgtctcggtcgcggtgcccgtcggcaagtccaccgccgaccgcctcatggagaagctgatcccgcgcgtcgagtcgttgaagatcggcacctcgatcgacccgtcggccgattacggtccgctggtgacgcgcgaggcggtcgagaaggtcaagagctacattgacatcggcatcaaggaaggcgcgacgctggccgtcgacggccgcggcttcaagatgcagggctatgagaacggcttctatctcggaggctcgctgttcgacaacgtcaccaaggacatgcggatctacaaggaagagattttcggtcccgtgctctcggtcgtgcgcgcgcatgactacaaggaggcgctggcgctgccctccgagcatgactacggcaacggcgttgcgatcttcacccgcgacggcgacgccgcgcgcgacttcgccgccaaggtcaacgtcggcatggtcggcatcaacgtgccgatcccggtgccgatcgcctattacaccttcggcggctggaagaagtcgggcttcggcgacctcaaccagcacggtccggactcgatccgcttctacaccaagaccaagacggtgacctcgcgctggccgtccggcgtcaaggagggcgcggagttctcgatcccgctgatgaagtaa

SEQ ID NO: 5203 - DNA, 1146 bp, BradyrhizobiumColbertium
atgcagttcgctctgaacgaagatcagatcgcggttcgcgacatggcgctcgcgttcgcggcggaaaaaatcgcgccgcatacgctgcgctgggacgaggagaagcatttccccgtcgaggtcatgcgcgaggccgccacgctcggcatgggcggcatttacatccgcgacgatgtcggcggctccggcatgacacggttcgatgcggcgctgatcttcgaggcgctggcgacgggctgcccgaccacctcggctttcatctccattcacaacatggcgagctggatgatcgatgccttcggcagcgacacccagcggcaccaatggctgccgaagctctgcgccatggagctgatcgcgagctactgcctcaccgagccgggcgccggctcggacgccgcggcattgcgcacccgcgcagtgcgcgacggtgaccattacgtcctcaacggccagaagcagttcatctcgggcgccggcggcaccgacctcctggttgcgatggtgcgaaccggcggcgacggccccggtggcatctcgacgctcgtcatcgacggcaagactccgggcgtctcgttcggcgccaacgagcgcaagatgggctggaacgcgcagccgacccgcgcggtgatgttcgagaacgcccgcgtgccagtcgctaaccggctgagcgaagagggtatgggcttcaagatcgcgatggccggcctcgacggcggccggctcaacatcacggcgtgctcgctcgggggtgcgcagaccgcactcgacaaggcgcgcagctacatgaaagagcgcaaggcgttcggaaagcggctggacgaattccaggcgctgcagttccgccttgcggacatggccatcgagctcgaagccgcccgcactttcctgtggcgcgcagccgcggcactcgaccggaaggaccccgacgccaccatgctctgcgcgatggccaagcggttcggcaccgatgtgggcttcgaggtcgccaaccacgcgctgcagcttcacggcggttacggttacctcagcgaatacggcatcgagaagatcgtgcgcgacctgcgcgtgcaccagatcctcgaaggcaccaacgaaatcatgcgtctcatcgtggcgcgcaaactgatcgagggcgcccgatga

SEQ ID NO: 5204 - DNA, 1014 bp, BradyrhizobiumColbertium
gtgatccggctcaaccggccgaaggcgctcaatgccatgacgctggaaatgtccatcggcatcgacgcggcgctcgaccgcttcgagagcgatcctgaggtcgggctgatcatcctggaaggcgctggcgagcggggcctctgcgccggtggcgacatccgcggcctctgggagagctcacgcgaaggcggcgatctcggtgcgcggttctggcgccaggaatacgtcatgaatgcacggatcgcgaagtatccgaagccttatgtggcgttcatggatggcctcgtcatgggtggcggtgtcggtctttccggccatgccagccatcgtgtcgtgacggatcgcaccaagctcgcaatgcccgaagtcgggctcggcttcttcccggatgtcggcggcacctggctcctctcgcgctcgcccggcgagatcggcacctatttcggcctcaccggccagaccatgaacgggcccgacgcgatccacgccaggttcgcggacgccgtggtgccagtggccaaatggccggaactgcgcgaggcgttggccaaagttcgccaaggcgcgaccgcagccgatgtgaccaggctgatcgatggttttgcaacgggcgagaccgccgggccggttgccgcgaagcaggcgacgatcgatgcgctgttcggcttcgaccgcatggaggacatcttcgcggcgctcgcgcgcgacggctccgaattcgcgatggccacgctcaagacgctcaacgagaagtcgccgcgtggcatggtggtgacgctgaagctgttgcgcctcgcgcgcgccgcatcgagcctggaagactgcctggttcgcgaatatcgcgccgcgcttgaagtgttccgcagcgacgatttccgcgagggcgtgcgcgcggccgtgatcgacaaggaccgcaatccgagttggtcaccgccgcggatcgaggatgtgacgccggagatgcttgcgccgtatctcgccgagatcggcgccgacgagctgaggttcaactag

SEQ ID NO: 5205 - DNA, 639 bp, BradyrhizobiumColbertium
atggccacgatcgcattcatcggtctcggcaacatgggtggcccgatggccgccaatctggtcaaggccggccacaaggtcgtggcgttcgacctcgtcgaggcctcgcgcaatcaggccaaggccgatggtgccagcgttgcggaaagcgcatcaggggccgtgaagggcgccgaagtcgtcgtcaccatgctgccggcgggcaagcatgtgctcggcgtctggaacgaggtcgtccccgccatgaccaagggcgcgctgatcatcgacagctccaccatcgacgtcgagagcgccagggccgcgcatgcgctagctgccaagcacggcgtgctctcggtcgacgcgcccgtctccggggggaccggcggcgccaagggcgcaacgctcaccttcatgtgcggcggcgaagagaaggcgttcgcggccgccaaaccggtgctcgagaatatgggcaagaagatcgtgcattgcggcggtgccggcgcgggtcaggcggcaaagatctgcaacaacatgatcctcggcgtctccatgatcgcggtggcgaggcttttgccctgggcgagaagcttggcctttcgcatcaggcgctgttcgatgtcgcctcgacctcgtcaggccagtgctggtcgctga

SEQ ID NO: 5206 - DNA, 237 bp, BradyrhizobiumColbertium
gtgccgggcccggtgccgacctcgccggcgaacaacgactacaagccgggctttgcctcggcgctgatggtgaaggatctgaccttggcgcaggacgcggcgaaggctgcgggcgcggcgacgccgctcggcaagcatgcgcaggagatttatcagtctttcgacgcagccggacagggcggggtggatttttccggaattatcaagcacgttaggagtctggccgggaaagtttga

SEQ ID NO: 5207 - DNA, 1719 bp, BradyrhizobiumColbertium
atgacgacatttcaggaagcgcgcgcgtttctgctaaagcaccgcacggattacgaggcagcggtcaaaggattccgctggcccgatccggctcctttcaactgggcgctcgactggttcgacgccgatctggcggcgaatccggacagcaaggatcgtgctgcgctctggatcgtcgacgccgcgcaggacaagcagaccaagctctccttcgcggcgctctcgaagcgctcgaaccaggtcgcgaatttcctccgtgcgcaagggctcaggcgcggcgatcacctcttgctgctgctcggcaacgtggttccgctctgggagacgatgctggcggcgatgaagctcggcgttgtcgtgatcccagcgaccacgctgctgaccgccaacgaacttcgcgaccggctcgatcgcggcaaggcgaaagcggtggtggcggccgaggaccaggtggccaagttcgcgagccttggtaccgagaatgtcgtccgcatcgtggtcggcgcggcgcccgatggatggctgacctatgacgaggcagcgaaagccgcggagagtttcacgcctgacggtccgaccaatgccgacgacccgatgctgctttatttcacttcaggcaccacggcaaagccaaagctggtgcggcacagccagcgcagctatcccgtcggccatctctccaccatgtactggatcggattgaagcccggcgacatccacctcaacatctcctcgcccggctgggccaagcacgcctggagctgcttcttcgcgccttggaacgcgggtgcgaccgtgttcgtggtcaaccagccgcgcttcgatgccaaggcgctgctcgccaccatcggccgctgcggcgtcaccacgctgtgcgcgccgccgacggtgtggcggctgttcatccaggagaacctggcctcgttcaaggtggccctgcgcgaggtctgcggcgccggcgaaccgctgaacccggaggtgatcgatcaggtgcgggcggcctgggggctcaccatccgtgacggatatggccagaccgaaaccacggcgcttgccggcaactcgcccggccagaagatcaaggtcggctcgatgggccggccgctgccgggctatcgcgtgcagatcagcgatgccgacggcaatccggcgaaggaaggcgaggtcacgctgatgctgggcgccgatcgtcccgccggcttgatgcagggctatcagggcgacgacggcaagctgtctggcgccgaaggcgagctctatcgcagcggcgacgtggtcttcgaagacgacgagggctatctcaccttcgtcggccgcgccgacgacgtgttcaaatcatcggattaccgcatcagtccgttcgagctcgagagcgtgctgctcgagcatgagctggtcgcggaagcggcggtggtgccgagccccgacccgattcggctcgccatcccaaaggccttcgtgctgctgacgtcgggcacggagcgttcacccgagaccgcgctctccatcttcaaacatcttcacacgcgccttgcgccattcaagcgcatccgtcgtctcgaaatcgtaaccgagctgccgaagacgatctcgggaaagatccgtcgcgtccagctacgacggctggagcgcgacaatgatcgcgacgatccgctgcgcggccgggaattccgcgaggaggatttcccggagctgtcaaagattcggggcgaaagctag

SEQ ID NO: 5208 - DNA, 480 bp, BradyrhizobiumColbertium
atgaacgaagtctggaagaagccgcccatcacgctcgaggcctatcaggccatggtcggcaaggagatcggcgtgtcgtcgtggcacctgatcgaccaaccccgtatcgacacctatgccgacgtgatcgaggatcaccagttcatccacgtcgatccggaacgcgcgaagagagagaccgcgttcggcactaccatcgcgcacggctttctcacgatgtcgctgctgtcgatcatgtcctacgaggtgatgccggtgatcgccggcaccacgatgggcgtgaactacggcttcgacaagctgcgtttcatctcgccagtgcgcgcgggcaagcgcgtgcgcggccgcttcgtgctggcggaagcgaagctccgcaagcccaacgaattgcagtcccgcaccaacgtcactgtggagatcgaaggcgaggacaagcccgcgctcgtcgccgactggctcggcctgatctatttcgcgtaa

SEQ ID NO: 5209 - DNA, 918 bp, BradyrhizobiumColbertium
atggcaatcaggttcgacggacgcgtcgccatcgtcaccggcgcgggcaatggtctcggcaaggcgcacgcgctggggttggccagccgcggcgccaaggtcgtggtcaacgatttcggcggcgcgcgtgacggcaccggcggctcgctgtcgccggcggaggcggtggttgaggagatccgcaaagcgggtggcaccgcgatggccgacggcgcggacgtgtcgaatttcgagcaggtcaccgccatggtcgagcgcgccaccaaggaatggggcagcgtcgatcttctctgcgccaatgccggcatcctccgcgacaaatcgttcggcaagatggaggtggccgatttccagaaggtgctcgacgtgcatctcgtcggcaccttctattgctgcaaggcggcctgggccggcatgcgcgatcgcaattacggccgcatcgtgctgacgacgtcgtcctcggggctctacggcaatttcggccaggccaattacggcgcggcgaaatccggcatggttggcctgatgaacgtgctggccgaggaaggccgcaagaacaacattcgcgtcaacatcatctcgcccaccgcggcaacccgcatgaccgaagagctgctgccgccgcaggcgctgcaattgatgaagccgaacgcgatcacgccggcggtcgagtacatgctgagcgaggacgcgccgacccgcaccatcatgggtgccggcgccggctcgttcgccgtgatcaagatattggagagcgagggcatcaacctgccggaatccgaatggactccggacgcggtggccgcgcatttcgccgagatcagcgacatgtcgaaggcgagggcgttgacgggtgccttcgagcagacgcagaaatatgtggcgcaagccgcggcaagggcgggcatcaagctgtag

SEQ ID NO: 5210 - DNA, 1263 bp, BradyrhizobiumColbertium
atgacatcacctgacaaccacgtcgccatcatcggcgccggtcccgccgggctgatggctgcggaggtgctggcgcagggcggcatccgcgtcaccgtctatgacgccatgccatcggcaggccgcaaattcctgatggccggccgcggcggcctcaatctcacccacagcgagccgttgccgcagttcatggcgcgctatcgcgaggcggcgccgaagctgcacgcggcgatcgccgcgttccctccggacgcgctacgcacctggagcgaggcgctgggcgagccgaccttcatcggcaccagcggccgcgtgtttccgaaggcgttcaaggcctcgcccttgctgcgcgcctggctgcggcggctcgatgccgccggcgtgcgctttgcgtttcgtcatcgctggatcgggtgggacgacgaggggaggctggcgtttcaaacgatcgatggcacgaaggctgtcactgccgacgccaccgtgctggcgctcggtggtgcaagctggccgcggctgggctcggacggcggctgggcgagcatcctggccgacagaggcatcgccatctcgccgcttcggcccgccaattccggcttcacagttagctggtccgacgtcttccgcgcgcgcttcgaggggcagccgctcaaggggatcgcgctgagcttcggtctgcacaggcttcgcggcgaggctgttgtcacgcagtccggcatcgagggcggcgtgatctatgcgctgtcagccgaactgcgcgaggcgatcgccgtgaagcacgaggcggtgctgcacgtcgccttgcgcccggacatcgatcagctcgagcttgccagacgcctgtccgcaccgcgcggcaagcaatcgctctccaacttcctgcgcaaggctgtgcagctttcgcccgtcgccgtcgggctgttgcaggaagccacgatcaatgcaggccagtcgttgtcgacgatgtcgccggaacgattggcggagttcatcaacgccgtgccgatcaagctgaccggggtggcgccgattgcgcgcgcgatatcgagtgccggcggcatctcgttcgatgagctcgatgctgattacatgatccgcaagctgcccggcgtgttcgccgccggcgagatgctggactgggaagcgccgaccggcggctatctgctccagtcgtcctttgcgaccggtgccgccgcgggcaggggcgcgctggagtggctgaagcgctacttaccgtcattgcgggcgagttcctcgcaatga

SEQ ID NO: 5211 - DNA, 1080 bp, BradyrhizobiumColbertium
atgacgacgtccctcgccgcaaagatcgcccgtgaatacggcacgccctgcgcggtcatcgatttggaccgggtcgagcgcaacatcgcgcggattcagaaggcctgcgacgatgcgggagtcgccaaccgtcctcacatcaagacgcacaagaacccgaccatcgccaagatgcaggtcgcggccggagccaagggcatcacctgccagaagctcggcgaggccgaaatcatggccaatgccggcatcgacgacatcctgatcagctataatctcctcggcgaggagaagatggcgcggctggctgcattgcagacgaaggccaaaatgacggtcgctgccgacaattccacggtcgtcgcggggttgcccaaggcagcggcgacatcagggcgtacgctctcggtcgtggtcgaatgcgacacaggccgcaagcgtgcaggtgtcgagacgccggccgaagcgattgcgctggcgcgtgagatcgcggggtcgaagggactcgagtttgccggcttcatgctgtatccgaccgagaccggctgggccgaggcgcagaagttttacgacgaagcattggccggcgtgcgggcacacgggctggatgccaagatcgtctccaccggaggcacgccgaacctgaagaatctcggcaagctgaagggcggcaccgagcaccgcttcggcacctatatttataacgaccgcatgcaggtggcggccggcgtcgccagctgggacgactgcgcgctgcacatctattccaccgtggtgagccgcgccgcgcccgagcgcggcatcctcgatgccggctcgaagacgctgacgacagataccggcggcctcgatggtcacggcctgatcctcgagcaccccgaagcgaaaatcgcgaagttcgccgaggagcacggcttcctcgacctctcccgcagcaacacccgccccaatgtgggcgatgtcgttcgcatcgtgccgaaccatgtctgcgtggtcgtcaacatgatggacgaagtggtgatggtgcgcggcgaagagatcatcggcacgctgccggtggcagcaagggggaagctgcggtag

SEQ ID NO: 5212 - DNA, 1812 bp, BradyrhizobiumColbertium
atggcgccgccgctgatccagctgaaagacatcaggttgaccttcggcggcacgccgctgctgtcgggcgtcgagctcaacgtcgccccgagtgaacgggtctgcctgatcggccgcaacggctccggcaaatcgacgctgctcaaaatcgctgccggcctcgtcgagcccgacggcggcacgcgcttcgtgcagcccggcgccactgttcgctatctgccgcaggagccggatttcggcgagcacgagaccacgctcgcctatgtcgagtccgggctcgcgcccggggacgaccagcaccaggcgcgctatctcctcgagcagctcggactcaccggcgaggagaacccgcacaatctctccggcggcgaggcgcgccgcgcagcgctggcctatgtgctggcgccctcgcccgacatcctgctgctggacgagccgaccaaccacctcgatctctccaccatcgagtggctggagcaggagctcgacagccgccgcagcgcgctggtgatcatcagccacgaccgtcgcttcctcaccaatctctcccgctccaccgcctggctcgaccgcggcaagatcaagcagatcgaccgcggcttcgcctcgttcgaggcctggcgcgatgaggtgctcgcggaggaggagcgcgaccagcacaagctcgaccgcaagatcgtcgacgaggagcattggctccgccacggcgtttccggccgccgcaagcgcaacgtcaagcgcctcgccaatctgcatgcgctacgcgaccagcgccgcaactatcgcggcaccgccggcagcgccaacctcgctgcagcggaagcggagcaatccggcaagctcgtgatcgaggccaagggcatcagcaagacctatggcgagcgcaagatcgtcgacaatttctcgacccggatccagcgcggcgaccggctcggcatcatcggcccgaatggggccggcaagaccacccttgtcaatctgctgaccggcgcgatgcagcctgattccggcacggtgcggctgggagccaatctggagatggcaacgctcgaccagcaccgtgaaagcctcgatcccaagtcgacgctggcggaagccctcaccggcggtcgcggcgatcacatcatggtcggcggcaagccgaagcatgtggtgggctacatgaaagacttcctgttcgcgcaggagcaacgcggcacgccgctcgaagtgctctcgggcggcgagcgcggccggctgatgctggcccgcgcactggcaaagccctcgaacctcctggtgctcgacgagccgaccaacgatctcgatctggagaccctcgacgtgctcgaggagatgctcggcgactatgacggcacggtcatcctgatcagccacgatcgcgacttcctcgaccgcgtcgtcacctccgtgatcgcacccgagggcaacggcaggtggatcgaatatgccggcggctacagcgacatgctggtgcagcgcggcgccgacctgaagcgcgagacggcgaaggcccagccggtggcggagaagaaagaggagcggccggctgctcccgcatccgctcccaaacggaagctgagcttcaacgagaagcacgcgctggaaacgctgccgaagaagatggagacgttgcaggccgacattgcaaggctgcagcgcgtgctggacgatcccaacctctatgccaaggatcgcaagacattcgacgatacatcggccgccatcgccaaggcgcacgaagaactgtccgccgccgaggagcgctggctcgaacttgaaatgcttcgcgaagagatagagcaggcttag

SEQ ID NO: 5213 - DNA, 492 bp, BradyrhizobiumColbertium
atgagcgacacccccacccgcatctatgtcgacgccgacgcctgtccggtgaaggacgagatctatcgcgtcgcgctccggcacggtgtgccggtgagcgtcgtcgccggcaatttcattcgggtgccgcaggacccatcgatcgagcgcatcgccgcaggcgccggcatggacgcggccgacgactggatcgccgagcgcgccagacccggcgacatcgtcgtgacctcggacatcccgctggcgagccgctgcgtcaaggcgggcgccgacgtgatcgcgccgaacggcaaaccattcacggaagagtcgattggaatgacgctcgcggttcgcaatctgatgaccgatctgcgctcggccggcgaagtcaccggcgggcctcgatcgttcgcgccgcgcgaccgttccgctttcctctcggcactcgaccagacgctgcgccggatcgcccgccgccgcgctgatgcgacggccacgagtcggggttga

SEQ ID NO: 5214 - DNA, 801 bp, BradyrhizobiumColbertium
atgccgaaccggctcgaaacctaccgcgtcgaggcctacaacaccgccaaacaatccgaaaataagatgcacgacgataccgtggcccgccgcttcggcttttccggcgggctggtcccgggcgtcgacgtcttcgcctacatgatgcacgtgccgaccgttcgctgggggcgggacttcctgtcgcgcgggctgatcgaggcgcgcttcatcaagcccgtctatgacggcgagaccgccgacgtggacgcgatggagcacaacgacctgctcacgatcgaggtgttcagccgcaccgagctgtgcgccacggggacggcgtcgctgccggcggctgcgccggccgtctcgctgagcgactatgttgcggtcccagccgtcgccgagcgcacgccggtcagccccgcgacgttcgaaacgggcaaatggttcggcacaacaccccgacgctgggccgggcaggacgccgctgattatcttgcggacatcagggagttcgatccgatcttcgcgcgcgaggggcttggccatcccggcctgatccagcgggtgatgaaccgcgtgctggtcgacaacaccatcctgggcccgtggattcacgtcggcagccgcatgcagctgttgtcggcggcgcgcgtcggtgacgagatcagtgcgcgcgccaaggtcactgcgaactacgaaaagaagggccaccgcttcgtcgagttcgacgccctcgtcgtcgccaacggcacgacgccgctcgctcattgccagcacaccgcgatctaccagccgcgcgagcaggcggcagcgtag

SEQ ID NO: 5215 - DNA, 2397 bp, BradyrhizobiumColbertium
atgccggtttttcaggtcaattccatgcaagaacacaccaaatcgaccacgctcgagaacgctattgcactgcaaaagtacggcgtcggacaaccggtccgccggaaggaggacgacacgctggtgcgcggcaagggccgctacaccgacgatttcaacctgccgggccaggcctatgccgtggtcgtccgctccacccatgcccatggcgtcattcgtgggatcggcatcgaggccgccaaggcgatgccgggcgtgctgggggtatggaccgggaaagatctcgatgccgccggctacggccccttcacctgcggcctgcccctgaagagccgtgacggctcgcccctgcgccagaccaaccgccagccgctcgcgaccgacaaggtccgcttcgtcggcgatcccgtcgccttcgttgtcgcagagacgctggcacaggcgcgtgatgcggccgaggcggtcgagctcgatatcgagccgctgcccgcggtgactgatcctgaggaagcttccaggcccggcgcgccgcagctttacgaccacatccccaacaacgtggcgctcgactatcattatggcgacacggagaaggtgaacgccgcttttgccagcgccgctcatgtgaccaagctcgacatcgagaacacccgtgtcgccgtggtctcgatggagccgcgcgtcggtcttgcctcctatgacaagaagaccgagcgctacacgcttcaggtgccgacgcaaggcgtggccggcaaccgcaccaatctcgccaagaacttgaaagtgccgaacgagaaggttcgcatcctcaccgccaatgtcggcggctccttcggcatgaagaacatcaactatccggaatatatgtgcatcctttacgcggccaagacgctgggccgcccggtgaaatggctcgatgaacgctcgaccgccttcctctccgacagccatggccgtgcgcagaagatccatgccgagctcgcgctcgatgccgacgggcatttcctagcggcgaagctttccggttatggcaatctcggcgcctacatcaccggcgttgcgccgggcccgctctcgctcaacaccggcaagaatttttccagcgtctatcgcacgccgctgatggccgtcgacatcaaggtggtgctcaccaacaccacgttgatgggcgcctatcgcggcgccggccggcccgaggcgaactactacatggaacgcctgatcgaccgcgccgccgacgagatgggcatcgaccggctggccttgcgcaagcgcaacttcatcaagccgaaccagatcccgttcgcggcctcctccggtgtcacctatgacagcggcgacttccaggccgtattcaacaaggcgctcgaaatctccgaccacgagaatttcgccaagcgcaagaaggaaagcaggaaggccggcaagctgcgcggcatcgcggtcggttcctatctcgaggtcacggcgccgccgagccccgagctgggcaagatcgtgttcgacgccgacggcaccgtgcagctcatcaccggcacgctcgactatggccagggccatgccacgccgttcgcgcaggtgctgagcgcgcaattgggggtgcccttcgacagcatcaagctggtgcagggcgacagcgacatcgtgcacaccggcaacggcaccggcggctcgcgctcgatcatggcgagcggccaggccatcgttggcgcggcaaagctggtcatcgagaaaggcaagcgcgctgcggcgcatatgctcgaagcgtccgaggccgacatcgaattcgccgatggcaggttcacgatcgcgggcaccgatcgcagcatcgacatcatggagctggccaagaaactgcatgacggcaaggtgccggagggcgtgcctgatacgctcgacgtcgatcacaccagcgaaccgatcgcctccgcattcccgaacggctgccacgtcgccgaggtcgagatcgatcccgagaccggcgtggtgcagatcgtgcgctacagcgcggtcaacgatttcggcacggtgatcaacccgatgctggtcgcgggccagctccatggcggcgtggtccaaggcatcggccaggcgctgatggagcatgtccgctacgacgagagcggccagccgatcacgggctcgttgatggattacgccctgccacgcgccgaggacgtgccgaacatgaccgtcggcgaccacccggtgccggccacgaccaatccgctcggcagcaagggctgcggcgaagccggttgcgccggcagcctgtcgacggtggtgaacgccgtgatcgatgcgctgtccgagtacggcatcaagcacattgacatgccgctgacccccgagcgcgtgtggcgcgcgatccaggaggcgaaggccaaggcggcgtaa

SEQ ID NO: 5216 - DNA, 1074 bp, BradyrhizobiumColbertium
atgaatgaccacacgcggctcggtgacggccatgggccgcacggcgagctggaggggtcgatggcggcggtggcgttggccaccaaaccttccatccccgcacaggcggcgggaaccggcgtctatgcggcgctggacctcggcaccaacaattgcagactgctgattgcctgtccgacccaggacggttttcgcgtggtcgattccttctcgcgcatcatccggctcggcgaaggggtctcggcgacggggtgcatcagcgaagctgcgatcgagcgcgccatcgcggcgctcagcatctgccgcgacaagatcaatctgcggaaggcgcggcggttgcggctgatcgcgaccgaggcctgccgcgcggcctcgaacgcggagggttttcgcagccgcgttgccgccgagaccggcatcgagctcgaggtgatcgaccgcgagaccgaagccgcgctcgccgtgctcggctgctcgccgctgatcgatcccagaggacgcggcgcgatcctgttcgacatcggcggcggctcgacggagctggtgcggatcgagcgcgatcccgcagatccggaaccgcgcatcaaggcctggatgtcgattccctacggtgtggtcacgctcgccgagcagttcggcggtcgggacgtgacgcccgggatctatgccgcgatggagcaggaggtcgccagccatgtcgcgccgttcgcagaagagcacggtcgcgagctcgccgacatgcatctgctcggcacgtcgggcacggtgacgacgctcgccggcattcacctcaatctcgcccgctacgaccggcgccgcatcgacagcatctggatgaacgacgccgacatcaccgcgaccatcagcaagctgctgggcatgagctacgaggagcgcgccgccaacagctgcatcagcgtcgagcgcgccgatctcgtgctggccggctgcgccatcctcgatgccatccggcgcgcctttccgctgccgcgcctgcgcgttgccgaccgcggcctgcgcgagggcatgctggtcgagatgatgcgcgaggacggcgcgctcaggagctggtga

SEQ ID NO: 5217 - DNA, 687 bp, BradyrhizobiumColbertium
atggccaaggacaccaccggccgcttgcacgtccaggtcaagaccggcggcaagcgcaaactgtcgtcgaagctgtggctggagcggcagctcaatgatccctatgtcgccaaggccaaggcagccggctatcgctcgcgcgcggctttcaagctcctcgagatcgatgacaagtatcggctgttgaaacccggcatggccgtggtcgatctcggcgccgcgccggggggctggagtcagatcgcggccaagcgcgtcggctcgacggagggcaagggcaaggtcgtcgccatcgatctgttggagatgcccgagattcccggcgtcgatttcgcgcagctcgatttcatggacaatgatgcccccgacaagctcaccgcgatgctcggcggcaaggccgatgtcgtgatgtccgacatggccgccaacacgaccggacaccgcaagaccgaccagctccgcatcgtcggcctggtcgagaccgcggctgcgtttgcccgcgatgtgctcaagccgggcggcacgttcctcgccaagacgttccagagcggcgccgatgccgacctgctcgcccagctcaaacgcgattttgcagcggtgcgccacgtcaagccggcggcgagccggcaggattcctcggaacgctacgtgctggcgacggggtttcggggcggggaaacggcgtag

SEQ ID NO: 5218 - DNA, 1491 bp, BradyrhizobiumColbertium
atggtcgacaagcaacgcgtcattccgctgatcgtggccactgctctcttcatggagaacatggattccactgtcatcgccacttcgctgccggcgatcgccgccgacatcggcaccagcccgctgacgctgaagctcgcgatcacgtcctatcttctatccctcgcggtgttcatcccggcgagcggctggaccgccgatcggttcggggcgcggatggtgttcgcgatcgcggtcggtgtgttcatggtcggctcggtcggttgcgcgctctcgacctcggtcaccgacttcgtgttcgcgcgcatcctgcagggcatgggcggggcgatgatgacaccggtcgggcgcctcgtgctgctgcgctcggtcgacaagagcgcgctggtcaatgcgatggcctgggtcaccgtccccgccctcatcggccccgtgatcggaccgccgctcggcggcttcatcacgacctacgcatcctggcactggatcttcctgatcaacatcccgatcgggttgctcggcatcttcatggcgctgcgctacatcgatcccatcaagagcgaggaacgcgagccgttcgatctctatggcatggtgctcgcgggcatcggcctcgcgggtatcgccttcggcctgtcggttgccggtctcaacctgttgccctggagcacggttgccgcgttgatcgcaggtggtgcgatctcgatgacgctctacgtcattcacgcgcggcgcaccgggtcgcccgtgctggatttttcgcttctgaggctgccgacgctgcgggcggccgtgttgggcggcttcctgttccggctcggtatcggcgcactgcctttcctgctgccgctgctgatgcagatcggtttcggcctctcgccgttccattcgggtctcgtcacctttgcctcctcgttaggagccatgggaatgaagacgctggcggcgcggatcatccgcaccttcggcttccgcaacctgatgacggtgaatgcgatcatcagcgccttcttcctcggcgtctgcgccctgttcacggtgacgacgccgctgctcatcatcatggtcatcctggtggtcggcggcttcttccgctcgctggagttcaccgcgatcaacacggtggcctatgccgaggtcgagaccgcgcagatgagccgcgccacgacgctcgtcagcgtcaaccagcagctggcggtctccgcgggcgtcgcgctcggtgcggcctgcgtcgagacgacgatgtggttcagtcatgtcagcgagctcaacgccaccgtgttcgcgccggctttcgtcgtggtcgcgctggcctcggcggcgtccagctggttcttctggcagatgcccgccgatgccggccacgagatctccggccgaaaggcggtcgagatcgccagccgcaagggcgcgggcaagggtgccgagaaggcggcggtcaaggcggcgtcggaggatacgcaggacgtgcgggatcagcggctggggtag

SEQ ID NO: 5219 - DNA, 1494 bp, BradyrhizobiumColbertium
atggccacggtgcaacttcagggcatccgcgaagcctttacgttcgacgacgtgctgttgaagccgggcctgtccgacgtcatgccgggcgaggtcgacatccgttcccgcgtcacccgcgccattccgctcaacattccgatcatggcctccgccatggacacggtcaccgaggcccgcatggcgatcgccatggcgcagtccggcggccttggcgtcatccaccgcaatttcgatccggaagggcaagctgctcaggtccgccaggtcaagcgctacgagtcgggcatggtggtgaacccgctcaccatcagccccgacgccacgctcgaggacgcgctgaagctgatgagcgatcacggcatctccggcattcccgtcgtcaccggcgccggcaagtccacgcccggcaagctggtgggcatcctcaccaaccgtgatgtgcgctttgcgaccaatcgccagcaaaagatctccgagctgatgacgcacgaaaacctcgttacggtccgggagaatgtcagccaggacgaggcgcggcggatgctgcatcagcatcgcatcgagaagcttctcgtcgtcgacgaccaatatcgctgcgtcggcctcatcaccgtgaaggacatggagaaggcggtcgcccatccgctcgcctgcaaggacgcccaggggcgcctgcgtgttgccgccgccaccaccgtcggcgacagcggtttcgagcgcaccgagcgactgatcgatgccggcgtcgacctcgtcgtcgtcgataccgcgcacggccattcccgtcatgtgctgcatgcggtgaaccgcatcaagcgcctgtcgaactccgtccaagtcgtcgccggcaacgtcgccaccacggaaggcgcgcaggcgctgatcgatgcgggggccgattgcatcaaggtcggcatcggcccgggctcgatctgcaccacgcgcatcgtcgccggcgtgggcgttccccagctcactgcgatcatggatgcggtggaagcggcgaagaaggccgacattcccgtcatcgccgacggcggcatcaagttctccggcgaccttgccaaggcgctcgccgccggtgccgacatcgcgatggtcggctcgctgctggcgggtaccgacgagacgcccggcgaagtattcttgtggcagggccgttcctacaaggcctatcgcggcatgggctcggtcggtgcgatggctcgcggctcggccgaccgctatttccagcaggacatcaaggacacgctcaagctcgtccctgaaggcattgagggccaggtaccctacaagggcgctgtcggccacgtcatgcaccagctcgccggcggcttgcgcgccgcgatgggctatgtcggtgcgcgcgacatgaaggagctgcacgagaaagcccagttcgtccgcatcaccggcgccggcctccgcgaaagccacgtccacgacgtcacgatcacgcgcgagagcccgaactatccgggcgggggttag

SEQ ID NO: 5220 - DNA, 465 bp, BradyrhizobiumColbertium
atgacatcgctgaggcagcagatcgggcaaatgggtctcgcagcaacgaagagcatggcttggaaagtcacggccgccctggcgtcctttccggtcctgatctttgcgatcggcccggtgctctcggcgtggttcgctgacgacacccctaatctcggtgaggcggcacattatctcgcaggttttgctctcctcttcctgccaacgtggatcgcgctctttctcagtcacccctgcgttttgtttatctacctgttgaatttcctggccttcgtgacgtctctgctctgcctcgccggcataaccgtcaacagctgggtcagcctcgacggccaagcgctgtgggcagtcctggcgacgcccgttgcgctgatctggtcgctgatgaacagcaagcgaccggatgcggcgaagctgaatgactcggctccgccgatcccatcacatggcgttgcgtcggcgtaa

SEQ ID NO: 5221 - DNA, 1023 bp, BradyrhizobiumColbertium
atgtcccaaggcaaacgcatcgttctcgccgcacgtcccgtcggcgaacccaagccgtctgattttcgcctggaggaattcgctgttccgacgccggggccgggcgaggtcctgctgcgcacgatctggctgtcgctcgatccctacatgcgggggcgcatgagcgaggggccgtcctacgcagctccggtgccggtcggcggggtgatggaaggcgaggcggtcagcgaagtcgcggcgtccaacaatcccgatttcgcagtcggcgacatcgtgcgcatccgctcgggatggcagacccatgcgatctcgaacgggaagggcctgatcaaggtcgatcccaagctcggtccgatctcgacctccatcggcgtgctcggcatgcccggcatgactgcctatacgggtctgctcgacatcggcaagccgcaacccggcgagaccgtcgtcgttgccggcgcttctggcgcggtcggctccgcggtgggccagatcgccaggatcaagggcgcccgcgcggtcggcatcgccggcggcaaggacaagtgcgactacgtcgtgaaggaactcggcttcgatgcctgcatcgatcaccgcgatcccgatctcgccgccaagctcaaggacgcctgccccaagggcatcgacgtctacttcgagaatgtcggcggcgccgtgttcgaggcggtcttcccgctgctcaatccgttcgcgcgtgtgccggtctgcggcctcatcgcccattacaacgacaccgaggccaagccgccgaaatgggccgcgagcctgatgcgcgcgaccctgaccaagcggctgacgttccgcggcttcatcgtgtccgacttcgccgcccgccatggcgacttcctgcgcgacatgtcgacctgggtccgcgagggtaaggtcaagtacaaggaattcgtcaccgaaggcctggagagtgcgccgggcgcgttcatcggcctgctgaagggagccaattttggcaagcagctggtgcgcgtcggaccggacaaggcttag

SEQ ID NO: 5222 - DNA, 294 bp, BradyrhizobiumColbertium
atgttcgagatcagtattttctgcgtaatcctcctggccgccggctattgggcgaccatgttcatcatgggccgtcgcgacgacgtcatccatggcaggttcgtgcacacggaggaggagggcgatttcacgccggccgcgatgcccgcgccaccgccgtttccgaagcgtccggtgaaagctgcgcagtccgctggtattcagccagtcggcaccgaggccaagcccgtgaacagcgaggcgctgcaatccctgctcgccgcgatccagcaggatctcaagagcgtcgcttag

SEQ ID NO: 5223 - DNA, 840 bp, BradyrhizobiumColbertium
atgcccgaatttcgcctcacccagatttccgacacccatctcggccggcgctttcccggcctgatcgccaacttcgaggcgatcggcgaccacatcgacgccggcaggcccgacctggtcgtcaacaccggcgacgtctcgttcgacgggccgacaagccgcgacgacgtcgaattcgcgaagggcttgcacgacgcgctgcccgtttcctgccgctatctccccggcaatcacgatatcggcgacaatccgacgacgatcggtccggcgccgaagcctccggtcaacgaggcgcatcgcgggcagttttgcgagatcatcggcgaagaccattggtcgttcgaggcctgtggctggcgcttcatcggcctcaattctctggtgatgaactcggggctgcctttcgaggcccagcagttcgattggctcgcctccgagatttcgcgcacgaacggcgggccggtcgcgctgttcctgcacaagccgctgtttctcaaccagcccgacgaccccgagacgccggagacgtcgatccgctacgtgccgcagccggcgcgagcgcggctgatcgagatgttcgggaaggtcgacttgcgtctggtcgccagcggccacgtgcaccagcgccgcgacttcacctggcgccacacccgccacgtctgggcgccgtcagcgggcttcgtcatcaacgataagcggcaggaccgcatcgcggtcaaggaagtcggcctcgtcgaataccgcttccagcccgacagtctcgaggtccgacacgtcagggcggcgggccagcgcgatgtcgatattgaggaattgcttgcccagatgggcgagcagtga

SEQ ID NO: 5224 - DNA, 615 bp, BradyrhizobiumColbertium
atgaacaccttgtccagcctcttcaccgcatccgccagcggccagctcggcattctgatgtctgcgctatcgggcatcgcgacggcgctggcggtcgcgctggccatgacggtgtacttccgcctgagctatcgaacttggcgcgatgtcgcccggcatggcctggctgcgttcgctgcactcgccttgttcgcctttgccgcctacgacatgcgccacgcggcgcttgcttatctcggcctcaatccgtccaagcccgccatcgaattcgagatccgcatgccgcgggagatgctggcggcggtcaccgacagccagatcgagctgcacaccgatcgcaaccagaccctggcgctggtcgatggcgtgcgggatcttgccgacgggcgggcggtgctgcgcggcgcggtggcgctcaaccaccgcacggccgaccgcgtcctggtcgtgaacctgcccggcaagggcacgttcgaattccgcctgcgtctgccggcgcaaccgcatcgctccgagcagttcggtccctggcatctggccgaccgaatcgcatcgccgctcgccggcgcggtcgcaccgcaggacggctacacgatccgctaccgcgtgctttaa

SEQ ID NO: 5225 - DNA, 423 bp, BradyrhizobiumColbertium
atgtccgttcaaatggtcctgctgccggtcttcgtgcaggtcgctctcaccttcgcgcttctgatcgggatggtcatggcgcgccgcaagacgctggtcgcgggggagaccaagatccgcgacattgcgctgggcgagccgaactggccgaagggcgccacacagatcgccaattgctgccgcaaccagttcgagctgccggtgctgttctacgtcctgatcgcactggcattgccgctccgccgcgccgatctcttcatcgtgctgatgtcctgggtgttcgtggtgacgcgctttgcccacgcgggtgttttcgtctcctcgaacgatctgggccgccgctccaccgtgtggctcgccggcgtgctggtactgctggcgatgtggatctacttcgcgctgaagcttctgctgctgatctag

SEQ ID NO: 5226 - DNA, 1302 bp, BradyrhizobiumColbertium
atgacacccgctgcacggctgtccgcagccatcgaactgatcgacaccatcgagagggaccgcgtgcccgccgccaaggcactgaaggagtggggcaccgcgcaccgcttcgccggttccggcgaccgcgccgcgattgccggcctcgtctgggacgtgctgcgccgctacgcctcgagcgcattcctgatggattccgataccgcgcgggctaggctgatcggcatgctccgcctcgagcgcaacatggatacggccaccatggccgcgctgttcgacggcagccggtttgcgccggcgccgctgaccgaggccgagcaggccgcgctcgcctcgcgctccctcaaggacgcgccctcggcgatcgccggcgattaccccgaatggctcgacccgcatcttgcaaaagtattcggcgagacccgcgccgcggaagccgccgcgatggccagtcgggccccgctcgatttgcgcgtcaacacgctaaagtccaatcgcgacaaggtgctgcgcgcgcttgctcatcttcatgcgaaaccgacgccctggtccgcaaccggcgtgcgcatcgagctttcggccgatgcgcgcaatcccggcatccaggcggaagaggatttcatcaagggcgcaattgaagtgcaggatgagggatcgcagcttgcggcccagctcaccgcggcaaaacccggcgagcaggtgatcgatctctgcgccggcgccggcggcaagacactggcgctcgccgccctcattcagggcaagggccggctgatcgcgaccgaccgcgacaagcgccagctcgcgccgatccatgagcggctgtcgcgggccggcgtccacaacgccgacgtccgcacgcccaagggcgaggcggatccgctggccgatatccgaggcacagccgacctcgtcgtgatcgacgccccctgcacgggaaccggcacctggcgtcgcaaccccgacgccaaatggcggatgcgcccgggcgcgctggagatccgcctgcgcgaccaggccgaggtgctggagcgggcggtgccgctggttaaggctggcgggcgcatcgcctacatcacttgctcggtgctttcggaggagaacggggagcaggtaagggcgttcaccgcacgccatcccgaattcgcggtcgtcccccccgagcagaccgcgagcgtgctctgggacaaggcggaagcttttggcgaggccgcgctgaagtcgacggaaggctggctgatgacgtcgcggcggacggggacggacgggtttttcgtgtcggtgctgaggaaaatcggctaa

SEQ ID NO: 5227 - DNA, 204 bp, BradyrhizobiumColbertium
atgggcaccgtgaagtggttcaacacccaaaagggttatggtttcatccagccggacgacggccagaaggacgtgttcgtccacatcagcgcggtcgagcgcgccggcctctccaccctcaacgagggccagaaggtctcgttcgacatcgtcgccgatcgccgcagcggcaagtcctcggctgacaatctccgcgtcggctaa

SEQ ID NO: 5228 - DNA, 333 bp, BradyrhizobiumColbertium
atgaagctccccacctcccccttcaccgtcaccgactggagcaagatcgacgtgaccacgcatcccggcgagagcggcgaggcaaaatggcgcacgctcactatcggcgatctacgggtgcggatggtggagtattcgccgggctatgtcgccgatcattggtgcgaccgcggccacgtgctctacgtgttgaagggcgacctcgactccgagctgcgcgacgggcgcaagttcaagcttacggcgggaatgagctaccaggtgtcggattttggcgacgccgcgcaccggtcctcgaccgcgacgggcgccacgctcttcatcgtcgattga

SEQ ID NO: 5229 - DNA, 372 bp, BradyrhizobiumColbertium
atgccacagcatcatccaccgtcaatgctggccgcgctcggccgcacctgggtcgaggcctggaacgcgcgcgacctcgagcgcgagcacgcgctctatgacgaggcagccgtgatgacctcggaccgcatccccgcgatggggttcgacgccagcggcacggtgcggggcaaggaggctttgcgcgcctattggggcaaggcactcgggctgctgccggagctgcatttctcgctgatcgatctgttcgtcagccccgacagcgtcgtggtgttctatgcgaacgagcgcgggaagaagatctgcgagtatctgcgggtgaacgatgcagggctgatcgtgcagggctcggcgaaccatttggtgcactag

SEQ ID NO: 5230 - DNA, 1656 bp, BradyrhizobiumColbertium
gtgggcgcgcgcagccgcgcggttgcggcccgggccgcgccagcgtatctgctggccatgacagcagcacagaacgaccgctccgcgtcgacgccctcggtggcctcggcgcacgacaagattctcatcgtcgacttcggcagccaggtgacgcagctgatcgcgcgtcgcgtccgcgaggacggcgtctattgcgagatcgtcccgttcaacaaggccgaagccgccttcgacgagatgaagccgaaggcggtgatcctctccggcggccccgagtcggtgcatgaggccggctcgccccgcgcgccgcaatcgatcttcgattccggcgtgcccgtgatgggtatctgttacggtcagatgaccatggcggcacagctcggcggggaggtcgagggcgggcatcaccgcgagttcggccgcgccgatgtcgaggtgaaagccgacagccagctgttcgcggacgtctggtcgtcgggcagcaagaaccaggtctggatgagccatggcgaccgcatcaccaagatgccgccgggcttctccgtcgccggcacctcgccgaatgcgcccttcgcgatcatccaggacgagaggcgcaaatattacggcctgatgtttcatcccgaagtggtgcatacgcccgacggcgcaaaactcattcgcaacttcgtccgcaagatcgccggtctcaccggcgactggaccatgcgcgccttccgcgaggaggagatcgccaagatccgcgcgcaggtcggcaagggcagggtgatctgcggcctctccggcggcgtcgattcagcggtcgcggccgtcctgatccacgaggccatcggcgaccagctcacctgcgtcttcgtcgatcacggcctgatgcgcctcaacgaggccgagcaggtcgtcgacctcttccgccaccactacaacattcccctcgtgcacgtggacgcctcgaaacagtttttgggcgaactcgagggcgtcaccgacccggaagcgaagcgcaagaccatcggccgcctcttcatcgaggtgttcgaggccgaggccaagaagatcggcggcgccgatttcctggcgcaaggcacgctctaccccgacgtgatcgagagcgtctccttcaccggcggaccgtcagtcaccatcaagtcgcaccacaatgtcggcggtctgcccgagcgcatgaacatgaagctcgtcgagcccttgcgcgagctgttcaaggacgaggtgcgcaagctcgggcgtgagctcggtctgcccgaaatcttcgtcggccgccacccgttcccgggcccgggccttgccatacgctgccccggcgagatcacccgcgacaagctcgacatcctgcgcaaggcggacgccgtctacatcgaccagatccgcaagcacggcctctacgacgagatttggcaggcttttgcggtgctgctcccggtcaagaccgtcggcgtcatgggcgacggccgcacctacgactacgtcgtgggcctgcgcgccgtcacctcgaccgacggcatgaccgcggacttctaccagttcgacatgaaattcctgggcgagacggcgacgcgcatcatcaacgaggtgaagggcgtgaaccgggtggtgtatgatgtgacgagcaagccgcccgggacgatcgagtgggaatga

SEQ ID NO: 5231 - DNA, 1308 bp, BradyrhizobiumColbertium
gtgcaagtctcctcctttgccccagagccatacatcctgatcctgacaggagcgggcctgctcatcgcgctcgttgcctggctaccactcgccctaaagcggcttcccctgtctctgccgatcgtctgcatcgggattggtgctgcgatcttctcgctgccggcagtctcgctccggccactgccgctcaactacccggacttcaccgagcgtttcaccgagttcgtcgtgatcattgcgctgatgggggccggcttgaagctcgatcgcccgttcagttggcgaaagtggagcgtaacctggcggttgctggcgatcacgatgccgatcggaatccttgcaatcactgcattggggggatggatgctgggcctgccctggatcgcggcgctgttgctggcggcgagtctggcgccgaccgatccggtgctcgcgtccgacgtccaggtcgggcctcccaagaccggggaagaggatgaggttcgcttcgggctgacatccgaggcaggcttgaacgacggcttcgccttcccgttcgtgaatcttgcgatcgcgctcggtttggcgatggcaacgggtgaaccctgggcagggcagtggctgctccacaatgtgctgtgggagattggcgccggcctcatcggtggctggctcattggccggctgttcggctggctcacgtttcacgttcccgccgacacgaagctgtcgaggacgggagacggtctcatcgcgatcgcggccacgttcgtttcttacggtgtgacagaactcatccactgctacggcttccttgccgttttcgtcaccgcactgacgctgcgccgatcgcaccgcgaccacgaattcaacaggcaaatgcacgacatcaccgagcaggtcgagcggctggccatgatggtcctgctgctgctgttcggcggggcattggtcagcggtttgctgcgcccgctcgagttggtggacgtggcggcggcggcggcgattctgctcgtcatccggccgatcggcggtttgattgcgctggctggattcaaggctcgcttctcggagaagatgacgctggccttcttcggaatccgaggtgtgggctcgttctactatctggcctatgggctcaaccatatggagttgaccgtcggcgagcggctgtgggctatcgttggcctcgtagcgctgttgtcgattctgcttcacggactgactgtcacgccggtcatgcgacaactcgacaggagtcagggtcgggatccagacgccgatgatgctgctccaccgccaaacgtgcagagaccggcgtcggcttag

SEQ ID NO: 5232 - DNA, 1425 bp, BradyrhizobiumColbertium
ttggatcttgcgcgcttccagttcgccttcacggtggtctggcacttcctgtttccggccttcaccatcggactcgcgagctatcttgccgtgctcgaaggtctgtggctgtggacgggccgcggcgcctatctcgatacctaccgctattggttgaagattttcgcggtcgccttcgccatgggcgtcgtgtcgggtatcgtcatgtcgtaccaattcggcacgaactggtcggtgtttgccgacaagacatcgccggtgctcggaccgctcctcggctatgaagtgctgacggcattctttctcgaggccggcttccttggcgtgatgctctttggccttggccgcgttggtccgcgcctgcatttcgtcgcgacctgcttcgtcgcgggcggcaccttgctctcggccttctggattctcgccgcgaattcctggatgcagacgccgacgggacatgggacggggccggacggccagttcattcccgagagctggctcgcaatcatcttcaatccgtcgttcccctatcggttcgcccatactgtcaccgcggcctacctgacgaccgcgatgatcgtgggggccgtgggcgcctggcaccttctgcgggacaggatgaacgaacgcgctcgcatcatgttttcaatggcgatgtggatggcggcgatcgtggcgccgatgcagctcctgatcggcgatctgcatggcgtgaattcgtaccaccatcagccggtcaaagtcgcggccatggaaggccacttcgagaccgaacgccgtgcgtcctccatcctgttcggcatgccggatgccgaagccggggtgacgcgcggccaaattgccattcctggcttcgcgagcctttatctgacgcacagccttgatggagaggtcaaggggctcaaggctttcccgaaagatacatggccgaccaacattccactcgtcttctgggcgttccgcatcatggtcggcctgggaattctgatgatcgtgctcggcatggcctcgctcgttctgcgttggcgcgacgggctgtacgacaccccgtggctgcaccgctttgccgtggccatggggccgtcggggctgatcgcggtgacggccggatggacggtgacggaggcgggacgccagccattcacggtttacggactcctgaggactgccgatagcgtcgcgccgatcgccgcgccggccgtggccgcgtcactggcggcattcgtagtcgtgtacttcgtcgtgttcggcgcggggatcgcgtatctgtttcacctcttccgccagacgcctgaagccggcgagcacggaccgccacagggccagccggtccgcacggccggcattacgccggccccagcgttgatagccggggcgccggcgacacacagagcagagtcgcgtcaagcggggatcaggccatga

SEQ ID NO: 5233 - DNA, 1011 bp, BradyrhizobiumColbertium
atgagcatcgacctcacactgatatgggccctgctgatcgccacggccgtgctgctctacgtgatgatggacggcttcgaccttggcgtcggcatcctgtttccggccgaggtggcgagagccgaccgcgacgtcatggtcaattccgtggcaccggtctgggacggcaacgaaacctggctcgtcctcggcggcggcggattgttcgcggtgtttccgctggcctacgcgacgatttttcccgcgctctacatgccgcttattctgatgctgctcgcgttggtgtttcgcggagtggccttcgaaatgcggtttcgagcgcggacgcccgccggtgaaacatggtgggaccgcgccttctcgtggggcagctttgccgccgcattcctccagggcgtctgccttggcgccatcgtgcagggcattcgtgtggaggggcgtgcttacgccggcgggtggtgggactggctgacgcctttctcggttctgaccggtattgccctggttgtcggctacggcctgctcggcgcgtgctggctggtttggaagaccgacggcgcgcttcaggcacgctgccgcaactatgcacgcgttctcggctttgcgacgctcggcttcattgccgtcatatccgtgatgatggtcatccagagcccggcgttccgggagcgatggctgacgctgccaaacatgctttacgcagcgcctgtgccagttctcgtggccctgctggcatggcgctttcatcgcgcgctcggcaagggcgaggatgtggtgccgttcctgtgcgcgcttggcttcttcgtgctgtcctacatagggcttggcatcagcatgtggccgatgatcgtgccgccctccattacgatctggctggcagccacgcatcccagcagccagttgttcctgctcgtcggcgcggcggtgctggtgccggtgatcctcgtctatactggctacgtctactggatatttcgcggcaaggtgcggcacggcgaggggtatcactga

SEQ ID NO: 5234 - DNA, 120 bp, BradyrhizobiumColbertium
atgctgcgtgtgtctcgaacctggaggcagctgttatggttcgtggcgctgtgggcggcgggtgtgattacgctgctggcgatcgcaatgcctatccgatggctgctgaagacggggtag

SEQ ID NO: 5235 - DNA, 147 bp, BradyrhizobiumColbertium
atggccttggtcaaggctgcggcaaggaacgcgagcagaaaggaccgctgcgaagcggcagagtgcagcgacgatcccctcgggaagcccgtgcatcgccataccgagcgcgaccagcgcaagcacgctggccaaccgatcgagtag

SEQ ID NO: 5236 - DNA, 1161 bp, BradyrhizobiumColbertium
atgatccgtctctcggcactaagttcgacacggctgcgcattgcgctggtcatcgtgctcggattgatctttgcggccctgcaactcactgcaaatgttgcgccgtcgcctgaaagcacgtctgcttggcagcacgatggaaggcttcacgttttctttcatccggactgccctcattgccacagggccatcgagtttctcaggacacaaccgcgtgtcgatttcgtccttcacgatgtgtcgaattcggccaacgaaaccctgttccttgccattgctcgtcagcacgccataccggagcacgaacttggcgttcccctcttcgtgcgcggctcgcgctacctgctcggcttcgagtcggcggagaaaacgggcagggacctgctggctcttgtggctgatgagaccgcgattgcgcgtccggaggacgccgcccgcaaaataagcttgccgtggctgggagacattgaccccgtcggttattcccttccgacgctgggcattctgatgggcctcgccgacggcttcaatccctgcgccatgtgggtcctcgtctatttgatctcgctgatcgcgggcatcaaggactacggcaagatctggtggctggtggggagcttcgtcctcgcgtcaggcgtgctctacttcctgttcatgacggcgtggctgaacacattcctcgtggtcggtcatatccgcccgctcacacagatcgttgggctggtggcgatcgggatcggcatcgatcatctctatgagcttgccgtgacgcgtggcgtgaccgtctgcgacgtcggcaataccgaacagcggcagcagacgatgcaacgaatccgcaagatcgtcgccgcgcccgtcggcctggtaagtctgctgctgatcgtcggtctggcgtttaccgtcaacgcgatcgagttcgcgtgttcggcggcgctgccggcgatctacactcatatgctcgcgctggcagacctctcgaccggagcatactacgcctacatcggattgtacgtaacgttcttcatgctcgacgatctcgtcatttttggactcgcggcattcaccgtgcagaaggtcattgatacgcgctatgccgcgttgagccgcggcgccggtggcgtggtcctgatcgggcttggcctctggatgctggcgcgctga

SEQ ID NO: 5237 - DNA, 1068 bp, BradyrhizobiumColbertium
atgaagagtccggccctatcgcgcattttctcggcgagcctggcggctgtgatcgccatcgcgccatcgctctcgctcgcttgtacgcgactggtctatctcggcgccaacaatcaggtcgtcactgcgcggtcgatggactggcggtttgagatgccgaccaatctctggatattcccgagaggcatggcgcgcagcggcgaggtcgggccgaactcgctgaaatggaaatccaaattcggcagcgtggttgcctccgcttacgacgtttcgacgtcggacggcatgaacgaggcgggactggtcgccaacgtcctctggctcaccgagtccgaatacccgaagttcggtcccggcaagcccggcctgtccattgccgcctgggcccaatacgtgctcgacaatttcgccaccgttcaggatgcggttgcggtactcgagacggatccattcatgatcgtcaccgacaacgtgcccggacagaaattgctcgccacgcttcatctgtctctttcggacgccacgggcgacagcgcgatcatcgaatacgtcaatggccggccggtcattcatcacggccgcaagtaccaggtgatgacgaattccccggtcttcgaacagcagctggcgctgaacgaatattggaaggagatcggcggcacggtgatgctgccgggcaccaaccgcgccgcagaccggtttgcgcgggcatccttttacgtcaacgcggttccaaaagatgaaaatcccgaccgtgccttggccagcgtcttcagcgtgatccggaacgtgtcggtgccgttcggcatttcgacgccggatcagcccaacatttcctcgacgcggtggcgcacggtggccgaccatcaacgcaagctctacttcttcgagtccgtgctgactccgaacacattctgggtggatctcaagacaatcgatttttcaccggagaaggggcgagtgaagaagctcgatcttggcccccaacagtcgcgaatctttgccggcgatgcgaccgcgaatttccaggaggccgagccattcaagttcctgggtctgccgatgtga

SEQ ID NO: 5238 - DNA, 1044 bp, BradyrhizobiumColbertium
atgaagaagatccggatctttgggcgggtggtttgtatcgccctcacactcacgagcgcggccgccgatgcctgcacgcgattcgtctacgagacgggaaacaagacctatatcgttgcgcggtcgatggactggatggaggatcccaggaccgatctctgggcgttcccgcaagggatggcgcgcgacggaggcgtggggcgtggctccgtctcctggacgtcgaaatacgggtccgtggtcgcatccttctacaacatcgcgaccgtcgaaggcatgaacaccgccggcctcgtcgccaacacgctctacctcgtcgagaccgactatggcgacgccaaggcctcgggcaagccgctgatgtcggtcggagcctggactcaatatgcactcgacaacttcgcgacagtggccgaggccgtcgaagccctctcgcgcgagccgtttgccattgtcgcgccagcgcttcccgatggcaacgccgcaggcgggcacctgtccctggcggacgcctccggggacagcgcgatcttcgagtacgtgaaaggcaagctcgtcattcaccacaaccgatcctatacggtcatgacgaactcgccgcctttcgaccagcagctggcgatctcgacctactggaaaaacatcgacggcctctcgttcctgccgggcacgatcaattcttccgaccgcttcgtgcgcgcgagctgggctctccagtatgctccgaaggagaaggacaacaggctggcagtggccacgtccttctccatgatccgcgcgatctcggtgccgctcggccttgccgaggcgggcaagccgaatatcgccgggaccatctggcgctcggtttccgatattcaggccaagcggtactatttcgagtcgtcctacaatccctcgatcttctgggttgacctcgccaagctcgatctggccgccggctccaagccccgccgcctcgatctcaccagccgcccgatctatgcaggagaagtgtcggacaagttcgcaccggccgagcccttcaaattcctgtcgcagtga

SEQ ID NO: 5239 - DNA, 1260 bp, BradyrhizobiumColbertium
atgcccgtcgcgactgccgccagccagcctcccgccactgccgttgaaaccgaccccgaagccctcggctggatgcgcggctttccgccctcgcccgaccgcaccatcaccttccaggacggctcgttccgcagcttccccgaactgcgctgggcctggagcaacatccgccagctggtgccgacggtgaatgtgtggcgcggggcggggccggcgtcggtgctgccgcgggacgaccatgacatcggcacggtcgcttcgaccacgatggacggccggccaatgacgttcgcgaagatgctggaggagacctatgccgatggcatcgcggttttgcaccggggcacgctgatttatgagcgctatttcggcgcgctgaagccgcacaagccgcatatcggcatgtcggtgacgaagtcgttcaccggcgtgctcgccggcatgctggtcgccgagggcaagatcgatccgcaggcaccggtgacggactacgtgccggagctgaaggcaagcgcgtttggcgatgcgcgcgtgcatgaggtcatggatatgaccacggggctcctctacaccgaggtctacaccgacaagaattcggacgtgtggggcctgcggcgtgccaacggcatggctcccatcccgcccgactacgacggcccgaccaccatctttgatttcctcatcgcgcagaagaagcagggcgagcacggcaaggccttcgcctacaagaccgtcaacaccgacgtgctcgcttggatctgccggcgcgtcagcggcatgtctctctccgatttgctctccgagcgcatctggcagccgatgggagcggaggaggacgcgcattatcacgtcgatcgcatcggcacggagagcgggggcggcggtctctccaccacgctgcgcgatctcgcccgcttcggtgagaccatgcgcaatcacggccgcttcaacggccgccagatcgtgccgccgagggtggtcgaggatatcgcgcgcggcggcgatcccgaaaaattcaagccggccggctacaccacactgcccggcgcgtcataccgtaatcagtggtgggtcacccacaacgaacatggcgcctacatggcgcgcggcgtttacggtcaaggcatctacatcgaccccaaggccgagatggtgatcgcgcgctacgcctcgcatcccatggccggcaacgccgccaacgacccgctgacgctgccggcctacatggcgctggcgaaggcgctgatggcgggcgggtag

SEQ ID NO: 5240 - DNA, 345 bp, BradyrhizobiumColbertium
atgaaagttcgcaaattcgccctcgccggcgcttcgctcgaacgctcgccgggacaagacggcgatatcttcgccggcaatgtgatcgaccaacgccacggcggccccatcacgatcggtttcggccgctacgcgccgaaccaaaatctcgatgagacgatgaaggtcgacgatgtcatgatcgtcctcgaaggcaagctgtcggtcacgagcgacggcaacaccgtgaccgcggggcccggcgagatcgtccatatgccgaagggcgagaccgtcacgatccgctcacacgagcaaggcgccgtcaccgcctacgtcacctatccgcattggcaggaggcgtga

SEQ ID NO: 5241 - DNA, 324 bp, BradyrhizobiumColbertium
ttgacgcttgagcacaccgcgatcattggggatcattgggaccagttcggcccgggtgcggtgggcatcggttgggacctcgcgcttgcgggtcttgagcgctaccttgcgaccggagcatcggtcgatcatgaaacggccgaggcctggatggtctcgccggagggcaaggactttatgacgacaagcggcgaatcttggcgtgcggcgcatgtggcaggcggggtcgatccggccacggcgaaggagcggtcggaccgcaccatcgccttttatcgcggcgagacgccgcccgatatcacgcatcccggcacaggaagctga

SEQ ID NO: 5242 - DNA, 363 bp, BradyrhizobiumColbertium
atgcacgccttcgaagtcctcgccgatcccgtgcgccgtcgcatcctcgagctgctcgcgcccggggaaatggcatccggtgaggtcgtcgaagcgatcggggccgagttcggcatcacgcaggcggcagtctcgcagcacctcaaggtgctgcgcgagagcggttttgcgaccgtgcgggcggaggcgcaacggcgcctctattcggtggacgctgcgggcctccgcgccgtggattcgtggatcggccagttcaggacgttctgggagccgaagctcgatgcgctggcgaccgagatcgcgcgaggcaaacgcgaacgtcgcaccgcgccaatgaccaagcgcggcgggaagagggcttga

SEQ ID NO: 5243 - DNA, 510 bp, BradyrhizobiumColbertium
atgaccatccgccctgtcctccgctaccccgaccgccggcttgcgagccctgcccgtccggtcactgatttcgacgacgccttgcgcgagcttgcgctggacctgcttgatacgatgcgcgctgcgcccggcatcggcatcacggcgccgcatatcggcgtgcccttgcgtgtcgtcgtgctggagctcgatgccgaggccggcccgcagacctacgtcaacccggagatcacatggaggtcgcccgagatgatcctgcatcgcgagggcagcgtctccatgccggggatcaatgacgaggtgcagcgtcacgcccgcgtgcggatcagctatcaggatctcgacggcaacatgcacgccgaggagtcggaaggtttgcgcgcggtctgtcaccagcacgaaattgaccagcttgacggcatgttctggatccagcggctgtcgcggctaaagcgggagcggctgatcaagaagttcgagaagatgtcgcggagttcacaggctggatga

SEQ ID NO: 5244 - DNA, 585 bp, BradyrhizobiumColbertium
atgagcaacgtttcatccacagccaacgacattctcgcctgcgcgcgcaccctgatcatcgcgggcggctacaacggcttcagctacgccgacatcgccgatgtcgtcggcatccgcaagccgagcattcaccaccatttcgccagcaaagtcgatctggtccggaccctcgtgtcgcgctatcgcgaggaggcgcaagccggactggcggcgcttgaacgcaacgttgcggatcccggcgagcagctcagaagctacatcgcgtactgggaggtatgtatcaaggacgcgacggctccgttctgcgtgtgtgcgctcctggcaagcgagcttccgatcttgcccgaggaagtcgccgttgaagtgcgagctcatttccgcgcgctggcctcgtggctgacctcggcgatggagcgcggcaagcggcagggacgattgcaactcgccagcacggcaaggatcgaggcggaatcgtttatggcaaccgttcacggcgcgatgctgtcggcgcgcgcctatggcgatcccaagatgttcgggaccatcacgcggccgctgctggatcggctttccagcaggcactga

SEQ ID NO: 5245 - DNA, 573 bp, BradyrhizobiumColbertium
gtgagagctcatgaactgacctcggatacggccgatcaatggctgaagcagtactacttcctgcgggcggcgttttccgttggctgggtcgttctggccttggccatcgcgccgtcatctgcggtgatcgcggcgacgctactcgttgcgtatccggcatgggacgccgcggccaactatctcgacgcgctctcgaacggcgggttgaaccagaaccgcacgcagggcctcaacgtgctcgtcagcctggcgaccaccattgcggtcatcctggccttgcaggtcagcatgaactgggtgctcggaatcttcggcgcctgggcgatcctgtccggattgctccaactcggcactgccttgcggcgctggaagctgtttggcgcgcaatgggccatggttctcagcggaggccagtcggcgctggcgggcggcttcttcatctttcaggcctcgatgccagcaatcccgtcgatctcgaatgtcgcgggctatgccgcggtcggcgcgctctacttcctggtctcggcggtctggttgaccgtcacggattggcggcgtcgtgccgccacatga

SEQ ID NO: 5246 - DNA, 180 bp, BradyrhizobiumColbertium
atgacttacggcgtcagcaacgtgcaaggcctggaccgtcctttgactcgtcgggcaaaacaccggcacaaatgccacatcccgccgatcctgatctcgtccacgactccgatcgtgaccacggctggtccgttcgacggccggttcccgcacagggacgtcacgccgtatgcggcgtga

SEQ ID NO: 5247 - DNA, 1218 bp, BradyrhizobiumColbertium
atgacttcttccaactatcgctgggtgatcgtcgccgccggcggcctgctcggctgcgtcgcagtcggcggcatgttttcgctgccggtgttcctgcagccgatcgcaaaggacaccgggtggtcggtgaccggcatttccagcgcgatgacggtcggcttcctggcgatggccttcaccagcatggcctggggcacgctgaccgatcgcttcggcccgttgcccgtggtgctgacgggatcgatcgtgctcacgctcagcctgttagccgcgagccatgcgacctcgctgatcgtgttccagatcgtgttcggcctcctggtcggcgcgtcctgtgcggcgatcttcgcgccgatgatggcgaccgtcaccggctggttcgacacaaaccgcagcctcgcggtgtcgctggtctccgccggcatgggcatggcgccgatgacgatgtcgccgttggcggcctggctcgtctccggccacgactggcgcacctcgatgcagatcatcgcgctcgtggtcggggccatcatgatcccggtctcgttcctggtgcgccgtccgccggcgctcgcgcaggctgctgtcgcaccgggcgagggcgctgcgcaggccgagatgtcgatgggcgacgcgctgcgctcgccgcaattcctcatcctgctcgcgaccaacttcttctgctgcgcgacccattcgggtccgatcatccacaccgtcagctatgccgtgagctgcggcattccgctggtcgcggcggtgacgatctacagcatcgaggggtttgccggcctgggcgggcgcatcgccttcggcctgatgggcgaccgcttcggcgccaagcgcgtgctggtttctgggctgctgctgcaggccttcggcgcgctcgcctatgtcttcgccaaccagcttgccacgttctacgcggtcggcgccatcttcggcttcatctacgccggcaccatgccgctctacgccgtcctcatccgcgagaactttccgctcaggatgatgggcacggtgatcggcggcacggcgatggccggcagcctcggcatggccacgggcccgctcgccggcggcctgatctacgacgccttctcgagctacgcctggctctacatcgcctcgtgggcgatgggccttggtgcgttcctgatggcgatgacgttccggccgttcgcaaagccgcaaggcgaggtggcgccggcgccggcgtga

SEQ ID NO: 5248 - DNA, 387 bp, BradyrhizobiumColbertium
atgacgacagacgagctcgccgagttctaccgcgactacatcgcctgcctgaaccggcgagactggccggcgctcagacaattcgtgcacgaagacgtcgcccacaacgcgcggcccctcgggctgccgggctatcgcgcgatgctggaacgggacattcgggagattcccgatctgcaattccacatcgagatgctgatctccgcgccaccccgcatcgccgcccgactgaagttcgattgcgcaccagtcgggacattcctgggtcttgccgtcaacggcaagcgcgtgtccttctgcgagaacgtgttctacgaatttcgcgacggcaagatccggcaggtctggtcggtgatcgacaagctcgcgatcgaggcgcaactctga

SEQ ID NO: 5249 - DNA, 873 bp, BradyrhizobiumColbertium
atgctcgacccggtctcccgcgtccgccgcttcaaccgtgccgtcacctccgccgtcggcgcgctcgacacctcctttctcggacgcggccggccgcttggtgcggcgcgcgtgctcaatgcgatcgggcacgggcgttccgatgtggcggagatccgcgactatctcgctctcgattcagggctgatgagccgcctgctgcgcagcctcgaagacgaggggctgatcgagaccgccgcgcatgaggacgatgcgcggcggcgtgtcgcaaaattgacgcgcgcgggccggcgcgagttcgcggcctacgaagcgctgtcgaacgcgcaggcggaaggcctcctcgcgcaacattcgcagcgcgaggccttattggcggcaatggacctgattgcctccgcgctgacgcgcgagcgcgtcgcacttgacgaggtggacccgcggagcgaacaggcgcgctactgcctcggcgagtactatgccgagctcgggcgccgcttcagccagggcttcgacgtctcgctctcgcgcgatcctgatgccaaggacatgcgccggccgcgcggcaccttcatcgtcgcgatgtcggacacactgccgatcggttgcgtcgggttgaagggaactgatcacggctacgccgagatcaagcggctgtgggtcgcgccggcagcccgcggattgcggctcggccggcgcctgatggatgcagccgaggatgcagcgcgggaactcggcatcgggctgctgcggctcgacaccaacagcgcgctgcccgaagccggccagctctatcgcagcacgggctggcgcgagattccccgcttcaacgatgatccctatccggacctcttcttcgagaagcgcctctga

SEQ ID NO: 5250 - DNA, 1665 bp, BradyrhizobiumColbertium
atgagcgggcaggagcgcaaggtcaagggatcggatctgttcgttgcggcgcttgagaatgagggcgttgacaaaatcttcggcattcccggcgaagagaatctcgatctggtcgaatccctccgcacctccaaaatcgagctgatcctgacccgccacgagcaggctgcggccttcatggccgctacccatggtcggctgaccgggaagcccggcgtctgtctgtcgacacttggtcctggtgctctcaacctgtctacgggcgccgcctacgcgcatctcggtgccatgccgatgatcctgatcaccggacagaagccgatcatgagcagccggcaggcgcgctttcagatcgtggacgtggtcgcgaccatgaagccgctgacgaagctgtcgcggcagatcgtcagcgcctccagcatcccgaccgtggtgcgcgatgcctttcgcgtcgcgatggaggagcggcccgggccggtgcatctcgagctgcccgaggacatcgcgggcgatgaagtgccgccggctcccgtgattccggttcatccgatcgagattccggttgcccatcacgttgcgctcgatcgggccgccgaactgattttggcagcaaagcgtccgctggtgatgatgggcgctgcgaccagccgaccgcgatcgacgcatggcatcgcaagcttcgtgcagcggaccgggattccgttcttcaccacgcaaatggggaagggcaccgtgcccggcggcaccaacctctacatgggcacggcagcgctgtccgagcgagactacgtccacgacgcgatcgatgcggctgatgtgatcgtcgccatcggacacgacccgatcgagaagccgccattcatcatggggccggcgggcccgaaggtgattcacgtgagctacacgccggcgagcgtggagctggtctactttcccgacgccgaggtcgtcggcgacgtcggcccaagtctggagctgctcgcggatcggatcgaaggcaggctgccgcaggcggcggcgctgctcccgctgcgcgaagagatattgaagcacctcgccgaccgggccaccgaagcgcgctggccgccgaccccgcagcggatcgtgcacgacatccgccgggtgatcccggagaacggcatcgtcgcgctcgacaacggcatgtacaagatctggttcgcgcgcaactaccgcacccgagtcgcgaacacgctgctgctcgacaacgcgcttgcgaccatgggcgccggcctcccgtcggcgatgatggccgcgatgctatatcccgaccgccgcgtgctcgccattgccggcgacggtggtttcatgatgaacagccaggagatggagacggctgtccgactcaagctcaatctggtcgtgctggtgctggaggacaatgcctacggcatgatccgctggaagcaggccgtcgatcgtttcgctgactacggcatgaccttccgcaatcccgacttcgttgtctacgggaaggcttatggcgcgaaaggacatcgcatcgagagcatcgaccgcttcggaccgacgctggaagaggcattccaggagggcggcgtgcatctggtctccatcccggtcgattattcggagaacgtgcgagtgctggtggatgagctaagggcgcacgagaaggcaaaggcgtga

SEQ ID NO: 5251 - DNA, 315 bp, BradyrhizobiumColbertium
atgggcgtcgacgttcacggcagggacgctaccaaggcggcaaagcgcgcggtgtccgatgcgatccgacattcgagcctcggcttcttccggatgatcgggaagaccgcgaacgacatgttcgtcgacgtcacgattgcggtgcccaacccggaggccgtcgacaaggaagccgtcgccaaggagctgccttacggcaccgtaacggttacggcggtcaaaggcgggctggagattccctcggccacggaagcggccaacgatccgatcctgatcgccaatgcggccgtgatcgtcagcttcgacaaggactag

SEQ ID NO: 5252 - DNA, 693 bp, BradyrhizobiumColbertium
atgtccgacaccgatctggcgctgctggatcgtccgatctggagcgcgttgacgacgagccagaggcacctggccgaaggcggcccacgggcgctgcgctatcccgtggacatgacgccgtttgccgacatggccgacatgtcggcggaaagctttgctgcgctcggtgatctgctgtccggttctcaggtggctgcgctgttcacgccggagccggtcgaggttcccgcgggcttcaaggtggtgctcgccgatacaggtgagcagatgatcggctcgccggccgacagcccgttgcgcgatgccgagatcgtcacgttgggggcggccgacgtgcccgcgatgatggcactgaccgagctgacgaagcccggtccattcgcgcggcgtactcatgagctcggcacgttcctcggcattcgctccggcggcgaactggttgcgatgacgggggagcgcatgaagccgggaaagtttgtcgagatgaccgccgtctgcgtgcatccggactaccgtgggcggggctacgcgcaggcgttgctcgcggcggtcgcgcgccggatcgaggctcgcggcgagattccgttcctgcacgtgttttccagcaacacgtcggcgatcgcgctctacgaacggcagggcatgtggattcgacggcgcctgcacgtcactgcgctaatgaaacaggcatga

SEQ ID NO: 5253 - DNA, 1188 bp, BradyrhizobiumColbertium
atggacgccaggacacctgatttttccgccgcacggacggcgatgcagcgctacgtcgatcaggagatcattccaggcgcatcctgggcggtgctgcgcgggcgcgaagtgctcgatcagcaatgcgtcggctttgccgatcgcgaggcgaacacagcgcttcggccggaccatattttccgcgcgttctccaacaccaagatcttcgtcacctgcgcgatcatgctgctggtcgaggaaggcggcatcgggctcgatgaccccgtcgaaaaggtcctgccgcagcttggcaatcgcaaggtgctgaagcagggcgcggcaagtctctcggacgtcgagcccgcaacaagcccgatcacgatccgcaagcttctgacccacacctccggcctgagctacggcatcttcgatcccggcacggtgctgttcaaggggtacaacgatgcgcgtgtgctcaatcctctgaccccgctctcggacctgatcgacaagcttgccgatctgccgctgtcctatcatccaggcacggcctgggaatattcagtggcgaccgacgtactcggccgtgtcgttgaggtcgtctcgggccagccgctcgacgtctttctcaaagcgcgcatcttcgacccgctcggcatgatcgataccggcttccacgtgccggaggcgcagcagggcaggctggtcgcgctctacaatggtgctgacgtgcttgaccctatgaagccgggtctcacgcgtgccgacaatcttccctttccgcaggcctatcggcggccattcccgaggctctcgggcggcggcggtctggtctctaccttgcctgatatgctcgcactggtgcgtgcgctgctgcccgggtctgatgcgctgctgaagccggcgacgctgcggctgatgatgacgaaccagctaggagcggggcagaccatccgtttcgcaactctcgggccgatccccggcaagggcttcggtctcggcggcgccgtcaccttcgcgccgacgccgttcgaccctccgaattcgaccggcgaattccagtggggcggtcttgccggcacccattggtggatctgcccggaggccaatactgcgggtgtgctgatggcccagcgctacatgggcttctggaatccgttcttcttcgagttcaagcggctggcctaccaggccgtaggcgcgaactga

SEQ ID NO: 5254 - DNA, 573 bp, BradyrhizobiumColbertium
gtggttgacgaggacagcgagctcggccgccgctacatcgcggcgatgcagctcgccgggcgctatgcctatgcgggccgcgaatgggtcgtcgagcgcgtccgccagatcatcggcggcagcgtgaccgagacggtgcacaaccaccacaactacgcctggcgtgagacccacgacggcaaggatctgtgggtggtgcgcaagggcgcgacgccggcgtttcccggccagaagggattcgtcggcggctcgatgggcgacgatgccgtcatcctcgaaggcgtcgacagcccggaggccagggcctcgctctactcgaccgtgcacggcgccggccgcctgttcggacgaagggaggcgaagcggcgcttctcgcgggcggagatggaccagtggctcaacgagcgcggcgtcaccttgatcggtgccgacctcgacgagagcccgatggcctatcgccgcctgccggacgtgctggcgcaacatgcgggcaccgtgaaggtgctgcacacgttgcggccgttcgcggtcgcgatggccggcgaaggcgagttcgatccctggaaggactga

SEQ ID NO: 5255 - DNA, 774 bp, BradyrhizobiumColbertium
atgcgacgacccgatccctacatggaacgcgcccgcgagctctgccttgccgccggcgtcgatcccgactcgcgcgtcggcgaaggacgcggccagcccgcctggtgcctgtacaaggatgccgcgcgcaaggagcatcttgcccgcgaggccaatgccaccgcagactccatcgccgagttccgcacccaggacgcccgcttccagaatgcgccgctgaaggtgttcggcccgcacgaggacgcgaccatcgcgcagatgcgcaactgcatggcggtcggcaacgtcgtatccggcgtgatctgcgccgacggccatctcggttacgcccagccggtcggcggggtcatcgcctatgagaagcagatcagcatctccggcgtcggcttcgacatcggctgcggcaacatggcggcccggctcgacacccgcttcgccgacatcgcgcagatcgctccaacgatcatccgcgacgtcgccaaggtgatctcgttcggcgtcggccgtgccaacgccgaacgggccgagcacgaactgttcgacgacggcgacgcctggcgcgagagcgatggaggattaccgcaagaaagcggtgagccagctcggcactgtcggatcgggcaaccattatgtcgacctcatgcgcgacgaggaaggcttcgtctggatcggcgtccatttcggaagccgcggtctcgggcacacctccgcgacgcgctacctcaaggctgccggcggcaaggacggcatgaacgttccgccggccgtggttga

SEQ ID NO: 5256 - DNA, 1326 bp, BradyrhizobiumColbertium
atggtcaggctcaacaagatcgttcgcgccttcacgcgggagggcgcgcgtgcgaggcgcttcacgcccgagatggagctgaagcgggcattgatgaactgcctcctgtgggaggaccagttctacgaggacggcgttgcgatcgccgaccgcatcaaggccctggtgcccaaggtcgcgcctgccaaggtcgcagagcttgcgatcgaggcgcgcgaggtgatgaagctgcggcacgcgccgctgctcgtcatccgcgagatggcgcggagcgagaagcaccgcggccttgtcgcggacacgctcgcccgggtgatccagcgtcccgacgagatgacggagctgctcgcgatctactgggcggatgcgctggggccgatgcagcagcgcaagcgtcagccggtttcggcgcaggtgaagaagggcctagcccgggcgctgaccaagttcgacgcctatcagctcgccaagtgggatcgcgacggcgcggtgcggatcagggacgtgctgttcctggtccacgccaagccgaaggatgccgggcaggccaaggtgtggaagcagttcgtcgatggcgagctcgcctctcccgacacctgggaggtttcgctctcggccggcaagaacaagcgcgagaccttcgagcggctgatcgccgagcgcaagctcggcggcctggcgctgctgcgcaatctgcgcctgatgcagaatgcgctggtcccgcgcgagaccatcgcaggggcgatcgaggcgatgcggacggatcgactccttccctatcgcttcatcacggcggcgcgctacgcgccggacttcgagcccgagctcgaggctgcgatgctcaaatcggtcaaggaccatgtacggcttccgggccgcacccggctcctgatcgacgtgtcgggctcgatgttcgcgaccctctccgcgcagtcggaaatgacgcgcgcggaggcggcgtgtggccttgccatcctcgcgcgcgagatctgcgacgaggtcgagatcttcaccttctcaaacgaggtcgtgaaggtcccgccccgccgcggcttcgcgcttcgagatgcgatcatcaactcgcagccgcatggcggaacctatctcggcaaggccgtgacggagatcgaccgcaagggcgatcgcctcatcgtcttcaccgacgagcagagccacgaccaggtgcccgagccgagggcgcgcggcaccatggtcaacgtggcctcgtatcagcacggtgtcggccacggcgcctggacccgcgtcaacggcttctccgaggccgtggtcgcgtggatcgcagcgtcggagacggcgttgaactga

SEQ ID NO: 5257 - DNA, 669 bp, BradyrhizobiumColbertium
atgacgtcgaattttctcggtctcgatggatttcgtttcggctgggtctcagcctggatcgacgatcgtggcgaccacggcttcgattattcaccgggcctgacgcgcctgctcgcgatgcggcatgcgcgcgcgatgatcgacatgccgatcggattgaaatcgagcggctaccgcgcttgcgatctgcgggctcgcgaactggtaggacccgccgtctttctcggtgcacgccgcgacctctggacctttcccgacatggccgcagccaatcgccattactgggcgcacgaaggcgaggggaggggaatatcggtgcagctctggaacatcagggacaagctgagagaggtcgacgacgccatgacgccgaccagacaggcgacgatcggcgaggcgcatccggagttgatcttctggaatctcgctgggcaagtccgtcttgcaaagaagacgtcagcgcaggggctcgaacagcgcatttcgttgcttgagcaacgcggcttcacgcgtttgccgaaatggctgaagctgcgtcacggcactggcatcgcccgcgacgacctcatcgacgcgtgcgcctgcgcggtcgcggcgcgcgacagcaggcagcgcgtcggcggcaaggaattcgatccgcgcggattgcggatggagatcaactactga

SEQ ID NO: 5258 - DNA, 234 bp, BradyrhizobiumColbertium
atgcttgcgcgttgtaggcagatgaacatcgagaagcgcgccctgctcgaccacgccaaacgctgtcgccgcgtcgcgaacaatctcgcccatgacgcagccgcgcggcggctgcgggcaatggccgagacgtacgaagccagagcggcaagattggatgacgagagcgactccttggacccgagccgaaacggtcgcaggcatttcggagctgagatcgatcgggagaattga

SEQ ID NO: 5259 - DNA, 147 bp, BradyrhizobiumColbertium
atgtatgatgttcgccagtgggcgactgcgatgcttgcgatttcattcacggccatgctgctggtgacaggccgatggtttatcgactatcgattgcagcatgagacaaggactccggtcgtggcttccgcgacggtgccgctgtag

SEQ ID NO: 5260 - DNA, 597 bp, BradyrhizobiumColbertium
atgctggaggagatcgggctgccttacgaggttcatctcgtcgatttcggcaaggacgatcagaagacggccgaattcctctcgctcaatccgaacggcaagattcccgcaattctcgatcccgacggccccggcggcaggccgctgccgctgttcgagtccggcgcgatcctgcaatacctcgcggagaagacgggcaagctgctgccggtagacgccgtgcgccgctaccagaccatccagtgggtgcacttccagatgggcggcatcgggccgatgttcggccaggtgggcttctttcacaaatttgccggcaaggatttcgaggacaagcggccccgtgaccgctacgtcgcggaagccaagcgcctgcttggcgtgatggagacgcatctttccatccggcaatggttcatggatgacgactacactatcgccgacatctccatgctcggctgggtgcgcaatctcatcggcttctacggggcgggcgatctcgtcgagttcagccagttcaagaccgtcggtgcctggctcgaacgcggccttgcgcgtccggcggtgcagcgcgggttgagcattccgcagcggccgtga

SEQ ID NO: 5261 - DNA, 372 bp, BradyrhizobiumColbertium
atgcacgtgacgcacgatcccgcagccgccgcctcgccgaccatcgacttcaacagcttcctcgcggtcgatgtccgcgtcggcacgatcgtcgacgccaagccgtttccggaggcgcgcaagccggcgtggcggctgtggatcgatttcggccccgtcatcggcgtgcgcaagagctcggcccagatcaccgaaaatcacccactcgatagtctcgtggggcagcaggtcgcggccgtcgtcaacttcccgccgcgccagatcggccccgtcgtctccgaggtgctgacgctcggcttccccgatgcgaacggcaaggtcgtgctggtgcagccgagcaagcccgtgccgaacggcggccggctgttctaa

SEQ ID NO: 5262 - DNA, 360 bp, BradyrhizobiumColbertium
ttgcccaacatcatctacggcatcaagaattgcgacaccatgaagaaggcccgcgcctggctcgatgcccatggtgtgccttatgagtttcacgactacaaggcggcgggcgttgagaaggatcggctcgagcggtggagcggcaaggtcggctgggagacgctgctcaaccgcgcagggacgaccttcaagaagctgcccgattccgacaaggacgggctcaccgagaaaaaggcgctggcattgatgctggcgcagccatcgataatcaagcggccggtgctggaagtcggcggcaagctgctggtcggcttcaagccggagatctatgccaaggaggtcggcggcaaggcgcgctga

SEQ ID NO: 5263 - DNA, 648 bp, BradyrhizobiumColbertium
ttggattttgcaggcgccgctccctccgtcgtcaagtcgatccggcaacgcgatctcctgaacacgtggctgcgactttatgcgcgccagcagatcgcgccggcgatctgggagtatcagcccgcgcggctcgaggaggagctgtcggatctcatctactatacggtggatttctcggccccgacgccgcgcctcatcatccagagcgaaggcacacgcatctcccgtgcctatggacataccggcaagggcgttccgctggatgactatatcgggccgcaactcgcgcccctcgtgatgccgatctaccatcaatgcgtggcacgcggactgcccgtctacagcgtggccgacgtcgaggacatctatgggcgcaacgtcgcctatgaaaggctgctgctgccgttccagaccgacggcaaggtctgtcacgtcatcgcttcggtcaagaccttctgcgaggacgggggctttgagatcaagaacctgatgcgcggaaatgacgcgctgccgcgtccaaagatgcgcgccgtaattgatcgcgagctgtttcatcgcgctcccggccgcatctcccctgcggaagtggtcgagctatccgaccagccggattccggcatcgtcaccgagatcatcgagttgaactag

SEQ ID NO: 5264 - DNA, 756 bp, BradyrhizobiumColbertium
ttggccgatgagttcattctcgaaacggaaggcttgaccaaggagttcgcgggcttcttcgccgtacgcgacgttgcgctcaaggttcgccgtgggagcattcacgcgttgatcggcccgaacggggccggcaagacgacctgcttcaatctcttgaccaagttcctcaaaccgtcagccggaaaaatcctgtacaaggggcaggacatcacggcgatggcgccggcggacgtcgcccgcatgggtctggtgcgttcgttccagatttcagcggtgtttccccatctcaccgcgctggaaaacgtccgcgtcgcgcttcagcgccagcatggctcttcgttcgatttctggcgctcgaagtcggtgctcaatcgcttcaacgaccgggcgcgtgagctgctgaacgatgtcggcctcagcgagttcgcgaacacgcccgcggtcgagatgccttatgggcgcaagcgcgcacttgagatcgcaacgacgctggcgctcgacccagagatgatgctgctcgacgagccgatggccggcatgggccacgaggacatcgacaagatcgcggcgctgatcaagcgcatctccgcgaaatataccatcctgatggtcgagcataatctgagcgtcgtggccaacctctccgacatcatcaccgtgctgacgcgcggtcaggtgctcgcgcagggccattattccgagctcaccaaggacgagcgcgtcaaggaagcctatctgggagccggtcatgcctga

SEQ ID NO: 5265 - DNA, 747 bp, BradyrhizobiumColbertium
atgcctgacactgcgatcgccgaggccccggccatggccacgaccggcggaaacatcctccaggtccgcaacctcgaagcctggtacggcgagtcccacatcctgcacgggatcaacttcgacgtgaatgcgggcgaggtcgtcaccctgctcgggcgtaacggcgccggcaagacgaccacgctaaagtcgatcatgggcatcatcggcaagcgctccggctcggtgaaattcaacgaccaagagatcatccgcgcgacctccgacaagatcgcgcgcatgggaatcgcgttctgcccggaagagcggggcatattctccagcctcgacgtgcgggagaatctgatgctgccgccggtggtccgtgagggcggactgccgctcgatcagatcttcgagctctttccgaacctgaaggagcggctcggcagccagggcaccaagctgtccggcggcgagcagcagatgctggcgatcgcgcgcatcctgcgcaccggcgcgagcttcctgatgctggacgagccgaccgaaggtctggcgcccgtcatcatccagcagatcggccacaccatcgcgcggctcaagaaggaggggttcacgatcctcctggtcgagcagaatttccgcttcgcgtccaccgtcgccgaccgttactacgtggtcgagcacggcaagatcattgacggattttccaacgcggagcttgccgccaacatggacaagctccacacctatctcggtgtctga

SEQ ID NO: 5266 - DNA, 1224 bp, BradyrhizobiumColbertium
atgaagaccatgtcgattgcgtcattgctgctgaccactgctcttgccgtcgcggtgacaggcgcagccttcgcgcaggacaagacggtcaagatcggcgcgctgtccgatcagtccggcctctatgccgacctcggcggaccgggctcgacgctcgccgcgcagatggccgttgaggattccggcctcgccgcgaagggctggaagatcgacatcatctccggcgatcaccagaacaagcccgatatcggcaccgcgatcgcgcggcagtggttcgacgtcgacaaggtcgacgtcatcgtcgacgtgccgaactccggcgtggcgctggccgtcaacaacgtcatcaaggagaagaacggcgtctacatcaactcgggcgcggcgacctccgacctcagcaacgcgcagtgctcgcccaataccgtgcactggacctacgacacctacatgctggcccacaccaccggacaggcgctggtgaaggccggcggcgacagctggttcttcctgaccgcggactatgccttcggtgcggcgctcgagcgcgacaccagcgcggtcgtcaccgccaacggcggcaaggtggtcggcggcgtcaagcatccgctgaatacgccggacttctcctccttcctgctccaggcgcagtcgtccaaggccaagatcatcggtcttgccaatgccggcggcgacaccaccaacacgatcaagcaggcggccgagttcggcatcggcaagggcggccagaagctcgcggccctcttgctgttcctcaccgacgtcaaggcgatcggcctggagacggcccagggcctcaacttcaccgagacgttctactgggacatgaacgaccagacccgggcgttctccaagcgctttgccgcgaggatgaagaacaatgcgccgccgaccatggtgcaggccggcgtctatgccggcgtgcgtcattatctcaaggcgctggaagccctcggcggcaacccgcatgacggcgtcaagatcgtccagaagatgaagtcgatgccgaccgaggacgatctgttcggcaagggcgagatccagccgaacgggcgcaccatccacaacgcctatctgttcgaggtgaagaagccctcggagtccaagggaccatgggacttctacaagctggtcggcaccgtgccgggcgaccaggctttcacgccgctatccgagagcaagtgcgcgctcttgaagaagtaa

SEQ ID NO: 5267 - DNA, 837 bp, BradyrhizobiumColbertium
gtgggactgatcaacggctcgttttacgcgctgctcagtctcgggctcgccgtgatcttcggcatgctcaacatcatcaacttcgcccatggcgcgctctacatgatgggcgccttcgtcgcctacttcctgttgaacctgggcgggatcaactattggtgggcgctcctgctggcgccgatcatcgtcggcatctttggcatgatcctggagcggaccatgctgcaatggctgaccgggctcgaccatctctacgggctgctgctgaccttcggcatcgcgctgatcgttcagggcgtgttccagaactacttcggctcctccggcctgccttacgcgattccggaccagctcaagggcggcatgaatctcggcttcatgttcctgccgatctaccgtggctgggtcgtcgtgttctcgctggtggtgtgtctggccacctggttcctgatcgagaagacgcagctcggcgcttatctgcgcgccgccactgaaaaccccaccctggttcgcgccttcggcatcaacgtgccgcgcatgatcacactgacctacggtcttggcgtcggccttgccgcgctggccggcgtgctctcggcgccgatcaaccaggtgcggccgctcatgggcgccgacctcatcatcgtcgtgttcgcggtggtcgtgatcggcggcatgggatccatcatgggctcgatcatcaccggcttcgcgctcggcgtgatcgagggcctgaccaagtatttttaccccgaggcctccaacaccgtcgtgttcgtgctgatggtgctggtgctcttggtgaagccaacgggattgacgggaagggcggcctga

SEQ ID NO: 5268 - DNA, 969 bp, BradyrhizobiumColbertium
atgacaaccctgacggacgacacgctgccggcaaccccgcgcgcgatgcgcgacgagatgacggtgttcgtggtgatggcgctgctgcttgcggcggtcccattcacgggagtctatccgttcttcgtgatgcaggcgctgtgcttcgcgctgctcgcctgtgccttcaatctgctgatcggctatggcggcctgctctcgttcggccatgcgatgttcctgggaacggccggctattgcagcgcgcatgcgctcaaagtgtgggcgctgccgccggagctcggcattctcgtcggcgtcgcggcggctttcgtgctctcgatcgtcaccggctatatctcgatccgacgccagggcatctatttctcgatgatcaccctggcgctgtcgcagctcctgtacttcatctatctccaggccccgttcacccatggcgaggacggcatccagggcattccgcaggggcgcatgttcggcctcctcgatctgtctcagccgacggtgctgtattacgtggtgctggtcggcttccttgccggcttcctcctgatcttccgcatcatcaactcgccgtttggcgaggtgctgaaggccatccgcgagaacgagccgcgcgcgatctcgctgggctaccgcaccgaccagtacaagttcctggccttcgtcctgtcgggtacgctggccggccttgccggagcgctcaaagtcttcgtggcgcagaatgcctcgctcaccgacgtgcactggtcgatgtcgggcgaggtcgtcctgatgacgctcgtcggcggtctcggcaccatctttggtccggtggtcggcgccttcgtcatcatcgccatgcagcaatatctggcgggcttcggccagtgggtgacggtcatccagggcgtgatcttcgtgacctgcgtgctcaccttccgtcgcggcgtcgtcggcgaaatcgcgcactacttccgacgatcgctctaa

SEQ ID NO: 5269 - DNA, 645 bp, BradyrhizobiumColbertium
atgatgcgatggtttcgtgcgttcctgcccagggaagagcggttcttcgacctgttcgaccggcatgcccagacggtgatccagggggccatcgcgctccagggtatgctcaacggggggcaggagacgccggtttattgccagcgcgtcaaccagttcgagaacgaggccgacaacatcactcgcgaggtgctgacagcggtgcggcgcaccttcatcacgccgttcgaccgcggcgacatcaagaacctcatcacctcgctggacgatgcgatcgaccagatgcagcagacggccaaggccgtcatgttgttcgaggttcgcagcttcgagccgcccatgcgcgagatcggcgcgctcctgatcgaatgcgccaatctggtgggacgtgcgctgccgctgatgcagtcgatcggacccaacgtcgcgatgctgactgccatcaccgaagagctcggcaagctcgaggggcgggtcgacgatctccacgacatcggcctcaaggagctctttctgaagcatcgcgaaggcaatgcgatggacttcatcgtcggcgccgaaatctacgatcatctcgagaaggtggccgatcgcttcgatgatgtcgcgaacgagatcaacagcatcgtcatcgagcaagtgtag

SEQ ID NO: 5270 - DNA, 993 bp, BradyrhizobiumColbertium
ttggcttttcctgtcctggtcggcctgatcgccgtcgcgctgctgttcgacttcctgaacggcctccacgacgccgccaattcgatcgcgaccatcgtctcgacacgcgtgctgcggccgcaattcgccgtgttctgggccgccttcttcaatttcatcgcttttctggtgttcggactgcacgtcgcccagaccattggcaccggcatcatcgatcccgcggtcgtcgatgcccaggtgattttcgcggcgctggtcggggccatcgtctggaatctcgtgacctgggcgctcggtatcccgtcctcatcgtcgcacgcattgatcggcgggctcgtcggcggcggcatggccaaggcggggatctcggccgcggtctggagcggcctgtccaagacggtcctggcgatcgtgctgtcgccgctggtcggtttcctgctcgcgatgttgctggtggcggtcgtgtcctgggcgtcggtgcgctcgacgccgttcgcggtcgaccgcgcctttcgtatcctgcagttcgcgtccgcctcgctctattcgctcggccatggcggcaacgacgcgcagaagaccatgggcatcatcgcggtgctgctgtattcgcagggccatctcggcagcgagttctcggtgccgttctgggtggtgctgtcctgccaggcggcgatggcgctgggcacgctgatgggcggctggcggatcgtccgcaccatgggcctgcgcatcaccaaattgacgccgatgcagggcttttgcgccgagacgggcggcgcggcaaccctgttcatggcgacctatctcggcgttcccgtctcgaccacccataccatcaccggcgccatcgtcggcgtcggcgctgcgcgccgcgtctcggcggtgcgctggaacgtcgcaagctcgatcgtctatgcctgggtgatcacgatcccggcctcggccatcgtggccgcgctgacctggtgggtggtccagctcgtcaagtga

SEQ ID NO: 5271 - DNA, 315 bp, BradyrhizobiumColbertium
atggcctggagcatcctgttcgtcgccggtctcctcgagatcgtctgggcgatcggcctgaaatataccgagggcttcacccggcttgttccgtccgtgatcacgctggcggcgatggccgggagcgtcattctgctcgggcttgcgctcaggtccctgcccgtgggaaccgcttacgcggtctggaccggcatcggcgcggtcggcaccgcggcgctcgggatctttctgttcggcgagccggctagcgcgctccggcttgccagcatcggcctgatcgttgccggcatcatcgggctgaagctcgtcacttga

SEQ ID NO: 5272 - DNA, 1623 bp, BradyrhizobiumColbertium
atgtccgacatcgccacccctacagccgaatcgccggcccgttccccgcttgccgccgaagtggcgcggcggcgcacctttgcgatcatctcgcatcctgacgccggcaagaccacgctgaccgaaaagctgctgcttttcggcggcgcgatcaatctggccggtcaggtcaaggccaagggcgagcggcgcaacacccgctctgactggatgaagatcgagcgcgagcgcggcatctccgtggtgacctcggtgatgaccttcgagttcgagggcctcgtcttcaacctcttggacacgccgggccacgaggacttttcggaggacacctatcgcacgctgacagccgtggattccgccgtgatggtgatcgacgccgccaagggcatcgaggcgcgcacccgcaagctgttcgaggtgtgccgtctgcgcgacattccgatcatcacctttatcaacaagatggaccgcgagagccgcgacgtgttcgagctgctcgacgagatcgagaagacgctggcgctcgacaccacgccgatgacctggccggtcggtcgcggtcgcgacttcctcggcacctacgacgtgatcaatggtggcgtgcggctgctggaaggcggcggcgccaagaccggcgcggcacagcagatcgcgatcgaagagctcgccaagctcagcgccaatctcgatgtctccgcggtaaaggacgagctcgagctcgtcaccgaggcgtcaaagccgttcgagctcgaggcgttccgcgagggccatctgacgccggtctatttcggcagcgcgctgcgcaatttcggcgttggcgacctcctggagggccttggcaggttcgcacccgaaccgcgcgctcaggacagcgaccagcgcaaggtcgaggccaccgatccgcgcatgagcgctttcgtgttcaagatccaggccaacatggatccgaaccaccgcgaccgcatcgccttcgcacggctctgctccggcaagctcagccgcggcatgaaggccaagctcgtgcgcaccggcaagagcatgccgctgtcgagcccgcaattcttcttcgcgcaggaccgctcggtggcggacgaggccttcgccggcgacgtcgtcggcatccccaatcacggcacgctgcgcatcggcgatacgctgacggaaggcgaggatttcaacttcgtcggcgtgccgagcttcgctccggaaattgtccgccgcgtacggctcaccgacgcgatgaaggcgaagaagctgaaggaagcgctccagcagatgtcggaagagggcgtggtacaggtgttccgcccacgcgacggcgcgccggcgcttgtcggagtggtcggtgcgctgcagctcgatgtgctgaaggcgcgtctcgaggccgaatattcgctgccggtcgagttcgaggtcagcgagttccagctggcgcgctgggtctcctccgaggaccgcaagaagctcgacaccttcatcgccgccaacacctccagcatcgccgacgacgtcgatggcgatcccgtgtatctggcacggaatgagttctatcttggctacaccaaggagcgcgcggagggcatcgagttcagcaacgtgaaggacgtcaagaagaaggggtag

SEQ ID NO: 5273 - DNA, 579 bp, BradyrhizobiumColbertium
atgtggcgtggcatcgttgtttttctgttgctgacgatctcaacgatcgcagcggacgcgcagcgtcgccagatcaatccgatcccgttcgcgcatgaaccgtgcagcgtgctcgatggccggccctgcacgccgtcctattgcagcccgctcgagtccggcccctgcatccccgagatcggctatccctacggccagaacctccagctcaccattcagagcgttccgtccgaggccgaccgcgtcaagtaccggaaaccggatcacgatctcgacaccatcggcgacctcttcgccgagctgcgcagctgctggtcgccgccggcggacaatgcgcgggagggcatgcagatggcggtgcgattcagcttcaacaaggtgggcggcttggtcggccccccgcgattgacctttgcgacagcgggcgtgccggccgccacccgcacgatctatcttgatgccatcaatgcatcgctgaacgcctgcctgccgctgaaattcaccagcggtctcggcggtgcgctggccgggcggccgatcgcgatccgctatgttgataatcggaagctcggacactag

SEQ ID NO: 5274 - DNA, 765 bp, BradyrhizobiumColbertium
gtgggtctgctggtcatgatcctggggctggtgctgttcttcggcatccatgttttcacgacgaaacgtgaggcgcgtgcgcaggcgatcgcaaggctgggcgaggggacctacaagatcctctattcgctcatctctcttgcggggctcgcgttgatcatctggggttatgcccactatcgcgccaccggatggatcgacgtctggtatccgccgaaggcgatgaagcacatcacgctcgccttgatgctgcccgcagtcatcctggtggtggcctcttacttgcgcggccgcatctatgcgacgttgaagcacccgatgctggccgggatcaagctatgggccgccgcgcacctgctcgccaatggcgatctcggctccatcatcctgttcggctcgttcctgggctgggcggtgtttgatcgcatcaccctcaagcatcgcgccgacagcggcgcgccgccgataccggtcggcggcgtcagcaacgatctgattcgcggtcgcggtaggcatcgtggcctatctcgcactggccttcgcgttccatccggtcgtgatcggcgttcccgtgatcggggtctagccggtcagcacaagacgcaacccggctgtccatgcgcggaagctgacaagagcaacaagccgagggcccttcgatggattggtcgcaatctcagatcccgccgatgcgtctcgaggcgcgctttggcgatcgggtggtgccggcattttcggatcggcctgcgagcgtctgggcgatga

SEQ ID NO: 5275 - DNA, 1491 bp, BradyrhizobiumColbertium
atgatcgcggaggcgcgcgatcgcaatgctgatggcgaggcgctgatctgcgccaatgtccgcctgagctggcagcaggccgttgagcagtcagcgcgcatcgctgccggatttcgcaggctcggcctccagcgcggcgaccgtgtcgccatcctgctcggcaatcgcatggagtttccgctgctgctgttcgccgccgcgcatgaagggctggtcaccgtgctgctcagcacgcgccagcagaagccggagatcgcttatgtcctggctgattgcggcgcgaaaatcctgattcacgaggcggcgctcgccgagcggctgcccgatgctcaggacgtgcctgctgtaatccaccgcatcgccgtcgatgacgatcccgccggatctcgcttcgccgtccttgccgacaatgcaccggcgcccgcgccggtcgaagtgaacgaagaggacaccgcgatgatcctctatacctcgggcaccacgggcaagccgaaaggcgcgatgctggcccattgcaacatcgttcattcctcgatggtcttcgtgtcatgcctgcaattgacgcaggccgatcgttcgatcgcggccgtgccgctcggccatgtcaccggtgtcgtcgccaacatcacgacgatggtccgctgcggcggcgctttgatcatcatgccggaattcaaggcttccgattacctcaagctcgccgcgcgtgaacgcgtcacctacacggtgatggtgccggcgatgtacaatctctgcctgctccacccggatttcgacggctacgacctctcgagctggcgcatcggcggcttcggcggcgcgccgatgccggtcgcgaccatcgagaagctcaaggcgaagatccccggcctcaagctgatgaactgctacggcgcgaccgagacgacgtcgccatccacgatcatgccgggcgaactgaccgagagccatatcgacagcgtcggtctgccgtgtcctggtgcacgcattgtcgcgatggggcctgatgggcgcgagctgccgcctggcgagatcggcgagctctggatccagagcgcctccgtcatcaagggctactggaacaatgcgaaggccactgtcgaaagcttcactggcggattctggcactcgggcgatctcggctcggtcgatgcggaggggtttgtccgcgtgttcgaccggcagaaggacatgatcaatcgcggcggcctgaagatctactctgccgaggtcgagtccgtgctggcgggccaccccgccgtggttgagagcgcgattgtggctaaggcctgcccggtcctcggcgagcgcgtccacgccgtggtcgtgacacgcatgccggtggctgacacggacttgcggacctggtgcgcggagcggctgtccgactacaaggttcccgaaaccctggcgatcacgaccgagccgctgccgcgcaacgccaatggcaaagtgctgaagcggcagctgcgggagctgctcggaagctga

SEQ ID NO: 5276 - DNA, 654 bp, BradyrhizobiumColbertium
gtgtctgaattacttaatgaagtcgacgaggaactacgtcgcgaacagctcaagaagctgtgggacaagtattcgatctacttcatcgccctgatggtgctggtcgtggccgccgtcggtggctggcgcggctaccaatatctggaggccaagaaggccgcagaggccggcgccgccttcgagaaggccgtcgagctgtccgagcaggacaagcacgccgacgccgagaaggccttcaccgagctcgccgccaaggctccgtccggctatcgcaccctggcacggttgcgcgctgccgccgaggccgcgaaccgcgatccccaagccgccgcgaagatgtacgacgacattgccgctgaccgcagcatcggcggcgagtggcaggatctggcgaagatccgcgccgcgggtctcgtgctcgacagcgcgagctacgccgacatgcagcagcggctggagggctccgccgcgcccaaatcgactttccgccacagcgcccgcgagatgctggctctgtccgcctggcgcaacaatgacatgaccgcagcccgcaaatggctcgacgcgatcggcgaggacggcgaaacgccgccaggcctgcgctcgcgcgccgaggcgctgcaggccctgctgccgcccgttgccaagagctga

SEQ ID NO: 5277 - DNA, 528 bp, BradyrhizobiumColbertium
atgcgccgtacgccacgcttgatcgccgccgccgtcctgatcgccttcacgggcgtcctcggcggctgctccagcttcgatccaagcgatatgctcgacttcctcgacaccaagaagaagctgccgggcgaccgcaagccggtcttcccggagggcgtgccggggctcgagcagggcgtgccgagagagctgtacaagggcgcgcagcagcagccggatccgaacgcgcctgccgtcgccgctctgcccgcggagcccccgccggagccggcccaaggcgccaaggctgcgaaatcgcgacaaccggccgctgccgaagcgcccgccggcgaaatcgacggcgaggcccagccggaggccgcgccgcccacggccgctccgccgcccaagcacaagatcgtccgcaggcgcaccaccgcgccgccgccggaccagcccgtccagcaggcgcaacccgcccagcccccgcagcagcaaacgcagagcgtcttcccggcgccgctgccgagcggcagcttctcgcgctga

SEQ ID NO: 5278 - DNA, 1383 bp, BradyrhizobiumColbertium
atgtccttcacgatcgccatcatcggccggcccaatgtcggcaagtcgacgctgttcaaccgcctggttgggcagaagctcgcgcttgtcgatgacctgcccggcgtcacccgcgaccgccgcgagggcgaggccaggctcggcgacctcgagttcaccatcatcgacaccgccggcctcgacgagggcgtcaagggttcgctcaccgcgcgcatgcaggagcagaccgagaccgcgatcgggcaggccgacgcgctgttcttcgtcatcgatgcccgcatcggtcttacgcccaccgatcgcgccttcgccgatttcgcgcgcaaggccaacaagccggtgctgctgatcgccaacaagagcgaaggcaagcatggcgatgccggtgcgatggaggcgttcgcgctcggcctcggcgatcccatccagatctctgccgagcacggcgagggcatgggcgaactctatgacgcgctggccaagcttatgcctgagccggtcgaagagaacgacgatgaagacgacgcgccgatctccgaggaagaggcggcgacgcgcccgatccgggtcgccatcgtcggccggcccaacgccggcaagtcgacgctgatcaatcacctgctcggcgaggagcgcctgctgacgagccctgaggccggcaccacgcgcgattccatcgcggtcgaggtcaactggaggggccgcgacttccgcgtgttcgacaccgcgggcctgcgccggcgctcgcggatcgaggagaagctggaaaagctctctgtcgcggacgcgctacgcgcggtgcgctttgccgaggtcgtcgtgctgatgatggacacgcagaaccgcttcgaggagcaggacctgcgcatcgccgatctgatcgagcgcgagggccgcgccgtggtgctcgccgtgaacaaatgggacctgatggagaccaagggcggcggcgcgatctcgagcctgcgccgtgatgccgaccattggctgccgcagctcaagggcgtgccgatcgttgccgtgtcgggcctgatgggcgagggcatcgaccgcctgatgcaggcgatccaggatgcctatgcggtctggaacagacgcgtgccgacggccgcgctcaatcgctggttcgagcaggcgatccaggccaatccgcctccggcggtgtccggccgcaggctgaagctgaactacatcacccagaacaaggcgcgcccgccgagcttcgtgctgttctgctcgcgtgccgatgcggtgccccagtcttacttgcgctacctcaccaactccatgcgcgagaccttcgatctgccgggcacgccggtgcgcatcaccctgcgcgagaaggccaatcctttcgcgcacaagcgcaagcggccgtcgtga

SEQ ID NO: 5279 - DNA, 1254 bp, BradyrhizobiumColbertium
gtgagcgatggcgccggcgaggcggtggcggcaagtgctgcgccggcccggcgcggtgtggtcgccttcatcttcgtcaccatcctgctcgacatgctcgcgctgggcgtgatcatgccgatcctgccgaagctgatcgagagcttcgtcgacaacgataccgcgcacgcggcccgcctcttcggcttgttcggcaccgcctgggctttgatgcagttcgtgttctcgccgctgctcggcgcgctgtcggatcgcttcgggcgtcggccggtggtgctgctgtcgaatttcgggcttgcggccgactacgtgctgatggcgttcgccccttcgctggtctggctgttcatcggccgtgtgatctccggaattacttcggccagcatctccacggcatttgcttatatctcggacgtcactccgccggagcggcgcgcggcggtcttcggcaggattggtgcggccttcggcgccggcttcatcctggggccggcgctcggcggtctgcttggcgacgtcgatccgcgcctgccgttctgggcctcggcggccctgagcttcgccaatgcgctctatggactcttcgtcctgccggagtcgcttgcgcccgacaagcgcgcgccgtttcgctggcgaagtgccaatccggtcggggcgctgcatctgctgcgatccaacgcggcgctggcggcgttgtcgatcgtcaacttcattgctcaggtcgcccatgtcgtgctgccgtcgacctttgtcctctacgcgacctatcgctacggttgggattccaggacggttggattgacgctcgcgatggtcggcatctgcgccatggtggtgcaggggctcgcgatcggcccgatcgtgcgcgtgctcggcgagcgcaacgcgctcctgctcggcctgtgctgcggcgcgctcggtttcgtgatcctgggcgcagcaccgaccggaccgttgtcctggctcggcattcccgtgctgtcgctgtggggcatctccggcgcggcctcgcaatcgctgatgacgcggctggttgcgccccatcagcagggccagctgcagggcgcgacggcgagcgtgcagagcgtgtcgcagctggtcggcccgttcctgttcacgctgacgttttcctatttcatcggcgccggcgcgccgctgcatctgcccggcgcgccgttcctgcttgcagcggcgctgatggtggtgtgcgtggcgattgcggtgcggacgctgggtgcgacgaagaacgcttga

SEQ ID NO: 5280 - DNA, 147 bp, BradyrhizobiumColbertium
ttgctacaaccgtttcgtccgcggacgacggggtggcgtctgggcctgatcgtagacgcacttgctgcagcccatgatgccgcagtccggatgatcgacacctcgattgcttgcgcacatcagcagggcgcccgcatcgcgatctag

SEQ ID NO: 5281 - DNA, 369 bp, BradyrhizobiumColbertium
gtggagtttgccagcgccgatgcggtgcgcggtgcgactgaagtccagcgcagcatggccgagcagaccgccgtgccgcaggatcaacggatcgaatttcgcatgggcattcacgttggtgacatcattttagataataacgacattttcggcgatggcgtcaacattgctgcccgcctagagagtcttgccgaacctggcggggtttgcatttcggatgacacctatcggcagatccggggcaaggtcgacatcgcatgtgacgacctcggaccacagaacctcaagaatattgccgatgcgatgcgggcttggcgccttcaattgaccaatcgagcttcgtccatggcacatccggttcgggcatag

SEQ ID NO: 5282 - DNA, 1164 bp, BradyrhizobiumColbertium
gtgctgccgttccagaatatgtccggcgatcccgagcaggagtatttcgccgacggcatggtggaagacatcatcactgcgctgtcacgcttcaattccctgttcgtgatcgcccgcaattcgagctttacctacaagggaaaggcggtcgacatcaaaagggtcggccgcgaactcggcgtgcgctacgtgctggaaggaagcgtccggaaggccggtggccgggtgcgcatcaccggtcagctgatcgatgcggcgagcggcgcccatctttgggcggacgggatcgacggcgaattgaccgacgtcttcgagcttcaggaccggataacgacgagcgtggtatcctcgatcgcgccgaagatagaacaggcggagatcgagcgggtccggcaaaatcctacgaacgtaccggacagctacgattcctatctgcagggactggcgctggctagtcgcgggcaaggcgccgaggccaggagcctgttcaagcgggcgatcgagcaggatccgctatacgccgctgctcacgcgatggcggcttacatctacctcgtggatcaagctcagtacggtgcgatagcggacgcgggcatgcgcgccgatgccgccgcgcttgccaatgccgccctgaaactcgctaaccaggacgccttcgtgctggcccgctccgcccaagccctcacctacctcggcctcgaatacgaccgcggggcctcgctggtagagcaggcgatcgccctgaatccaaacttgtccgtcgcatggctcgcaaggtgctgggtttcggtcatgcgggctgacgcggagcgggggatcgaaagcttcgagaaggtgatgcggctaagccctctcgatccgctcaagcctttcttcgtggccggcgttgcgcactgccattggtttcagggccgtttcgaggaggggtgcgagcttgccaaggaggccattcagattcgaccgcaccttcagccgttcgcatcctacatcgtgaacagcgtagcgctcggagatctgccggaggccaggaaggccgcccggcgtctgctggaattcgatccctccttccggatgtcgggcgctgccgcgatttttctgatccggtctgcggaatatcgcgaaaaatttctgggcgccctccggactgcggggctgccggactag

SEQ ID NO: 5283 - DNA, 177 bp, BradyrhizobiumColbertium
atggagaagacggaactgcctcctgaagattttcctctcatgctcgatggcaatgccttggtcacccaagatggaacgaaggtcgccgacgcgcagtcggtccggttggcagaagatatagcgcaacgcctcaacgagaacgcagcgcgcaaacgagaggatcgctgggccctctag

SEQ ID NO: 5284 - DNA, 73 bp, BradyrhizobiumColbertium
gggcgcatagctcagttggtagagcagctgactcttaatcagcgggtcccaggttcgagccctggtgcgccca

SEQ ID NO: 5285 - DNA, 594 bp, BradyrhizobiumColbertium
atgaagaaattcaccatcgcagccatcgccgtgctcagcatcgccggctcgggcgcggtctatgcccaatatcatcgcccgtggacggagcacgtccgccacatgcgcatgaaccccgaggaccgcgccgccttggtcgacgcgcgtatcgccgccgtccatgccgggctgaagctcaacgccgatcaggagaagctgtggccgccggtcgagactgccgtgcgggagttcgccaagctgcgcatcgaccgcgccaatgcgcggatgaatgccggccccaatgatgcggacaagcctgaagatccgatcgcccgcctgcgtcagcgcgccgaggacatgggcgccagctccgccgccctgaagaagatcgccgatgccgccgatccgctctacaagaccctggacgagggccagaagcggcgcctcgcggtgctgacccgccaccgcggcccgtttgggggcggcgaggacggtccgcgccaccgccatttcatggagcgcggcatggaccgcatgatgggccacggcatggaccatttccaccatcaccgcttcgaccgtgacgagggccgggaccgcgagggccggctctga

SEQ ID NO: 5286 - DNA, 1005 bp, BradyrhizobiumColbertium
atgcgcaccttcgcgatcgccgcgtccatcgcggctctggcacttggcttgaccgggccggcgtcggcccaatcaccgatcatcatcaagttcagccacgtcgtcgccaccgacacgccgaaaggcaagggcgcggagaagttcaaggagctggccgagaagtacaccggcggcaaggtcaaggtcgaagtctacccgaattcgactctctacaaggacaaggaagagctcgaggcgctgcagctcggcagcgtgcagatgctggcgccgtccaactccaagttcgggcccctcggcatccgcgagttcgaagtgttcgatctgccctacatcctgcccgacctgaagacgctgcggaaggtgacggaagggccgctcggcacgcggttgctcaagctgctggacgccaagggcatcaccggccttgcctattgggacaacggcttcaagcagatgagcgcgaacaagaagctggtcacgcctgccgactatcaaggcttgaaattccgcatccagtcgtcgcgcgtgatccaggcccagttcaaggcgctcagctctctgccgcaggtgatggcgttctcggaagtctatcaggcactccagaccggcgtggtcgacggccaggagaatacctggtcgaacatctacacccagaagatgcacgaggtgcagaagtacatcaccgagaccaatcacggctacatcggctacgtcgtgatcgtgaacaagaagttctgggacgatctgccggccgacatccgcgaccagctctccaaggcgatgaaggaagcgaccgctttcagcaacgcgcagtctcagaaggagaacgatgacgcgctggccgagatcaagaagagcggcaagagcgagatcatcaagctcaccccggagcaggacgaggcgatgcgcaaggcgatggagccggtctacaaggacgcggcgagccgcgtgggccagccgctgatcgacgagttcctgaaggaagccaagggcaccacgaactga

SEQ ID NO: 5287 - DNA, 1563 bp, BradyrhizobiumColbertium
atggccacccagaacaagtccgagaaggaccgcgtcatcattttcgacaccacgctgcgcgacggcgagcagtgtcccggcgccaccatgaccttcgaggagaagctcgaggtcgccgaactgctggacgatatgggtgtcgacgtgatcgaggccggctttccgatcacctccgaaggcgacttccaggcggtcagcgagatcgcgcgtcgctccaagaacgccgtcattgccggcctgtcgcgcgcacatccggccgacatcgatcgctgcgccgaggcggtgaagttcgccaagcgcggccgcgtccacaccgtgatcgcgacctcgccgctgcacatgcgggtgaagctgaacaagaccccggagcaggtgatcgagacttcagtggccatggtcgcacgcgcccgcaaccagatcgacgacgtcgaatggtcggccgaggacggcacccgcagcgagatggattttctgtgccgcatcgtcgaggccgtgatcaaggccggcgcaaccaccgtgaacatccccgacaccgtcggctacacggtgccggaggaatacactcacttcatgcggacgctgatcgaacgcgtgcctaattcggacaaggcggtattctccgtgcactgccataacgacctcggcatggcggttgcgaactcgctggccggcatcgtcggcggtgcgcgccaggtcgagtgcaccatcaacggcatcggcgagcgcgccggcaatgccgcgctcgaagagatcgtgatggcgatcaacgtgcgcaacgacaaattcccgtactggaacaagatcgacactacgcagctcacccgtgcctcgaaggtggtgtcggcggcaacctcgtttcccgtccagtacaacaaggccatcgtcggccggaacgccttcgcgcatgagagcggcatccatcaggatggcgtgctgaaggacgcctccacctacgagatcatgcggcccgagatggtcgggctgaagcaatcctcgctggtgctcggcaagcattccggccgccatgccttcgtgcacaagctggaggagatgggctacaagctcggcccgaaccagttggaagacgcgttcacgcggatgaaggcgctggccgaccgcaagaaggacatctacgacgaagacatcgaggcgctggtcgacgaggaaatggcggcctcccacgaccgcatcaagctgacctcgctgaccgtgatcgcgggcacgcatggcccgcagcgcgcgaccatgaagctcgacgtcgacggccagatcaagatcgaggaggccgagggcaacggcccggtggacgcggtgttcaactgcatcaagcgcctcgtgccccacgaggccaagctggagctgtatcaggttcacgccgtgaccgaaggcaccgacgcgcaggccgaagtctcggtgcggctggcgcaggacggtcgatcgatgacggcacgcgcggcggaccccgataccttggtcgcgtcggccaaggcctatctgggcgcgctcaacaagatcgtcatgaagcgccagcgcgacacggtgacgacggcggctgcgagctga

SEQ ID NO: 5288 - DNA, 1236 bp, BradyrhizobiumColbertium
atgacacgccaagaggctcgtgaccaggagcagcgtgaccaggatgctgcgctttcgcgacgaacacttgtccgggggcttgcaatcagtgcggccacgatcgcgggagccggcgccgcactggcccagaccggacccgccgcaccgccgagcaccatcaccaacccgccgcgcgatttcggccctcgcggcgcaccgaccacttatttctgggacccggacatcatcgcggtggatccgtccttcaacgatctcgcgcagcccaacaccgcgatcaagcgtctctacaccggactgctatgggccgagggccctgcgtggagcgcgcaaggccgctatttgttgtggagcgacattcccaacaaccggcaaatgcgctggagcgaggacgatggccgcgtcagcgtattccgctcgccctccaacaactccaacggcaactcgttcgacttccagggtcgtcagctctcctgcgagcacctgacgcggcgcgtgacacggtacgagcatgacggcaccgccaccgtgctggcggattcctatcagggcaagcggctgaattcgccgaacgacatcgccgcgcatcccgacggcagctactggttcaccgacccgccctatggcggccaactctatgaaggcgagcccgacgtcgcgggtggtccgagcaatacggccggcaaactcaacccgcggatcggccagcccgccggcttcgtgccgggcaggcgcgagctgccgaccaattgctatcgcatcgatccgtcgggccgcgtcgacctcgtggtcactgaggaccaggtgccagacccgaacggcctgtgcttctcgccggactacaagaagctctacatcgcctccaccggcaaagggcctggcgacaccggtcccggcggcaagggcgagatcttcgtgttcgatgtcggcagcgacaacaagctgtccaacctgaaacgcttctccgactgcgtgatcgatggcgtgaaatgcgggcccgacggcctgcgctgcgacgtcaacggcaatctctgggcttccagcaatgccggccgcgcggtcggctacagcggcgtgacggtgtggtcgccggagggcaagctgctcggccgcatccgcctgccggaagtgtgtggcaacgtctgcttcggcggccccaagcgcaaccgcctgttcatggccgcgagccagtcgctctatgcggtgtacacggcgacgcaaggcgcggggccgggctga

SEQ ID NO: 5289 - DNA, 138 bp, BradyrhizobiumColbertium
atgcgagatgcttcagacgacaatattcctgccctagagatcggtgatgcgccggcgaaagacgccggcgcgctcttgttcacggattatgtggctcagcccggccccgcgccttgcgtcgccgtgtacaccgcatag

SEQ ID NO: 5290 - DNA, 1311 bp, BradyrhizobiumColbertium
atgccgacttcacgcaggcagctgctgaagacctcggcggctgccgccgccgcactcagcctcgactggacacgcgcccaggcgcaagccgagacattgcgcatcgggctgatctacgacctcacgggccctttcgccgccggcggctcggtcgcctcctcgatcggcgcgcagatcgcgatcgatctcgtcaacgagcaaggcggcgtcagcggcaaatacaaggttgctccggtcgccgcggattcccagagcaagccggacgttgcgatcaacgaggccgaacgcctgatcaaccaggagaagatcgacatcctcaacggcgtctatgcgagctcgcatgcggtgccgctcgcagccaaggtcgagcaacagaagaagatcctctggatcacgacggcggtctcgaccgcagtgttcaaggacaagaacctgcaatacgtgtttcgcgcccagatccattcggatcaatacgggcaggcctttgcgagcttcatcaacgagcatgcgaaagccaagctcggcatggatccgaaagaggtcaaggtcgcgctgatccacgaggacggcccctatggtgtcggcgttgcctctgccgacgaggcctatgccaagcaggccggcatccccgtggtgctgcgcgaaggctattcagcctcggcgccagacctgtcggtgctggtgacaaaaatcaagcgcgccaaggccgacgtgatttcgcatgccggctataaccccgacatcaccctgttcctgcgtcaggcgcgcgaaagcggattgcgattcaagatgctgttcggcgccggcgccggctacagccagctcgacaagctgcgcgcgaccttcggcgccgacatcgacaatttctgcaacatcgacccggtgccggcgcaattgctcgatcctgccaagctcgcgcccggcatgggcgatctgatcaagaccatggtctcgcgctatcaggccaagaccggcgccaccgacgtgccgccgcactgctcgatgggcttcaatcagacctgggtgctgctcaacaacgtgctgccggtcgccaaggagaagtacggcagcttcgagccagaggcgatccgcaaggctgcgctcgacgtcgacatccccgccggcggcaccatccagggctatggcgtcaagttcttcccgccgggcacccccctgtccggccagaacgaacgctcgacgccggtcgtgatgcagaacgcgggcgagcacatttctgtggtgtggccgacgaatatccgcacacaggacccggtgttcccactgccgaagggatcgacctacgcggcgtga

SEQ ID NO: 5291 - DNA, 1170 bp, BradyrhizobiumColbertium
atggccaggatcagggtgggactcgtcggctgtggcttcgtgtcggagctgcacatgcatgcattccgacgcgtctatggcgtgcgcgtcgaagtcgcggcggtggcggcgcggggcgaccgcgtcctccaattcgctgatcggcacaacatcgcgcgcgtctatcgcaacttcgcagatgtgatcgcggacgccgatctcgacgtcatcgatatctgcacgccgccaaatctccataccgggatgatcgtcggggcgatgcaggccggcaagcatgtgatctgcgaaaagcccttcgccggctatttcggccgcgagggtgacaagcagccgatcggcaagcacgtgccgaaggcgctgatgtacgagcgcgtgctggaggagatggacgccacgcgcgccgcaattgagcgcaccggacgactcttcatgtacgccgaggactggatctatgcgccggcagtgaccaagacggcagagatcatccgcgccaccaaggacaagatcctgttcatgaagggcgaggaaagccattccggctcgcacgctgcccatgccgcgcaatgggcgatgaccggtggtggctcgctcatccgcatgggctgccacccgctctcggccgtgctctatctgaagcaggtggaagcccaagcgcgcggcgagaacatccgtgttgccagcgtcacctgcgatgtcgggaacgtcaccgcgggcctgaagcccgaggagcgtacttacatcaaggcgaaccctgtcgatgtcgaggattggggcacgctcaccgcaacgttctccgacggcaccaaggcgaccgtgttctccggcgacatgatcatgggcggcgtgcgcaatctgatcgagacctatacgagcggcggctcgctgttcgccaacatcaccccgaacacacatctgatgagctatcagaccagcgaggagaagctcgcgagcgtctacatcacagaaaaagtcgaccgcaagaccggctggcaatatgtttgcctcgaggaggaatggacgcgtggatatctgcaggagatccaggatttcatggaatgcgtcgccaccgggcgccagccgctgtcggatctcgcgctggcctatgagacgatcaaggtgaactacgccggctattgggcggcggaggagggacgaagggtggtgttgtag

SEQ ID NO: 5292 - DNA, 450 bp, BradyrhizobiumColbertium
atgaggatctggaagacggcaattgcctgttcattggccggcgtggtcatggcggcccagattgggcaggccacggcgggcccgatgccgaccaatgtcgcgacgatgaaggctgcagccggcgataatgtcacaccggtgcattggcgcggcggcggctggggctttgccctaggtggtctcgcagccggcgcgatcatcgggggcgccatcgccagcggtgcgccctacggctattatggcggcccgtattacggcggatatggatatcccggctacggctatggttacgcgccagcctactatggctatggctacgggccgggctatgcttatccgcgatactatcggccttatcgtccgtattatagctacggctattatcgcccctaccgggcctatcaccgcccgtatcgtgtctaccaccgtcaccactatcgccattggtga

SEQ ID NO: 5293 - DNA, 1263 bp, BradyrhizobiumColbertium
atgagtgccgcgagacccgagccgcttgcccgtcaggcgctggcgttcgtcctggccggcggacggggcagccggctcctggagctgaccgaccggcgcgccaagcctgccgtgtatttcgggggcaagtcccgcatcatcgatttcgcgctgtcaaacgcggtgaattcaggcatccgccgcatcgcagtcgcaacccagtataaggcgcacagcctgatcaggcatcttcaaatgggttggaacttcttccgtcccgagcgcaacgagagcttcgacattctgccggcaagtcagcgcgtctccgagaacatgtggtatgtcggcacggccgacgcggtgtaccagaacatcgacatcattgaatctcacgcctgccgcttcatcgtggtgctggccggcgaccacatctacaagatggactacgaggtgatgctgcgccagcacgtcgagagcggcgccgatgtcaccgtcggctgcctcgagatgccgcggacggaatcctcgggtttcggcatcatgcatgtggacgagaacggctggattcacgagttcctggagaagccgaaagatccgccgccgatgcccggaaagcccgacgtctcgctcgccagcatgggcatctacgtgttcgatgcgaagttcctgttcgatcagctcaagcgcgacgccgaggacccgaactcgaaccacgatttcggtaaggacatcattccctacctcgtcaagaacggccgcgccatggcgcaccagtactcgacctcctgcgtccgcaccggcagcgacctccgcgcctattggcgcgacgtcggtacggtcgatgcctattgggccgcgaatatcgacctcaccgacgtcgtgcccgagctcgatctgttcgatcgcgcctggccgatctggtcctatgccgagatcacgccgcctgcgaagttcgttcacgacgaggagagccggcgcggccaggcggtgagctcgctggtctccggcggctgcatcatctccggtgcctcgctacgccgctcgctcctgttcaccggcgtgcgcgtcaactcctacgccaacgtcgagaacgccgtcatcatgccctacgtgaatgtcggccgcggcgcgcgcttgaagaacgtcgtgatcgaccgcggcgtcgagattccggaaggcctggtcgtcggcgaggatcccgagctggacgcaaagcgcttccgcgccaccgagcagggcatctcgctgatcacccaaccgatgctcgacaggctcaataaatga

SEQ ID NO: 5294 - DNA, 1455 bp, BradyrhizobiumColbertium
atgacgcctgttcgcgtcctcgcggtcgcttccgaagtctatcccatcgtcaagaccggcggcctcgcggatgtcgccggcgcgctgccggttgcgctcaaggcgcatggcgtcgagatgcgcaccttgatgccgggctatcccgacgtgatgcgcctgctcgccggcgcggaggaactgcggcggtggccggactatttcggcggtcccggacggctgctcgcaggctcgcacgacgggctcgatctcttcgttctggacgtgccgcatctctatgcgcggccgggtaatccctacgtcaccagcgagaacatcgactggccggacaacggcgtgcgcttcgcggcgctgtcgcgcatcgccgcggacatcggccacggcctcgtgccggccttcgtgcccgatgtggtccatgcccatgactggcaggccggcctcgcgccggcctatctgcactatgacaaccgcccgcggcccggcaccgtgatgaccattcacaacatggcgtaccagggcaagttcgcgcccgagctgatcggagcggttggtctgccctggtcctccttcaacgtcaatgagctcgaatatttcggcgggatcagcttcctgaaggccggactgcaattcgccgaccgcatcacgacggtgtcaccgacctacgcacgggaaatccagaccgacgaaggcggcatggggttcggcggcctcttgcgcgcacgcgccggcgtgctcagcggcatcctcaacggcatcgatgtttcggtgtggaatccgcaaaccgatccgcacatcgcctaccgcttcggcacggaggacctgacgttccgggctgcgaacaaggcggtgctgcagcagcagttcaatctcgattcctcggacgaagcgccgctgctcggcgtcatcagtcgattgtcctggcagaaggggctcgatctgctgctcgaggccatcccgaccattttgcgcgaaggcatgcagctcgcgctgctcggcagcggcgaccgcgacctgcaggatcgctatcaggctgcggcccgcgccaatcccggccggatcggcgtcgtgatcggctacgacgagattctggcgcatctcatccaggccggggcggacgcgctcgtcgttccatcgcggttcgagccgtgcggcctgacccagctttgcgcgctgcgctatggcgccgtgccgatcgtgtcccgcgtcggcggtctcgaagacaccatcgtcgatatcggcgaggccgatgcgtccggccacgacgccacggggttcaagttcggcccggtgacggcggatgccctcgccggcacgctgcgcaaggccaacatcgccttccacgacaagctgacctggcgccggctgcaacgaagcggccttgcgaccgacgtttcctggcgcaatcgcgccggcgactatgccgcgctctatcgcagcctcatggcggcgcgcgcgtga

SEQ ID NO: 5295 - DNA, 273 bp, BradyrhizobiumColbertium
atggagccggacatggaccccttcgcgatcaagctgctcggctttgccgctgcgacctgcaccaccgttgcctacgcgccgcagttcatcaaggtctggaagacccgctcggcgcgcgacatctcgctcggcatgttccttgtcatggtgctgggcctggcgctctggctcgtctacggcctgctctccggcgacgcgcctctggtcgccgccaacgccgtcaccatgctgctcgccggcggaattctcttcatgaagctgaaatacgggtaa

SEQ ID NO: 5296 - DNA, 729 bp, BradyrhizobiumColbertium
gtgcaatatgcgaagacggccgaggcgttcgcccggctgccgcagcttctgcccgcgcggccaaaggccgtgctcgtcatcaccggacattgggaggccgatgcgttcaccgtatcgacctcggcgcatccgccgatggtgtacgactattacggcttccccgagcatacctaccacctcaaatatccggcgcctggcaaacccgagctggcggccgaggtgaaggcgctgctgacgcgggccggcttcgattgccgcgaggatcccggccaaggctttgaccacggcacgttcgtcccgctcggattgatgtatccgaacgccgacatgccgatcgtgctgctgtcgctgaagtcgagctatgatccggccgagcacatcggggcagggcaggcgattgcatcgcttcgcgatgaaggcattctgatcgtcggcagcgggctcacctatcacaacatgcgcggcttcaaccggccggaatccacgcaggtctcctacgacttcgaagcttatctgaacgaagccatcggcaacccggatgcggcgcgccgcaacgcgatgttggccgactgggagagcgcaccgggtgcgcgcctcgcccatccgcgcgaggaccatctgctcccgctgatggtcgcagccggtgccgccggcaacgacgccggccgccgcgtcttcgtcgacgaggtcgcgcatgtggcgatggcgtcgtacgtgttcggcgggtga

SEQ ID NO: 5297 - DNA, 177 bp, BradyrhizobiumColbertium
atgcgacaggaagagagtcggagatcgcgtcatggggcttgtctcgtcagcaacgggcgcgtgcctactcacgcgaccggcggcgagcataggcaagccggcatggttagcaagccgttaacgatttggcgcccaaaatccgggcgtggccgaagcagtcggcctgaagacgagtga

SEQ ID NO: 5298 - DNA, 180 bp, BradyrhizobiumColbertium
atgaggaagttcgcgctgggggacgtcgtcaacagtgacaaggggcgccgcggtgtggttcgcgccgccttcaagtccagggacggccagcaattctacgccgtcgagaaggatggcgcgatagactatctggaggaagaccggctgagcccggcgccgcgcgtcgagctcgcggcttaa

SEQ ID NO: 5299 - DNA, 1407 bp, BradyrhizobiumColbertium
atggctcagccggttgggcagtttccgttcgcgctgacacgcgaagggcagatgctcggggccgtggaaggcgaggtggcctcgttcaaggggctggcctacgcagcgccgccggtcggcgccctgcgctggggcccgccgcagccgacgagcgaaagctcggaaatgcacaccgcctatgatcacggtgcgtcgtgtcttcaagctgcgctgccggagtcgcgcgaggattgtctgacgctgaacgtgtttcgtcccttcgggctcgacggcccatttccggtgatggtattcatccatggcggcgacttcgtctcgggcaccgcgaacgagccgctgttcgacggcgccaagctggcgcaggcgggcctcatcgtggtcaccgtgaattaccgtctcggcgcgctcggctggctcgctcatcccggattgtccgacagcggcggaaattacgggctgatggaccagatcgcggcgctgcattgggtgcgcgacaatatcgcggccttcggcggcgatcccgataacgtcactttgttcggcagcgatgcaggcgcgacgtcgatcgcgctgctgatgctgtctgcgcaatcgcgtgacctcttccagaaagccattctgcaatccgtgcccggccgcgcgcggctgcgcacggcgcacgaggcggaggcggtgggccggcagttcgcagccgcgcttggaccggacacggatttgcgcgccgccgagccgcagcgcctgcttgccgccgaaagacgtctgctcgagaaatcgccgcggagcttcgggccgacgatcgatgggcgtctggtgaccgaggaccttgcccccggctttgcggccggacatcagagccgcattcccctgatcatcggctccaacgaggtcgaggcggattctgggagtgagtcaggtatcaaggaagcgcttgcatcgtctggcattgccagcggcgaactgcgcaagctctatcccgatctcgccacagcatcggatctctcggcgaggctctacaccgacatggccttctcagagccggtgcgattgctggcccgcctgcatgccgctggcggcgcgccgacctttcgctaccgcttcgcctatgtgccggaggcgaggcgcggttatccggatgccgaccgcggtcgggaattgcagttcatcttcggcgcggagggcgtgccaggtgcgggcatcctgtcgcgacgtgatcgcgaagtcgcgagccgcatgcgtggctactggatcaatttcgcgcggagcggcgatcccaatgggcccgatctgccacgatgggacacggcgggcggcgatcgcctgctgctgatcacgaacgatcgcatcgcgagcggagacgatcccttggcggagcgtctcgatcggctcgcgaatgagagcaggaaatga

SEQ ID NO: 5300 - DNA, 177 bp, BradyrhizobiumColbertium
atggacgtcgtccttgaggagacgtgccggcagctgccgcatggcggcgatcacgacagccgccggttcatcgccgagcgcctgatcgaggcggcgcaggcgggacacaccacgctcggcgagctcggcatcatcgcgcggcgcgccctcgcggaactcattggcaagggcagctag

SEQ ID NO: 5301 - DNA, 2685 bp, BradyrhizobiumColbertium
atgcctgacgcaatggttgccacacgtgcctccgatgagcgcggaaccgctcagcaagtcgatgtcgccgtggtcggcgccggcttttccggcctctatctcctgcatcgcctgcgcaaggccggcttctcggcggtcggcctggacgaggccgacgatgtcggcggcacctggtattggaaccgctatccgggcgcgcgctgcgatatccagacgatcgactacagctacacgttcgatccggaactcgacagggcctggacctggtcggagaaatacgcgacccagccggagatcctgcgctatctcggcttcgtcgccgaccggtatgacctcaggcgcgacattcgcttcaagaccaaggtcaccgaggccagatgggacgatgcatccgagcgctggctcatcacgaccgacaacggcgcgccggtctcctgccgccactacgtcatggccaccggctgcctttcggcgccgaagccgccggagatcgacggcgtcaaggatttcaagggcgaggtctatttcacgggacgctggcctcatgacggcgtcaacctggcgggaaaacgcgtcgccgtgatcggcacgggctcctcggccatccagtcgatcccgctgatcgccgagcaggccgcgcatctgaccgtgttccagcgcacgccgaatttcgcattaccggcgcataacggtccggcgcctgcggaccgcatgagcctgctgcaaggcgaccgtgcggcctatcgcgagcaggcgcgccaatcgatggccggcgtgccctacccgcagcagaccgtcgtgagctggcaattgagcgatgccgagcgtcgcgagcggttcgaacgcgcctgggcagcgggcgacctcgtccacatcctgacgcagctgtgggccgaccaggcggttgacctcgacggcaacaagatcgttcaggacctcattcgcgagaaaatccgcgccgcggtcagggatcccgagactgccgctgcgctcatgccggatgatcatccgttcggcgcaaagcgtccctgcctcgagacgaactactacgcgacctacaaccggccgaacgtcacgctggtcaatctgcgccaggagccgatcaaggcgatcactgcaggcggcatcaccacggccaggcgcagcgtcgacctcgacgtcatcgtcttcgcgaccggcttcgacgccatgaccggcgcgatccgcgccgtgcatccgatcaccgggcgtggcggcaagtcgctctccgacgtctgggcgcaggggccgcagacctatctcggcctcacggtcgagggttttccgaacttcttcatgatcactggcccgggcagtccatcggtgctgtcgaacatggcggtgtcgatcgagcagcatgtcgactgggtggtcgatcgcctggcgtcgctgcgcgatgccggcttcaccacgatcgagccgaccgagacagcgcaggccggctggggccggcacatggccgactgctcgatgctgacgctgcaccggctcgccaacacctggtacacgggcgccaacgtgcccggcaaggtgcagggcctgatgccttataccggcggcgtcggtccctatcgcagcatctgcgacgaggtggtcagccgcggcatgctcggcttcaagctcaccggaccgggcggggccgtgcaatgcaacgacggcgaggtcgtgcgtctccagccggatgtgaggctggtgctgaacctgctcgcctcgctgaacctgccgccgatcgagtcgatgggcgcggaaggcgcccgtgccttcgtgaacgagttcaacaagagccgccccgccgggcgaccgatcggcgacatcgtcgacggcacgctgcctgttgccgacggcgcgctgccctatcgcgtctacaagccggcaacgcccgggccgcatccggtcgtggtctatttccatggcggcggctgggtgcttggggacgagcagtcggacgagccgttctgccgcgacatggtgcggcggaccggcatgatgttcgtcagcgtcggctatcgccacgcgccggagcatcgcttcccgaccgccgccgaggacggctacgcggcgacgcgctggatcgccgagcacgccgccgagctcggcggcagtacgtgcccggtgctggtcgccggctggagtgccggcggcaatatcgccgccgtcacctgccagctcgcgcgcgaccgcggcgggcccgcgatcgccggccagcttctggtctgcccggtcaccgactgcagcttcgaccggccgtcctacaacgacaatgcgaccggctacttcctgacgcgctccctgatgtactggttctgggacctgtactgctcgccggccgaccgcatcgatccgcgcgtctcgccgctacgaggcaaggtcgccggcctgcccccggccttcgtggttacctgcgagttcgatccgctgcgggacgagggcgtcgcctatgcggaggcgatggaagctgccagcgtcccggtcgaacagctcaaggctcggggtcatttccactcatcgttcgcgatggtggacgtggtgataacaggtgcgccgggccgggcacagatggccagggccctgcggcgcttcgccggtctgccgccggagctcagccaggacgagaacagcaagagccacaccagcccgggactgaggatcgcggcggccgccagctga

SEQ ID NO: 5302 - DNA, 273 bp, BradyrhizobiumColbertium
atgggcggcgtggtcggggattccaaggtcgatttcggcgcgccagcaacgctgcataaatggccctcgctggccaaccagcggcggccggaccgggagccttacgaggtcatcgaaggcaccctcgacgattgcatctcggctttcatggcgaagccggcggcaacccgacacctctatgaaatccgcaccgtcgcgcagccaccgctcgtcaccgaaatcctcatgccagagcacatcatcgagctgtcgcgcctgagagaatttctctga

SEQ ID NO: 5303 - DNA, 306 bp, BradyrhizobiumColbertium
atgcttgaagctggcgtgcccattccggtcgtgccctatggcgcagaccagaccttgttcgtggtaatcgatcgcctcgaccggtcgaccgaggtccgtgtcgagcgcagcgatctcgaggccacaatcggcgagctcgtggccggctgcttcaacgatcccatcaaggtaatttcgttcaacacgctcgagcattggatgaaggacatctcgagcgatgtggccggcgagatcaaggcacgctgcgacatcgatggcgtgacgctgcccgactatctcagcgacttcgtcgagaaccacagctga

SEQ ID NO: 5304 - DNA, 237 bp, BradyrhizobiumColbertium
ttgagcatcatccggctcggaagcgctttgcgtttttcgatctggttctatttcctgcgttccatgcggctatcgcatccgccctcgttccaaagcgcggaacttctcttttgctccggcgtcatgacagtgtttgaagaggaggacatcatgggtcttggacgaggtgctttgctttggatgcttggcgtgccgctgccgatcgtgctgctgctggcgctgttctggaacaactga

SEQ ID NO: 5305 - DNA, 156 bp, BradyrhizobiumColbertium
ttgaacacgatcaagtatctcgaagatcaggccgcgcgtgccgagcggctcgccaaacggatcacggatacgtcgacgatcgagaagctcctgactttcgcgggcgagcgccgccgcgagatcgaggccatcgccggcaagcatcgcagcgcctga

SEQ ID NO: 5306 - DNA, 543 bp, BradyrhizobiumColbertium
atgtcttgcattgcacgtaccgaaagtgcccggatctccgtcgcaacctcgtgccggctgctgctcgccatcgccggcgccgcctcgctcgcagcctgtgcgcaagcgccggtcggccgtcagaaggccgatctcgccgctacgggccgacacgccgcggtggagcgcccgcacagggtggcggcgctgcatccccggccgatcagccgggcgcgcgctccagccgatgatgcaaagcaggcggcctcgcatggcgtggccagcttctattcggatacccagaccgcgagcggcgaaaagttcgacaggaacgagctgaccgccgcgcatcccaccttgccgttcggcaccaagctgcgcgtcaccgatacctcttccgggcgcttcgtgaccgtgcgagtcaacgatcgtgggccgtatgtgcgcgggcgcgtggtcgacgtttcgccttccgcggccgaggcgctcggcatggtcgacaagggcatcaccaatgtcaggctcgaggtcgtgcaattgggcgcgaccagtcgaggccgatga

SEQ ID NO: 5307 - DNA, 999 bp, BradyrhizobiumColbertium
ttgacgggcgaggcctatgacagcttcgtcgacgaattcattcaggccgctcgcaagacctttccgggcgtgctgatccagttcgaggatttcgccaaccattcggcgttcaagctgctgcacaaatatcgcgacgaagcctgcgtcttcaacgacgatatccagggcaccgctgcggtggcgctcgccggtctgttctcggccttgcgcatctccgggggcaagctcaaagaccagcgcatcctcttcctcggtgcgggcgaggcggcgaccggcatcgccgacctcgtggtctcggccatgatggcggagggggcttccgaggcggacgcgctccggcgcaactggctggtggattcccgcggcctcgtggtcggcggccgtgatggcctgtccggccacaagctgcgctatgcccatgccgggcaggcgccgatcgccgactttctcaccgcgatcaagacgctgaagcccacggcgatcatcggcgtcgctgccgtcggcggcgccttcacgcccgaggtgctcaagaccatggccgagctcaacgagcagccgatcgtgttcgctctctccaacccgacgtcgaaggccgaatgctcggcggaggatgcctatcgctacaccgagggccgcgcattgttcgcctgcggcagcccgtacgacccggtgaagctcaatggccgcagcttcgtgccgcgccagggcaacaactcctacatcttccccggcgttggactcggcgtcatcgccagtggctcgcgcctcgtcaccgacgaaatgttcatggcggcggcccatgcgcttgctgactgcgtcggcaaggacgacctcgcgcaaggcagcctctatccggcactgccgcgcatccgcgaggtctcgatccgcatcgccgcagccgtcgcagacgtcgcctatcagcgcgggcttgcggacggaccggcccccaatgacgtcaaggccctggtccaatcccagatgtacgagccgcattactga

SEQ ID NO: 5308 - DNA, 624 bp, BradyrhizobiumColbertium
ttgggggaattcgtgaatagacctgcccgggtcgttgcccgctcgacgtcgtccaatccgccgcaaggcatgactctgctgcgcgatcccttgctcaacaaggggactgccttcacagaagcggaacgcgagaggctcggcctgcgcggcctcctgccgccgtgcgtgctgacgatggagacgcaggctcagcgcgtgctcaccaatctgcgcacgctgccgaccgacctcgaaaaatacgtcgcattgaacgcgctgcatgaccgcaacgaggcgttgttcttccgcgtcgtggtcgaccatatcgacgagatccagccgatcatctacacgccgacggtcgggcttgcctgccagaaatacggcctgatcttccagcgcccgcgagggatgttcatctcctcgcgcgatcgcggccagatcgcggacattctgaagaactggccctatcaggccaagctcatcgtcgttaccgacggcgagcgcattctgggcctcggcgacctgggtgccaacggcatggggattccggtcggcaagctttcgctctattcggcctgcgccggcgtgcatccggaagcatgcctgccgatcgtgctcgacgtcggcaccaacaacgaatag

SEQ ID NO: 5309 - DNA, 837 bp, BradyrhizobiumColbertium
gtggtgacgatcggcctcgccgtgttcgttgcggccgcgatctgggaagccagcaatgcgctcctggatcgtcagatcaatacgctgtcccgggacggtcattatgcccgtgccgcgcgcctacgcaccttccagccgatgctgcgtaccgcgctgctctgcctgattgccacggttgtcggcctcacagcgctgagcgagatcggcgtcaatgtcgcgccgctcctggcgggcgccggcatcgtcggcatagcgatcggcttcggttcgcaaaagctggtgcaggatctcatcaccggccttttcctgctgctggagaacaccgtgcaggtcggtgacaatgtcagcgtgtcgggcttgtcaggcgtggtcgagaacgtctcgatccgcaccattcgcctgcgcgccggtgacggcgccatccacatcgtaccgttcagcgcggtcacgaccatcaccaatgccagccggggtgccggcaatgcctcggtcagcgtcaacgtcgcctacaaggaggataccgaccgcgcgggtcagatcctcaaggacatcgtcgacgagatgcggcgtgaaccggatttccgggccttgattcgtggcgatctcgagctgtggggcgtcgacaaggtcgacggcgcgatggtgtcgatcgtcggccagatccgctgcaccgatgccggtcgctggccggtccagcgcgaattcaaccggcgcatgaagctgcgtttccagcagaacggtatcgaggtcgcatccgccacccagaccatcctgatgcacgtcgtgcccccgatggacagcgcggcccatctcacgccgcggcgggcggccggatag

SEQ ID NO: 5310 - DNA, 1482 bp, BradyrhizobiumColbertium
gtggcgcacaagctggccgcggcgctcttcgccgctctcttcctcacgattccatctctctccgatgcgcgtgccgagccgcctgcggcggcgaacagcaccgtcacactgtcggccgacgaggcgaagcgcgcgctcgaaaccctgcaggacgacaagaagcgcgggcagatgatcgacacgctccgcgcgatcgccaatgcgtccggtccgcagctctccgcgcccgagccgaaatcgccgatccccctcgcggccgacgggctcggcgcacagctcctgctcacggtgtcggaggagatcggtgcgatctcgagcgagatcgccagcgtggcgcggacgctcacgcatttcccggcattctattactggatcatgcgaaccgcgaacgatcccgcggcccacaacctcctgctcgagatcgcatggaagctggcactggtgttcggctccgccttctgcgcggaatgggcgatcgtccgcctgatccggcgtccggtcgcgttcctggaagcacgcgtaccacagagcccgcgcttgccggtgcaggtgctgcccatcgccgatcctccgtcctcagtgaccgctgtcacccccgcgcccgaactgcagaagcgccgtcacaatctcgcgcgcatgtggcaggtcgtggtgcggctgcccctggtgctgggacgtctcgcgctcgaactgatccccgtgttcacctttgcaggcgtcgctacggcgctgctcgggaccgagattggcgagcccacaactgtccgcctcgtcatcctcgcagtcattaacgcctatgcgttctcgcgtgggttgatctgcatggtccgggcgctggcagggccgttcggcctgcttccggtgcgtgcggagaccgccgcctacatcgagataggggcccgccgcatcgtcggtgtcggcgtttccggcatcgccttcgccaatgtggcgctgctgctcggcttgcaccgcgccggctacgccgcgctgctgcgcatggcgatgctggtcgtgcatctgttcgtcgtcatcatcatcctgcaatgccgtcgccaggtcgccgaagccattcgcgcccctgccgagcggcaggggattgcagcccgcttgcgcaatcgcgtcgccggcggctggcattaccttgccatcgcgctcgacatcgcgctgtgggcagtatgggcactgaacatccgcaacggctattcgcttctgctgcaatacttcgtcggcaccattgcggtggcgctggtcacgcgtgtcgtcaccatggtgacgctgagcctgatcgaccgtggcttccgcatcacgccggatatcctccagcgctttccgggcctcgagatccgggccaaccgctatctgccgctgctgcgcaagatcatgtctggcgtgatcgccttcatcggcttcgtcgccgtgctcgaagtctggggcgtggacgccatcgtctggttctacggcggcagatcggcagccggctga

SEQ ID NO: 5311 - DNA, 126 bp, BradyrhizobiumColbertium
atgacggcagagacggtctcttcggtggaaacgctgccttcagggatgattggcgaggccgttccgtcgcggaacgaaacggaacgcgtcttcaaatgtgatctcaaggcctttgatcccgcttga

SEQ ID NO: 5312 - DNA, 951 bp, BradyrhizobiumColbertium
atgagcaagaagccgtccagatcgctcgcccaggaacttgaccgctacatcaccccgttccgctacgacgggtcgggcaagtttcacctcaaggaccacaagaccgacgagaagggcgatctcgacaaggagaaggcgctggcgatcctcgacgccaacaagcagcggctcatcgaatttcaggaaaagctctacgcgcaggaccgctggtcgctcctgatcgttttccaggccatggacgccggcggcaaggactctgcgatcaaggcaatcttcgaggggatcaatccgcaaggctgcgaggtccatgccttcaaggcgccgagcagcaaggagctcgatcatgacttcctctggcgccatatgatcgcgctgcccgagcgtgggcgtatcggcatcttcaaccgctcgcattacgaggaatgcctggtgacgcgcgtgcacccggagattctcgccaaggagaagctgccgccgaagctcgtcaccaaaaacatctggaaggaacgatttgaggacatctccgccttcgagcgctatctctgccgcaacggcaccgtggtgctgaagttcttcctcaacgtctccaaggaagagcagcgcgagcgcttcctcgaacggctggagaacccggccaagcagtggaagttctccatggacgacatcagggagcgcgcgctgtggccgcgctaccaggccgtctatcaggatatcgtccgccacacggcgacacagcatgcgccatggtatgtcgtgccggccgaccacaaatggtttgcgcgtgtcgtgatcggctccgtgatcaacgcggcgctcgaaaaactcgacttgcgttttcctcgcgccgacaaggcctcgctggaggagttcgagcaggtgcgcaaggcactcgagaaggaagaaaggaagggcaacatggaaaaacctcgaaaacaaccccatgcacagtag

SEQ ID NO: 5313 - DNA, 1020 bp, BradyrhizobiumColbertium
atgatcgggcaggggcggcttgcagcatggggcataggactggccgcgctggtcgctctgcccttcgtctatcgcgatccctatcatctgcacatcctggtgctgatcctgatctggtcgttcgcctacacctcctggtcgatgatggggcggttcggcctcgtctcgctcgggcatggcggcttcatggggatcggcgcctatgtcaccgccttgctgtggaatcatctgggcctgtccccctggatcggcattcccatcagcatggtcgcggccggcgtgctggcgctgatcgtcggatatccctgcttccgcttccgcatcaccgggcactatttcgtgctggtgaccctggcgctctccggtatcgtgctccaggtcatcaccgcgacccgtgactacaccggcggctcgctgggctacacgccgaaccggacctcaggcaacaagctgctggcgctgcagttcgacgacaagaccacctggtacctgatcgcgctcggggtctggctgttcggcatcgtggtctggcactgggtcgaccgcagcatggcccgctacgcgctggaggcgatctcggaggacgaggacgccgccgccgcggccggcgtcgacgtcaccgccgagaagctgaagatcacgctgctcagcgcgttgatgacggcgctcgccggcgcgatctactgccagtaccagatgttcatcacgccggacacggtcagcggcatcgcggtgtcgctgcagatggtgtttgcggccatcgtcggcggcctgttcgtctcgctcggcccgaccgtcggcgccatcatcacaattctgctggcggagagcttgcgtatcggcttcggcaccaaggcggtcggctgggacaacctcgtctacggcgttctgctcgtccttttcatcatattccttcccaagggcatccttggtagcttgctcgaccgattgaagccgcaacgcaaggtgccccgcgctcatgagcaagaagccgtccagatcgctcgcccaggaacttga

SEQ ID NO: 5314 - DNA, 891 bp, BradyrhizobiumColbertium
gtgaagggcatgcaggcatttctggaggtcttcgacatctacctgctggaggccgtgatcaacggcattctcctcggcggcgttctggcgctgcttgcgctcggcctcaacctgatctttggcgtcatcgacgtcacctggatctgctacgccgagctggtgatgatcggcatgtacggcatgtatttcatggtgcagtattacggcgtcagctatttcgtcgccgccccgctgaccatcctacttgtcgcggtgcttggcgcagcgctgcactatctcgtgatcgcgccgctgctgaccgcgccgcccatcaatcagctgcttgccaccggcggcgtgctgttcgtgctccagagctttgccaccgtggccttcgggatcgacttccgcaatctcggcatccgtctgccggtgctcgccttcggcgacatgaatttcagctatgcacggctgctgtcctttgccgccgcgctggtcggcatggttgcggtctatctgttcatgacgcgcaccttcaccggcaccgccatccgcgccatctcgcaggaccgccagatcatggcgctgatgggcgtcgacaccaggcggatctatctcatcacctccgccctcggtggcgcactcgccggactcgccgcgtgcctgctggtgctgcaatacgacgtgcatcccttcgtcggcctctcgttcggaccgatcaccttcctgatctgcgtgctcgggggccttggcaatttcatcggcggcttcatcgccgctttcgtgttcgccgagatcatctcgctcggcggcctgttctccgaccttgaatggggctatgtgctcgcctttgccttcttcatcgtcatgatgttcatccggcccgcgggcctcttggcgaggcgccgatga

SEQ ID NO: 5315 - DNA, 705 bp, BradyrhizobiumColbertium
atgctggagctccgcggcgtcaatgccggttatggcaccttccaggcgctgttcgacgtcgatctcgacgtcagggccggggaggcggtcggcgtcatcggccccaatggcgccggcaagacgaccttgatgcgcgtgatctccggcctgatccggccttcgcgcggctcgatcaagatggaaggcatcgacctcatcgcgacaccgtcgcacaagatcgtcagcctcggcatcgcgcatgtaccggagaaccgccggctgtttccgcagctctcggtcgacgacaatctcaagatgggcgccttcatgaaggaggcacgtgggcattatgccgagcgcctcgaggccgtgttcgacctgtttccacgcctgaaggagcggcgacaccagatggccggcaccatgtccggcggcgagcagcagatgtgcgcgatcggccgcgcgatgatgtccaatccgaagctgctgctgctcgacgaaccctcggcagggctggcgccggtcgtggtgcagcaggtgttcgaactggtgaagcggattcgcgccagcgggctgaccgtgctgatcgtcgagcagaacgtgcaacaggtgctgaaggtcgtcgaccgcgcctatctgatcgaggcgggtacgatccgcgcgtccggcagtgcggccgagatgctggcgagcgacacggtcaaggaagcgtatctcggggtgtga

SEQ ID NO: 5316 - DNA, 768 bp, BradyrhizobiumColbertium
gtgctggaggtgaacgggctggtgaagcggttcggcggcttcaccgccgtgaacaacgtgtcgttcaaggtcgagcagggcgagatcctcggcctgatcggccccaacggctcgggcaagagcacgatcttcaacatgctttccggcacgctggctccgacatcaggttcgatcctgttcgccgggcatgagatcgctggccttgcgccgcaccggatcatcaatagcggcatcggccgcaccttccagatcccgcggcccttccgccgcttgaccatcttcgagaatgtcgcgctggccggcttctacggccagggccgccatagccgggccaaggcggaggaggcggcggagcggtcgctggcgatggtcggcctgccgactgaccgccatgccagcgtcgatgggctcggcgcggccggcctgaagaagctcgagcttgcgaaagcgctcgccaccgcgccgaaattgttgctcgccgacgagagcctcggcgggctcgacgaggccgaaatggatcaagcggccgacatgctgcgcaacatacgcgatgagctcggcatcaccatcatctgggtcgagcacatcatgggtgtgttgatgcgcgtcgtggaccgcgtgatggtgctcgaccacggcgagaagatctcggagggactgccgagtgccgttgcgggcgatccccgcgtcatcgaggtctatctcggcaccgatgccgagaccacgcaggccgcggcggccgaagcgcgccgccgggcgggaggctag

SEQ ID NO: 5317 - DNA, 1311 bp, BradyrhizobiumColbertium
atgcgcctgcgcatggctgcccgtttggtacgtgggctgtttgtcgcgattgccgcgacgggcttggcggtgtccgccgaggcccaagagaagaagctcaagatcggcgtcatctatgatctgaccggcccgctcgccggcggtggctcggagctgcaatataccggcgccaggatcatgctggatcagtacagcgcgaaggacgtcgagggctacaagatcgaggcgatctatgccgatgctcagagcaagccggatgtcgccatcaacgaagcgatccgcctgatcgagcaggaaaaggtcgacatgctgctcggcttcttttcctcggcgcagtgcgtgccggtggccgcgcgcgtcgagcagctgaagaagttcatgtggatcacgacctgcatttcgtcggccgtgctggagaacaagaactacaagtacgtgtttcgcccgcaggcctccggcgatcagttcgggctgatgacgatggacttcatcgcgcagaacacgaaggaaaagttcggcaaggatccgaaggacctgcggatcgccatcatccatgaggacggcgcctacggcgtcgacgttgccaaaggcaatgaggccggtgccaagaaggccggcttcaacatcgtgctcagggaaggctattcggcgaccgccccggatttgtctgcgctggtcaccaagctgaagcgggccaagccggatgtgatcttccacaccggctacaatccggacatcaccctgctgctccggcaggcccgcgaacaggggctgaagttcggcgcattggtggggcatggcgccggctacggggtctatgagaagctgaaggagggcctgggcgccgatgtaaactacgtcttcaacaccgacccgatctcgatctggctcgccaaccagaagagtatggatccgaagctgccgccgatcatcaaggcggttggcgaggagttcgacaagcgcaagccgggcatcgccatccgctcggcccatgtcggcatggctgcatccaacacctacttgttcctgaccgacgtgttgccccgagcgatcaagaaatatggcgggatagatcccgactccctgcggaaggccgcactcgacaccgacatacccgaaggcggcaccatgctgggcttcggcgtcaaatttcacggcgagggctcgccaatggccggccagaacgagcgctcgttccccgtcgtgatccagtacgtcgacgacaagtcctatgtggtgtggcccaagagccaggcgcagcgcgaggccgtgctgccgctgccgaagggcaccacctatagtaaccagtag

SEQ ID NO: 5318 - DNA, 705 bp, BradyrhizobiumColbertium
atgacgtcacctgtcattcatcgcgttgcgacgcttgatcttgccgtgcggccgatcgcgtggtcgttcgcggaggagcgtcgcaccgagatcgcgacgcatttcgccgagaagcagcgtgagcggccgaagatctggaacggccgcgtcttgcttggccgcgatcccgtgtttgcgggtgaccatttcgctgcgacctatttcgagaccgatttcgcgagcttcctcgcttggcgcgactggggctttcccggccctgccgtgttcaacggttttggcatgggcgcgctgcgcgcgtccgatggtgcgttcatcatgggcgaaatggcgccccacaccgccaatgcgggtcgcatctattttccctccggcacgccggatctcgacgacgtcagggacggcgtgctcgacatccccggcagcgtcatccgcgaactcggcgaggaaaccggcctgaccacgaccgactatcggatcgagccggggtggcactgtgtggtgaccggcccgacgattgcgatgctacaggtcatcaatctggacatgccgggcgatgaggcccgcgcccggatcgaagccaatctcgcgcgcgaggccgaaccggagctgtcggccatccatctcgtgcgcgcgacgagtgatctcaggccgtccatgccgcgatttgtcacggcctttgtcgagcagcagtttgctgcgcgctga

SEQ ID NO: 5319 - DNA, 1026 bp, BradyrhizobiumColbertium
atgaagaagacgattgccaggctcgccggcgtgctgcttgcgctgacgctcaccaccgcgcttgccgcggcgcaaagcaaggtgaccatcgcgatcggcggcggctcctgtctgtgctatttgccaaccgtgctggccaagcagcttggcgagtacgagaaggccggcctcaacgtcgagctcgtggacctcaagggcggctcggatgcactgaaggccgtgctcggcggcagtgccgacgtggtctccggctatttcgatcattgcgtcaatctcgccgccaagaagcaggaactgcagtccttcgtggtctatgaccgctatcccggcctcgtgctggtggtcgcgccctcgcgaaccaacgagatcaagtcggtcaaggacctcgccggcaagaaggtcggtgtgagtgctcccggctcctccaccgacttcttcctgaaatacatgctcaagaagaatgggctcgatcccaccaacgtcgccgtgatcggcgtcggcctcggtgccaccgcggtcgccgccatgcagcagggccagatcgacgcggcggtgatgctcgatccctccgtcaccgtgcttcagggcaaccacaaggatctgcgcattctctcggacacccggacccagaaggatacgatcgagactttcggcggcgaatatccgggcggcgcgctctattcgaccgcggcctggatcaatggtcatgagaaggaggcgcaggcgctcaccaatgcgatcctcgccacgctagcgtggatccattcacattcgcccgaggagatcatggcgaagatgccggaggaaacggtcggcaagaacaaggatctctatcttgccgcgctgaagaacacgatcccgatgtattccgagaccgggaagatggacccgaagggcgcggaggccgtgctcgcggtgttcagcgtcggctcgcccgaggtcgcgaacgccaagatcgacctcagcaagaccttcaccaacagattcgtcgatcaggccaagaagacgacggggaatgccaagtag

SEQ ID NO: 5320 - DNA, 789 bp, BradyrhizobiumColbertium
atgtcgcgcgcgacgctccttgctttgcagattctcgtcgccgtcatcggcatcgtgctgtggcaggtgctgacgaccgttcccctcttcggcaagatcctgttgccgccgttctttttctccaacccgttcgacgtgttcagtcagatcgtgaagtggttctcgaccggcgtgatctggaaacatctcggcatcaccctggcggaatcgatcctcgccttcgtaatcgggtcggtcggcggcgtgctggtcggcttctggttcgcgcgacagccgctggtcgcggccgtgttcgatccctacgtgaagatggtcaacgctctgccgcgcgtcgtgctggcgccgatcttcgcgctgtggctcggtctcggcatctggtccaaggtcgcgctcggtgtgacgttggtgttcttcatcgtcttcttcaacgtctatcaaggcgtcaaggaagtcagccgcaccgtgctcgacaatggccgcatgctcggcatgagcgagcggcaattgatgcagcacgtctattggccttcggcgttgtcctggatgttctcctcgctgcacacctcggtcggcttcgccgtggtcggtgcggtcgtcggcgagtatctgggatcggctgccgggctcggctatctcattcagcaggccgagggcatcttcgacgttgccggtgtctttgccggcatgttcgtgctgtcggcgttcgtcatcctgatcgactttggcgtcacgctggtcgagcggagactgctggtgtggcgcccgaccgcggcggacgggcgagggtag

SEQ ID NO: 5321 - DNA, 801 bp, BradyrhizobiumColbertium
gtggcgctggaagatgccaaggttgcattccgcctcggggacgggcgggtctatacggcggtcgagcaggcccatctcacggtcgaccagggcgagttcgtggctatcgtcggtccgacaggctgtggcaaatcgacattgctcaacgttgccgcggggctcctcaagcccgctgccggcagcgtcaggatattcgaccggccgctggccggactgaaccgggatgccggatatctattccaggccgatgcgctgttcccctggaagacggcgctcgacaatgtcgcgatcgggcttgaaatcaagggcacgccgcgcgcagaggcgctgccgcgggcccaaaaatggctgacctcggtcggcctcggcgcctttgggggccgctatccgcacatgctttccggcggacagcgcaagcgcgtggcgctggcgcaggtgctgatccgcgatccaaagatcctgctgatggatgagccgttcgggccgctggatgcgcagacgcgccaggtcatgggcaacctgctgctcgacttgtggaatgccgaccgcaaggcggtgctgttcgtgactcatgatctggaagaggcgatcgcgctcgccgatcgcgtcgtaatcatgtcggccgggccgtcctcgcgcatcatcggcgactggcgcgtaagcctgccgcgtccgcgcgacatcttcgaggtgcggctcgacaaggagttccacgctctccatcgtgagatctggagcgtgctcaaggacgaggtcatgaagggctacgcccagtccaccaacgcggcggaggcggtctga

SEQ ID NO: 5322 - DNA, 783 bp, BradyrhizobiumColbertium
atgcccgccaagctggcgatcagctaccgacacgtcgttaaatgcttcggtcgacttaaggccgtcgatgacgtgtcgctcgacatcgcggagggcgagtttatggtgatcgttggcggctcggggtcgggcaagaccacgctgctgcgcctcgccaaccggctgatcgaagccgacggcggcaacatcaccgtcgaaggtcgcaacgtgagcaacgttgatccggtcgcgttgcggcgacggatcggctacgtgttccagagcggcgggctgtttccgcatttgagtgtcgcggacaatatcggcatcacgccaaagctgctgggcatgccgacggcgaacatctctgcacgcgtcgacgagctgctggagctggtgcagctcgaccgtgctgcgcatcgcgaccggttgccggaagcgctctcggggggccaacgccagcgcgtcggcgttgcgcgggcgcttgcggcaaggcctcgcatcgtcctcatggatgagcccttcggagcgctcgatcccctcacgcgtgacgccctcggcgacgactaccggtcgctgcatcgcaagctcggccttacaagcgtgatgatcacccatgacatgaccgaggcgattttgctcgccgaccgaatcgccgtgatgcgcgctggaaagcttctcgcgcagggcacgcccaaggagctgaccaagagcggcgatgcgtacgtgacggagctgctccgcacgccgcggcgccaggtcgagcggctgaatgccttgctgccggaaagcgggtgtgcatga

SEQ ID NO: 5323 - DNA, 1560 bp, BradyrhizobiumColbertium
atgagtcttctcgccgatccacgctggggcgaggcgctggcgcatctgcccgattatctcggcaatcatgtgcgggtgagcctcgccgccctggcgctcggccttgtggtcagcctgcccctggcgatcctgacgcgcaaccgcccggcgccgcgtggcatgctgctcgcgttcgccagcatcgtgcagaccgtgcccgggctggcgatgcttgcgctgttctatccgctattgctcgctgcggcgtccgtcacactggcgtggttcggtgtttcgttctccgcattcggtttcctgccgacgatgctggcgctggcgctctattcgatgctgcccgtgttgcgcaacggcatcaccgggctcaacggcatcgatcccgcgctgatcgaggccgcgaagggcgtcggcatgactgcacggcagtcgctcctcatggtcgagctgccgctggcgctgccggtgatgatggccggcatccgtaccgccgcagtctgggtgatcggcaccgcaacgctgtcgaccccgattgggcaaaccagcctcggcaattacatctttgcggggcttcagacccagaactgggtgttcgtgctgttcggctgctttgcctcggcactgctggcgctcgcggtcgatcagctgctcggtctgatcgagcgaggcctgcgtcatcgcaaccgtctgcgagcagcgctcggctgcgtcggcatcgctgccctcgtcgccgcaacgctggtgccggcgatggggcgctcctcgcagggttacgtcgtcggcgccaagaccttcgccgagcaatatgtgttgtcggcgctgctcaaggaccgcctccaggtcgccggcctgtccgcgacggtgcgatcgggtctcggctccagcgtgatctttgaggcgctgaaggccggcgacatcgatctctatgtcgactattccggcacgctttgggccaaccagctgcatcgcgccgacatcagaccgcgcacggagctgctcgcggagttgaagaccgctctcgcccgcgacaagatcactctgctcggcgaactcggtttcgagaatgcctatgcattggtgatgccgaggcagcgcgccgattcactcggcatccgcaccatcgctgatctcgccgcgcacgcaccgagcatgtcgattgccggcgactatgagttcttctcccggccggaatgggccgcgctgcaaaaggcctatggcctctcgttccgcgcgcagcgccagatgcaacccgatttcatgtatgccgcaattgccagtggcgaggtcgacgtcatcgcgggctacaccagcgacggactgatcgcgaaatacgatctcaccacgctcgatgatcccaggcaggcgatcccgccttacgacgcgatcctgctgctcgcaccgaaacgcgccggtgacgagcgattgcaagcggcgctcaagccgctgctcggcaagatcggcatcgccaccatgcgggaggcaaatttacgcgccagcggcaacgacgcaaactcgtctccggatgcggtggcgaaatggctatgggagacggtgaagcagcgttag

SEQ ID NO: 5324 - DNA, 180 bp, BradyrhizobiumColbertium
atgggagacggtgaagcagcgttagggcacgacaattccggctggcggaaccgaccaagcatcgacaaggctttgatcggccgcctgatgcaccgcaagatcgagttcgcggccgaatggtcgcccgcggaccgaaggacgcctcgttgcgtagagctggtcgcgtactgggaggagtag

SEQ ID NO: 5325 - DNA, 1056 bp, BradyrhizobiumColbertium
gtgatgattgcgcttgctcgccccttgcggccgaccaaagaagaacatcagaaacgctatggggcaggaaaaatgaaaaagccgacacggcgactgttcatgactggtgcagcggcactgttgtgccctccattcggaatggcgcacgcgcaaactgcgtggccagcccgaccgcttcgtatcgtcgtgccatatccgcctggcggtcagacggacggcatcgcgcgagctttcggtgactacctggcgcggctggtgggaaagccggtcatcgtcgaaaacagggccggcgccggcggcgtcatcggcgtggctgaagcaaaacgcgcagagccggatggcaccaccatcctctgcacgatctcttcgtcactcatccagaaccgcattacggtgaaagaccttccctatgatcctgaacgggacttcatctatctgaccatggtcagcggcgccggtggtccggtggtcgcggcgaagaagacgggagcgaccaatcttcgtgagttcatcgaatatgcaaacaaggccggcagcctgaactgggggtcctacggcgtaggttcgacgccgcacgtcctcattgagacaatcgcgaagcaatacggcattcgattccaagtcatccagtaccgcggcgaggctccgatgtggaatgacattgcgggacagacgctggatggcgccgcaggaagttatgccgcagcagcacccgtcatccaagcgggaaccggaaacctgatcggcgtggtcggcagcaggctgccgccgtatcccgacacgcctaccatgaccgagcagggtgctatcggtgacttctatgagctgcgcgcgttcacgaccttcgccgtgccggtcggcacgccaaaggagatcgtggagcagctctctccgatgttgatccaggccggatccgatccgaaggtccagcagatgctgaacaactttctactgtcctctccagccgatttcgagacgaccaatcgcatcttcaagcgcgacagcgatgtgatgctccgcatcttgcgcgatctcggggtcaagccatcggagtga

SEQ ID NO: 5326 - DNA, 129 bp, BradyrhizobiumColbertium
gtgatcgatcaatgggcgctcgactatgccgcaacggcacggcttccttcgatgacaccccgcgtcattcagcgaaaggagatcgccccggcgtcaagttcgggagcgagcgatccgaatgatagctga

SEQ ID NO: 5327 - DNA, 1722 bp, BradyrhizobiumColbertium
gtgtccttgatggcgtccgcgcccaatccaggtccttccgccacgactgccgcgctcgcgagcgttgccgcactcggcatctggcggctgctcgcggtcgcggcgccgcatctggcggcgcttgcgctgatgtacgagaccgagaccgatttcggctcgaggctctccttcgcgctggcctggggcatcctcaacttcttctggatcgctgtgctgcggcggccggcattatcgggcgcgctgtcgctgaccatggtcgtcgtgctcatgctgctgtcgcggctcaagcacgacgtcgtgcagatgacggtcaacttcatcgacctgatgatgatcgatcgcgactccgtcgccttcctgttcacgatctttccgaacttgcgctggtcggtgatcctcgccgggttggtcaccctgccgctgatgtacgcgttgtggtggctcgatccattccgcattcgccgcctgccggcgctcgcctgcaagctcgcctgtcttgccgcgctcgtcggctattcactctatcatccggacgaggcctggcgcggctattacgatgacggctacctctcaaaattcttccgttccggcgtcaccgcggtctccgacttcgtccaatacggtcttatggaagccgctgccgcgaacagcgagcggctcaacatgcccttggtcgatgcctgccacccagcgggtcgccggccgaacatcatcatgatccatgatgaatcgagctttgacatccgcgccgcccaggggatcaaggtgccgcaaggctatggcagccacttcaaatcctgggacggcaagcaacgctcattcctggccgagaccaatggcgggcccagctggttcaccgaatacaacgtgcttgccgggctctcctcgcgctcgttcggccgcttcgcctatttcgtgacgcggatcgcctcgaaccgggtcgagcgcggcctgccgctggcgctgcgccgctgcggctacgacacgctgtcgctctatcctgcccatggcggtttcatgggcgcccgcagcttccagatgacgacgggcatccaccgcttcctcgactcgaaggatctcggcgccaaggacgtcgagccggacagcttcttctacgacaaggcgctccagctgatgggccagcagccgccgaacaagccgctgttcaccttcatctatctcggcgccaaccatttcccctgggagatgcgcttccgccccgatctgctgccgaactggcgcccgccaggcaacgtgccgtccatcgacgaatatttgcgccggcaggcgatgagcgccgagcagtacaaggcgttcgttgcgggactgaagaacaagtttccgggcgagcctttcctgatcgtgcgttacggcgatcaccagccggaattcgcaccgcagatcctcgagcccgggctcggcgacggcgctctaggcaagaagctggacaattatgatccgcgtctctacgcaacctactatgcgatcgattccgtcaacttcgagccggtaaagagcccggtcgtgatggacacgatcgacggcccctatctgccgctggtgatccaggaagctgccggcatcccgctcgatccgtccttcgccgagcagaaggagatcatgctccgctgcaagggaatattctatagctgcaaggacggcgcggaggcgcgacggctgaaccggctgctgatcgacgcggggatgatcagggggctctag

SEQ ID NO: 5328 - DNA, 648 bp, BradyrhizobiumColbertium
atgcccgtccgtcaaccgtcgaggccgtccgccggtcgcaccgcaacgcggccgtatcaccacggcgacctccgccgcgtcctgatcgaagctgcgctgcaacttgcagccgagggggccgaggtctcggtccgtgaggccgcgcgccgggcagctgtgtcgcccggagcgccgttccggcactttccgacccgcgatgcgctgatggcggcggtggcggaggaggcgcagcggcgttttcgtgccgagatcgaagcggcgctggcggaggttcggaccgccggtccgctcgctcgtttccgagcctttggccttgcttacctgtgctgggcgatgtgcaatcccgcacatttcgagatcatctcgacagggcgctatttcgcccatggcagctcgccggagctgacgcgcgacaatgccgagctgatcgcgctgacggagcagatgctggctgacgcggctgcgcagggcttagtgcgcgcggccgacatcaagcgcatccagatcgccggccgggccttggtctacggtttcgcccggatgaatctggatggtcacttgccgcgttggggcatcgcgccgcacgagatcgagcagatggccgaagcggtgctcgacctgttcatcgtagggatcgcaaagacctag

SEQ ID NO: 5329 - DNA, 621 bp, BradyrhizobiumColbertium
atgtcgcaacgtcgaagctggattgaaggctggcggctgcttaccgccctctcattgagtctgatcgcgctgagcgtatggatcgcctcgatgcggcaattcgaggtcgagggtgtccgcacggtgatcagcttcacggcgcgaagctcgctgctgctgttctgcctcgcattcagcgccgccgcggttgcgcggctctggcccaatgtctgggcgcgctggcagcgccgcaaccgccgctatctcggtttgagctttgcggtctcccatggcatccatgcggtggcgatcgtcgtcttcgccaagatggatccggcgggctttgcggaagccacatcagccgtctcctacgttttcggcggcatcggctatgccttcatcattgccatgagcgtgacttcgttggaccgcaccgccgcgctgatcggcccgcgcgcctggcgcgcgctgcaccttgtgggcagctattatctctggttccaattcatggtgtcgttcggcaagcgcgtcccgacgatgccgctctatgccgcgttcctccttccactcctgatcgcgatgacgctgcgcatgatcgcgacggcccgccacccgagcggacgaaccgcggcggcgggctga

SEQ ID NO: 5330 - DNA, 849 bp, BradyrhizobiumColbertium
atgcgatcagtcgtcgtgaccggggcatccaccggcatcggctgggccattgcgaaacttctgatcgggcgcggctatcgcgtgttcggaagtgtccgcaagcaggttgacgccgatcgcctcagggatgagctcggcgccggcttcgcgccgctgctgttcgacgtcaccgaggaggctgctgtcctcgcggccgcgcgaactgtccgcgaggcgctgggcggcgagacgctggccggtctcgtcaacaatgccggcatcgccgtcgcgggtcccgtcctcgaattgtcggccgacgatttccggcgccagatggacgtcaacgttatcggcccggtcctcgcgacccaggcgttcgggccgctgctcggcgcagatccgtcgctgaagggatcgaaggggcggatcgtgatgatcaactcggtggcgggcaagaacggcaatccgctgttggcgccctacagcacctccaagcacgccatcgagggcctgtcggagagcctgcgccgcgaactgatgctgttcgggatcgacgtcgtcatcgtcgcccccggcgcggtcaagacgccgatctggagcaaggccgaacaggtcgatctctccatctacaaaaactcgccctacctgccggcgctcaacaaggtcatggccgtcatgatggaactcggcgcgaagggcctgccggccgagcgcatcgccgaaatcgtgctcgaagcgctgaccgcggcaagccccaaggtacgttaccagatcacgccggacccgatgcgccatctgatcgcggccgtgttgccgaagcggacgctcgaccgcatcatcgccaagcggctcggtttgcgggagcagtga

SEQ ID NO: 5331 - DNA, 114 bp, BradyrhizobiumColbertium
atgagagtgcagatgaagagccgactcccggccgctgaagacgctgacgttttggtattcggaagctcgcaggcaaatcgccagaagcggcgcgcgatcaagaatgtggtttaa

SEQ ID NO: 5332 - DNA, 1020 bp, BradyrhizobiumColbertium
atgcgtgtttactacgatcgcgacgccgacctgaacctgatcaagggcaagaaggtcgccatcgtcggctacggcagccagggccacgcccatgcgctcaacctgaaagattccggcgtcaaggaagtcgctatcgcgctgcgcaagggctcggcctcggccaagaaagcggagaacgccggcttcaaggtgatggaagtcgccgaagccgccaaatgggccgacctcgtcatgatgctcacgcccgacgagcttcagggcgacatctatcgcgagcaccttcacgacaacatgaagaagggcgccgccctcgtgttcgcgcatggcctcaacgtgcatttcaacctgctcgatccgcgcgccgatctcgacgtgctgatgatcgcgccgaagggccccggccacacggtgcgctcggagtatcagcgcggcggcggcgtgccctgcctgatcgcgatcgccaaggacgtctcgggcaacgcccatgacctcggactgtcctatgcttcggcgatcggcggcggccgcgctggcatcatcgagaccaccttcaaggaagagtgcgagaccgacctgttcggcgagcaggtcgtgctctgcggcggcctcgtcgaattgatcaagggcggctacgagacgctggtcgaagccggttacgctccggagatggcctatttcgagtgcctgcacgaagtgaagttgatcgtcgacttgatctatgaaggcggcatcgccaacatgaactactcgatctccaacacggccgagtacggtgagtacgtcacaggcccgcgcatcatcaccgaagagaccaagaaggagatgcgcaaggttctggccgacatccagggcggtaagttcgctcgcgactggatgctcgagaacaaggtcaaccagacctcattcaaggcgacccgcgccaagctcgccgcgcacccgatcgaggaagtcggtgcgaagctgcgcgacatgatgccctggatcaagaagggcgcgttggtcgacaagaccaagaactga

SEQ ID NO: 5333 - DNA, 264 bp, BradyrhizobiumColbertium
atgttccagtggatcaacgccaaaggctgggtgatcgtgatcggcaccaccaccgcctatgccgcgattgcccaattccctctcaacatcgccatccagaccctgatcagcctcatcgtcggcacggtgtcgaccgtagtttgggcgctgttcggcactgcactacggccggtgctgacctccgagcggctggtgcgcggcttcaatatcctgatggcgatcctgctgctcgcttctctctaccccgttttcatggatgcatga

SEQ ID NO: 5334 - DNA, 372 bp, BradyrhizobiumColbertium
atgtcccaatcgctgttctatgccttcctcatcttcatggtcgtgatgtatttcacgcccggcccgaacaacatcatgctgctgtcctcgggcctgacctacggcttccgccgtaccattccccatatcgtcgggatcgtcatcggctttgccttcatggttgctgcagtcggcctcgggctcggcaccgttttcctggcctatccgatcctccaaaccgttctgaaatatgccggagccgcctatctgatctacctggccgccgtgatcgccatgtccggtccggccaggccgggcgaggaggagggccgcggcccgatgaccttcggggcgcggccatgttccagtggatcaacgccaaaggctgggtga

SEQ ID NO: 5335 - DNA, 876 bp, BradyrhizobiumColbertium
atgaagccggccgacatcctcatcgccatcctggtggcgatcatctggggacttgccttcgtggcgagccggatcgcgctcgacgaattttcgccggagctgatgacggcgatgcgcttcgccatcgccgccataccgtgtcttttcattcccaagccgaaggtcgcctggtcgctgctgctggccatcagctccactctgtttctcggacagttcctgagtcaagcctatggcatcgcccacggcgtaccggtggggctgaccagcgtggtcgtccagagccaggcgctgttcacgatcggctttgccgcgctcgctttcggtgagcggccgacgccggtgcagacgctgggcatcgtcatcgcggcggcgggacttttgatgatttgcgccacggtcggctatgatttcagcgtcggcgcgttcgcggtgctgatgatcgcgccgatctgctttgccgtcggcaatcttctgctgcggggcgcccgtggcgcgccgatgttcgacctgttcgcctggctttgcctcactgcggcggtgccgctgttcgcgctaacgctggtcgtcgacgggccgatgccgaccgtccgggcgctgacccaaatgtcgctcaccggcctgatttgcctgctggcgatcggcgccatctccaccagcattgcatactggctctggggccgtctgctgcgcgactatcccgccgcgcaagtcgtgccgttcgcgctgctggtgccgttcgtgggatcagcggcttccagcatcgtgttcggcgagcgcttcggccctctgaggctcgccggcatgctcaccgtgatcggtggtattgcggtgatggtgctggcgcagcgtccgcaagtcctgtcgaaggccgcgtga

SEQ ID NO: 5336 - DNA, 696 bp, BradyrhizobiumColbertium
atgctggcgcgcgattggtactataatgagcggaatcggatgggaatcgagcccgccgtggcctcgatctacgacagtcacgaggatgccgatctgcgggcgcgcgccgcgctgaaaatgctcggtgtgcagcgcggctggcgcatcgccgacatcggctgcggcaacggcgtgctcgccaccgaagccgcactgatgggtgccgaggtcgacgccatcgacatctcgcccgcgatgctggcgctcgccgagatctacgcgcgcgaccgcaaggctcccgtacgcactcaatcggccggcctgctcagcttcgcctatcgcccggaaacctatgacctgatcgtcagcgagttcacgctgcaccatctgcctgatttctggaaggcggtggcgatatcgcggatctatcgcgcactgaaaccgggcgcgagcttctatctacgcgacatcgtctacaccgcgatgcctgatgcgatcgaacgtgacgtcgagcaatgggccgactttcagatcaagaaccacgatttttcgcgcgagagcgtcgtggcgcacatgcgcgatgaatattccaccttcggctgggtgatggagcggatgctgatcgacgtcggatttacgctggtctcggccgattaccacgcgcccatgcacggtacctatctgctgcggaaaccaaaggccggcgagcaaggctag

SEQ ID NO: 5337 - DNA, 543 bp, BradyrhizobiumColbertium
atgaaccagcccgcatccgcctacttcatcgaggagcgtcacgatcccaacgagacgcatacgctctccgtgctcgtgcagaacgagccgggcgtgctcgcgcgcgtcatcggcttgttttccggtcgcggctacaacatcgagagcctcacggtctccgagaccgaggcccagaagcatctgtcgcgcattaccatcgtcaccacgggcacgccgatggtgatcgagcagatcaagcaccagctcgatcgcatgatcccggtctaccgcgtcgtcgacatgactctgacgaagcgttcgatcgagcgcgagcttgccatggtgaaggtgcgcgggcagggcgagcaccgcgtcgaggcgctgaggctggcggacgctttccgcgcccgcgtgatcgacgctacgaccgagagctttgtgttcgagatcacaggcaatacggacaagatcaatcaatttatcgacctgatgcgcccgctcggcctggtcgaagtgtcgcgcaccggcgttgccgcgatcggtcgcgggcccgaagggatgtga

SEQ ID NO: 5338 - DNA, 1776 bp, BradyrhizobiumColbertium
atgagcgacaagagccacgatccgaaccagatgaccggcgccgcgatgatcgtccgcgcgctcatcgatcacggcgtgaccgacattttcggctatcccggcggcgccgtacttccgatctatgacgagattttccagcagagcgaggtccagcacatcctggtccgccacgagcagggcgcaggccacgccgccgagggctatgcgcgctcgaccggcaagccgggcgtcgcgctggtgacctccggtcccggtgccaccaacatggtgacgccgttgacggatgcattgatggattcgatcccgctggtctgcatctccggccaggtgccgacgcatctgatcggcaacgacgcgttccaggaatgcgacaccgtcggcatcacgcgcccctgcaccaagcacaactggctggtgcgtgacgtcaacgatctcgcaaaagtgctccatgaggccttctatgtcgcgacctccggccgtcccggcccggtgctggtcgacgttcccaaggacgtgcagttcgccaccggcacctatcatccgccgcgcaagtccgacgtgcatcgctcctatgcgccgcgcctgaagggcgatgcgtcgcagatccgcaaggcggtctcgctgctcgcgagcgccaagcgcccggtgatctacagcggcggcggcgtcatcaattccggcccggaggcgaccaggctcctgcgcgagctcgtcgaagtcaccggcttcccgatcacctccacgctgatgggcctcggcgcctatccggcgtcgggcaagaattggcttggcatgctcggcatgcacggcacctacgaagcgaacatgacgatgcatgattgcgacgtcatgctgtgcgtgggcgcgcgcttcgacgatcgcatcaccggccgcgtcgatgcgttttcccctggctcgaagaagatccacatcgacatcgatccgtcctcgatcaacaagaacattcgggtcgacgtgccgatcatcggcgattgcggcaacgttcttggcgacattcttcaggtgttcaaggcggaggcgaagaagcccgacatcaagtcgtggtggcagcagatcgcacaatggcgcgcccgcaactcgctctattacaagaagagcaacgacgtcatcctgccgcagcacgcgatccaaagcctgttcgaggcaacgcgcggcaaggatacctacatcacgaccgaggtcggccagcaccagatgtgggcggcgcagttctacggcttcgaggagccgcatcgctggatgacgtcgggcggtctcggcacgatgggctacggcctgccggccgcggtcggcgtgcaggtggcgcatcccgacagtctcgtcatcgacatcgcgggcgatgcctcggtgcagatgacgatgcaggagatgtcgacggccgttcagtatgagctgcccatcaagatcttcattctcaacaaccagtacatgggcatggtgcggcaatggcagcagctgctgcacggcaaccgactgtcgcattcctactcggaggcgttgccggatttcgtcaagctcgcggatgcctatggctgtgtcggccttcaggtgcacaaacccgccgatctcgacggcgccatccacgaaatgatctcggtcaagcgtccggtgctgttcgactgccgcgtcgccgcgctggaaaactgcttcccgatgattccctccggcaaggcgcacaacgagatgctgctgccggagcaggcgaatgacgaggccaccgcgagggcattcgccggcggcaaggcgctggtgtga

SEQ ID NO: 5339 - DNA, 129 bp, BradyrhizobiumColbertium
ttgtcagcggcttcgttcgtgtcgggttcggcaaataaaaaaggccccgaagagggcccatgcacaccgcctgtcttctggatggcagctagccatccccggcggtgtgcctgggtacgacggcgataa

SEQ ID NO: 5340 - DNA, 912 bp, BradyrhizobiumColbertium
gtgcttatcgcaggcccgaccgccagcggcaagtcggcgctggccctcgagctcgcgcatgccaccggtggtatcgtcatcaatgccgattccatgcaggtctatcgcgacctgcgcatcatcacggcgcggccgacagaggatgaggaagcccgcgctccgcaccgtctctacgggcatgtcgatgcggccgtgaatttctcggctggcgcctgggttgccgatgcggcgcaggcgctcgaacaggcgagaatcgaaggccgcctgccgatcttcatcggcggcaccgggctgtacttcagggcgctgacggcggggctctcggtggtacctccgattcctgccgaggtgcgcgaggacgtgcgcgcgcgactggaacggaacggcgtggaggcgctgcacgcggaactggctgtccgcgatccgcttgcggccgagcgattgaagctgcgcgaccgcacccggatcgcgcgcgcgctggaggtgattgaggcgaccggacggtcgctgctcgactggcatcgggagggacagccgccgctgctgcccaaggatagctttcgcgcggtgtttctcgcacctgagcggaacgagctttatgcccgcatcgacgcacgcttcgatgccatgctgggagccggagcgctcggcgaggtcgagcggctcgccgcccggcacctcgacccgctgctgccggcgatgaaggcgcatggcgtgccgtctttgatcaggcatctgcgcggcgagctcagcctgggagaagcagctgccatcggccgcgccgacacccgccattatgccaagcggcaattcacctggtttcggcaccaactgcccgagttcgaatgggtgcggccggaggaggcgcgaggatggcttgccgcgaccgtggctgagggtgccaccggctga

SEQ ID NO: 5341 - DNA, 906 bp, BradyrhizobiumColbertium
atgtccctcgtcgccacgctgatctgcaaccctgacaatcccgcgctggactcgaccatcgtcgacggcgcacgcgccgtactgcctcaggccgctcccgcgcactggctgttcgacggggttgcggtcgacattcccttcggcgccgacagtaacctcggaggcgaccgtcacgccatcgagcagcggctccgcgaactccgcggcgacctgcccatcgacatcgtcctgcagccagtcggcgtccggcgcaagaagctttttctcgccgacatggattccaccatgatcggccaggaatgcatcgacgagctcgccgatttcgtcggggtgaaggcgcatgtcgccgccatcaccgagcgcgcgatgcgcggcgagatcgagttcgagccggcgctgcgcgagcgcgtcgcgcttttgaagggcctgcccgccggcgcggtcgacgaggtgctggccaagcgcatcacgctgacgccgggaggccgggaactggtcgcgaccatgcgcgcgaacggcgcctatacctgtctcgtctcgggcggtttcacgctattcaccagcgcggtcgccgccaagctcggcttccaggagaaccgcgccaacgagcttgtcgtgcgcgacggcaagttcaccggcgaggtgaaggagccgatcctagggcgcgctgcaaagctcgcgacgctggtggatctgatcgagtcgttcgatctcgacgacatcgactcggtcgtcgtcggcgacggcgccaacgatctcgcaatgattcaggcggcagggctcggtgtggcctatcacgccaagcccgcagtggccgcagccgcggccgcacggatcgaccacggagatctcaccgcgctgctctatgcgcaggggtatcggcgggacgagttcgtggaagcttag

SEQ ID NO: 5342 - DNA, 1464 bp, BradyrhizobiumColbertium
gtgcgaattgggctggccgcgctcgccgtcggtgctttcagcatgttcggcacgccggccgatgcgcgcggaccggatggcattgccgacgtcgccgagaaggtgatcgatgcggtcgtcaacatctcgacctcgcagaacgtcgaggccaagggcgggggcagcaactccatgccgcaactgccgcccggctcacccttcgaagagttcttcgatgatttcttcaagaatcgccgagggcccggcggcggcagcaagggcggcgagaacagcgcgccgcgcaagaccaattcgctcggaagcggtttcatcatcgacacttcgggcgtcgtcgtcaccaacaaccacgtcattgcggacgccgacgagatccacgtcatcctcaacgacggcaccaagatcaaggccgagctggtcggcgtcgacaagaagaccgatctcgccgtgctcaagatcaagccgacgaagccgttggtcgcggtcaagttcggcgattccgacaagctgcgcctcggcgactgggtggtcgcaatcggcaatcccttcagcctgggaggcacggtgaccgccggcatcgtatcggccaagaaccgcgacatctcctcaggcccttacgacagctacatccagaccgacgcatccatcaaccgcggcaattccggcggtccgctgttcaacctcgacggcgacgtcgtcggcgtcaacacgctgatcatctcgccctcgggcggctccattggcatcggtttcgccgtgccgtcgaagacggtggtgggcgtcgtcgatcagctccgccagttcggcgagctgcgccgtggctggcttggcgtgcgcatccagagcgtcacggacgagatcgcagagagcctcaacatcaagccggcgcgtggtgcattggtcgccggcgtcgacgacaagggcccggccaagcccgccggcatcgagcccggcgacgtcgtcgtcaagttcgacggcaaggacgtcaaggacccgaaggacctctcccgcgtcgtcgccgacacggcggtcggcaaggaggttgacgtcgtcatcatccgcaagggtcaggaagagaccaagaaggtcacgctcggccgcctccaggagcccgacaaggtgcaggccgccgtgaagaccgaggggccggcgccggagaagccggtgacgcagaaggcgctcggcctggatctcgcagcgctgagcaaggatctgcggacgcgctacaagatcaaggacagcgtcaagggtgtcgtcgtcaccaatgtcgacgccaattcggacgccgccgagaagcgcctgtccgccggcgacgtcatcgtcgaggtggcgcaggaggccgtctccagcggtgccgacatccagaagcgggtcgatcagctcaagaaggacggcaagaagtcggtgctgctgctggtctcgaacggcgagggcgagctgcgctttgttgcgctgagcgtgcagtga

SEQ ID NO: 5343 - DNA, 207 bp, BradyrhizobiumColbertium
atgaggtccattgcgttcgccgacttcctcatcggcctaggcatccttttcgtgctggaaggcttgatgttcgcggccagtcccaactggatgcgcaaagcgatgaagagcgtcatcacgacgccggacaacatactgagggccgtcgggatcggctcggccgtggccgggctggtgctgatctgggttatacggcgcccgatttag

SEQ ID NO: 5344 - DNA, 897 bp, BradyrhizobiumColbertium
atgaggtctccggtcacaggtatcgtcacgttgctcgggctcctgctcgtcgtgatcgtcggctacatgtcgctgttcacggtgcagcagaccgagcagaccatcgtgctccagttcggccggcccgtcgacgtcgtcaccgcgccgggcctgcatttcaaggcgccttggaattcggtgatcaacatcgacaagcgaatcctcgacctggagaacccgtcgcaggaagcgatcgcgtccgaccagaagcggctcgtggtcgacgccttcgcgcgctatcggatcgagaatgcgttgcgcttctatcagagcatcggctcgatccaggctgccaacgtccagctcaccacgctcctgaacgcggcgctgcgccgtgtgctcggcgaggtcaccttcatcaacgtggtgcgtgacgaccgcgagaagctgatgcagcgtatccgcgaccagcttgaccgcgaggcggagggctacggcatcgaggttgtggacgtccggatccgccgcgccgacctgccggagcagaacagccaggcggtctatcagcgcatgaagaccgaacgtgagcgagaggcggctgagttccgcgcgcagggcggccagaaggcccaggagatcaggtccaaggccgaccgcgaggcgacggtaatcatcgcggaggccaactcgcaggccgagcagacccggggcgcgggcgatgccgagcgcaacaggctgttcgccgaagcctacagcaaggacgccgatttcttcgccttctatcggtctatgacggcctatgagaacgggctgcggtccaacgacacccgcttcctgctgcggccggaatcggatttcttccggtacttcagtaatccgtccggcaggatggcacccgagacgctcgcgaagccgtaa

SEQ ID NO: 5345 - DNA, 1086 bp, BradyrhizobiumColbertium
atgccgtggaagaatcagggcggtggcccatggggctcgggtccaaagggaccgtggggctcaggcccgcaaccggtcgggccgaggcctccggatctggaagaccttctgcggcgcggccaggaccgcctccagcagatcatgccgggcggctatttctccggcatcggcatcacgctgatcatcctgctgatcgccgcattctggctgctctcgggcttcttccgcgtccagtccgaagaactcggcgtcgtgttgcgcttcggcaagcatgtccgcaccgtgcagccgggcctgaactatcatctgccttatccgatcgagaccgtgctgctgcccaaggcgctgcgcgtcaacaccatctccatcggcatgacgctgatcgaagatccggcgcggcgcggccgctccgttcgtgacgtgccggaagagagtctgatgctgaccggcgacgagaacatcgtcgacgtcgacttcaccgtgctctggcgcatcaagccggacggggtcggcgacttcctcttcaacatccagaaccccgaaggcaccgtgaaggcagtcgccgagagcgcgatgcgcgaggtgattggccgctcgcagatccagccgatcctgaccggcgcgcgaaacgtcaccgagcagaacgtgcacgaactgatccagaagactctggacagctacggtgcgggtatccagatcagtcaggtgcagatgcagaaggtggatccgccggcgcaggtgatcgacgctttccgcgacgtccaggcggcgcgcgccaaccaggagcagttgcagaacgaggcgcagacctacgccaatcaggttatcccgcaggcgcgcggccgtgccgcgcagatcctgcaggctgccgaaggttacaaggagcaggcggtcgccgaggccaagggccagagcgcgcgcttcctcaacgtttacgaggaatacaagaaggcgcccgacgtgacgcgtgaacggatctatctggagaccatggagcgcgtgctcggtggcgcggacagctcatttttgacggcggcggcgcctcgggccagggcatcgtgccctatctgcccctcggcgaattga

SEQ ID NO: 5346 - DNA, 510 bp, BradyrhizobiumColbertium
atggaaatcgtcttcgtcgttgcgatcgcggagaacggcgtcatcggcgccggcaacgccattccatggcggttgaaatccgatatggcccacttcaaggcgctcacgatcggcaagccgggtatcatgggccgcaagaccttcgaatccctgcgccggccgctgccgggccgtaccaacatcgtgatcacgcgcgatgccgcctatcgcgccgcaggcgccattgtcacgacgtcggtcgcggctgcggacgcggttgcgcgaggcgatgccctgcggcgttcggtcactgaggtcgctgtgatcggcggcgcggaaatctaccggcaatggctcgatcgcgctgatcgccttgagatcaccgaagtgcatgcacggcccgacggcgacacgcattttgatatcgacaaggcaaaatggaacgagatcgtgcgcatccgtcatcctgccggccccgacgacagcgtcgatttctcctatgtgacatatcgtcggcggtcgggccattaa

SEQ ID NO: 5347 - DNA, 486 bp, BradyrhizobiumColbertium
atgtcgctcaacatccgccgagtgcgccaaggcgaagccggacttgttctcgcttttatccgggaactggccgagtacgaaaagctttcccacgaagtggaggcgaccgaagccgacatcgccgatgcgctgttcggcgaaaggccgcaactctattgcgccatcgcggagtggaacggtgagccggtcggcttcgcggtgtggttcgcgaatttctccaccttcagcggccgccacggcatctatctcgaagatctctacgtgcggccgtcgcatcggggcaggggcctcgggaaggcgctgctggtctatctggccagggaatgcgtcgagaacggctggtcgcgtctgcaatgggccgtgctcgactggaacgcaccgtcgatcgccttctacaagtcgctcggcgcggtcatgatggatgattggacgctgtgccgcgtcaccgggcccgcactgacgcggcttgccgggagcacgtcctga

SEQ ID NO: 5348 - DNA, 795 bp, BradyrhizobiumColbertium
atgcaccaatatcaggacctgctcgagcggattctttccgacggcgtcgagaagaccgatcggaccggcaccggcacgctctcggtattcggccatcaaatgcgcttcaatctgtcgaccggcttcccgatgctgacgaccaagcggctgccgttgaaggcgatcgtgcatgagctgctctggttcctgaagggcgacaccaacatcaaatacctgcgcgacaacggcgtcaccatctgggacgagtgggcggatgccaatggcgatctcggcccggtctatggccatcagtggcgctcatggccggccccggacggccgcagcatcgaccagatcgccaacgtcgtggacatgatcaagcgcaatccggactcgcgccgcctgatcgtctcggcgtggaatccggccgaggtcgacaagatggcgctgccgccgtgccattgcctgttccagttctacgtcgccaacggcaagctgtcctgtcagctctatcagcgctccgccgacgtcttcctcggcgtgcccttcaacatcgcctcgtactcgctgctcaccatgatggtggcgcaggtcaccggtctgaagcccggcgatttcgtgcattcgttcggcgacgcgcatctctattccaaccacctggagcaggcgaagctccagctcacccgcgcgccgcgagcgttgccggtgatgcgcatcaaccctgaggtcaaggacatcttctccttccgcttcgaggatttcgaactcgtcggctacgatccgcacccgcacatcaaggcggaagtcgcggtctag

SEQ ID NO: 5349 - DNA, 981 bp, BradyrhizobiumColbertium
atgaccttcgttcgcgcgctaacgggcgcatgtgccgcagcgcttgcgtcgcttgctacattcaccgcaaccgctgaggcacagacctttccgacgcgcagcatcaccatgatcgtgccgttcgcggccggcgggcctaccgacgtgatctcgcgcatcgttagcgggcacatggcgcagccgcttgggcagagcatcatcatcgagaacgtggtcggtgccggtggcaccaccgccacgacgcgcgccgcgcgcgcggccaatgacggctatacgctgatcaccggtcacatgggcacccatgccgcatcggtgccgctctatccgaagctcgcctatcatcccgagaaagacttcgagccgatcgcgctgctggcgggcacgccgatcctgatcctggcccgcaaggattttccgccgaaggacctcaaggagttcgtcacctacgtgaaggcgaatgccgagaaggtgaatgccgcccatgccggcgtgggctcggtttcgcacgtctcgtgcgagcttctgcactccatcctcgacatcaagcccgtcggcgtgcccttcaacggcacgggcccagcgatgaacgcgctggtggccggacaggtcgactacatgtgcgaccagatcgtcaacgccgtcccgcagatcaacgcgggcaccatcaaggcctatgcgatcgcgacggcggagcgcaatccgtcgctgccgaacgtgccgaccacggcggaggccggcttgccggcatttcaggctcaggcttggaacgcgatgttcgcgcccaaggggacctcgcctgcgatcgtggcgagcctgaacgccgccgccgtcaaggcgctcgacgacgagaccgtgaagaagcggcttctcgaactcggcagcgtcattcccgggccgaaggaccgtacgccggaggcgctggcggccctcgtcaagaacgagatcgcgaagtggagcccggtgctcaagccgacaaattaa

SEQ ID NO: 5350 - DNA, 1515 bp, BradyrhizobiumColbertium
atggatatctttgccaacctcgctcacggcttcgccgtcgcgttctctccgatcaaccttctgatgtgcctgatcggcgccctggtcgggacgctggtcggcgttttgccgggcatcggcaccatcgcgacggtcgcgatgctgctgccgattaccttcggactgccgccggtcggcgcgctgatcatgcttgctggcatctattatggcgcccagtatggcggctcgaccacgtcgatcctcgtcaacatacctggcgaggcgacatcggtcgtcaccgccatcgacggtcaccagatggcaaagcagggccgcgccggtccggcgctggcgatcgccgcgatcggctcgttcttcgccggctgcgtcgcgaccgtcttgatcgctgtgcttggcgcgccgctcaccaagctcgcattggcgttcggcccggccgaatatttctcgctgatggtgctgggcctgatctttgccgtagtgctggccaaggggtcggtgctgaaggcgatcgcgatgatcgtcctcggcctgttgctctcgatggtgggttcggacatcgagaccggcgcctcgcgcatggcgttcaacattccggagctcgctgacggactcggcttcgcgaccgtcgcgatgggcgtattcggtttcgcggagatcattcgcaatcttgacgctggcgccgagctgaaccgtgatctcgtgcagcagaagatcaccggcctgatgccgacgaagcaagatctggtcgattcgacgcccgccatcctgcgcggcaccgtgctcggctcgatcctcggcatcctgccaggcggcggtgcgacgatcgcatcgttcggcgcttatacgctcgagaagaagctcgccaagatcccgtcgcgattcggtcgtggtgcgatcgagggtgtggcggggccggagagcgccaacaatgccgcggcgcagacctcgttcatcccgctgctgacgcttggcatcccgccgaacgcggtgatggcgctgatggtgggtgcgatgaccattcacggcatcgtgccgggaccgcaggtgatgcagaagcagccggatctcgtctggggcatgatcgcgtcgatgtggatcggcaatctgatgctgatcatcatcaacctgccgctggtcggaatctgggtgcggctcttgcgcgtgccgtaccggctgatgttcccctcgatcgtgatcttttgcgcgatcggtatctattcggtgaacaacgcgccggtcgacgtcatcctggcaggcgtattcggtctcgtcggctactggctgatcaagcacgatttcgagccggcgccgctgctgctcggcatggtgctcggcccgctgatggaagagaacctgcgccgggcgctgctgatctcgcgcggcgactggagcgtgttcctgacccgtccgttgtcggcggtgctgcttgcagtcgcggcgagcctgcttgtccttacggtgctaccggcattgcgcgccaagcgtgacgaggtattcaccgagtccgaaaactag

SEQ ID NO: 5351 - DNA, 762 bp, BradyrhizobiumColbertium
atggccgacacgatgggccactcagcgactgccatccggaacaccaaggtggcgctcggcttttgtctgctggcgattgcgccgcagattttcgaattgatctggtcgatcgggacgatcttcggctggggcgcggggcggggccccgcgaccgttgtcaccagccacgcgacagcactgatcgtcggcgcgcccagcgccttattcggatcgtttggcggcggcaccaagaagatgtcatccgaggtgctgctggcgctgatctattcctatccactgtttgcggtggcgatcctcacgcttctcatgacgatccggtcggcgcaggactatgttggcggtgtcgtcttgatggccgttgccctgttcgctctgtacgcgtcgagcgatttgcagggcatgcggggcttctccttcggcgcagggaccgcgccgcgcatgttcggcggactgctggtcgccttgtccgccggcatcgccttgaccggccttttgaccgatgggccggcgatggcccattattcctggcgggggccgctgttcgtggtcgccgcgatcctcttcttcgccctgtcgatccggtcgctcggcctcgtggtcacggctttcaccagcttcatgatcgcagcgacgggctcgcaagagacgcggtggctggaagcggtgatcgtcggcgcctgcctgacggtcggttgcgcgatcctgtttccgtacgtgctcgggctgccgatgccgatgtacccgcgtttcctgatccagtga

SEQ ID NO: 5352 - DNA, 531 bp, BradyrhizobiumColbertium
atgaacggccaaagtccgatctggtcgctgatctccaccttcggtctgatgtcgctgttcgccgtcggcggggctgcggcggcggtgcccgagatgcaccgcatcgcagtcgaggtgaatcactggatgaccgacaggcagttcaccgacgcctatgccatcgcgcagctctcgcccggtccgaacgtgcttatcgtcacgttaatcggctatgccgtcgctggcatccccggggcgctggccgcgacgttggcgatgtgcctgccgacggcgctgcttgcctactatgtcagccggctcctgaaccgtccccgcgaatcgcgatggcccggtgtgattcaggctgcactggttccgctgtcgatcggattgatggcggccagcgcgctgatcctggcccagtcggccgagcgcacgattgctgcactgcttctgaccaccatggttgcggtgatcgcatccatctcgcgcatcaatccactctggctcctgcttgccggcggtctgttgggttttgctggcattgtgtga

SEQ ID NO: 5353 - DNA, 627 bp, BradyrhizobiumColbertium
atggcgcggccctcgttctacgcttctgacatgtcctcggattcagcaccggccccgcaacagccggatctcgccgccgcgccgccaggtctggccgcattattcctggcgtttgccgggatgtcgttggcgggcttcggtggcgtcttggtgtttgcccgacgcgcgatcgtcgagcagcaccgctggatgacggcggacgagttcaacgaaacctttgcgctctgccacttcctgcccggccccaacatcgtcaatctgtcgatggtgttcggatcgcgcctgcgcggcatcgccggcggcgttgccgccttcgccgggctgttgctgccgccaacgctgatcatgatggtgcttgcgatcgcctatgcccatttcggcgatctcgaggtgctgcgccgaatccttgccggcatctcatgcgctgcgatcggcctcttgatcgcggtggtcttgcgcatgatgacgccgctgctcaagcggacggatcccctcccggtgatcctgatgctcggcgtgttcctggccgtcggcgtgctccgtctgcctctgcaggcggtgctgctggtcgcgattcccgtcagtgtcggcgtcacttatttcctgcggcggaaagtagcagcatga

SEQ ID NO: 5354 - DNA, 519 bp, BradyrhizobiumColbertium
atggcgaccgatcatatccgatacgatgtgctggcccgcgacgcccttcgcggcgtgctgcggaaggtgctgaccgatgccgcggcccatggcctgccgggagagcaccatttcttcatcaccttcgtgtcgaaagccgagggcgtgaagctgtcgccgcggctgctcgcgcaatatccagacgaaatgacgatcatcctccagcaccagttctgggacctgaccgtgctcgaagaccgcttcgaggtgggcctgtcctttggcggcattccggagcggctggtagtgcttttcagtgccatcaagagcttcctcgacccgtccgtgaagttcggccttcagttcgacacttccgatgtcgccgaggtcgcgccggacaatctgccggcggctcccgcaccatcggcggtcgcggtgccggcacctgccacggaaaaggcagaagctgccgacgaaccgaccccgccgaaccagggtggcgccgaagtcgtgcggctcgatcgtttccgcaagaaatga

SEQ ID NO: 5355 - DNA, 1233 bp, BradyrhizobiumColbertium
atggtcaaagcttcccgctcgagaaccgcccgctccgcgacccgcatcgagaccgacagctttggtcccgtcgaggtcccggtcgaccgctactggggggcgcagaccgaacgctcgcgccagaatttccgcatcggaaccgaccgcatgccgatctcgctgattcatgcgctcggcatcgtcaagcttgcggctgcgcagtccaatctcgagcttggcctgctcgaccggcgccgcgccaacgccatcatccgcgctgcgcgcgaagtgatcgagggcaggctggacgatcattttccgctggtggtgtggcagaccggctccggcacgcagagcaacatgaacctcaatgaggtgatcgccaaccgggccaacgagctcctgggcggcgaactcggggccaagaagccggtgcatcccaacgaccacgtcaacatgagccagtcgtccaacgactcgtttcccaccgcgatgcacatcgcggccgcaagccgcatcaatgccgatctcgttcctgccctcggcgaattgctccgcgccctgcgcaagaaggagaagcagttctcgaagatcgtcaagatcggccgcacccacacccaggatgcgacgccgctgacgctgggccaggaattttccggctatgccgcacaggtcgaaagcggcatcgcccggctgaaggtcgcggtgagggacctctatccgctggcgcagggcggcaccgctgtcggcaccggcctcaactcgaagccgcgcttcgcaagactgttcgcaaagcacgcggccgcaatcacgaagctgcccttcaccagcgccaccaacaaattcgaggcgctggcctcgaacgatgcttatgtgctggcacacggcgccatcaattcggtcgcgacgggcctgttcaagatcgccaacgacatccgcctgctcggctccggcccgcgttcgggtctcggcgagctgatcctgccggagaacgagccgggctcatcgatcatgccgggcaaggtcaatccgacccaatgcgaagcgatgaccatggtctgctgccaagtgttcggcaatcacaccgccatcaccgtcgccggcagccagggccatttcgagctcaacgtctacaagcccgtgctggcctacaactgctgcactcgatccgcctgctggcggatgccgcacgttccttcaccgaacattgcgtcagcggcatccgcgccgacgaaaagcgcatcaaggagctga

SEQ ID NO: 5356 - DNA, 189 bp, BradyrhizobiumColbertium
atggagcgatcgctgatgctggtgacggcgctggccccgaagatcggctatgacaacgcggccaaggtggccaagaccgcgcacgccaacggcagcacgctgaaggaggaggcgcttcggctcggcttcgtctcggccgacgagttcgaccgtctggtacgccccgagaagatgaccagcccgggctaa

SEQ ID NO: 5357 - DNA, 189 bp, BradyrhizobiumColbertium
atggggaacgtcatcaacctgaatcgtttcaggaagcgcgccgagcgggaagcctcggcgaagcaggcggacgccaaccgggcgaagttcggtcgcacgaaggcgaagcggtccgcggaggagaaacgggcggaccaggccaaggagcatctggaccagcaccggatcgatcgcgaggagcagccatga

SEQ ID NO: 5358 - DNA, 252 bp, BradyrhizobiumColbertium
atgaagtcgccggtcgtaaaacggtcgatcgtcgtcgccggccacaagaccagcgtcagcctggaagaggcgttctggaacggcatgaaggaaatctccggccttcgcaacatgacgttgtccgaactggtcggcgagatcgatagcaaccgccagcagggcaatctgtcgtcggcgatccgcctcttcgtcctggactacttcaagagccgcgccatggccgcccagccggacaaggtcccggcccaatag

SEQ ID NO: 5359 - DNA, 276 bp, BradyrhizobiumColbertium
atgaccgacaccgctgacacgcgttcgcacatgccgctgggtctggcccagcgcggctacaccggcgtcatccagcacctttccgccaaggaggcgggctcggcgctctcggacgtcgagctcgaaagccgcctgatcgagctcggcttcgtcgaaggcgcccgcgtcgaggtcctgcatgaggggctggtcgggcgcgatccaatcgccgtgcgggtcgacaacatcacgatcgcggtccgccgtcgcgaagccatggccatcatcgtcgcctag

SEQ ID NO: 5360 - DNA, 1860 bp, BradyrhizobiumColbertium
ttgctgcatcttgccctggtgggcacgccgaacagcggcaagacctcgctgttcaacgccctgacaggcagccggcagaaggtcgcgaactatcccggcgtcaccgtcgagcgcaaggaaggcttcttcgtcaccccgctcggccgccaggtctcgttggtcgacctgcccggcacctattcgctgcgcggccgcagccccgacgaggagatcacccgcgacttcgtgctcggcaaggcctccggcgagaccatgccggatctcgtgctgtgcgtcgccgacagcaccaatctgcggctgacgatccgcctgctgctcgagctcaagcgcacgggacggccgatgatcctcgtgctcaacatgttcgacatcgcgagccgccgcggcatcaccgtcgacgtcgagcggctcgccaaggagctcggcgtgcccgtggtcacctcgatcgcggtgcgcaagggcggcacggccgacctgctcaagctgaccgacgagaccgcggccaagctcgccgctgagcctcgggagagcagctggcgcgcgctcagcgtctccgaattgcgcgcgacgcagcgcgaggccgaccgcatcatcgccgactgcgtcagcctaccggccagccccgacacctggaccgcgcggattgacgcgatcgtgctacatccggtcggcggcctgatcgtgctcgcactgatcctgttcgtgatgttccaggcggtgttcgcctgggcccagccgctgatggagctgctcaactccgggttcgaagcgctgggcgagctcgtccaggccaccctgcccgccggcctgctgcagagcttccttcagaacggcgtgatctcgggcgtcggcagcgtgatcgtgttcctgccgcagatcatcatcatcttcctgttcatcctgctgctggaagatttcggctacatggcgcgcgccgcgttcctgatggaccgcatcatgggcggcgcagggctgcacggccgcgccttcattccgctgctgtcgagctttgcttgcgccattcccggcatcatggcaacgcgcgtgatcgacaacaagcgcgaccgcctgaccacgatcctgatcgcgccgctgatgacctgctcggcgcgaattcccgtctacacgctgatcatctccgccttcattccggccagggacgtctggggcttcatcaacctgcaaggcctcgtgatgttcggcctctatgcggccggcatcatcagcgccctcgtcgtctccttcctgatcaagttcttcatgctgctcgactacgcgccggcacccttcatgctggagctgccggactacaagatgccgcggctgaaatcgatcgcgatcggcatctacacccgggccaagatgttcctggtgcgcgccggcaccacgatcttctcgatgatggtgctgatctggttcctggcctcgttcccgcagcccccggccggcagtaccgagcccgccatcgacttcagcttagctgcgatgatcggcaaggctctcgagccgctgctcgcacccgtcggcttcaactggcagatcgcggtcgcactgatccccggcatggcggcccgcgaggtcgctgtcgcagccctcggcaccgtctatgcgatcgagggcggcaaggaggcggccgaccagatcggccacgtgctggcgacgaaatggtcgctcgcgacggcgctgtcgatgctggcctggtacatcttcgccccgcaatgcgcttccacgctggccgtgatccggcgcgagaccggaagctggacctggatgggcgtgaccttcacctacatgctggtgctggcctatgcggcgagcctcgtcacctacaacgtcgcggtcgcgcttggcgcgggttag

SEQ ID NO: 5361 - DNA, 567 bp, BradyrhizobiumColbertium
atgtcacgatcagcccgcatcgattgcagcatgaacgacgacacgccacggaaacggcgatccgtcgccatcaaccatttcgccaccagccgactgacggctgagcagctgcgcgaagatcacctagccgacctcgtcgcgttgcaccgcgatgccgaggtctcccgctatctcggcggcgtgcggacgcccgaggtcacgaaggcctatctcgcggccaacatggcccactggaaccagcacggcttcggactctggacgctccggacgaaagacggggcgttcgccggacgggccggtatcaggcacatcgtcatggagaacgtcgacgaggtcgagatcttctacgcgttcaagggcgaattctggggccggggattcgcaagcgagatcgcgaccgcgctgacgggcatagggctgtcacaactcgcgttgccgtccctcatcggaatcgtgaatgtcggcaacggcgcatcccgccgtgtgctggagaaatcgaactatctgctcgagcggatcacgagccatcacggcgaggaggtcgcgatttatcgcatcccgcagtga

SEQ ID NO: 5362 - DNA, 1515 bp, BradyrhizobiumColbertium
atgaccggtcaatcagcggctgctccaggcagcgacctcaaggatttgccgagggtttcgaccggcagcgaagggctggacgacatcctcgggggcggtctcgatgccaaccggatgtatctctacgaggggcggccgggcacgggcaagaccacgattgccctccagtttcttctacgtggggtgcgcgacggcgaacgcgttctctacatctctctctccgagaccaagagcgagctcactgttgtggccgagcgccacggatggtcactggacggtgtcgacatcttcgagctcgttccgccggaaacaacgcttgatcccgagcgggagctcacggtttttcatcccgccgaaatggagctgagtgaaaccaccggtttgatcttcaaggaagtcgaacggatcaatccctcccgcgtggtgctcgacagcctgtccgaacttcgcctgctggcgcagaacccgctgcgatacaggcgccaggttctggccctcaagcacttcttcaccaatcgtaactgtaccatcgtgctgctcgacgatctctcgtcgtctcaggacgacttgcagctgcattcgatcgcgcacggcgtcgtgatgctcgaacagcttgccatagactacggtgccgagcggcgacggcttcgcgtgatcaagatgcgcggcatccggtttcgcggcggctaccacgactttaccatcatgcaagggggcctgcggatcttcccccggctcgtggcggccgagcatcacaggtcgttcgaaggtgacacggtatccagcggcaacgccgagctcgatcgtctcctgggcggcgggctcgagcgcggcaccaacgcgcttctcctcggctctgccggcgtcggcaagtcgtcggttgcgctgacctacgccatcgcggcagcggcacgtggcgagcacgcggtattcttcgccttcgatgaagggcgcggaacgattgaggcacgggcccggacgctcggcctgcctctggacaagcatctcgcctccgggaagatccggtttcagcaaatcgatcccgccgaattgtcgcccggtgagtttgcggcaggcctccgccgcagcgtcgaggtcgacaatgcacgcgtgatcatcatcgacagcctgaacggctatctgaacgcgatgccggatgaacgctttctcattctgcagatgcatgaactgctcagctatctggcccagcagggcgtgttcacaatcctcatccttgcccagcatgggcttgtcggtcccatggatacgccagtcgatctcagttatctgagcgatgcagtcgtcatgctacgctatttcgagttcgcgggaacggttcggcgcgccttgtcggtcgtcaagaagcgcagcggcagccatgagcatggcatccgcgaattccggctcggcagcagcgggatcaaagttggcccgccgcttcacgagttcagcggcatcttttccggcaatccgcgctataccggcacggtactcccggaagggccgggcgaatga

SEQ ID NO: 5363 - DNA, 1707 bp, BradyrhizobiumColbertium
atgaccgccgatcgcgatcaccgcgttctcgtattcgccccgatcggccgcgacggaccagcctcggccgaactcttgcgcagcgcgaatctcaacgcgatcaattgccgggacttgcccgagctcgtcagcgaaatggcggcaggcgtcggcaccgtgtttctggccgaggaaggattgttcggcaaagacaccgaaccgctggcgcaatggatcgccagccagccgccgtggtccgatctacccttcgtcgttctcaccagccaccgcgagcagccggcggtcgtcgcctggcggcgcagcatcgtcgaacttcttcgcaacgtttcattgctcgaacgtcctgttcagccgatcacgctgaccagcgcaattcaatcagcgacacgggcacgccggcgccaatatgaaattcgtgctcttctcgaagcgcgcgagcagaccgcacaagagctcgagaaactggttatcgagcggacgcgggcactggaggaagccaacgagcagctgcggctggaaatcaaggagcgcgctcgggtcgaggaaacccttcgccaggcccagaaaatcgaagccatcggccagctcaccggtggcgtggcgcatgacttcaacaacctcctgatggtgatctccggcggcctcgacatgatcgaccgccagacggatccgaaccggcgtcgccgcctgatggacgggatgatccaggccgcgcagcgcggtgccagcctgaccaagcagcttctggctttttcccggcggcagaagcttcggccgcagcccgtcgacgtcgccgcgcagatcggcggcatgcgcgagctgctcgaccgcagtctgaggggcgacgttcatgtcgagttcgactttccggagcagctttggcctgtggaggtcgaccccggcgagctcgagctggtcgttctcaacctggccgtcaatgcccgcgacgcgatgcccaatggcggcacgatcgtcgtgcgtggggagaatctgcctgatctgaacgaggatcagatctccggcgactacgtccggctatcggtgatcgacaccggcgtcggcatgcctccggagattctgtcgcgcgtgttcgaaccgttcttcacgaccaaggacgtgggaaaggggtcggggctcgggctcgcgcaggtccatggatttgcgaggcaatccaggggtacggtccgcattcggtcggaggttggccggggcacgagcatcgagctgtacctgccgcgatcgttcgatgctccttccagcgagcggcatctcatcgatctcaccagggtgcggccgaaaaagagcaatcaggggcaagtcctgctggtggaggacgatgatgaagttgccgcactcgtcagcgagatgctcggccagctcggttacgaggtcacgcgcgcctccagcgccgcggcagcgctcggtgccctggctgacgggcgtcgcatcgatctgatcttctccgacatcatgatgccgggtggcatgaacggggtcgagcttgcgcgcgagatcaagaacagacgaagtgacatcccgatattgctgaccagcggatacgccgaagcctcggtcagcgacgcggagagcgcgggtatcgagatattgcccaagccctatcacatcgacgagctcgctgcagccttggccgccgcgaagtcaaaccttcggcgcgatgcggaatccaaacgctcgagttcccgttga

SEQ ID NO: 5364 - DNA, 243 bp, BradyrhizobiumColbertium
atgttgcctcaattcggcaccgccgttcgcaagaagaatcccggcaatgccgtgaacgccgatctcggcggcgcggctccggacaagtcctcggtcgacgccgcctggctcgtgctcgaagcggccaacgacctcggcgaccatgccgcggtggacgcctgccgccgcgtcatcgacgccgagctgaacggcacggcggcccgcagctcggatatcgatctcgtgctggggtacttcaggtag

SEQ ID NO: 5365 - DNA, 1128 bp, BradyrhizobiumColbertium
gtgatcgagatggacggggcgaaatcgcttctgcaggatctggacgacgcgatcgcgcgcgggaccgacgaaagccgggccaaggcgctgtggcacgcaaccgatatcctgatcaccggccgctacagcgacgacgagatctccacgttcggcgaggtcatcggccggctcgccgacgagatcgaggttgctgcgcgcgcgcagctttcggagatgatgtcggcctacgatcacgcgcctctcaacgtcatcgagaagctcgcgctcgacgacgagatcgaggtggcgggtccggtgctgcgcgactctactcgtatcgacgagaagatgctggtggagagtgccctgaccaagagccagtcgcatctgctcgcgatctcccagcgcaagtcgatcggcgaggccgtgaccgacgtgctggtcaagcgcggcaaccaggaggtcgtgacatccgttgcaaagaacgagggcgcgcgcttctccggatcaggcctgttgcacatggtccgccgcgccgaaggcgactcgattctcgccgaacagcttggcctgcgcaaggacgtgccgcgccacatcttccagcagctcatctcgaaggcgtcggaagacgtccgccgccgcctcgagaccgagcggcccgaaatgatggcgcagatccagagctcggtgaccgaggtgaccggcgatcttcagtccaagttcggcccgtcctcgcgcagctatttcgtcgccaagcgcgtggtcacgacgcagtaccggcagggcaacctcaatcaggactccatctcgaactatgcgcgccagcatcgtttcgacgaagtgcagatcggcctgtcgctgctgtcctcgctgcctgtggacgtgatcgagcgtgcgctgatggaccgcaaccgcgagatgatcctggtcctgtgcaaggcgctcgatttctcctgggacacgacgatgtcgctcctgtttctcggcgccaaggatcacctgatcacggcgcgcgacctgcaggacaacgagcgcgatttcggccggctcaagatcgagacctcgcgcagcatcttgaagttctaccagtcgcggaagaccggcgccggtgccgatgcgggccgtcagcccgagctacaggtccactga

SEQ ID NO: 5366 - DNA, 1968 bp, BradyrhizobiumColbertium
atggcgcgccaccgagctttcggtgggcggcatggcggtcgatctcggcttggacgcgcgcgggcgggtcgacttgccttccaccgcgagcggcaccttcaatctggcctcgctcgccatcgagcggctccatctcaccggccgcatcgccctgcacgatgccgccagtcgctcgacgctggaattgaacgacatcgccttctccggcgacgtgcgctcgctcgcgggctcggtgcggggcgacggcagcttcagcgccgatggggtgcgctacccgtttcgcatctcctccggtcccagcgccgacggcaaggccacgcgtctgcatctcaacatcgatcccggcgagcgtgccattctcgccgacctcgaaggggtgctcgccttcgacaaccggcagccgaaattcgacggcgcgctgacgctcgccgtgccggagaccaagaagcccggcgaggcggggccgacgccctggaagctcgcgaccaggctcaaagccgatccggccggcgccaaattcgaccagatcgatgcgagcttcggcaccgaggacgcggcgctgaaatttgggggcgtcggcgatctcaggttcggcgcctcgccgctgctgcgaacggtgctgtcggcgcggcaggtcgatgccgacaagctgaccggcaggaccgatgccgatccgcagcgcgtcatgccggcgctgcgcgcagggctggcggcgatcccgcaggcgccgatcccggctcagatcgagttcaatgccgaccagatcatgcttggcggccgtccgcttcagaacatcgcggccgagcttgcgaccgacggacgatcctggaccttccggcggctcgaactgcgcgcgcccgggatgacgcagctctcgctcaatggcgcagctcccggcgccgacagcttcagcggccggctcagcgtggagtcctcagaccccgacgcgctggtggcctggctccagggccgcagcgaaatcaatcgccgcagcagccggccgctgcggctcgcgggcgacgtcacgatcgccgccaatcatctcgccatcgacaggctgaaggccgatatcgacggcggcgccgtggagggacgtatcgtcttcgtgcagaccggcgcgagccggggctcgcggatcgatgcggacctgaaggccgaccgtctcgacctcgatgccgccgcaagcttcgtgcgcgcgctggcggggccgcaaggcgagtggccggaagaggcgaagctctcgctcgatatcggccgcgcgatctccgccggtcaggagctgcggccgttcgcagccaagctcgcttacagccccgcatcgctgacgctggagcagttgcgcttcggccaggccagcggcgtgaccacggaggcgagcggcagcttcgaccgcaccaaggtcaccggcaagctcgcgctgaaatcctcggccagttcgctgcgcgagctgaccgcgctgaccgagccgtttgcgccggcgctgcgcgcgcgcatcgatgccctcccgtcatcgtcaggcgcgacccgtctcaagctcgatctcagcctcgacaacagcgccgagcatgcggaccgcagcaatgtccgcgccgtgctcgatctcgacgcacctcagctcaaggccagtgcgacgctgaccgcacagacgcaggcggccgccattggcggcgtcgacctcgaccgcctgcggagcagcgacttcacgctggactcgaaagtgtcggcgccgcaggccggtgcgctgctggcgctgctcgggctcgatcgcatggtggcggcaggcgagggcgccgggcagatcgagggccggctgagcggcgcctggcgccgtccggtgcagttgaacgcaaagttcagcggcggcgggctggacgccgatgcgcaaggcagcgtcgatctgtcggaaccgaaaggcagcgtgaacctgcgcctgcgcaacgtcaatctggcgccgctgctcggcattag

SEQ ID NO: 5367 - DNA, 1230 bp, BradyrhizobiumColbertium
atgaacgagcaagtgcaaccggccggcggaccgctgttcaacccgctctcgccggatttcatccgcgatccctacccgcattacgaccggctgcgcacgctcgatccgatccacgtgacgccgttcggccagttcgtcgccagccgccatgccgaggtcagtctcgtgctgcgcgacaagcgcttcggcaaggatttcgtcgatcgcaccacgcgccgctacggccccgagatcatgaaggagccggtgtttcgcagcatgagctactggatgctgcaagccgatccgccggaccatacccgcctgcgcggcctcgtggtcaaggccttcaccgcccgccgcgtcgaggacatgcggccgcggatccagcagatcgtcgaccagaccatcgacgccgtgatcgaccgcggccatatggacctgatcgaggatttcgccttccgcctgcccgtcaccatcatctgcgacatgctcggcattcccgaggagcatcgcgagaccttctacaagagctcgcgcgacggcgggcggctgcttgatcccgtgcccttgtctccggaggagatcagccaaggcaacgccggcaacctgatggcgcagatgtatttccagcagctgttcgagctgcgccgcaagaatcccggtgacgacctcatcacccagctcgtgcaggccgaggaggacggcaacaagctcactaacgaggagctgaccgccaacatcatcctgttgttcggcgcaggccacgagaccacggtcaacctgatcggcaacgggctgctcgcgcttcaccgcaatccggatcagcttgcgctgctcaaggcgcggccggacttgatggagggcgcgatcgaggaattcctgcgctacgattcctcggtccagatgaccggtcgcgtcgcgctggaggatttcgacgacctcggcggcgtgaggatacccaagggcgagaccgtgctctgcctgctcggctcggccaaccgcgaccccgcggtctatcctgaccggcccgaccggctggacgtcacccgccagaacgtgaggccgctctcgttcggcggcggcatccatttctgcctgggcgcccaattggcgcgcatcgaggccgaaatcgccatcgccacgctgctgcggcggctgccggatctgcgcatcgacgatgtcgaaaacccggaatggcggccgaccttcgtgctgcgcggcctgaagcggctgcccgcgagctggtag

SEQ ID NO: 5368 - DNA, 603 bp, BradyrhizobiumColbertium
gtgaggacgagaccgaccagggacgacacgcgcgacaaactgttcgaggcggccgcccgcgtgttcgaggcggacggcatcggcggcgccagcatcgaggcgatcgcggcggcggcgggcttcacccggggcgcgttctattcgaattttggcagcaaggacgaattgatcatcgccatgctggaggaccatgtcgagcaatcgatccggcgcaacatggacatcctcgcccagcacgacaatctcgacgatttcatcgcggcgctgaagacgatggaccggagccggcaggatccgctcggccgctcgcccctcctccacatggagatgatcctgttcgtcgcgcgcgccgagaagcgccggcccgaactggcaaaacgcctgcgggcgcggcgcaagctggtcgccgacatcattgaggcgacattgaagagcaatggcaggaacagctcggtaaacccgccctggatggcctcgatcgtgctcgcgctggaagacggatttcgcctgcaccggctgatcgacccggaaacgaccccggccgacagtttcctgcgcgccatcacggatctcaggcgcaggacgggattggcctcggactag

SEQ ID NO: 5369 - DNA, 327 bp, BradyrhizobiumColbertium
gtgccgtatctggtgagcggaaccaacgaatacggcagctccaatctcggccgtggaactgcgaccgtcgcgctacgtctcgcggaaaaactgctgcgcgagggctacatggacgtcagggtctgcaccccgcgtggccgtgtcctgcagccgaatgaattcgacgaactcaaaccagcaagggagagcgacatggcaaagggccagcaacgcggcaaccgcgaagccaagaagccgaagaaggacaaggccaaggtcatcgctgcggcaccgtcccgcaaggaagccgcctggcagccggatttcggacctgcaaagaagaagtag

SEQ ID NO: 5370 - DNA, 132 bp, BradyrhizobiumColbertium
gtgctcccgccgaaggcttcgcaggagcattcgatgtcgcgtgtacgcatctcggaatggatcgtgccgccggtgatcgttccgctgtttcttctgcttctcgtctgcgccgctgcggtcttcaatggctag

SEQ ID NO: 5371 - DNA, 267 bp, BradyrhizobiumColbertium
atgaccatccgctcgcggcgagagaccgtgatcttcagacatccgtttcagatccgcggcatcgagcgcatcttgccggcgggcgcctatgaggtcgtcacggacgaggagacaatcgacggcttgaccttccccgcctatcgccggattgccacgatgatcaccgtgcccgccgagggtgcgcgcggtgcgatggagcgactgtcgatcggctctgtcgatcttgcgaatgcgcaagctgcagacgcgagcatgacccatgagtga

SEQ ID NO: 5372 - DNA, 258 bp, BradyrhizobiumColbertium
atggccgcgcaaaaggcaaccgacctgcgccgcgcgctggccgaggtcgaggcccatgtcagagagctgcgcgagcgcgaggccgatctcgaacaccgcatgatgacggtgcccgcggcgtcatggccggaggctgcggtgaaggcgcgccatctgctcaacctctatgctgcgagcctgcccgccgaggacacgcgccaccgcgcgcttgtgtcggcgctgttcgacgatttcgcccggctggccggcgagggctga

SEQ ID NO: 5373 - DNA, 279 bp, BradyrhizobiumColbertium
atgacgctgacgagcggccgctttattggccacgaatacgaccggatgatcgtccggttctcgatgcatgacggcgcacgggagatcccttgcgcgatctcgacgtccgcgatggacaatctcgagcgaggcccccaggtcaagcccgaacagcgggaagcccaattcacccgtctgcgggctcgcatcgaagcatgcgctgcgaacaagtatcgcgccacggagttcgaaggcacgccgccgggcatcgtgcttcgaggcatcgatttcaagccataa

SEQ ID NO: 5374 - DNA, 276 bp, BradyrhizobiumColbertium
atgcacgtactcgtcagagacaacaatgttgagcaggcacttcgcgttctcaagaagaagatgcagcgcgagggcgtcttccgggaaatgaagcagcgccggtcctacgaaaagccgtccgagcgcaagacccgcgagaaatccgaggccattcgccgtgcccgcaagctcgcccgaaagcaggcgatcagggaagggttgctgcctgcaccgccgaagaagaagcctttcgagcgcaagccgcccttgccggagatcaaatcaaagtcggagtag

SEQ ID NO: 5375 - DNA, 210 bp, BradyrhizobiumColbertium
atgacgactggtacagtcaagtggttcaatggccaaaagggcttcggtttcatccagccaaacgacggcggcaacgatgtgttcgttcacatcagcgccgttgaaagggctgggcttgccgggctcggagagggccaacaggtcactttcgagatcaagaccgacaagatgcgcggcaaatccagcgccgagaacctctcgctggcttga

SEQ ID NO: 5376 - DNA, 243 bp, BradyrhizobiumColbertium
atgagcaccaagaaatcggcagagccgtcacccacaagcatcgcgcgttccgatcgcaagcgcctggccgctgaagaaggcgcgcgggcgttggctgacgtcgagaggcaaggcatcgaggttcgcaagaacatggcgcggcttcgcgaggcgcgccaggcgaaggaatcggccgatgaagctcttcggctggcgttgccgccgccgacgcccaagaagcgcttgaggaagccggcgcgatag

SEQ ID NO: 5377 - DNA, 213 bp, BradyrhizobiumColbertium
gtgcctagactcaagccagaccacggaaccatcaccttctttctcgcctccggcgcaaatcgccagatgtgccggcttgccacgacgttcaacacacagaagcaggccttcagctatctgcagaagcaccgaacggagttcgagcgcatggcgcgggcgcgaatggcctcaggcgagctcgaagacgggattgtcgtgctttcgatgctctag

SEQ ID NO: 5378 - DNA, 237 bp, BradyrhizobiumColbertium
gtgtcgcaattctacttcgatatctgggatggtgaagcgctcgccgtagacgaggaaggtctcgatcttgccagccggcgggccgcagagatcgaggcggcgctgtcccttgccgacatcgccaaacagctcgagccgttcgccagcagcgatggcgttgccatcaatgttcgggatgctggtggtcccgtcttgagcgcgacgttcgtccgcgagagagttcggttggtcaattga

SEQ ID NO: 5379 - DNA, 186 bp, BradyrhizobiumColbertium
atgaaacggcattcccaatcgcgtgcagcgatcgaggcgaacaatgtcttcaggcaggccgcagcgaagcccgccaccgattacgaaaaggcggaacaggctttccaggcaaatcgagagcgcttgaaggccgaacggctggcgcgtgaggctgaacgacgaggccagtccgaaaggacgagctag

SEQ ID NO: 5380 - DNA, 210 bp, BradyrhizobiumColbertium
gtggagctggggctggcgttccacgccgagccggatcgccagaagcagcgcgcccgcaaaatggccgccgatgcgatcgacggcatgggagacacgaccacgacggtggagggtagggcggtccgcaagcgggatctgctcgatggacccaaggagttcggccgggtacgaattgatcggtcgaagcgcaacaagcgggtccgggaatag

SEQ ID NO: 5381 - DNA, 2589 bp, BradyrhizobiumColbertium
atgatgactgcctcagattgtcttgtgaccgaagcgccggacgtgctgcgggcggcgctcgaacgcgccgacgacggcatcgtcatcatcgacggcgcgcgccgcatcacgcatttcaacgcagccgcagagcgaatctggaagctcgcgcgcgctgaggcgctcggtctcggcgccgcaattctcgatctcagatgcctgcaggcggatgcggtcgcggagttgcgcgacgagatcagcctcacccggcgcgacggcagcaggatccgggtggccatttcggtttcctgcatcgacagcggcacaggggttcatcacgtcgtgttcgcgcgcgacgtcaccgccgaggtcgaacggcgcgcgcggattgcgctgctcgacgccgtctcggaccagaccaaccgcgccgtgctcgtcaccgacccggagctgggcatccgctacaccaatgcggcgttcacatcgttgttcggctactccgccgcggaggcggaaggccggcgagtgaccgatcttctggctggtccccacaccgaccggaaggccatgatgacgatcggaaggcgtctcatcaagggcggtccaggcggcgaagccgatatcctcacctatgccagggacggcgaggaaatctgggtctctgcccggatcgatgccttccgcgacgggaagggccgggtcaagcacatcttcgcgctgctccaagacatcacagaaaccaagcagctgcgctcacttcagcagctcatcatgaccgcgctcgcggacgaggtgccgatcggcgagatcgccgaccggctgtgccgccgcgtcgaggagatcgcgcccgacgtcgtctgctcgctgcttcacatcgatgccgccggcctgatccatcccctcggcggtcccagcacgcctgaggattattcccgcgcgctggacggcctcgccatcggtcccaatgtgggctcttgtggcaccgccgccttctatggcgagccggtgctggcgaccgatctcgacactgatccgcgctggcagcctttcaaggcgatgccgctcggggtcggcctgcgcgcctgctggtcgactccggtcaaggccaaggacggccgcgtcattgcgacctttgccttctactatcgggagtcacgtgccccgagcaattggcaccggcgcattgtcgaggcttgcgtcaatctcggcgccttcgcgatcgagcgcaaggaagcccgcgccgagatcgcgcggctggcctatcatgacatcctcaccgggttgccgaaccgcgctcagctgcggcacctgatcaccacggccattgatgcctgtccgaccggcggccatgtcgcactggccttcctcgacgtcgatcacttcaaggacgtcaacgacacgctcggccacgccgccggcgatgagctgttggtgcagctcgcgcagcgcctgcgcgagcatatcgaccccggcgacatgctggggcggctcggcggcgacgagttcgtcattctgctgccgcaacgcaacgccgcgagcgccgagcgcgtcgctgccgaaatcacccgagcgctggcccggccgctgcgtctcggatcgaagctgatgccgatgtcggccagtatcggcatcagcctctaccccgatcacgccaccgatatcgacacgctgatgcaacaggccgacgctgccatgtacatggccaaacaggccggccgctcgacccatcgcatcttcaatgccgagatgaacgggctggccgagcagcggttggcgctgatcgcggcgctgcgccgcgccactgcggagggcgcgctgagcctcagctaccagccgcagatccgcagttgcgacggcgccatccacggcgtcgaggcactggcgcgctggcgtgatgccgtgctcggcgacgtctcccccgcaaaattcatcgcgctcgcggaggaatgcgggctgatcgagcagatcggcatgtggtcggtgcgcgaagcctgtcggcagatggcgagctggcgtcgcgccggcctcaacattccctgtgtctcggtgaacctgtcgccgatcaatttccgcaacgtcacgctggctgcgcggctcaaggacatcctcgccgaatacgatctgccgccggacgcgctggtgctggagatcaccgaaggcgcgttcatgcaggacggcgccgcagcgctggagacgatgaacgcgatccgcgagctcggcgtcggcctctcggtcgacgacttcggcaccggctattccagcctgagccggctcgcgcatctgccgatccgcgaactcaagatcgaccgcagcttcatgcgcgacatcgagacggatgcgggcgcgcttgcgatcgccaccgccgtggtccgcgtcgggcagggcctcggcatgaccgtggtcgccgagggcgtcgagaccgagggacagcgcaagacgctggccgagctcggctgcgacatcgtccagggcttcctctatgcaccggcgctgcctccggtcgccttcgaacgttggctgatcgagcactgcgcggagcaggcgaggacgatgctgggacggctcgatgtcgcggcagtcggacacgaggcggtgaagcggacggcgtag

SEQ ID NO: 5382 - DNA, 1299 bp, BradyrhizobiumColbertium
atgcggcttccgttcttctacggctgggtcgtggtggccgtgaccttcgttaccatggccatcggcgtcaacgcgcgcacggccttttcgctgttctttccgcccatcatctccgagttcggctgggagcgcggtgtcaccgcgggcgccttctcgttcggcttcgtggtctcgggcgtggtcagtccgctgatcggccgcctgatggatcgcgccggtccgcgcgcggtgatggagctcggtgtcgtgttgatgggcggcgggctgctgctggctccgctgacgagcgcgccttggcatctctacgtcaccatcggcgtcatggtcggggccggctcggtttgtctgggctattccggccagtcgctgtttctgccgaactggttcatccgcaagcgcggcttcgcgatcgggatcgctttcgccggcgtcggcatcggctcggtgacgctgctgccatgggttcagcacatgatcgagcagaccggttggcgtaccgcctgcaccgcgatgggcctgctcattctggtcgtgctggcgccgatcaatttgctgctgcacaagcggccggaggacatcggtctttcgccggatggcgatgccgctccggcggcgggcgcggcccagccgatctccaatatcgtcgatcccgcctgggtcggcaccgattggacgctcaagcgggccgtcgcgaccgcgcggttctggtggattgctctgggctatttctgtggtctctacatctggtacgcagtgcaggtgcaccagactaaattcctgctcgacatcggcttcagcccgggcgttgcggtgtgggcacttggcattgtcagcctgctcggcattcccggccagatcctgctcggccacgtctcggaccgcatcggacgcgaatgggtctgggcgaccagctgcgcaggtttcgtcatctgcttcgcagcgctgatcgcgctgaagtacctgccagcactctggctcgtttacgtcatggtgttcgtgcagggcgcgctcggctacggcctcacctcgatcatgggcgccgtggtgttcgagatattccagggcaagcatcagggcagcatcttcggcacgatcatgctggcggcgctggccggcggtgcggccggaccgtgggtgaccggcctcctccatgatcgcgccggcgattacacgctcgccttcggtatcgccatcgccatgagcggactgtcggcattcgcgatctggcaggccgcaccgcgcaaggtgcgcgccgtcgccggccggctgcacaagctccgcggcggtgtcgggacttag

SEQ ID NO: 5383 - DNA, 2430 bp, BradyrhizobiumColbertium
atgggcgatcgcgatcagaatgatcaggatcggagacgttcgagcggatggtggcgcgccgcgccgctgctcgggctctatcgccccgcgctcgttgcgatcggcgtcggcctgctattctcggttgccggtgctgccgccgtggcgcgatgggaggatcgcgtcaacaggatcgagttcggcaacgcggccgagacccaagcgatcgtcatgcagaacggcatgaacgagtacatctcgaggcttctcgcactgcgcacgctgttcgaatcgaccagtgacgaagtcactcgcagcgagttcgagaccttcagcgcgcgcctgttcgagcgccatcccggcatgctgcgcattgcctggttgccgcgcgtcagccgcaaggagcgcgcagattacgaggctgcagcgatcagggaaggcgtgtccggctatcgcatcagatcgctccagggcgagagtttcgccaccgcgccgcagagcgacgaatattttccggtgttctactcgacgcagccgaagacctccccggtctacggcatggactacacgaccgttcccgaacggcgggccgtgctggagcgtgcgcgcgacaacgatcgcgtcgccggcatgcgcacgcgcctgttcgtgccgcgggaggggagccggctgcccgacgtcctcgtcgcgattccagtctacgccaagggtacgtcgcgcgatgagatcgcggaccggcgccgcaatctcgccggcttcgtcgtcggcatcttcgacctgcctttgctgatccagtccattcgcacgaccaccggagcgagctctgccgtcagcatgaacgtttatccgcccttcacgccccagatcgtgagcctggagcaaacgctgccggattattcgtcggacgccacggcgccccagtcgatgccggacgtcgcgcggatccgccactggtcgggcactctccgtatcggcgatagcgagtggcaggtgcgggcggttccaagcgccggcggtccgctggcgaccagttacgatcgcgccgttgccgtcctcatcgtcggcatgctgctgacgctgtcgctgtcgacctatctgatgctcgcgagccgcaattcgcgacggctgtcgcttgccaaccggcgcgtgctcgagcttgcccagaccgacatcctcaccgggctgccgaaccgcgcttttttcctcgcccggctagaggagatcaacatgcagctgagcgtgaggggcctgcccttctcgatcctgatgctcgacctcgaccgcttcaagaacgtcaacgactccctcggccacgcagccggtgatgcgctgctgcgccaggtcgggcagcggctgaaatccgccctgcgtcccaaagacgtgctggcgcggctcggcggcgacgaattcgccatcattcaggaaacgggcgaggatcagcgcacctgctcgaccgagctggcggcccggatcgccaggctcgtgagcgagccgttcctgctgcccgggcatcgcgtcgagatcggcaccagtatcggcatcgcgatcgcgccggatcacggcagcgaccaggagcagctcctgaagaaggcagacctcgcgctctatcgttcgaaatcggcgggccgcaactgcttcaccatctacgacgaggcgatgtcggccgagctggaggctcgcaacacgctggagggggatctgcgcgacgccatcgcgcagtgccagcttgaggtgcattaccagccgttcgtcgacgcgctcagcggcgcccggcgcggcttcgaggcgctggtgcgctggcggcacccgatgcgcggactgattccgccggaccagttcatcgcgctcgcggaggagaccgggttgatcgtgccgctcggcgagttcgtgctgcggcgcgcctgcgaagatgccgccggatggccctccgatctcagggtcgccgtcaacctgtcaccgatccagttcaaggaggccgagctgttcgggatgatctgtgcggcgctcgccgattccggcctgccgccgcagcggcttgagatcgagatcactgaatcggtgttgctggagcgcggcgccgagaaccatgccttcatggagcggctgaagggcatcggcatcgaactcgcgctcgacgatttcggcaccggctattcgtccctcagctatctcaccgcgttcccgttcgccaagatcaagatcgacaagtcgttcatccgcaatctgacgcagcaaccgcgcagctccgcgatcatctccgcgatcgtgacgctggcgcgcgggctcggcatgtccgtcaccgccgagggcgtggagacccgcgaggaattcgagcggctgaaggcgctcggcgtcaatttcgcgcaaggctatctgttcggccgaccgcagcccatcgagcggatcgcgatcgacgcgccggtcaaacgctcacgcctcgacgccgcctga

SEQ ID NO: 5384 - DNA, 1167 bp, BradyrhizobiumColbertium
atgcatcgattccgatccgcgagatccgtcgtcctgacagtcgtgttcctggccgcgaccacgttggccgccagcggcgacgaggccggcgtcagcgaggatgcgatcctgttcggacaggccgctgcgctcgagggtccctcctcggcgctcggacagcgcatgcggcaaggcatcgtcgcagcgttcaccgaagtcaacgccaagggtggcgtccacggccgcaagctccagctcatcagccgcgacgacggctacgaccctgatcgttctgtggcgcagacgctgcgcctgatcgaggacgacaaggtgttcgcgctgatcggcgcggtgggcacgccgacagcgatggcgacgataccgatcacaagtgcgaggaacattccgttcatcggccccttcagcggcgccgagttcctgcgcgacctcgagcttcccaacgtcgtcaacatccgcgcgagctatggcgcggaggcggaggcatggatcaagcacctcaccgaggatcgccatttcacccgcatcggcatcttctaccaggacgattccttcggccgcgacggtctcctcggcgtgaagcgcgcgctcgcgaagcgcggcctcgagctcgccgccgaaggcactttcgaacgcaacacccgcgcggtcagcggggcctggcggatgatcaagcgtgccgaaccggaggccatcgtgatggtcgggacctacgggccctgcgcggatttcatcaagctcgcacaccgcagcggcttctatccgaccttcgtcaacatctccttcgtcggcgccaatgcgctcgcgacggagctcggccctgagggcgaaggcgtcatcgtctcgcaggtcgtgccgtctccctgggaccgttcgctcaagctggtcgccgactaccaggcggcgcagcgggcgttcgatccgacgctgacaccggacttcgtgtccctggaaggctatctctccggccgtctcgtggccgcggcgttggagaaggccggaccgcaaccgacgcgcgcaagcctgctgcgcgccatcaacgatgtcgggcgcttcgacatcagcggcagcaccgtcaccgtgggcattcgcatgatcgatgcgccgccgaaggtgtacttgacggtgattcagaaggacgggacgttcagggcggtggatcggctgtag

SEQ ID NO: 5385 - DNA, 1344 bp, BradyrhizobiumColbertium
gtgtataagagacagctcgtagacgaccacttcgtcgggcgggggcggccggcgcggcttcggcggcgtctcgaccaccttgcgctttggcggggtatcgtcgacgcgcttcttgagggtgggcggaacactcggattgacaggcgtcgccggcgtcgagcacgggcaggtcggtgccgtcgcgacggcgaccggggtcgccgccgcagcggtaggcacgccataattgcggttctggacgcggagcagcagccggcgcgcagttgccgcgaggtcgctattgtcccagttcgcaagataggcctcgaacgaggcgcgcgtgttgatcgccgttgcacgctcccacgccagcatctggcgccgtcgctccagcacggtgcgcaggcgcggcgtgcgggtgtcctgcgcgtagagttcgatgtaggcctgatacgcctcgacggtgtcctcggtgatcacgagctcataggcggtcatggctggcttgccgcgcaattccttgcgccagtcctcgaggctgcgcgtgccgccggcgagcgccatcgcggatgcgccgggaagggcgggcgtgttgccgctgctctcgccgaagaacctgaagtcggtggtcagcgacgagctttcccagggaatctgccggccgtcggtcgattgcgccacggcgacgcggatgcgcttgaacatctcctcgatcggcagattgggctgtttcgcgatcgtcagcacagccgcggtgtaagggctgtcgatgccgttgccgtcctcggcttcggcgccgggcgaggtcgaataggagatgaaggagccgggggcgccggccttggtgtcgacgatcgcaagcccgtggccggcgccgcggagcgcggggaacggattgttgcggcaggcatccagcatgaagatgcgcgcccgcgtcggcagagcgccgagcgtgttgagcatgtcgttcagccgcacgccctgcagcggaatgtcggcctcgcgcttgggatcgagatccacgggaacgagatagttctcgccgtcgatctgcaggccgtggccggcatagaacaccaaggcgaccgtatcggggccgctggcactgaccttgccggcgaagtccgagatcgccgcccgcatctcgttctgcgccagattggcggcggtcgtgacggtaaagccggcgttgccgagcagctccgtcatgcccttggcgtcgttggcggcgttgggcagctccggcaccgtccgataggcggattggccgatcaccagcgcgagccgcgcttcggccgcggcatcggccggaatcatcaattgcgtgagcgcgagaagaccggaagcaagcagaaagttggataa

SEQ ID NO: 5386 - DNA, 1761 bp, BradyrhizobiumColbertium
atgcagagcgccaacggcgagctcagcgtcaccttcaatggcgagatctttaactacatcgaattgcgccaggcgatgatccgccgcggtcatcgcttccggaccgattccgacaccgaagtcatcctgaagctctaccaggaaagggggggcaactgcgtcacggaactcaacggcgattttgccttcgcgatctgggacaagcgccaacagcggctgatgttggcacgggatcggatgggcgttcggccgctctactatgcgcgccggcccgatggcctgttctttgcgtccgaggtgaaggcgctgttgatggtgcccggcgttcgagccgagcttgatccgtttgcgctcgaccagatcttcaccttctggttcccgctctgtccacgtacgccgttcaagggtatctttgagcttccgcccgcccatgtgctcgttgcggagagcgctagcatctcgatccgtcgttactggcagatgcattttgccgacgagatgatggatcgtcgtagcgaagctgcgattgccgccgagctgcgcgaacttttgaccgacgcgacccggatccggctgcgctccgatgttccggtaggcgcctatctgtccggcggccttgattcctcgatcatcgcagcggtgacgcggcaaatcaagcaggacaagcttcgcactttctccgtcacgttcgatgcggctgagtacgacgagagcgccttccagggcgagatggcggatgcgctcggcaccgagcatgtgtcggtcgcctgccgcaccgacgatataggcaagattttccccgatgtgatccgtacgaccgaacggccgatcctgcgcacggcgccagcgccgctgttccatctgtccggcctagtacgcgcgcagggctacaaggtggttctgaccggcgaaggcgccgacgaggtgtttgccggctacgacatcatgaaagaggcgaagatccgcaggttttgcgcgagccagccgcagtcacggcgtcgcccgctgctgctgcagcggctctatccctacctgccgggcctgaaaggccagtcgcagaaatatctcgaggcgttctttcgcgcccgcgccgaggaggtcggcgatcccctattttcgcatcttccgcgcttccgcaacaccgcgggcgcaaaggtcttcttctcggacgagctgcgccgcgagctcggcaactacgatgcactcgatgaattgcgcgcggggctgccgccggagttcagcgactggcatccgctagcgcagtcgcagtaccttgagacggcatacctgctgccgggctatatcctgtcgtcgcagggcgatcgcgtggcgatggcacatgccgtcgaaggccgcttcccgttcctcgatccccgcgttgtggagttcgccgcgcgaatcccgccgcgcctcaagatgaagggcttgcgcgagaaacacatcctgcgtgaagcgatggggcatctcttgccgcccgcgatcggcaaccggccaaagcagccgtaccgggcgccggatgcccattcctttgtcggcgcgaacgctcaggagtacgtaaaatcgataatgtcggagcacgcgctggctaacgcaggggccttcaatccgcgcgcggtggcgaaacttcaacagaagtgcgtggctgccgccaatctcggcttccgtgacaacgtagcctttgtcggcattctttcaacccagctttggcacgacgctttcgtcgagcaaaacctctcgcatcaaaatctcaacgcagcctaa

SEQ ID NO: 5387 - DNA, 261 bp, BradyrhizobiumColbertium
atgcctgccgatgtgaccaccaagatccgcgatttcatcaaggacaactttatgctccgggacgatcgcgcggagcttgcggatgccgagtcgcttctggacacgggactgatcgattccaccggcgttcttgagctcgtcgctttcatcgagaccgagttcagcatccagatggctgactcggacatcgttccggaaaacctggattcagtggagacgattgtccgctacgtcgatggcaggctggggacaacggtttag

SEQ ID NO: 5388 - DNA, 1557 bp, BradyrhizobiumColbertium
atgagcatccatcggatcgaagagtacctgtcggccagcgctcgcaagttcggcgacaaggttgcgctcgtcgcaagcgggcgccgcctgacatttgcggagctcgaggtgttgtccgaccggattgcggcggcgctcaacgacggcggtatcaagcggggcgaccgtgttctcattttcatggacaattgctgggaggctgtcgtctcgatcttcgcggtgctgaaggccggcgcagtctttagtccggtgaacccgtcgacgaagtccgaaaagctggcgtacgttgcccgcaactgccgtgccgcggcgatcctgacccagggccgtcttttgcccgtcgttatcgaagccgtcaaaagctgcgaggcggtaccgctaatgatggtcgcaaatgccggcaagggcgggttgccggacggctatgcctcgttcgaagcggcgtgtgagacgccgcgcgccccgccgcgttcgggtatcaacctcgatctcgcaatgctcatctacacctcgggatcgaccggcttcccgaaaggcgtgatgatgacgcatcagaatatcgaggcggccgcgacctcgatcaccacctacctcggcaacacctccgatgacgtgattctggcggtgctgccgatctcgttcgattacggcctctatcaggtgctgatggcggctaaactcggcgcgacactggtgctcgagaagtcgtttgccttcccccaggcgatcctgaaccggatcgcggaggagaaggtcacgggtttcccgctggtgccaaccatggccgcgctcctcttgcagatgaaggatctgcggcccggggaatacgcgacgcttcgttacatcaccaacacggcagcagccctgccgccggcacacatcgcccggctacaggaattattcccgaccacgaccttgttctcgatgtacggtctcacggagtgcaagcgctgcacctatttgccgcccgcggagttgacgagaaggcccgaatcagtcggcatcgccatccttggcaccgaagcctatatcgtgggcgacgacggctttccgcttccattcggctcaaccggcgaactcatcattcgcggaccgcatgtgatgaagggttactgggaaaatccttccgccacggcaaaggcgctacgccccgggccgctgccgcacgagatggtcctttataccggcgatctgttccgctccgatgaggagggatttctctatttcgtcggccgcaaggacgacatcatcaagacgcgcggcgaaaaggtcagcccgaaggaagtcgagaacgtgctctacgcgctttccggggtgcgggaggccgccgtcgtcggcgttccggatccggtgctcgggctcgccatcaaggcggttgtggcgctcgacaccttcgcggccctctcggcggccgacgtgatccgccactgcgcacggcatctggaagatttcatggtgccgaagctcgtcgaatttcgcgaccagcttccaaaaagtgaaaacggaaagatcgcccggcggcagatcgaggccgagtctctggagactacatcatga

SEQ ID NO: 5389 - DNA, 1005 bp, BradyrhizobiumColbertium
atgaacgaacatgtgcagacggtcgaggctggcacacctttttcgcgggaggccctcaagctcgaccccgcccgggaaatcgagcagattagcgtcggcattcgcgaacaggtgctgaagacgttgcgcaagcgtggcgccatcgtcggcctgtccggcggcatcgactccagcgtcacagcggcgttgtgcgcccgcgcactgggcgccaagaacgtgctggccgtccttatgccggagaaggattcggaatccgacagcctgcagcttggccgcaaagtggccgaaacgctgggcatccactgggttgtcgaggatatcgcgccccagcttgccgccgccggctgctacagccggcgcgacgaattcatcagaaaggtcgtgcctgagttcggggacgggtggggatgcaaggtcgtcctcggcggagcgctggcggcgacgggttacaacatcacctcgctggttgtgcggtcgccgagcggagagatgcgcaagctgcgcatgccgctggacgtctatcttggcatcattgctgcgaccaacatgaagcagcgcacccgcaaacagatcgaatattatcacgccgaccggttgaactacgcagtttccgggacgccgaaccggctcgaatacgatcagggcttcttcgtcaagaacggcgacggcgcggccgatttcaagccggtcgcgcatctctacaagagccaagtctatcagcttgccgaggccctcgacattccgccggacatctgcagtcggccgccgaccaccgacacctggtcgctgtcgcagacgcaggacgaattctacttcgcgctgccgtatcaggaaatggatctctgcttgttcggcctgaatcacggcattgcaatggatgcagttgccgcggccgcggaattgtcgatcgagcaggtcaagctcgttttcagggacatcgagcacaagcggcgggcgacccgctatctccatgtcccgcctttgctcattggggacgacaaataa

SEQ ID NO: 5390 - DNA, 153 bp, BradyrhizobiumColbertium
atgcggcagatggaagaggatctcggcacccggctcgattgggtcgcggtcgatcacttcaacaccggccacgcgcacagccacgtcgctattcgaggcaaggacgattccggcaaggacctgatcatccgcaggactacgccgaaggggtga

SEQ ID NO: 5391 - DNA, 2097 bp, BradyrhizobiumColbertium
gtggacatctggacctgcagcgaccagccggccatggccgttcgctgcatcggctgtggcggcgaacctgcaaggatgggcgacggccagtgtttttgtgtttggacccatttaacgatgaaccgccgatccctgcgaacctccgctggcctcgggctcggcatgctcgtcctgcccggcgcaagctttgccgccgacctgccgctgaaggcccctgcgctgaaggccgtctatgattggaccggtttatatatcggtgcgcacgcaggctacagccgtggctcttccagcttcgtcctgagcgatcccgcagcaaccgtgggcagtggtcaattcagcggcatgatcggcggtgtgcaggccagctataattatcggctagcttccggattgctgttcggcgtggaaggtgatctttccttcccgaattacatcacgtcgaactcgatcgtctctttcctcgcgacaccgcgcgccgcggcgacccagcaatgggattattccgcaagtgtccgtggccgtgtcggttacgcctcgggcttgtggctgttctatgcgaccggcggattggcatggatgggcgagcgctttttcagcacgcctgccgctggcgacggcgagaagatcctccacacgaggcttggctggattgcgggggccggcgtggaatacggcttcgcgccgcattggagcgctcggctcgaatatctctacagccggttcgagaacgccagcgttacctttccttccgcgacccactacacgtcatccctggatcttcagtccgtccgcgtcggtctcaaccgcaagatcgacttgccggggtctccgaattaccgccccagcgcatccttagacgacaccgagtccaaccgttgggaaatccacggccagactacctatctgccgcaaggctacccgtcattccgcgcgctctatagcgggccaaacagcctctcaccggcagcacaggccaaggcgacctggagcaacagcctgttcctgaacgcgcgcctctgggaaggcggcgaggtctactacaatccggaattgctgcagggcttcggattgaacgatacggtgggcgctgccggctttcccaatggcgaggcgcagaagtcgaacttcccctacccgcactacaacacgtcgcggctgttcctgcgccagaccttcggtttcggcggcgagcaggaggagctgccaagcggaccaggccagcttgccggaaaggtcgacgtctcgaggctgacgctgcaggcgggcaaatttccagtcgtcgacgtgttcgacggcaacgcctacgccaaggatacgcgcaaggatttcatgaactggtcgctgtgggcgcccggcgcgttcgactattcggccgacaaggtcggtttgacctatggcgtcagcgccgaactcaaccagaagcattgggcattgcgcggcggctatttcctgatggtcgccgagtcgaattcgaaccatttcgacacccgtgcgccagagcgtggccagtatgtgatcgagctcgaaacgcgctattccctgttctcccaacccggaaagctgcgaaccctgggctggctcaccagcgcctacatgggcagcttccgcgaaacgctggacaatcccgcgctcaacctcgacatcacgcagacgcgcaaaggccgcaccaaatacggctacgtcatcaatctcgagcaggcgatcaccgacgacctcggcttgttcgcgcgctggagctggaatgacggccggaccgagaccatgacattcagtgacatcaacggcagcctttccggcggcctctcgatcaaggggacgaaatggggacgcccagacgacgtgatcggtatcggcggcgcggtcaatgcgatctcgcgagactttcgcgactttctcgccgttggcggcctaggtgtgcttgtcggcgatggtgcgctcaactaccggcgcgagcgggtgcttgaaacctattactccctggcgctcagcaaggctttcactttgaccgccgactaccagctcattgtcaatcccgcctacaatgccgatcgtggcccgatctcgatcttctcggggcgcctgcacggggagttttga

SEQ ID NO: 5392 - DNA, 267 bp, BradyrhizobiumColbertium
gtgttcatctctggccggaagcgacgggtaacgccaaagatcaaacgcgagctgcgccgccgctcggtcgccgaaccggtcatcggccatctcaaatccgaacaccggatgggccgcaactatctctggcaccgccagggcgacgtcaccaatgcggtcctcgccgccgccggctacaacttccggcgtctcatccgctggctggcgctcttgctgcgccaaatcctcgtccagttcaccgctcgacttcagttcaacccaggttga

SEQ ID NO: 5393 - DNA, 528 bp, BradyrhizobiumColbertium
atggcgattgacgtcgcactcgaagccgagcggatggagcgcaaaaccgaacaccgacgcatcatcgagctggaacttcagcaagcccaatatgaggcttcgctcgcggagcgacgctatgccccctgcgatccaggtaatcggctcatcgccgtacagctggagaagagctgggaagcagtgcttcgtcgcgtcgagtcgtgccagacccgattggctgccgcacaggctgccgatcacgacgttattctgcccgactttgtcggccttgccgatgatctgaatgctgcttggaacgcccccggcgtcaccacgcgcgcccgtcagcagctcttgcgtgccctcatttccgatatcatcgctgatgttgacgagacaacgcgcgaagtcattctgacgatccattggcgcggcggtcagcattcacagctccgcgtccgcaagccgaaggcaggcgagcacggatgccgcacatccgaggaagcgcttgctgtgatgcgagccatggcgacccgatggttggactag

SEQ ID NO: 5394 - DNA, 360 bp, BradyrhizobiumColbertium
atgaccgcaaacggcccctcctccgtcgagggcaaccccgaagcgatccgcaagatcctcgcgaccctgctggataacgcgatcatctattcgaagtccgacgactcggtggaggtgaggatcgtcaagacggatggcgattgcgcgatcgatgcagtcgatgaaggtcccggcatcgtcgaggatgcgattccgtttatctacgaccgcttcttcagggcggccgctccggggatcgaaggaacgggtctcggtctcgtgatcgccaagtcgaccgccgaacgcgaggggatcacgctctcgcatcgaaaccgcagcgaccgcagcggtctgatcgcagcggtcgctttcgcaaggtag

SEQ ID NO: 5395 - DNA, 228 bp, BradyrhizobiumColbertium
atgcgcgggcttcggcttctttcgattgatatcgtccggcgcagcgtcgacgcgcgcgagccgctgcggcccgtcggcgttccggaggaagcggcgcccctgatcgtcgcgacagatgggttcgtcgctcgatatcaggaagcgctggaggcccagcgacgcttcgtcgccgacgcggcacatgagccccgcacgcccgctcgccgcacttcagatccagacggataa

SEQ ID NO: 5396 - DNA, 339 bp, BradyrhizobiumColbertium
atgctcgcgatcgtgggcctcgccgccgcggcgtcgacgctcgcgcttgtcagctacgaaatgaacaagttcctcgacgcccagttgcaggaaatcgcggtgaacgtcggtccgggcgatcgaagcgaggccggcccgttgctggacagcgaagacgaagatcatcttgtcgtccggatctgggatcgatccggcaaggtcgttcaccgctccggacccgagatcgacatcccatgggaggcccagccaggtctttccgacgtcgccgccgccggcggggactggcgcgtctatcgctggagccacgcgcgccaggacgtccaggtcgcacagacctga

SEQ ID NO: 5397 - DNA, 579 bp, BradyrhizobiumColbertium
gtggcggagagagccagcaccgggcgccagtttatctccaacgcgaaggattgcttctgtctcgcgcttgtggcgtcgccacgtcgggcatcagacgaagtcttgaaggccgcgcgcgcgagcagcgttcctccgattctcgtcatcaccgcgcgggaccaggtcgaggacatggtcgctgggctcgacttgggcgcggacgactacatcatcaagctgttcgagctccgaatccttctcgcccgcattcgcgccagcacgcgccgagtcagcgaccgatcgaacttgctggtaagcagcaaggagatcacgctcgatccgtccacctatgtcgtgacgttccgtgggatcgagtccacgctttccacccgggagttcgcggtcctgtacgcgctcatggagaggccgggcacgatcctttcgcgcagccagatcgaaaaccgcatctacggctggagcgaagaggtgcagagcaacgcggtcgacttggcaatccacggtctgcgcaagaagtacggcaaggatatcatccgcaacattcggggcgctggctggatggtcacaagagccgcgtcatga

SEQ ID NO: 5398 - DNA, 174 bp, BradyrhizobiumColbertium
atgcgctccaacggcagacctctgctgcgaccccgcgaccagcgattggtgcgctcggcgagacctgaggagatcgccgagcttgagctgcggcgtggtctggatgaggcgaggggcgaagacctcaagtattgttttgcctttctggtgccgatcgacgccgaactgaactga

SEQ ID NO: 5399 - DNA, 342 bp, BradyrhizobiumColbertium
ttgctcatcctaacagcggcgacttcgggcgcggaggcacagccagcgaccgcgaagatcgtcggactcggcgcaacgcgatgttcgcaattctccagcgacgtgcaatccaatccggcggtccggcgcgattacctcgcctgggctcagggctacatgagcggaatcctggtcggccggccggcaggtacggacaccggactggatctcaatcctccgaccttcggtcttctcacccagctgaagtttctcgaggatcactgcgccggcaatccaagtcaggatttttccgatgcagtcgaagcgctctacgggcggctgcgtaaggaaggtcgcacgtaa

SEQ ID NO: 5400 - DNA, 141 bp, BradyrhizobiumColbertium
gtgaactggaacacaacgcagttcgatcagaagtttccagcaccgatcaaggcagcgcgggaagtgggccgcattctcaagcacatcgagtttggagccgctgtctcgccggattaccacgagggctcccgttccggttag

SEQ ID NO: 5401 - DNA, 294 bp, BradyrhizobiumColbertium
atgacacgactttattcccggctcggtgcagcggcgcttggttttggcctcgtggtgggcggcctggagcttcaggcttcgccactttcgaccgtcccgatttcggacggcgacgcaaagctgctgaaggtgcagcatcatgatcctcattacgatcgccggcacgtccgtcggcagcgccaccacagcgatcgtcctcttcatcaggtggttccgccgccggtgatcgacgtgatcccgcaccataaccagccgcggcctcaccaccgccgccgtcatcatgagcatcactag

SEQ ID NO: 5402 - DNA, 1830 bp, BradyrhizobiumColbertium
atgcgcattctcggtatctctgcgttctaccacgacagcgccgcggcgctggtcgaggacggtcacatcattgctgcagcgcaggaagagcgtttcacccgtaggaagcacgatgcctcgtttccgcgccatgcggttcgctactgcctggaagcagccggcgcaaaactttcagagatcgatcatgtcgtgttctacgacaagccgttcctgaagtttgaacgcctgctggaaacctatatcgcattcgcgccgcgcggcttccgctccttccagatcgcaatccccctatggctcagggagaagctgttccaaaaaagcctgttgcggagtaagctccgggagctcgacgaggatttcgcttcggaaaagctgttgttcgccgagcatcatctgagccacgccgcgtccgccttctacccgtcgccgttcgagaaggccgcggtcctgaccatggacggtgtcggcgagtgggcgacgacctcggcggcgataggcgatggcaaccgcctcgaaattttccaggagattcattttccccattcgctcggcctgctctattcagccgtaaccagttacatcggcttcaaggtcaattccggtgagcacaaggtgatgggactggcgccttacggtgaacccaaatacgcgcagctcgttctggatcatttgatcgacctgaagccggatggatcatttcggctcgacatgtcctatttcgattattgcaccggtctcaccatgaccaacgagcggttcgcgaagctgttcggtcaacccgagcggtcgccggatcaattgctgacgccgttccatatggatgccgcagcctcgattcaggccgtgctggaggaggcggtgctgcgactgacgcgcagcctcgcgagccggaccggtgcgcgcaatctctgccttgccggcggcgtggcgctcaattgcgtggccaatgggaaggtgctgcgcgacggcagatttgaccgcctctggattcagcccgctgcgggcgatgcaggcggcgcagtcggcgcggcgcttgcggccttccatcagttcaagagcgggccacgcaacatcgctgcgaccgacggaatgtccggcgcgtttctcgggccggaattttcgcaaagcgagatcgaacggaggctcaccgcttgcggcgcgcgctttgccgtgctggacgagggcgacatgatcgaggcaacagcaaaggcgctatccgatcagctcgcggtggggtggtttcagggccgcatggaattcggcccccgctcgctgggggcgcgctcgatcctcggcgatccccgttcgccgaccatgcagaagaacctcaatctcaaggtgaagtaccgcgagagttttcgtcccttcgcgccagccgtgctgcgcgaggacgtcgccgactggttcgagctcgattcagacagtccctacatgctgatcgtcgccgacgtgacgaaggacaagcggcgcgccatgagcgccgaggagcaggcgctgttcggcatcgacaagctcaatatcgcgcgctcggaaattcccgcggtaacccatgtcgattattccgcccgcatccagacggtcagcgccgagaccaatccctgctttcatcggctgctgacgcgattcaaggcgcggaccgggtgtccggtgctggtcaacaccagctttaacgtgcgcggcgagccgatcgtctgcgcgccggaagatgctttccgctgcttcatgggcaacgaactggatttgctcgtggttggcaactgcgtgctgcgcaagagcgagcagaatcccgatctcaagcaggattacagttccgctttcgacttggattag

SEQ ID NO: 5403 - DNA, 153 bp, BradyrhizobiumColbertium
atgatggattttctggccgagctttggcgcttcatgcgcgtgcggaagaagttctggctgctgccgatcctgatcatgatggtggtgttcggcggtcttggggtgttgacgaagggctccgcggtcgcgccgttcatctacacgctgttctag

SEQ ID NO: 5404 - DNA, 231 bp, BradyrhizobiumColbertium
ttgctgcacccgctcaatcggctgtggatgaagttcggcctgcttctgcacaagatcatcaacccgatcgtcatgggtgttctcttttacggtacgatcttgccgaccggccttgtcgtgcgactgcgcggcgaggatcttctgcgactgaaacgcgagcccgacgcggagagctattggatcacgcgcgtaccggggcctgcgccggaaacaatgagagaccagttctga

SEQ ID NO: 5405 - DNA, 1146 bp, BradyrhizobiumColbertium
atgaagcgctggtgtcgcctcctcggacagggggcgctgctgttcatcacctgggtcgcgatctttgagatcgggttacggttgcagcagtatttcggtccgctggtcgatctcgaaatggcgagcgtcaacctgaattgggaatccgacgtcttgaaccataagccggaaccgaaaaaccagaacctgtgcatttacggcgatctgaccggcttcagctaccagagatcctatgacgcgaacggtgtcaggatcatcgacgatagggcactgctggccgggtgtcgaaaagcagtctcggtcttgttccttggcgattcctttatggaaggctacgacgacgagaacacactgccgtatcacgtcgcaaaatatttcaagaaagagctgggggtttgcctaaagacccacaatgccggttatacctcatattcgccggccatcttcgtgccgcaggcgaagctgctgctgccgattgtgcgtcccgactatatcgtggtggacgtggacgagaccgatctatacgacgacttcgctcgataccgtaagctgattgtccgcaatgggcgcggacaaaatgtcggcgtcaaggcttcacccatcggacacgaatgtagtttcggcttgatggaggctcgcgagcatcccttgtatctgatgcggtttgtggccaaggcctggatgtccctcgtccacatgccagcggtgattaagaaataccgatcggacgagctcgttcttttttcctattcacaggaccatggcgctgatctcgaacagaaatattcagaagcactttcgagtttcaggcagaatctgcaggagctggctgacgtgctaagggactacgccggggacgggagccgggtgctgttcatctttcacccgcatcttgagcacttgaagcccgacgctgagggccgcgtgtggaacaatctcgtaagctctacggtgcacaaaatctgcatcgccaacaactttcttttcttcaatgccaccgcaacattgaagcagcggttcggatcgcaccccgagaatttctattggaggcaaggtgatatgcattttagtcttaacggattggaagaatattccgctgcggtcgcagcgttcatggcctcctctatgatcaaaccgaaggactga

SEQ ID NO: 5406 - DNA, 141 bp, BradyrhizobiumColbertium
atggccggcgcgcagcagggcgaacccaacttcgcagcgatcgaggcattgaatgccgcagggggtttatcagaaggtgatcgcgatcatgggccggcagatcgacggcgaaggcacggcggcggcgcgatggggctgtag

SEQ ID NO: 5407 - DNA, 141 bp, BradyrhizobiumColbertium
gtgggcgcggtcggcattgcgccgcttcttccaggcggcggaattcgcaattttattcgaaatgacgcaccactcttcgtcttcggctacgcgtggcgagtcgtcatcggctacgcgtggcgagccagcgccctggcgtag

SEQ ID NO: 5408 - DNA, 165 bp, BradyrhizobiumColbertium
atgctggtggtggggacgattgcgaagatccatcgcgcctatttgtttatggtcagcaccatcagtcgcaccaagaaccgggcttccaggcgccagtcggcgcgacactacccccttccgctccgcgatccgtccagccgacgcatcattcatatgttcgactaa

SEQ ID NO: 5409 - DNA, 138 bp, BradyrhizobiumColbertium
ttgtccttccagcgtaaccagacggccaccgccatcaatcgtgaatgcgccgtttcgcgtgaagcgctcgcctcgctcggtctgtacgacgaaatacctctggccattgatggcaacatcgagcgggttgccagttaa

SEQ ID NO: 5410 - DNA, 126 bp, BradyrhizobiumColbertium
gtgcagagcacgcgcgaaatgagccgcctcgcggagattacccgaacctacgagatggtcggcagattgctcaagagctcgcaagatgccgacgacatcaacaagttggcaaatgttcccgaatag

SEQ ID NO: 5411 - DNA, 204 bp, BradyrhizobiumColbertium
gtggcgttttcaatcattctgacgatgcggatggcgacgcgcctgcgacaaggcgcggaggcagccggcctcgtcacccacctcgtcagctttccgcgcgcgatccaacgcggcccgatcgtgggccgcatcgatctttgcctgcgcgtcggcctcggtcgcggacctgatcgtgggctggcgatgcatctgcgcacgcactga

SEQ ID NO: 5412 - DNA, 126 bp, BradyrhizobiumColbertium
gtgtacggaccaaccccgcgccgcaaggtcggcaaccgcgccttcgtaggccgcgatctcctgggcgcactggccggcgtgcgccgatccggaaactggaagcgcgagcgcaattgcaccaaatag

SEQ ID NO: 5413 - DNA, 546 bp, BradyrhizobiumColbertium
atggaggcgttctccggtaacaaggcgggcaccggcggcctcgtcaccttcaaggattccaactggctgatgtcggtggtgctctatcatcagccgcattttgcaggacagccgaagaacgtccaggtgttctggggctacgcgctgcatcccgaccgcgtcggcaatttcgtcgccaagccgatgtcggattgcagcggcgccgaaatcctgaacgagctctgcgggcatctgaatttcgatcgcacggtgttcgaggacgcgatctgcatcccctgccgcatgccctacatcaccagcatgttcatgccgcgtgcgaagaccgaccggccgctaccggtgccgaagaattcggtcaatctcgccttcgtcagccagttcgtggagattcccgacgacgtcgtgttcaccgtcgaatattcggtgcgcgcggcgcagatggcggtctatcagctcatgaagatcgatcgcccgatcccgggcgtgacccgccacgacaagtcgccggctgtgctgctgaggaccgttgagaaagcgtttgcttga

SEQ ID NO: 5414 - DNA, 828 bp, BradyrhizobiumColbertium
atggtcgaccctgaggcgcgtcccgattcgcaatatgtcgtcgtcgaatcaacctatggcgatcgccggcatccgcaagccgacccgcagagcgaactcgacgacattgtcaatcgtacggttcggcggggcggaacggtcgtcgtaccagcctttgcggtcgggcgggtgcagagcctgttgttctacttcgaacgcctgaaggcggccggaaagctcgcacacgtccctatttttctcgacagcccgatggcggttaatgccagtgagatcttttgtcatcatcgaagggaccataaactgtcagaacccgattgccgcagttcgtgtgcggtggcgacctacatccgcagcgtggaagattcgaagcgattgagcgccatgacgatacccaaggtcatcatatccgcgagcgggatggcgaccggcggacgcgtcctgcaccacctcaagcgctttgtggccgatccgaaaagcacggttctgtttgccggctatcaggccaaagggacgcgcgggccggcgatgatggcgggtgcgagagccatccggatccacggtgaggacattccggtccgagccgaggtcaggaatatcagcgcgctgtcggctcacgcggatgccgaggaaatcatggcgtggctgaggaccggcaagtccgccccgagcatgacattcatcacccatggcgagcccgctgcgtcggacgcattgcgctcgcgcattgagcgcgagcttggctggagcgcgacggttccggcccagatggaggtcgcggccctttctctacccgagcctgtttcaaccgccggcgcaaaacgttcctga

SEQ ID NO: 5415 - DNA, 522 bp, BradyrhizobiumColbertium
gtgaccatcaaattgagctttctcggcgccgctggtacggtcacgggatccaaatatcttttggaaaacggatcgcaacgactactgatcgactgcgggttattccaaggcgaacgagaacgccgcgaggcaaactgggcgcaatttccggtcgatccggcaagcatttcagccgtaatgctgacccacgcccatctcgatcactgcggctatcttcccgtgctggtcaagggcggctttcgaggggatgtcctgtgcagtgaagcaaccgccgacctctgcgagatcctgttgcgcgatgctgggcacctccaggagagcgatgcgcattttgccaatcgccacggattttctcgccacaagccagctcttcccctctacacggttgaggatgccgaagctgcgctgcggcagctgtggaccattccctttcatcagactcaaacgttgcccggcggcgcgcagctgcgtctcttgcgcgccggacacattttgggtgcggcatcgctccaaatcgaatga

SEQ ID NO: 5416 - DNA, 294 bp, BradyrhizobiumColbertium
gtgaacgcactcgcacgccgcggcctcgctttcatcgccaatcggttccggcgaaccctgttgcagcagaagctcgttctcattgcggcgccgcaatgcctggcggcgctggtgatcagcaacagcagacgcgacgatgcggctgagccagccttggacggcgccttcatcgcgaagcgcctcggctttctccatcgcgcgaagaatgactccatgcagaacatcctcggcgtcggccgcatttccaagccgacggacaaggtaagctctcagacgatcatagccccgagatag

SEQ ID NO: 5417 - DNA, 177 bp, BradyrhizobiumColbertium
gtgatccgccggattgacctggaggccgaggacaggcttgcggcagcagccgcccttgggctgacagtcaatgcgctgacggtgcggctgcatcgcgcacgcggccagctcaggcagcgattgctcgagatgtgccgctcctgccgcgaggactctttcctgcggtgcggttgctag

SEQ ID NO: 5418 - DNA, 618 bp, BradyrhizobiumColbertium
gtgataggtcgggccatttcaaatcgcgccctcacctacgtcgtgaagcaggctcaccgcagctcgttcgcaccgctccttggtgcggtctcgtttgccgcgacagtcacgatgagcctgccggtcgagcttatcgtcgttgcgggcacgctggcctcacgacgcgcgtgggtcggaattgccgtctgggctgcggcgggcagcgcccttgcggccaccggcctttattttgcattccatcatctcgggtggagtctcctggccaaaagctatccggaccttgcgctcacccaggcttggcgacaggcaactgtctttctctcgcaatatgggacggtggcgatattcgccgtgatggcgcttccgctgcctgtgcccaaacttgccctgttggcggtcgctggaatctaccgcctgccggttctccacgtctccctggcaattttctcgggcaagctcatcaagtacatcttgtatgcctatctcgccctgcggtttcctgggttctttcaacgcttggcacatcgcggccaccaatccgacgccccacagggagtggggttaagtcgcagcgaagtgcctgcacattcgagagttcgtcgaaagctgatcttctag

SEQ ID NO: 5419 - DNA, 492 bp, BradyrhizobiumColbertium
atgtcaaaccacttctcgaagatcgcaatccctgcagccatcgccgcaacgatcgctctctcctttggcgccgcactggctcagtcccaacagaccggcacccaaccgacccaagcccaacccggccagtcctcgggggcagcgaccgaccaaccgaacactgggaccaattccatgccgatgcagggcatggagcacggtcgcatgatgcgcgaccagggtcagaaaatgatgcacaacggccagtcccagactggcaatcagccgtcgaccacgcaagctcagcccggccagccagggacagcaaccgatcaacagacgaccggaaccacttccacgccgcaaggcatggagcacggccgcatgatgcgggaccagggccagaagatgatgcagaatgagaagaacatggagcatggccagatggggactcccccctgcggaccggggcagacccaaacccagacgacccagaactccggctgcaaatag

SEQ ID NO: 5420 - DNA, 900 bp, BradyrhizobiumColbertium
atgaccgacgataatttctcgcaaaggctcctgtccgaccacggttcgcaccgcgaggctgcggcagccggcgcagcgcagagctcagcatcgtacatcctgcccgccctcgaccaagacttcttgttgggcgattcgatgcgcggcgtgcggtttctgctcgaatacgcgaaggccgaagaagcgttgcgcaactggggcgtacgatcgaccatcgtggtctttggatcagcgcgcgttcgacagaacgggcagggaagacacgccgactggtatgaacaagctcgccaattcgggttgatagcgtcgcaacgtggcggcgcgctgaccgacaatggcggcgtgcgcgacaacgtgattgcgaccggcggcggtcccggcttgatggaagcggccaatcgcggcgcgcacgacgctggcgccccctcgatcggcttcaatatcagacttccgcgggagcaagcgccaaacggttactcgactcccgaactgaccttccaattccactattttgcgatgcgcaagatgcatttggcaatgcgcgccaacgccttggtcgcctttcccggcggctttggcacgttcgacgaactctttgaaattctcacgctccgtcagaccggaaagtcgccgccaatcccgatcgtcctgtttgacgagaagtactggcgcgcggcggtcaacttcgatgcgctgatcgccagtggcaccgtcgacaagtcggactgcacgctgtttcgttttgccgaaaatgccgaggagatttggaataagttgctgtcttgcgggttggacgtgcctggactgtcgtgcgcggcgtcgcgttaccgtcacctgctcgatggccaatcgccaacttcggccgcgacagtcgcccgcccctcacctaggtccgagtag

SEQ ID NO: 5421 - DNA, 978 bp, BradyrhizobiumColbertium
atggaagcacggaacaaccatacaacgctgctggaccatcttcgccgtcaaggcgtgtcgcggcgcgattttttgaactggtgcgcctacacggcttcgattcttgccctcccgccgagtgcaagccaggcgatcgcacaagcgcttgcgaccaagcctcgccccagcgtcatctggctctccgtccaggaatgcaccggctgcagcgagtcgattctgcgatcgttcgagccgacgctcgaaagcctgatgttcgatcagttctctctcgactatcatcatgtgctgcaggcggccgcaggaaacgccgccgaacaggcgcgcgacagggcgattgagcaaaacttcggcaaatacgtgcttgtggttgacggcggaattccgcttgatcgggatggatattactcgacaaccggcggaaagagcggacgcgatctcgtgcggggtgcagcaaaaggagcggcgctcatcattgcggtcggcacttgcgccacttatggggggatccctgcagcctcgcccaacccgaccggagcaggcggagttcacgatgccctgcgcgagctcatcgacgccaaggacgtcgcggctcccatcatcaacgttccggggtgtccgccgatcccggaggtgatgaccggagttgtggtttattttctcacgtatgggaaaccgcctgatctcgacaatctgggacgcccccttccgtttttcgggcggaccgttcacgacgattgtccgagactgcccttcttcaatcaggggctgttcgccaagagctttgatgatgaaggcgcgcagaagggcttttgcctgaaagatcttggttgcaagggaccgacgacgttcaacgcatgcacgacggtgaagtggaaccagaagaccagcttcccgatgttctcgggccacggctgcctcggctgtgcccaaccgaaattctgggatcgcgagggcggcttctatggcaagctcttctaa

SEQ ID NO: 5422 - DNA, 1794 bp, BradyrhizobiumColbertium
atggcaagctcttctaagaaggccggcgaaaagtccacggctgcggccaagaccgcgcccggctcgcagcctcggcggctcatcgtcgaccccgttacgcgaatcgaggggcaccttcggatcgaagcggagacggatgctcagggcgtgatcacccgcgcatccagctcaggcacgatggtgcgcggcatcgaattgatcctgaagggacgtgatcccagggatgcgtgggcgtttacacagcgtttctgcggcgtctgcacggtcgtccacagcatcgcctcgatccgggctgtcgaatacgcactcggctatgtgatcccggagaatgcgcagctcatccgcaatctgatgattgccgcgcaatatgtgcatgaccacgtcatgcatttctaccatctgcatgcgctcgattgggtcgacgtggtttccgctctcaaggcagatccggccgcgacttccagactgcagatgagcttgagcccttggccgaacaactcgccggcgtatttcggcggagttcagcagaagttgaaaggttttgtggagggtggccagcttggaatcttcgcgaatgggtactggggtcatcccgagtacaaacttccgccggaggtgaatctgctcgcggtcgcgcactatctggaggcgttggcctggcagcgcgacgtggtcaagattcacgccatcttcggcgggaaaaacccccaccccaattttgtcgtcggcggtgtcccctgtgcgatttctgaaacctcgcatgcaaccgcggtgaatgcagaaaatctgcgtctcgtcggccaggtcatcagcaagatgcgggagttcgtcgaccaggtctacttgcccgacacgctcgcgatcgccggattctacaaggactggacaacgcgaggcgaaggcgtcggcaatttcctgtcctatggtgaatttccgaccggggtaggtgccgccgagcgagcgacattgcagtttcccgccggggtcatcatcaacagggacctttcgaagatacagccggtcgactttgaggatccgaccgagattcaggaattcgtcgcccattcctggtacagctattcggcaggcaagcaggtcggtttgcacccctacgacggcgaaacgaagctcgattatacgggaccgaagcccccttacgagcagctcgatattgaccagtcctattcatggatcaagtcgcctcgatggaagggtctgccggtcgaagtcgggccgcttgcgcgtgttctgattctctatgcaagcggagaggtgcggacgcgaggcctcgtcgaccacagcctcggacggttgggacttccgatctccgccctgttctctacgctcggccgcgtcgctgcccgcaccatcgagaccaaattgatcgccgacatgatgccgggcatgtacgatgcgctgatggccaacatcacgcgtggcgatcttcgcaccttcgatgatgtgctgttcgatcccacgacctggccgaagaaaacccgcggcgtgggcatgatggaagcgcctcgcggcgcactggctcattggctcacgatcgaggagggacggatcggcaactatcaggccgtcgtccccagcacttggaatgccggcccccgcgatgccgcagggcgagaggggccctacgaggcggcgttacgcggccacaagttacaggatgcttcccgtcccttggagatcttgcgcacgatccacagtttcgatccgtgtctggcctgcgccgttcatgtcgtcgaccctaacggcgaagaactggttcgcgtgaaggtgctctaa

SEQ ID NO: 5423 - DNA, 144 bp, BradyrhizobiumColbertium
atgcggctggtgcgcgcggacccgcaagcggccacgttcgatgcaatagttgtcgatcaagtcgccatagccattcccagggcgggcgaggacaggggacatttgccaaccaagcagagtcaggacgaatatggcgaccgatga

SEQ ID NO: 5424 - DNA, 291 bp, BradyrhizobiumColbertium
atggcggccttacatgatgcggtcggaatcacgacggcacaggagccggcttggctcgaccttctcgacgcagccgctcgcgcgctgcagcgtccttccggtcctgccgaagctgccaccaaggatccggtgacgttgctcaaggttcatgagctgcaatcatccaaacacgtggcgagcatgcgcgccgttgggctcgcgcttgcgcgcctcaatgcgaacctgtcggatcaacagcgccagaggcttgtcgaggggctcagaccgatcctggcctccatcccaccgtag

SEQ ID NO: 5425 - DNA, 243 bp, BradyrhizobiumColbertium
atgtgcctcgccatccccatgcgggtggatagaatcgacggattcctcgcgcaatgctccgtcaagggcgtttctcgcgaggtgaacctgttcctgctacaggaccaggacgtctcggtcggtgaccacgtcctggttcacctgggctatgcgatccagctcatcgacgagcgggaggccaagtccacctgggaagtcttcgacgccatgctggccgcaggggacagccactcgcatgcatga

SEQ ID NO: 5426 - DNA, 426 bp, BradyrhizobiumColbertium
atgcatgagctttcggtgtgctgggctctgatttccgaagtcgagcgcctcgcgcaggaggcgggcgaggacagcattgcgcatatcgcgatccgggtcggtgagctctcgggtacggacccgggcctgcttcttcgcgcgttcgaggtcgcgcgctcgggcacgaaggcggaacatgcgtatctcacgatcgagctctgcgatccgcgtgtcaaatgcacggagtgcggcctggaaaatgtgacacgtcccaatcgcttgctttgcgcgttctgcggttcatttcgggtaaaggtcatcggcggcgacgaattgtcgagcgcggcggtcgaatttgccgcaaccggcttccccggcacctcggatccaccagtagccggcggaccagggaaactgaacacggagagggaggcgccgcatgtgtag

SEQ ID NO: 5427 - DNA, 807 bp, BradyrhizobiumColbertium
atgtgtagccattgcggctgcgccgccaataacaagcaccggcttcatctgccacataggggttcggaagatggcgcaattgcgtcggtacacgggcttgcccacgaggaaggcgtgatccgcaatattctcgccgccaacgatcggatcgccagccacaaccggcagcatttcgatgagagcggtctgcttgcgatcaatttgatgtcctcgcccggatccggcaaaacctcgcttctcgaagcaacaattgatgctctcggccccgaactcggtttcgccgtcatcgagggcgaccttgaaaccgagaacgatgctgcccggatccgagcaaagggggtccccgccctccagattacgaccggcggcgcctgtcatctcgatgcgaccatggtgcatcacgggctccatgagctcgatctgaacggcgtcgacgttttgttcattgagaatgtgggcaatctggtatgccccgcttcattcgatcttggagcgcactgcaatgttacgctcttgtcggccacggaaggtgacgacaagccggccaaatatccgatcatcttccgcaagagcgatctcgtgatgctcacgaaatcggatcttttgccgtacctggacaactttcaggtggatcgagcagcagcaacgctcaaggcatcaggttacgacggtccgcttctgagaacgtcggctgccaagtcggccgatgtgggcgaatggctggcgtggctccgccagcggcttgccgatcatcgcgccgggctattcctcaacccaaccacctcggttgaagcaggagaggcttga

SEQ ID NO: 5428 - DNA, 1134 bp, BradyrhizobiumColbertium
atgagctcgcctgctcgcatttggctggaccggatcaaggacctcccgctcgatcggccggttcgaatcctcaacgtctgcggtggccacgagcggacgattgcgacctcaggcatcagaagcctgcttccacccgcggtgcagctgattccgggacccggatgcccggtttgcgtctgcccggaagaggatgtcttccatgctatccaactgtcgctgacaaattccgtcatcctggttgcgttcggcgatatgctgcgcgtccccgtcaatggaccgaaggcccagccgcgctcccttgagcaggcaatcgcgctcggcgcggatgttcgccccatcgcgagtccgagcgaagctgccgctattgccagggagaatccgcgcaagacggtggttttcttcgtcgccggctttgaaaccacgcttgctcccgtcgcggcgctgatcgcgatgggccttccgccgaatcttaagctcctgatttccgggcggctgacatggccagcggtcgccatgctccttcagtccgaagagccgggatttgatgctttgatcgcgccggggcacgtcgcaaccgtcatgggccccgaggaatgggagtttgtggttcgcggtcaccacatgcccaccgcgatcgcgggcttcacggctgacgccttgctggcagccacctattcgacgcttcggcaacggctcgaaggccggtactttcttgacaactgctatcccaagagcgtcaggcccggcggcaacgccgtcgcacgccgctatcttaccgaaaccctggaggtgacggacgccgcctggcgcggcatcggcgtcatcccccggtccggtttccgcctcaggcccgaatatgccgaccacgatgcaaggatagaatttccgttggacgaagcaacagaacgccctcgtcgcggcgaaatgccaccaggttgcgattgcgcgcgggtcattctcggcaaagtcctgccaaccgattgccgattgtacggttctggctgcgcgcccgaatcgccgataggtccttgcatggtgtcggacgaaggggcctgccaggtgtggtggactgccggctaccgcagcggccgccatgcctttgggggcggcggcgcggtccgcgcagcaaggtga

SEQ ID NO: 5429 - DNA, 426 bp, BradyrhizobiumColbertium
gtgatccggtacctgcgcgactggccgcaaccgagcgcaaacctggcgatcgtcgacggcgggacgctgagcttcaatctgctgccgatcattgagaccgccggtcgtctcatcgtcatcgatgctgcgatgatcggagatgaggccggggcggttcgctgcctggttggtgacgagctcgacgcgttcctcggcacctcgaagcataccgcgcacgagatcgggctaaaggaactgttcgatatggcccggatggaggaccttctgccgcgccggcgcgcgctgatcggtattcatcctcaatgcatcgattggggcgaaggcctgagcgaccgagtcgcgacagcggtgccgttggctgccggattggtgctgcgcctggctcgcaaatggatctgcgccgatcaggtctcggtgcccggatga

SEQ ID NO: 5430 - DNA, 2304 bp, BradyrhizobiumColbertium
atggatctgcgccgatcaggtctcggtgcccggatgaacaggaatgagaccatcgaaacgcgcagcgagacacggctgttcgaaatcgtcggtcgtgtccagggtgtcggatttcgaccgttcgtgaagcgtctcgcggacgctcacgagatcgtgggctgggtgaagaacgaggcaagccacgtgtccgtgcttgccagcggcgagcctgacgcgctcgaccgctttgcggccggcctgatcgcccaaaggccaccgttggcgcggccgatgattaggtcggtcagcccgcgaccaccagccgattgttgcgaattttcgatcctcgaaagcaaacctggttcgacccgcgatgcggagcttccgcccgatttgttcctctgcgacgactgtctcgccgagatagatgatccatcagagcgcaggtaccgctatcctttcaccaattgcacccaatgcggcccgcgatacaccattatcaccgccctgccctacgaccgccccaacacctcgatggcgggcttcgaactgtgccgaaactgccggcacgagtttgagaaccagcaggaccgccggtttcacgcgcagcctttggcgtgtcccgaatgcggcccgaaattggtcttcaggaaagcgaatggcgaggagatctccggcagcggacaagcgcttgccgccgctgtcgaggccttgagctacggcctgacgctggccgttcgcggtatcggcgggtaccacctgatatgtgatgcgacgaatgagaccgcggtgctcaggcttcgcaacaggaagggacggcctgacaagccgcttgccgtgatggtgccgggcggcaacaaccggcatcgatttgccagaacgatcgctgatcttgatgaaatcgaagaagcggccctgtgcgaccccgttcggcccatcgtgctggtgcggcggcgcgcggacgcgccgatcgcggccgccgttgcgcctggccttggcgaggtcgggttgatgttgccctatagccccttgcaccacctgatcttgagcgaatttgctggtgtgctggtcgcaacgagcggcaacatcagcggcgaacccgtgatcaccgatccggacgaagccgagaagcggctcgctcgctgctgcgacgccttcctgcaccatgatcgtcctatccagcgccctgccgacgatccggtctggcgggtgatgggcgggcgggccagatcgatcaggcttggccgcggctcggcacccatcaccctgcacaactcttatagggcggctgacgccgtgctcgcctgcggagggcaactcaaggccacggtggcgctcgggctaggcgaccgggtcgtcgtgtctccacacattggggacatgggatccttgcgctcacagacaacgctggaacaggttgccgacgatcttcaaagactttatgcgaccgatgcaacatgcatccttcacgacgcgcatccggatttcacgacgacacggtgggccctgcggcaagacgtgcccacaaccgggatccagcaccatgtagcccatgcttctgcgctggccggggagcatggttgcagggagaaaatgctggtcttcacctgggacggtctggggcttgggtccgacggcaccttgtggggcggcgagaccttgttcggctcgcccggacattggcagagggtcggcagcctgcgtccgtttcggctcatcggcggcgaccgcgttgcactcgagccgtggcgcagcgcgtacacgctggcgctggaggcccatcatcactgggaatgcgttcatacggatgcagccgcctaccgccgcgcatgggctgccggggccggcatgatgtccagctcggtcggtcgattgttcgatgccgccgcagcaatggtgggcctcatcgagcactgcagttacgatggccaggcgccggcgctggttgagagcatgtcagatgaagtcagcatcgagcccgctctcccggtccgccccgaaggcaagatccggcggatcgactggactccacttgttccaatgctcgtggattcgtccttgtccgttcgcgagcggcttggacgcttccacggttcgttgtctgcaaccctggttcgcgaggccctgcatcatggcgcggccaatcgcaccaatatcatcggactgacaggcggcgtgttccagaacaagctgctcaccgagcatgcggcggccgctctgaccagccacggcttccaggttctcttgcatgaacgcataccgatgaatgacggtggactgagttatggccaggtcgttgaattttctgcgcggaaagccccatga

SEQ ID NO: 5431 - DNA, 1041 bp, BradyrhizobiumColbertium
atgaaacctggtgacgacaagcactgctcgcgcgacctgagccgcatttcgctggcgcacggcaatggcggcagaaggatgcgtgagctgattgaaggggtcttccgccgacatctccacaacgacctgttcgatacaaatgccgatgcagcgatcttaccgatgctgcccgccggcagttttccggccctgacctcggacggttttacggtggatccgctggagtttccaggtggcgacatcggaagtctggccatcaatggcaccgtcaatgacctcgcagtgtcgggggcagagccgctttacatcgcgctgaactgcttcatcgaagagggcttcgaacgggagcgcctcgagcgcctggtcgcatccatggccgccgcggcgcgggcctcctcggtcaaggtggtgacgggcgacaccaaagtcctccgcaacggcgagggtggcgggctttacctggcgacgaccggactggggtttcgcaaccctgccgtcgcccttggcctcgatcagatcctccccggcgaccgcatcattgtcagcggctcgatcggcgatcatggaacggccgtcctgctggcccgcaagcaatttggtctttcggggacgctgcagtcggactgcgccagtgttcttccgcttgctagatgcgccctaatgcagccgggtatccgattcatgcgcgacccgacccgcggcggactggcaagcgtcgcccacgagatcgttcgatcaacggccaaaagcgtgcgcctgctcgagcgcaagattccgctgcgcggtgaggtgcaggccgtctgcgatatgctcggctataatccgctctatctggcttgtgagggcaggatcgtggctgtcgctgacccgccttcagccgaacggctggtgcaggcttggcgcgacctgccgggcggagaagacgcagcagaaatcggcgtcgtgggcgaagacgggccttacgtcgtgttggaaacggagctcggcggcgaacggttggtcgaggagctcgattccgacccgctgccacgaatctgctga

SEQ ID NO: 5432 - DNA, 1395 bp, BradyrhizobiumColbertium
atgagcattgcgcgtacgtcaattcggttgctggccgtggctgtcgtggcggtttgctctgttcacgccggagcggcgcagacactcgaccaggcgctggctcaggcctaccgcaacaacgagacgctcaatgcagaacgcgccaatttgcgcgccacggacgaagaggtgccccaggcgctttccggttaccgcccgcgcatcgaagcgactgcggacggtggttctcgctacctcaacgaaaagggggccgatggcgcgcagcaaagctcgaccaccacgccgcgcggcgtcggggtgacggcgacacagtcgatcttcaacggattccagacagcaaaccggctgcgtgccgccgagaaccaggtgcttgccggccgcgaggcgctccgcgttatggagcagaccgtgctggtggatgccgccaccgcctatatggatgtgctgcgcgatgccgcgatccttgaactgcagaaacgcaatctcgacttgctaggtgagcaactgaatctggtccgtaaccggcaagcgagcggtgacttaaccactgccgacgtggcgcaagtggaagctcgccttgccgcggcgcggacggccgtgctcgcggcacaggcgacgtacaactcgtcgcgcgccacattcacgcgcataatcggcagcgagcccggcaaattgacgcccggccaacctgtggaccgctttgctcctgcgacgctcgaggccgccatcgcacttgcgcgcacccaacacccggccgttcttgccgccatgtacggcgtcgacatcgcccttcttcagaccaaaattgccgaaggggcgctgtacccgatggtgacgctggaaggcagtgtgaaacgccgctgggatgtcatgcccgaccagaatctgatatttccggcgacgagcaccgatgcgtcgatcatcagccgggtggtcattcccctctatcaggggggtagcgagtacgccaagatccgccaatcgaaggaaatgaccggtcagaaacgactgtcgcttgaagccgtacgcaagctcgcacgggccaccgtcgtgcaggcgtggagcacagtggctgccacgagggcgcaggtggattcggcgcaagctcaggtgaaggccgccgagttcgcactggaatccgttcggcgcgagttcggcgccggccagcgcagcacactcgaactgctcacggttcagcaagagctgctgaatgcgcggatcgctctcgtcctaactcagcgagagcgggtgacgtcctcctacgcgctgctcgcagccattggccggctcgctcccgacgttctcggattgccgacagaatcctatgatccgtccgtgcactatcaccaagtcagggattcctggttcggggtacgcacgcccgatggccgctga

SEQ ID NO: 5433 - DNA, 270 bp, BradyrhizobiumColbertium
atgacgggagctgaagtcatcgacgctgcgagggatgcgcttatgaccgttgcgttggtatcagcgccattgatgatcatcgggacaatcgttggcgttctcgtgtctttgctccaagcgctcacgcagatccaggaacagacgctgatctacgttcccaaaatcatcgcgaccttcctaactttgctgatagccctgccgtttatgtcggaccaaagccatcgccagtttctgcgcatgatggcccaaatcatggcgtcggcaaactga

SEQ ID NO: 5434 - DNA, 525 bp, BradyrhizobiumColbertium
atggcattcaagttcaaggaggtgttctcgagcgcgcaggccgcgctgagcgctgaccctgcccaagcgttagcgaccttccgagcgcaatcccgtctcggagacggcgttgacagcgccgtcgcgattcgccagttcagcgtccaggtcgacgagccggcgggcctcggcgggcaggacacagggccgaacccagtggagtacattttggctgccctgggctcttgtcaggaaatcacctaccgcctctatgccgacgcgctcggcattcccctcaatggcgtttcggttcagctttccggcaggattgacttgcgcggcttgttcgacgtcgaaggggacgttcggccgggttatcaaatcattgaagccgaggtaattttggacagtccggctcccgaagccgagttggcgcgcctgaaagaaatcgtcgaccgtcattgccccgtgctggacatcttacagaatccgaccccggtgcagctttcacttcgtgcggacccattgcggagcgcggctgagtga

SEQ ID NO: 5435 - DNA, 594 bp, BradyrhizobiumColbertium
atggcatacctggagaccgaggtgatagcggcgcaccggcacattcgccgccgcacggtggcatatgtgcttctcggcactttgctcgcgagttatttatcctatccgtatgtgaccctgtatcggcttgatcgggcactggaagccagcgatactcgcgtggttgcagaaatgatcgactggccgagcgttcggacgcagctgaaggcggacgttacgacgtcgctcgcaacgcaggcctatggcgcaagcgggccggaagcgattggcgccgctttcgcgctggccttaagtccatatgtattcgatcccgtagccgaccgcgtcatctcgccgtccggactcatcgcctggtattcggatgcacgaagatcgggccgatcgagcacgttgtgggaggcaacgagctacgcgttcttccgggccccgacgcgcttcttagtggcactgaggatgaacgagccgcaatatccgaatatcgaattcgagatgaaattgacgggtttaagatggcaggtcgaccacctggtctggccgcgcgcgagaggtatcgctgttcccgggtccggcgcatccggtccgacgacagaatga

SEQ ID NO: 5436 - DNA, 726 bp, BradyrhizobiumColbertium
gtggttgcgaatgtgcaggccgcgagcgataagttacgcgacgtcgcggtggatcgcgcgcgcacgtttctgatgctgatggtgcttctgcaccactccgtgattgcctacacctatttcggtcataccgacgctaagtcgtggatcggctttgatatcgtcgtgctcgccaccgacagcttcttcatggcgacgttctttttcctgtcaggcctgttcgtatggccgagcctcgcccacaaagagctgcaggtcttcctgcgcgaccggctatttcggcttggcctgccgtttgtgatcggcgtactcaccatcattccgattgcgtatttcgcgatcgaactgcgccggcgcccagacgcgagctttctttccttctggtggaacacaatcacagtcgggccatggccaagcggaccgatctggttcatctgggtgctgctcgcttttgacttggcagcttgtttcctgtttcatctctcacccaaactgctcgatcctatcaaccggctggcggtgcgcggctataggcgaccgaccgaattcttcattctggtgcttgctgttacggcggtcgtctacattccgatgcggctctattttggagcgggacgctggttgagattggaccgctctcgctgcaggccagccgcgttctactatatcctgcctacttcctcatcggggcgggcgtgggcgccgcgaacctcgatcgcggtctgctaa

SEQ ID NO: 5437 - DNA, 465 bp, BradyrhizobiumColbertium
gtgggcgccgcgaacctcgatcgcggtctgctaagtgcggatggccggctcgccaaaagcggccggggctggatcgtcgcagcgctcgtcccctactgtctgttgtgggtgcttatttacgtcaagcttgaaatcctcggaaatccggtatggctgccggattggtatgaggcgagctacggcctgttcttcgtgacgttcagtgcggccattctatttgcaatcttcggctactttctgaggttcaaacgcacgggctttagcgtgctagattggatgcaggcacatgcctatggcatgtttctggtgcactacccgatcgtgctctggatccaatactggctgtttgacttcgatgtccctgcgatcgccaaggccctgaccgcattcgtgttcacagttctgttgagctggggtgtaacggcggccttgcgaacaatcccgggagcgaagcgggtgctttag

SEQ ID NO: 5438 - DNA, 495 bp, BradyrhizobiumColbertium
gtgtcctcgaccaagaatataaccgagaagcgctacagcgaagcgatcaatcgcctcacgtgggagatcacggcgatttacgcctatttggaggagatccagcgagtatgggcacgagcgctcgggatcagcagatctcaatggatgatcctgatagcgatttccgatctggacgaggggagcggtgtcccggttaaaacggttgcggagattttgcatgtgaatgggtcctttgttacaacccaatccaatctgctcgaaaagatcaagctggtgcgacgacgaccttgtcgcatggacggccgggtcgtccggctcttcttgtcagacagagcgctcaagttgctggctcgcgaggccgataggcatcaagcggtgaccgattccgtgttcacggactttgaagaggccgggctcaacaaacttgtcgcccaactgacattgctcgaacggcggcttgagacggcaaagctaagagtgacgctcgagttgtaa

SEQ ID NO: 5439 - DNA, 114 bp, BradyrhizobiumColbertium
ttggtgctgctgacctgtgagcgtgttggcgacgcgcaagcagaggccaggatttcctatctgaagacgtcagtgcatactcacacccgctccttccttgcggtccttgaatga

SEQ ID NO: 5440 - DNA, 123 bp, BradyrhizobiumColbertium
gtggcactggaagcattgattgatttgcgtgcttccgtgcccacccatgcgcatcgaagcgaccgcaaagtgttcggtgtaatggctcggcggggcctgatggcattgcgcacagatctttga

SEQ ID NO: 5441 - DNA, 708 bp, BradyrhizobiumColbertium
atgaatcagaccgaacggcagatcgccgaggcagtgctctccgtcatcctcttcctggtgccggcgttcttattccacaccgcgccgcggttcgccggaagcttgatgggcttcgtgctcggggtggccgccgccactttgatggtttctcttctgatctatccgctggtcaaatatacggcttggatcaagcgatgggtgacccggatcgtgtcactgcgcgcgttgctgacgtttcacgtctatgctggtgtcttcggcgcgtttctggccatcttgcacaccggccacaaataccagagccaactcggcatcgcgctcctcgtcgtcatgttgatcgtggtggcgaccggattcgtaggccgatattacctaccgcagacgtctctcgagctgaaggaggcggagtcgcacctcggcacacttcgcgcgacctacaatcaggcagcggaagccgttgccgagcgccaagtccttgaggacgccgctgccgccaatatcagcgcgccagccctgcagaacgtctcgatgctgcaggtcgtcgaaggtatcgccgatctcgaatacgccatcggctcgcgcgagatcttgaagagagtgtccatgcgctggatcgtggcgcatgtcgtggccgcaatcctcatgtacaccttgctcgtcctgcacatcgcaggagaaatctactacggcctacggtggctgtcgtga

SEQ ID NO: 5442 - DNA, 1782 bp, BradyrhizobiumColbertium
atgggccacggcggcatgggcgggatgggagaaatgatgggcggccgtccgcgcaaggagttttatccgtcgctgatggatatgccgagcctgacagccgagcagcgccagcgcatcgaatctcaagcgcgtgcggagctcaacaccgccaccgaagacatcgccagcgccgaagcggcgcttcgccaggccaatgcgagggctgattccgccggcgcggagcaggccacctcgcggcttcgcgatgcgctgaaccaggccaagagcgcggcaaccacgcttcgggcgctttcggaaggaaagcccccacagcagatcgcgctggattggttcaggacacaattgaatcttcccgcgctgacagcttcgcacgatgcggggcttggactgtcgtggtttcatgtcgtcacaatggcggtgctggcgacattcaccgcggccatgattctcgtgtatgtcctgcgtctgcgccgtgccaacgcgttggtgcaaagattgacgagcgctcccgctctcgccacggcatctggcagggtcgctacgccggcaccgccaagtgcgccgccgcccaccacgccgcctcctgccgcaccacctcctgccgcatctccgggtacgcctccatcgacccgggcgggtgaagcgggcgcgtcgagctcggcagttgcggcggcaagtcctgccgccgcatcctcgccctggaaaggcaagctacaggtcgccggcatctttcgcgaaacaaaagatgtgaaaacctttcggctgaagaatccagacggcgggccaattcccttcaccttcgtgccgggacagttccttacctataccgcggagattgatggcaagctcgtgcggcgctcatatacaattgcgtcgtcggccgcacagaccgcctatgtggaaacgaccatcaagcgggaggagccgggcatcttctcggattacatgcatgacaagatcaagcaaggcgatctgattgaagtcgctgcgccctttggcgcgtttacgttcagaggacaggaagcagacagcgtcgtcctgatcggtggcggggtgggaatcacccctttgatggctgccatacgctatctgttcgataccgcctggcggggcgacatctttctggtctatggcgtccagaccaccgagcacttcatctttcgcgacgagctcgagtatctgcaacgccgcatgccgaacctgcacgtgatcgcgaccatggcgcgtgcagagggcacctcctggatggggccgcaaggccacgtgaccaaggagctcctgacccagtcggtcccggacatcatcaaacggcgcatccatctctgcggtcctcccggcatgatggaggccatgaagaagctcctagcgacggtcggggtgccgacggaacaggtcaagaccgaggcgttcggaccggcacgcggtgccgtgcccccgccgggggtgacgcaggtggtttcatccgagccggccgctgcggcggcgggcgcgccgcccgccgcgcttgccatcggaccggcaacggcaaccattcggtttgccaaggccgacaaagtcgtagccctaccgccagacaagaccgtgctcgaggtcgccgagtccaatggagtgtcgatcgattacgcctgccgcgtcggggtttgcgggacctgcaagacgaaattgctcgaaggccaggtgacgatggaggtggacgatgccctgacgcccgaggacaaatccaacaacatcattctcgcctgccaggccaagtccgtcggcaatctggttgtcgaggcttga

SEQ ID NO: 5443 - DNA, 117 bp, BradyrhizobiumColbertium
atgtccgacaaactgctgcaaagccatccaatcatcgaactcatgcaatgcaacatgcttgtgaacggaacgtttgccctccgtcgccagaccgtcaatcaaagcatccagccgtga

SEQ ID NO: 5444 - DNA, 2307 bp, BradyrhizobiumColbertium
gtggtcggctgctcgctcgggcccgcccggctttggttcacggctggttatggcatcatcaacgaagtctactggccgaggatcgacattccgcagattcgggacctcggcttcatcggcgccgacgaccagggattttgggtcgaggtcaagcggatgggtcaatatcagctgcgatcggtcgcaccaggcgttcccgcctacgagatcacccattcccattcgcggttcagcttgcggcttcgaatcacgcccgacccgctgcgcgatgtgcttgtgatcgaatgtcgccttgagagtgacgatccggcgttgcgaatctatgtgctggttgccccccatctcggcgccaccggctatggcaatcgcgccgtcatcgccgaacatcgcggacggcgctttctgtcggcggaacgggcgccgtttgcgatggcccttgctgccgtggacgaacaccagcaggacgcgctcatgagagcgagcgcggggtatgtcggcgccagcgatggttggcaggattttgcccacaatggcaggatggcgtgggagtatccggcggccggccccggtaacgtcgcgctgttggctgagttgcgaccattcagcgtgctcgcgttggccttcgcaagcagccagggtgcggccgcgacattggccgtgtcatcactgatgcagccgttcgatcgcgttttggacgcgcaaagcgccgattggagcgcctggcaccgcagctgcgatgaatgttgcgcccgaccggtgggcgctccggctcatttgcaggatcagtttgttacatccgtcacggttttgcgcacacatctcgataagacctacccgggcgcgatggtggcgagcctgagcgtgccctggggcgacacgggcaacgagcggagcggttatcatttggtctggcctcgcgatctcgtcgagtgcgccacggcgctacttgccttcggaggggaggcggaagcgcgcaacaccctgcgctacctgatcgcaacacaaaatgtggaaggacactggcagcaaaaccaatggttgggcggcgaaccctattggcgcggggtccaactcgacgaagcggcgtatccggttctcttggccgctctgctcgccgaccgggatgccttaggaggaatcgagccccacgacatgatccgtcgcgcgctcggctatatcgcccgggtcggtccctcgacggagcaggaccgctgggaagaaaatagcggactgaacgcgttcacccttgccacctgcatcgcggcgcttgtcgcgggcggctcgctgctcgagcctacggcgcgccagtgggcgacggcgctggcagacttctggaacgcccatctggaagactggctcaccgcctgcggctccgatctggcaaaacagttcgccattgccggctattatgtccgcacggcgccgcgatcagtgctttccgaaggccaggcggcgctcgatgaactcgtgcccattcgcaaccgaagcgatggggtgcgaatgcaggcgagcgaacaagtcagcacggacttcttgcgcctggtccgctttggtctcagggacgccgctgatccgctggtcctggatacgctcaaggtggtggaccggctcttgagggtggaaacaccctccggttcggtctggcgccgctataacggcgatggctacggtgagtacgacgatggccggccgtatgatggcgccggcagaggccggccctggccgctgctggccggggaacgaggtcattacgcggtgagcgccggcgatgatcccttgccgatgctcgagacgatggccgcgtcagccagccccggtggcatgatccccgaacagatctgggacgcgtcgccagttcctgagcggcgactgtatcccggccgcccaaccgggtcggcgatgcccctcgcgtgggcgcatgcggaatttgtcaagcttgccgtctcccgcaaccacggtcggccattcgaccgtccggaggccgtctggaagcgatacggtggaaggaagaagatgtccccgtacgcgttctggtggccccacgcgcaaatccggtccttggccgcgggccgtcgcctggtcattgccctgcctcgggccggaatggtgcactgcggcgtgaatggatggcgagaggtccgcgatctcgacgcactcgatagcggtctcggcttctgggtggcggaactcgacaccagcgggatgaacagcggcgaaagcatcgatttcaccatccgctggcaggaggatggttgggaacgggtcgaccattgcatcgatgtcgtatctgctggcgaggaagtgtga

SEQ ID NO: 5445 - DNA, 765 bp, BradyrhizobiumColbertium
atgaaccttagtcgtcgaaacaatccgctatccgccccggcaatgacgtgccggctcgccgcggtcgccctcgtgggcgtgctgtcgtcgcaactggtcgtaacgtctgtattcgcggcaccgccgtccgttcgcatggcgatgatggacgacaaggaaatgggctcgatgggaggccaatccaacaactcgatgtccggcatgggtggaatgtcgggaagcccgtcaggggggtatggggggatgtccggcgcttcgtccggcggcatgggcggcggttgctgcatgggatcgatggggcaggcgcccggatctggctcggccggtgcatcgggcatgtcgatgcaaaccagcctgccggggtttcccggctcatcgcatatctatcacgtcggcgcgacgggattttacctcgaatatgccgataagctcggcctttccacccagcagaggaccggcctcaacgatgtcaagcagcgcgccctcgtcgaccagtcaaatcagcagcggaagatcgacgaagcagagcaggccctctggttgctgacggcggcagaccagccggatgccgcgacggtcgaggtgaagattcgcgaggtcgaaaagttgaaggcggaccaaaggctgggctttattcgcgccgtgggcgaggccgccaaactcctgaccgatgatcagcgcaagatggtgctggggatggtgccgatgcccggctctacggccgcacctgcgtcggcgtcgaaaccgatgaatatgggcaaatag

SEQ ID NO: 5446 - DNA, 1314 bp, BradyrhizobiumColbertium
atgcgcgtcttgctcccaggttatcgcgatgtcgtcagccaactacaggcagtcgagatcgttggacgtctgccgtcctgcggcgacatcccgggctgcgatcttgcacgcagcatcacgggcgaccttcttccggtttatgtgctgctctgtccgcagcttttcgagcgcgacggcggtctctacggggacgcaacgggggccgactggaaggacaatgatctccgttttgcgaggctgggccttgccgccgcacaaatcgcatccggcgcaggcgatccaaactgggtaccggacctgctgcatctcaacgactggacctcggcgctggcgcccgcctatctcgcctggagcggccgatcgacaccgagcgtgctgaccatccataatcttgcgcatcgcggcttgttttcgcggcatcgcttggatcggctcggcattcctcaggcagcattcgacatcaatggcgtcgagttctgtggtgatatttcctttctcaaagcgggcatcttttacgcatcccatattacgaccgtaagttcgacctatgcgcgagaaatcgtgacgcctgagcatggctgcggcttgcacgggctgctcagaggaaagctcgatcaggggcgcttgaccggcatcatcaacggcatcgacgaaagctgggaccctctgacggacccgcacttggcgcgaccgttcagtccagatgactggaagggaaaggacgtcaatgcgcaagcgctaaggaggaccttcggcttggcggtgtcgcgcggcccgctgtttgcgatcgtctcgcggctggtccaccagaaaggtctcgatattgcaatcgaagccatcgagacgatcgtgcggcagggcggccagatcgtcgtcaccggcaagggcgaaagcgaggtcgagcagtcactctgccagatggccaagcgatatccgggcaagctcggcatcaagattggatacgaggaaaagactgcgcggcagatgctggcgggaagcgactttctgctgatgccctcgcgcttcgagccatgcggattgacgcagatgtacgcgcaacgcttcggctcgttgcccgttgcccatcgaaccggggggctcgccgacacgattcaggacggcgtcaccggcctgcttttcggtgacctctcccttggcagcttcctgggagcgatctaccgctcgctcgacatctatcattcacctcggcggctgcgggagatgcggacggccgcgatggcgcgccccgccggctggaatgatgccgcggcaaactatgcgaacatctacgattcaaccctctcggtcgcctga

SEQ ID NO: 5447 - DNA, 306 bp, BradyrhizobiumColbertium
atgagagaccaactgcatgccttcgcgtccggacagcgccgcaacgacatcagccagcagacgcgcaacatcgcgcgcgcaatgagcggttcgcaacgcgctgttgacgagcgcgccaccgcggtctgccctttccgtccggacgtggtgatccgcgtcggtgatgacgcggccgagacccacgcgttccatcgcgctcggaatttcgccaaaagcgacggcaacggctggaatcatggtttgttgatgcgggaaattgcacgcaaactttccgacgccgctgagggcgtgtgtcctcggcgttag

SEQ ID NO: 5448 - DNA, 276 bp, BradyrhizobiumColbertium
gtgcttttcgaggcgaattgcgctgcctgccacggcctcaaagccgcgggaaccgacaaaggcccgccgctggttcacgagatctacaatcccggccatcactccgatgccgccttcttcttcgcggcccagcgcggcgtgcgtcagcaccattggccctacggcaacatgccgccgcaaccccaggtcagtgagcagcagatcacgtcaatcgtgcagtatgtaagagaactgcaggtcgcaaacggtatcccgtatcgacctcaccggatgtag

SEQ ID NO: 5449 - DNA, 216 bp, BradyrhizobiumColbertium
atgagcgagttcgacaagcgcactcagactaacatgaacgtggtgctcgaggacgtctgccgggacttgtccaagcatggcggggatcatgaaagccgcaaatacattgcggagcatttgatcgaagcggcgagcgccgggaaaaccacgctgggcgatctcgaagcaatagcgcggcgagcgttgctggatctgaccaaacggaagtcggcctaa

SEQ ID NO: 5450 - DNA, 675 bp, BradyrhizobiumColbertium
atgagcgacgccgcacctgcctatggcctgtggagccttgtgatcgtcaacgcggccatcttcattttctttgcctatacctttttcaagccgcagacgccgagggactggcgctcgttcagcgccttcagtgcctttctggtggcactgttcgcggagatgtacggctttccgctgacgatctacttcttttcggggtggctgcagtcgcgatttcctgatatcgactggttctcccatgacgccggtcacctcctggagatgatgttcggctggaaggccaatccccatgcgggtccatttcatatcctgagcttcgtgttcatcggcggggggttcattctgatctccgccgcctggaaggtgctctacgatgcgcagcgggcgcggtctctcgccacgaccgggccttacagttatgtgcggcacccgcaatatgttggattcatcctggtgatgttcggtttcctgctgcaatggccgaccatccttacgctcgccatgtttccggtgctcacagtgatgtacgtcaggctggcacggaccgaggagcaggatgcgagaagagagtttggcgacgcatatgtgagatatgcagccgaggtgcctggttttattccgaagctcagcaggatcttgggtcaggagtcccgcggagggtatcgccatggttag

SEQ ID NO: 5451 - DNA, 180 bp, BradyrhizobiumColbertium
ttgacttttcgacgcactcggagcggcgaatattttccttcaccgcgtcgattttcctcttttacggccgtccctgccggcgcggaaaccctttcggacgcactcgtgaacgcctaccagtcgaatccgcagttgaatgcagcgcgggcgcgccagcgcgcgaccgacgagaatgtgtga

SEQ ID NO: 5452 - DNA, 159 bp, BradyrhizobiumColbertium
atggtctcctcgacgctgctgacgctgattgtgatcccggcgatcttcggactgatcaagggctttggcttgcctttgagcgagcccggtggccctcaacgccctgtgcgactgcaagcgacaaccaaaagggtacgtattccggagccggccgaatga

SEQ ID NO: 5453 - DNA, 432 bp, BradyrhizobiumColbertium
atgcggccgagcaccggcaatttcgcggcgggccccgcggcccgtcccggcggcggcagcttcgtaggcggtttggcatcccgtcccggagtcgcaccgtcctatagcgggtctcgccacgttgcgacgggcggcaactggcatggaggcggcggccgccactggcaccgtcatcatcgccgcggcggcttctggcccggcttcgcggctggcgccgcaatcggaggaatcggctcgtacgcttattacggcagcggctacggctattacgatgatccctattactacggctattatgacgaaccgtcggttgcggtggtgcaggacggcggtggcgactccgtggcctattgctcccggcgcttcaagtcctacgacccggcttcgggcacctatctcggctatgacggcaagcggcatccctgcccgtaa

SEQ ID NO: 5454 - DNA, 423 bp, BradyrhizobiumColbertium
atgccgcgtgttctcgtggttgatgacgatccgatggtcggtgcgaccatcgaggtcctcctccaacgtcagggcttcgacgtcacgctggccgatggcggcgaaaccgggctggcggcgctcgaatcgcaggtgttcgacgtgatgctggtcgacatcttcatgccgcatatgcgcggcttcgaatccatccgcatctttcacgagcgcgcgccgaccactccgctgatcgcgatgtctggctacgcctttgcctcgtccgcctcgccttctcccgatttcctgcgcatggccctggaactcggcgcaacgcgctgcctgcgcaagccgttcacgccggaagcgctgctgacgacgatccgggaatgcctcgccggcgcgggcgagagcgcgcagccgaaggacaagaaagaggccccttga

SEQ ID NO: 5455 - DNA, 2241 bp, BradyrhizobiumColbertium
ttgattccaacgcagcgcgtcattctgggtgccggacttgccatcctcctgatcatcaccgcggcctcgatcgctctcgacgtcaagtcgcggtccgacgcggcacgggtcaatcatacgatccaggtgcagaagaagatttccgatctgcgcgtgctgttgcgccgcgccgagagcgccgcgcgcggctttgagctttatcgcacgccgggcttcaacgatgagttccggacagtgcaggccaggatcgcgcctgccctcgccgagctcaagcgcgacgtgcgcgacaatccggaccatgtcgcgctgctggagggcaccgagccgctggcgctgcgccggatcgagatcgccgccacagcgatgcgcctgcgcgccgagaacgacgaggccggcattgccgcgctcatcagcaaggccgagggccgcggcctcatggacaccgtgatgggcaatctcgaccgtctgggtgcccaggaagaacgcctgctcaccgagcgcacccaggattcacgccgcaccggcatcgtgctgctcggcatcgacgtcgccggcgccctgctcatcctgctgctcgtcgcgctggtcttgcgcgaaagccggcgcgccacgggcgagcttcagagctcgctggcgcagacgcaagccgcgaaggcggcgctcgaggctgcggtggccgagcggaccgagcacctcgtcaccgcgcatgacgagctccgcctgtcggtcaacgtgctccagagcacgtttcgcagcatggcggaggcggtgctcgtcatagacgccgagggcaccgtgctcctctccaatccggcggccgagcgcatgctgctgcatcgcaccggcatgagcgtgagcaatctgcgcgcgctgtccgacgtgtttcacggcgacggcgtcacgccgctcaagaccgacgaactgccatcggcgcgcgtgctgcgcggcgagcacttcgaagagctggagatgatcgtccgcccgcacagcggcaatcccacccgccatctcatgatcagcggccggccgatgcgggacgggcaaggcaacgtctccggcgcggtgctggtctatcacgatgcgacgacctcgcgcgagaccgagcggcagctgcaccagtcgcagaagctggatgcggtcggcaagctgaccggcggcgtcgcgcacgacttcaacaacatgctgaccgtgatctccggcaacaccgagacgctggtggagggcctgaaggaccagcccgagcttcagcgcacggcgcggctgatcgacgatgccgccgagcgctgcgccgagctgatccagcatctgctcgcgttcgcgcgcaagcagccgctcgagccgcgcaacgtcgagatcaacgccgcgatcgcggatatcgccaagctcctgcgccccaccctgggcgagcagatccagatcgagaccgtgctggaacaggggacgatgaagacgcacatcgatccgtccaggctcaccaacgccgtgctcaacatggcgatcaacgcccgcgacgccatgccgaacggcggcaagctattgctggagacgcaccgcgtcgtgctggacgaggcctatgcgcaggccaatgcggacgtgacgcccggcccctacgtgatgctcgcggtcagcgacaccggcaccggcatgccgcccgaggtgcagcagaaggcgttcgagccgttcttcaccaccaaggaggtcggcaagggatccggcctcggcctctccatggtctacggcttcgtcaagcagtccggcggccacatcaagatctacagcgaggaaggccacggcaccacgatcaagctctatctgccgccgggcgaaggtgcggcggacgcggccgcgcccgtcaccccggccgccgagggcggcgccgagaccatcttcgtggtcgaggacgacaatctcgtgcgcaatttcgtcaccacgcagctgcagagcctgggctacaagaccgtggccgtgccggacggcagatccgcgctggacctgatcgacgcgggccaggcgttcgacctgttgttcaccgacgtcgtcattcccggcggcatgagcggacgcgagttggccgaagaagtggccaggcgccggccgggcgtgaaggtgctctacacctccggctacaccgacaacgccatcgtccatcacggcaagctcgacgacggcgtgatgctgctgaccaagccctaccgccgcaaccagcttgccgagatgatccgcaaggcgctgggcaactag

SEQ ID NO: 5456 - DNA, 900 bp, BradyrhizobiumColbertium
atgcatgattcgactcgccgggatgcgcggccgcgcatcgccccggccggcctgatgttcctcgcgatcacctcgatcggctggggcttcaactggcccgtgaccaagttcctgctcgcggagctgccgccgctgaccctgcgcggggtcacgggcgtgctcggcgcggtgctgctggcgctgttcgcggtgatgcggcggcagagcctgcgcgtggacggcgcgacctggccgcgcctcctcaccgccgccgtgctcaacgtcaccggctggatggtgctgatggggctggcgctgctctggctgccggcgagcgaggcggcgctgatcgcctacacgatgccggtctgggcctcgatcatcgcctggccggtgctgggcgagcggccgacggtcttgcgcacgctggggctggtgctggccttcgcgggtctcgcctcgatcatgggcggcaacgggatcgccgccagcgcggagaaagcgcctggaatcatcatggtgctcgtcggcgcgtttggcttcgcgttgggcacggtgctctccaagaagtacccgatccacctgccgccgatcacggccgcggcctggcagatcgggatcggctgcctgccgatctcgatcgtcggcctgctggtcgagaccacggatctgggcaaggtgacgccgctcggctggtggctgctggtctattcgaccgtggtgcagttctgcatcgcttatgtcagctggttcgcagcgctggcgcggctgccggcctccgtcgccgcgatcgggaccatggcggtgcctgtgatcggcgtcgtggcgtcggcggtcgcgctcggcgagccgctcggggcagggcagatcgccgcgctggttttcacgctggcggcggtggtgctggcgacgcgcggctag

SEQ ID NO: 5457 - DNA, 3771 bp, BradyrhizobiumColbertium
atgcggattgagcggcgccacaccagtgcgggacagtcaccttatgcgggaatcgaattccggctcaccacgtcggagattcgcaatcccgacggctcggtcgtgttcaagctggacaatgtcgaggtgccctcggagtggtcgcaggtcgcctccgacgtgctggcccagaagtatttccgcaaggccggcgttgccgcgcgcctgaagaaggtcgaggaggaatccgtcccctccttcctgtggcgctccgtgcccgacaccgaggccctcgccgcgctgcccgagaaggagcgctatgtcagcgagctcagcgccaagcaggtgttcgaccgtctcgccggctgctggacctattggggctggaagggcggctatttcacctccgacgacgacgcccaggccttctatgacgagctccgctacatgctcgccatgcagatggtcgcgccgaactcgccgcaatggttcaacaccggcctgcactgggcctacggcatcgacggtcccggccagggccattattacgtcgaccccttcaccggcaagctgaccaagtccaagtcggcctacgagcatccgcagccgcacgcctgcttcatccagggcgtcggcgacgacctcgtcaacgagggcggcatcatggacctctgggtccgcgaagcccgcctgttcaagtacggctccggcaccggctccaacttctcgcgcctgcgcggcgagggcgaaaagctctccggcggcggccgctcctccggcctgatgagcttcctcaagatcggcgaccgcgccgcgggcgccatcaagagcggcggcaccacccgtcgcgccgccaagatggtcgtcgtcgacgtcgatcaccccgacatcgagacctatatcgactggaaggtgaaggaggagcagaaggtcgccgccctcgtcaccggatccaagatcaaccagaagcacctcaaggcggtgctgaaggcctgcgtgaactgcgaaggctcgggcgacgattgcttcgaccccgagaagaaccctgccctgcgccgcgagatcaagctcgcccgccgcagcctggtgcccgacaattacatcaagcgcgtcatccagttcgccaagcagggctacaaggacatcgcgttcgacacctacgacaccgactgggacagcgaggcctacctcaccgtctccggccagaactccaacaactcggtctcgctcaaggacgacttcctgcgcgcggtcgagaccgacggcgactggaatctcaccgcccgcacctccaggaaggtgaccaagacgctgaaggcgcgcgacctctgggagaagatcggctacgcggcctgggcctccgccgatcccggcctgcacttcaacaccacgatgaacgactggcacacctgcaaggcgtccggcgatatccgcgcgtccaatccgtgctcggaatacatgttcctggacgacacggcgtgcaacctcgcctccgccaacctgctgacgttctacaacaccacaaccaagcgcttcgacgtcgaaggctatgagcatctctgccggctctggaccctcgtgctcgaaatctccgtgatgatggcgcaattcccgtcgaaggcgatcgccgagctctcctacgagttccgcacgctcggcctcggctacgccaatatcggcggcctgctcatgaccatgggcctgccctatgacagcaaggaaggccgcgcgctctgcggcgccctcaccgcggtcatgaccggcatcacctacaagacttccgccgagatcgcctccgagctcggcaccttccccggctacaagaagaacgcgccgcacatgctgcgcgtgatccgcaaccaccgccgcgccgcgcacggccagtccaacggctacgaggcgctcagcgtcaacccggtgccgctcgacctcgtctcctgcccgcaggcagacatcgtcagccgtgcccaggcggcctgggatgcggcgctcgagctcggcgagaagcacggctatcgcaacgcccagaccacggtgatcgcgccgaccggcacgatcggcctcgtcatggattgcgacaccaccggcatcgagcccgacttcgcgctggtgaagttcaagaagctcgccggcggcggctacttcaagatcatcaaccgcgccgtgccggccgcgctgcgcacgctcggttatcgcgaagctgagatcgccgagatcgaggcctacgccgtcggccacggctcgctggcgaacgcccccggcatcaatgtcaccacgctgaaggccaagggcttcaccgacgaggcgatcgccaaggtcgagaaggccctgccgaccgcgttcgacatcaagttcgccttcaacaagtggaccttcggcgaggacttcatccgcgagcagctcggcatcggcgccgaggcgatcgcggcccccggcttcgacctgctccaggccgtcggcttcaccaagcgcgagatcgaggcggccaacgtccacatctgcggcgcgatgacggtggaaggtgccccgcacctcaaggccgagcattatccggtgttcgactgcgccaatccctgcggcaagatcggcaagcgctatctgtcggtcgagagccacatccgcatgatggcggcggcgcagcccttcatctcgggcgcgatctccaagaccatcaacatgccgaacgacgccacggtggaggactgcaagtccgcctacatgctgtcgtggaagctcgctttgaaggccaacgcgctctatcgcgacggctccaagctgtcccagccgctcaactcgcagctcatcagcgacgatgaggacgaggacgatgcggtcgaggcgctgcacgagaagccgatggcggcgcgcgccacccacgtggccgaaaaggtcgtcgagaagctggtcgagcgcatcatcgtgatgcgcgagcgcgagaagatgccggaccgacgcaaaggctacacccagaaggcggtcgtcggcgggcacaaggtctatctccgcaccggcgaatatgacgacggccgtctcggcgagatcttcatcgacatgcacaaggaaggcgcggcgctccgctccttcatcaacaacttcgccatcgcggtgtcgctcggcctgcaatacggcgtgccgctggacgaatatgtcgacgccttcaccttcacccgcttcgagccggcgggtcccgtgcagggcaacgactcgatcaagtacgcgacctcgatcctcgactacgtcttccgcgagctggcggtgagctatctcagccgcttcgacctcgcccatgtcgatcccaacgagacgggtttcgacgcgctcggcaagggcgtcgacgaaggcaaggagccggacgacgacggcggccaccacgccaccaagctggtctcgcgcggcctcacccgctcgcgcacggacaatctgttcgtgatgcgcggcggctcggccgcggtcagccagggcagcgacagcgcgccctccggcggcagcaaggtcaccgcgatggcctcgcatggcgccagcgcccgcgtcggtgatgccctcgaaggcgccgtcgccctgaagcaggaagtccagcacgacctctccccgacggagaagctggagcagctccagtggagcaaggccggcagcgccgcgaccgccgtccccagcaaggccgagcgccgcgcggaggcgaaggccaagggctacgagggcgagatgtgctcggagtgcggcaacttcacgctggtgcggaatggcacctgcatgaagtgcgatacgtgcggttcgacaaccggctgctcctga

SEQ ID NO: 5458 - DNA, 126 bp, BradyrhizobiumColbertium
gtgcaagcgctcctgaaggcgcgcatcagacttcaggttcaatcgaatatcgcgaaggtgggagtgcctgtgaacctggaagagagcgccatgctgagcggcagtttatcgcgtggtattctctaa

SEQ ID NO: 5459 - DNA, 999 bp, BradyrhizobiumColbertium
atgtacaccccgatgaccagggagcagcggcggctggcggagaccatgcgctccaccacgctcgagtttgccgcgctctcccgctcgcgggacgagttcggtggcggcatgcagtggctgaaggtcaagaagtttgaatacctgacccggtaccgacgggatcctctcactggcgagcagaaggcagcttcaatcggccgccggtcgcccgagaccgaggggatctacgaccgtttcatcaaagaacgggccgagctggatcgccagatcgcggccctacggccgacaatcgccgagcagaccaggatggcgcgggcgctgcggctcacccgcgccccggaggaagtcggcgctgtggcgcgcgccataggcatgtccggactgatcgaccacgtcaccatcatcggtgaggctgccatctacgcctacgaatgcgagatggccgcgctcctgccgcgcgagatgctgcccgaaggcggcatggaccttctggtcgccggcgtacacccgacggacgtgatcaacgagctcgtaggagtgctgagacgagccaagatagaggtgcagcgcgccaagctcagtgccgacaaagcggcggtcgaactccggaccgaagaaggcctcagcctccggctctatacggcatcgacccttggcggcttgatcgaccaatatgcggagagttcggcgtacggggcggaggcggtgcagtggggtctcgacctgccggtgatgcattcgatgctggtcgaccgcaacgggcgggccgccgccgtcgcggttctcgatccgcgcgcctactgcatgcttcgtttcatggccctcgacgtcgaggagatgtcgctcatccgccgtgaggtgtccaccgaactcaatgccgcggtagtgaagctcgtccacgagcggtggaccgagccatttatcgaggagcacgttcagagcattggcccgctccacgatcttttggaagacggcttcccctcggcaccgaggatgtag

SEQ ID NO: 5460 - DNA, 1419 bp, BradyrhizobiumColbertium
atgttgcgaccaggttcaagtacagggggcgcggatccggcaaagaccggagcgtttcagataaatcgcgatggagcctcagctagaggcgcacaccgtcctattccgaagcgtaccaggtccaaaacgcgccctcgcagggcgcgcgatgccggccgccagtgcggcatggtcaaggtcttccaaccgaacgctgacaggatcgcgaagctcggcttcgcgtccgttgcccacgtgccggtgattttcgacagtcgtcagcgttattgccgggaatacaatcgctatcttcgcgagcgcgcggaattggactggcgccccgcggcgggttttcacgatcgtccgcggccgcgcacactcaagaccatcgccgatcatcttaccaattggatccgttggtgtgagtccaaggatgttgcgtggcagaaggccacttacgatcacgtgctcgtctaccaagacgaacaacactcaggcatctggtccgcttcaggcgagcgtttggcagctagtacgtcaaacgggagagcagacaacgccacccattttttgacctgggccgcagatcgaggcctgcggggtgagtttaaagtcaatctcaccgttcaacaaaaaaggatcggcggccgcatgcggaccgtaaccgtcaggcctggacgtctgaaggagccgctgggcgaaagccagatcgacacgttcaggcttcctcagcctgtcgaagttcgtgactggttggcggctgtgcgacgttgtcgcggctacgcgaaatatctcgtctgccgtttcattttagagaccggtgtacggctcggcgaggccgaggcctttcccgtcgctgattggccttcggttgagaaaattgaagaggccgcgtttcgccgcgatgtctttgtgccggcgaatctcacgcgcggcacaaagggtggacgtcccaggaccatccgcgtccccatcgaacttgccagggaaatacgcgtctggatcgacgggccccgcaataagtacgtttttgcactctacaagcgggacggaaagcgcaccgacaacctgttcgtatccgatgcgccgggtttcatcggcatcccgatcctgcggcatacgattggcgactgcttcgccaaggttacgccccgtccgaaggtttggtcgccgcacaaaggacgacatgcgtttgcctgcttcttcatcctgtacgcactcgaggccgaagcgcgcgcacacaaatcgacacctgccggcatgggcgtgaattgggttcataaccgcggttccgaatggttgaagatgctccagcggcagttcggccatgtcgacgaggtcaccacccagatctacctgaaatggctcgccacagcgctcaatctcgcagagacggctaacggttggcaccgctttctagcgggtgacgaggagcgctga

SEQ ID NO: 5461 - DNA, 1956 bp, BradyrhizobiumColbertium
atgaatgtcgtccccttcaacgccgggtcgctgaagctgaccatcaaagctcaaagcggcatcgtttacgacgtcgatttgagcgaattctccgtcggcggaaagctggaaaatgttctgcccaagtcaaagcacatctgggcaggagatttttctggccgtccattgtttgcgctggagatcgcagagcgttttcggatcgagcgaccggagcccgtagcatcgaaaaaggtacggcatgtcttccgggggattttccgttttttggatgcggtagagaccaagcatggcgctccagttacttgtatcgctgatatgaccgacgcccacggtcccatgatgctggaatggatagcgtccggaaattcgcttgaataccggagtgccaaaggagaaattgacgccctgcgccgctttcgcggcttgcccccgctcttttggtcagcgcgcgcggctgacaacgtgtccacgacagagccggtcaacagggaggcggttcggcacctctacaatgcattcaagcatgaagcccgctgcatcaagagaatgttcaaagagggcgagctactagccgctgcgggacgagatccccgcagcgacacgcgcgtttccgctcaatggactgttcgggaaaacagagcctggatcataaaggagctgacgcaacagcaccttctcgacaaacaggagttgaaggacgtgggtgcctattggggcatggttcaaccaggccgaaagggccccgactatcttgcgccgggcatgacggaacggggccgagaaggcgtcgttggagccttacgctggttctatccgagctatcaggacaccgctgtctttctgtggctcttcctgctcggaacaggctggaatctctcgacagcacttgggctcgacgtgagtgaagatgatgcctggtgtcaggcccatccacaccgcgagcagtttacggtcatccatgccttcaaggcgcgcgcggaccggcatcagttcacgctatcgatgaccgagcctgagtggcacccctaccagatcgttcgagaaatgatcaagcgcaccaagatcctgcgcgccactgtcagccatcggctggagctggctcgcaaggaccacgccctctctcccacactggcgaagtcgggcaagatcgctgaacttgaggcgctggtccgcagcccctggctttaccatacggtcaataagatcggcgaggtgtccgcattcaataacgccgattccagccatctcaatctcatcgcccggaccgtcgccgccggtctcatcgagcgccatccttcgctcgaaaagatcgcgacgtccgatgcccgcgatgcctggattgggttcgcctacgttcagtctggttatcatgtcttgcttactcagctggccagtcagcacagcaacatccggacgctcaagcattacctgaagtccaagcgatatcgtgagttcagcgagaagcaggtccgaaaggtgcaggataccgtcttcgctgaaatctctaccggcggcgtggtcgatcccacgcggctgcgcctgttggtcgccaacgggaccatcacggccgagcaggagcgtcggctgcaggatttcaggcagcggacccgacttggcctcggatgcctcgatcccactaatccgccgcgccagatcgcgcccgatcacaagagcggtgccctctgtcgagtgcagcgctgcaccggttgccagcatggcgtcgtgtttaaggagagccttggccccctcgcccgcgcgtgcgccgagctaatccacattcagcgcaccattccatacgccgcgtggagcggatcgagcttggaggacgaactcgcgtcgatcgaggagacgctcaagggcttcgatcaaaccgaggtcgcagcggccatccaggaatggtctcacaagctccagacgggagaggtcaaggcgcatgacacgtatccgatctattga

SEQ ID NO: 5462 - DNA, 2028 bp, BradyrhizobiumColbertium
atgacacgtatccgatctattgatcctgcggagcgcgcccaagaatggcgtatcaagacccttccaacgctcggaaactactccgagctcgcggcaaagccttgggaggaattgcgcgaatacgagatcttcgagggctgtcggctcggagacgaggaactcgtcgtgccggaggattgggtgccgcccacgtccgtgagccggctgtcaaagaggacagtttgcccatccgatgctggcgtgccggccgacccttccgcggccgagcggcgcgacgaggcaattcgccgtgcgctgttggcactctggcttccccggatgaccgataccggcgtcaggaaatacaagccgggcccttggatcgatgccgccaatctgctgctgcgtcttgccaaatggcaattcaacaacgtgccgacggaagacggctcggtttttggtggattcaccatcaccaacatcctccaggaggtgcttcccgccctggcgccaagggagaaggggcgagacgcgatacgggccctcttccgcattctcgttgacgccggaatacgtggccgcatctctgattggcctcgcctctatgccgacggcgacttcgccaatgggaacgatgaccctacgatcgagcgaaaccggcatggccgggccgcccctgcccccgtcgaaaagacagagcagcgcaactggcaaccgttctcggacacttttgtcaccgaattcatccgccgtgctctctgggtccatgcgaacttggctgaccagcttctcccactgtgggctgagctgcgcgaaattacggccagcgaggcggcgcggggacgctcgacctcccatccttcggtcattgctctgcgcaatgccgccattgaacgcgtcagatgggtggacgcagcaggcaggccgatcacgcagcttcccttcgagattgcccgcagagatggcgtttcggaccagtggccgccgcgcaatgccagcgacatcaaccgcatggtcagcaccgttcaggccatgaacttcgggatgatcgatttctgcaccggcgctcgtgcaagcgagctcgcggccgcggaagataacgaaaaccagggctcggacgatcgtcttcactccgtcacctacaagctcatcgatcagatcggcggaaagaagcgggactggccgttgcatccggcagccgtacgggcaatcgaggtgcagcagaaaatttgccaagtcgttcgcccgcccgggcagacacatctctgggtcatcctcggcgacggtgacaagctcggcaatcggctgctcaatctcaccgaacccttggtccaggccgtagatcacctcggactctccggattgaccggccgagaccgggcccatgtgcaccgctggcggcacaccgtcgcccgcctggtcgctctctcggtcgttggtgcaccacaggttctgctcgacctgttcggccaccgcgacctcgaaatgaccttgcgctacatgctgtccgaaccgcgcatcatcgaggatgcgatgaaggtcgccaaagagacctccttcgtcatggcggaaaaggccctggccgaaaccatcgaaggccaggccggcggccctgccgccatgcccctgcaggcgggcctcgccgcagcgggaatgcagcgcggtgaaaaggtctttgagacatcttccttgagggaaaccgcggaagttctcactttcaacggccgctactggtcgctggtccgtcccggtgtcatctgcaccaagggactcggccaggctggaccttgcactaaggagcggggtgcccccgatcccggcgcctgccgcaccacttgcgaccatcgcttggagacctcgcgcgccaagcaagggtgcgaggaaacgctgcgggcgctcatcctcgagcgcgagcaaactaccaatgaaatggtcctcgccaatctcgacgggcagatcctggccaacctcaagcgctgggacgacgtccgctcgcgcgtgctcaacgagcatcccaacattcaaagcatctgggaggccggtcaatga

SEQ ID NO: 5463 - DNA, 510 bp, BradyrhizobiumColbertium
gtgggcaagcgcaggatcgcgcaggcaggagcagcctatgcaaaagaaaagcacctcgagagcaagatctcggttcaggagacgatgcagaggatcgagctcgagatcgacgccaacggcggcatatacccctacaacgacggcaagctcaccgtcgacgaactgctgcggcgctccggaaagagcgcggcctacctccaaaagaacaccccgaaaatcaaggagctcaggcacgaggtcaatgcctggatcaagcggatcaaaggtcaggtcgccaccggcgcgccttccgtgcggcgggaggtcaacgcgcgcgtcaaggtggcgaacaagcagatcgacgagatcaggcaaaactatcacgaagccgagcttcagctcacccgcgtcacggccgagctggcggatgccacccgtaaaatcggcgagttggagaagagaaacaccgagcttctgaaacagctcgccggcaagactgtcgtttccttgaaaccggagcagcggaagtga

SEQ ID NO: 5464 - DNA, 459 bp, BradyrhizobiumColbertium
gtgaatccccgctcggtggtgccgtcgatcctcgaaaagctcgagccccaccttgagcggctcgaacttgcctggtcgtcgcagtcggaacgcgatcgcgcgcctaccctgcccctcacgtctgagggcaaggtcaacgtgcgccagctcgtacgggatctcggtctccgggaaaccctcgagcagcatttcttccggaagcccgagctcgccgggccggtgaacgccctcgcccacgcgcaaggcgtgaagccgatcggctcacgcctgctcgacgacgttgccgacgccggcgtccgcaagcggctcggccgggatgcggatacgatctccgagctgcgcaaggcgctcgccgagcgcgaggcactggtcgtctcactgcgcgacgagaacgcgcggctcaaggctcgcctcgacctaatcgaggagacgggcctcgtgttcagggctccggcatga

SEQ ID NO: 5465 - DNA, 2181 bp, BradyrhizobiumColbertium
atgaccgacatcgtcgtcgacagcatcgtctcgcggcgtgactttggcactatcttcgccggccgcctggccgacggttcttccgtccgggtgaaggctgcaaacgcggccatgctgggcatgccctcggtcggtgagctttggtccgtggaaggcgacctgtccgacacccagtggggaccgcagatctcggccagccgcgcggtgcgcgccctgcccagcggcaagctgatggtcgactatctcgcgagttgcgtcgccggcatcgggccggcgcgcgcccgcaggctgtggcagcatttcgaggaccgcctgcccgaagcactcgacaccggcgacgtcgcggccctcgcggcggtgatggaccccgaccgtcccgtgctggggccaaggctcgcggccgcgctcgtttcttcctggaaaaccatggccggcgaagcgaggctcgtcgaatggctcgcggccgtcggtgtgaccgagttggcgctggcccggcgcgtgcacgcgctactcggcggcgatgctccgcgggcgttgcaggcaaacccttattgcctcgtcccgctgctcgattggaagcgcgtggatgacctcggtctgcggctgctgaatgagagcggtgaagccgatcccgtaaaccatcctcatcgtctcgtgggcgcagcggacgcggtgatcaaggccctggtcggatccggttcaaccgcgatcgcgcgggacgattttcgcgagcggctcgccagcaagcttggcgggccactctcctcccgagtgctcgaccacgtggtcgagcttgcgatcgagcgccgggcggtcatcgcctcgccttccggactcctgcgggcaccgggctgcgccctgatggaggatgccgtggtcgggcagctccgcaccatggcgacggagggcccgccaaacccgctaaatcgcctcctgggtgacctcggaggccaaaaggccgtcctgagtcaggatcaggccgaggccgtccgtaggagcctgtatgccggtttctcgtgcctccgaggcggcgccggcaccggcaagaccttcgtgacgcgcacgatctgcgacctctgggagcgcgccggcggccagttgctgctggcggcgctcgcgggcaaggccgccctgcggctgtcccgctcgaccgggcggctcgcgcgcaccatcttccggacgctccgcgagttggatgaacgagaggcgatcgagagtcagctcgccggcgaacttgatcagaccgagagggcggagctggagactaagctgcgcgagctggcgcatttaacttccgacacgctggtcatcctcgatgaagcctccatggtggacctgccatcgcttcacggcctgcttcggcggatgccgcaaggtgcccggcttctgctcgttggggacgagcgacagcttccgccggtggggtttgggttgctgtttcaccgcttcgtcgacgatccggccgccacctcaacgctcaccaccgtgcaccgccaggccgcgaccacgtctatcccgggtattgcagcccagatccgccggcgggagatgccgaacctctccacttacgtcgggccccacgtcggtgtcatgcttgcgcgcgcgtcggggcgtgacgagatcgccgataaggttgtctcgatctgggatgaattgcgtgacggtcgcgacgtcatgatcgtcacgccggttaacgacggtccctgcggcgtcagcggtctcaaccggcgcctgcatgacgaatatctgcgcaggaaagacctgcaggagctccgggggccgctcggtgatttattctcgcctggcgagccgctcgtgcaccggcgcaattgctacaagcgcggactcttcaacggctcgatgggcatcgtccggcggatcgaccgggccgaacgtcagctcgtggccgttttcgacgacgaagagcatgtattcgcctctgaggacttggtcgatctctcgctcgggtatgcgctcacctgccaccgtgcccagggctccgaagcagactacgtcattgtcgcgctgccgcagagccggctgctcgatccgtcctggctctacactgcggtcacgcgggcccgccagcaggtcatcatcgtcgggcagccggagacgatgaaagaagccttgaaacggccgtacgccgataaaaggcgatcggtcggattgctgtggtga

SEQ ID NO: 5466 - DNA, 177 bp, BradyrhizobiumColbertium
atgccccttaagacaaccaagttcgatgtgcaggactacctgaagacgccggatcagcaggccgcctatctagaagcagcgcttgaaagcgatgacccttcgttcattgctgtcgcgatcggagatctggccaaggcccgggaagtttcgaagttctcccgttcggagagaaactga

SEQ ID NO: 5467 - DNA, 123 bp, BradyrhizobiumColbertium
gtgtcgcacaagacaccccacaacatggtcgtaaccaacactatgatcctcgtggtattcgatcgcgaagagaccgaaattctcccgaatgagcggatcgactatggtgtagatgaactctag

SEQ ID NO: 5468 - DNA, 1491 bp, BradyrhizobiumColbertium
atgctcgatcgaggattgaagaacaaggatattcagttttatttcaatcgcccagagcgccctgttaattcgggcaggatatcgaccatcaggacagggacttacagcaactcgaagaaaatcaaagccgcgtctgcagacgagctggaatacttctttgcatcattcgcaaggggtggcgcgaggagagatggcgctgaaagccccaatgaacaagaggtccgacagctctttaggaaaggtgatgacacccattggcaccttttccgaggtgaaagcgaagaacacgaatgcaagcaggactttgaccctcgaaggctcactccggtagtccgggcgatcgcggcgcttgcaaataacaagggcggctacgtgttcttcggggtcggaaataaccggtgcaaggtcgaaggtgtcggtccggcattctctcagaccgatatcgcggacatcgtgaataaagttaaggctcatctcgctcccacgccgagcatagttgctaagggtgtaatcgacttcgatgggcgagcggttggctttttgcgtgtggagaagcacccggatcgtccggtcgtcgtttaccgggacggagaatcgttagcggagggcgatatcctttataggtatcctggccagtcagctcgcatcaaatttgctgacctgcgagctatgcttgatgagcgagatcggcgtgcccaggtcgcactcgcagaggcggcacggactttggccaatgtaggtaccgccaatgctctaatcctagacacagacaaaaatacaatgaacacaaatggtcgctcgataattttggatgaacggctgattgatcagatcaaatttatcaaagaggggcaattcgaagaaaaatctggtgcgccaacactaaaattggtcggcgagataagaacggtaggggtgatcggatcgccccaaaaggtgatctcaagagaggcgatttttgagaaagacatactcgatgcgtttatcagtcaggagatcgtcgaaggccctgagaatttcatcttcgcaggactagctcaatctcgcatgtggttgcctatattttacttcgcgcgaatgtccggccgcaccaattcgcaaatcgcggacgacgtcgaaggtcgaaaaatcgctcagaagggcaagaagtcgatattgctggagaggttgcgaggacaaagaacggcgcacgcgaaggctgtcacacaagcggcgcgagctgtgagtagggacatcgcaactgggaatttgcacgcgccaaaggtgctgtcagatgtaggtacatttgctcatggtgttacagcagtcacggcgataaacgtacctctgggggaggttctaatcgcgcttctcgccgctcgtgaattggccgagaaagccgacgataagaatgcattcggtgcggtttgcaaagcgatctgccgagttgatgaaatcttctttgcagagatgaaagtacccctccaacctcgttctggagcgggtgaatga

SEQ ID NO: 5469 - DNA, 276 bp, BradyrhizobiumColbertium
atgttcgaaatctatcgccgtgcaaaggtcgaagctaaatatccggcgaatattttcttgcagatgctcacggaccgtggaggaatcgatacggccaaatttcttatcaatcagccacagccgtctgatggatacacccacctttacgaacgtggccgccttgatctaaccgtcgaagctgaagtggtcgataacgagaaatggcattcgcttttcacttctgaagaaattgacaaggctcggcgacgcctcgcgcaatacggatatcgttcgtaa

SEQ ID NO: 5470 - DNA, 315 bp, BradyrhizobiumColbertium
ttgtcattcggcggcgcgagggacgacctcagcaatcgtgaccgatcagcacttacttttctcgcacatttcgccatcggccattggttatatttgcgccgtccgaacttaacacgttctaaaccgctctcgcctcgcgaatttgactgtcttctttgggccgcggaaggaaaaaccgattgggaaatatctgtcattctcggtatttctcggtcaacagttacgaagcacatcgcttcagcacgcgagaaacttgatgctgttagcaaatcccacgcgattgcaatcgccatgcgtctaaagattttatgctaa

SEQ ID NO: 5471 - DNA, 2343 bp, BradyrhizobiumColbertium
atgagccgcgcagcacagattgtctggtggcttgaacaggtcgaggccgcgcgtcgggcggtcgcggaggcgcgagcggaacgtcggcggccccgccggcccggcgcgttggacgaggacgtccgcgcgaggcgagcacgggtggcgccgcttcccaagacgccgccggcacaagacatcatccgtggcgcgaccatcacgggtgagtgggatgaggaacgggcccgctcgatcccggccgcgagcgggggtggcggcgcaggacctgggaccgcgcctctgcgtggcgcgccgagcccgatctccggaggattcggcgctagcgggaccgcaatgagttccggcggggcaggacagggcggaccccttggccgagcccggcaactcgctgccggctaccagcctgctgtcatcaaggtagtgtcctatgcgcgcggcgtcacgcgcgccacggcgaccggccaatatgtccagcgcgaagatgttccgctcgagacccatgacgggcggttgttgacgaaccgcgaagccgtcgccgacgagatcaaggcctggtcggcagatttttcgaagcgtgcggagagccaggacgttggcgcattccgtctgaagtttgaaggtgtctcagacaatgccgaaggccgagcggcctaccagaaggcgatcgcggccggcttctcgggacatcgctacgcggctcgcgtcgacgtcgacgacaagggcgcgctcgaggcgcacgtcgtcgccgcgatggccgggagcggcaaggaacggtttcgcatcagagaggcccaggctgccgatcgggatcatgacgcccgaccacgccgtcttgattcagtgtccgccgccgctgtccgcgccaggatcgaagcggcctcggcgatcgacgggcaggcggtgttaatccgacccggggcgaccagccatggtcgagacggcgtcacctacaggctcaataagctgatcgagaaggacgcagcactcgacgaccgcggcaagagcttgtccaacgtggcagatgcgcgggtcgccgcgcgcgaatggggtccgtcgctccggtcgcaatccgcgcgcgatacgatgcacctgatcatatcggcgaaggctggaacggatgtggccgccttcaccgatgcagcgcgtgcgttcctgcacgatcgctttgccgatcataagttcatgtttggcgttcatacggacaaggaatcggccgggcacattcacgctcacgccgtcatcaccgtgaagaacgaatccggccagaagatccgtcccaatcgggatacgttcgcggaatggcgcgaggtgtatgcacagcacgctcaggcacaaggcttgaagatcgtcgcgaccaccgcgaaggagcgggcttcctcgcaaagttacggcccgaaggatagggcgatcgtcgaagcggcggatcggccgcgtccggcgcgagaagcccgagatcgcgcctatgctgccgatcccgccaatcaacgtcttatcgacaatgcgcggcagcggatccgggtggcgaggaccaatcccatccgcttgccgatgtccgcgcctgaccgcaaagtcgtgaacgagagcatcgtggcctggaaggcagtcacggtggagcagccttcaaaccggatggcgaaggatatgcttgagcggctgttgatggcgcagactgttggagccattcttcacacgatcggcaaacgggtggaattgttgagcaaggagggcgacatgccaattacatcggaacagatggtccaggatctgcgactcatgaacgaagcggtttcgcgaaccagcgacctgttagatggggagaccaagcagcagttccgtgagacttcggcgcgctaccttgaaacgcttgccaatcggattgatctccagcggatgcaggaacgcggtgtgcagcagctcgcccaggcggaggtcgaagccatcgtcggcgtgaacgccgatcggcttatcgagcgcgcccaggagattcggatcaaggaagagtttgaggcgacgtccgatgaatatcttgcaagtagtgcaatcgatgcggagcgacggcaggagggccgcgggggcattgatcaagcctcgcagcaggaattgcgggcggaaagggctatcgttgccggttcgcaacaatcggcggcccgggaagcgcgcgaggcagccgctgctgccgaggccgcgagatcaatcgccgaacatccagcacagccactgccggctgccttgatccagaccgatggcttggcaaagcttcgcgcggaacaggaaaagatcgtgcgtgagctcgaggcggaaaagccaagcttgcaatcaatcaagggacaaaggcttagatga

SEQ ID NO: 5472 - DNA, 426 bp, BradyrhizobiumColbertium
atggtccgctctgcaagagccctgcgacgcaagccgaggcttcggaccgagctgtccgatgcagatgagcagcgtctgcaggaggctgtcgcgttgttcggcctgccgaaagcggaggtggtgcggcgattgatccgagcgtctgttcaggcgggaccggccttgtcggccgagaacacgcgcgctgtcgtcgaactcgcgcagcaggtccggatggtcggccgcaatctggcgcaggtgcttagagccatccatcgcggccaggccgtgcggatcgaggacacggagcccgtgtggcgaggtcttcatgaagtcgtcgccgcgattaatgatgagctgaccgaaatgacggtcgcctacgggtcgaagttgcggcgagaggccaagttgacgttgcacttcgtcgccgatgaggccgccccatga

SEQ ID NO: 5473 - DNA, 87 bp, BradyrhizobiumColbertium
ggaagggtggccgagcggtttaaggcaccggtcttgaaaaccggcgtgcccgcaagggtaccgtgggttcgaatcccaccccttccg

SEQ ID NO: 5474 - DNA, 1410 bp, BradyrhizobiumColbertium
atgctgggagttttctcgattactctgggcatggggcggcgaatgcgaggtagcgcaacctgtcgttcactggccgtcgcggtggcgctgtcgagttggtttggtggagtatgtctagcgcagcaggcgcctccggcagaaggggggactacgctatttcagaatgtccgcatcttcgacggcaagagcaccacgctgtctgctccctccaatgtcttggtccgtggtaacaagatcgaaacaatttccctacacccactagcggtggatagcctcgcggaaattcgcaatatcgaaggcggcggacgcacactgatgcccggcctcatcgataaccattggcatgcgatgttgatccgagttaccccggtgcaatcatttggcgatgtcggctacctcaatcttgttgctggcgacgaggctacgcacaccctgatgcgcggttttactactgttcgagatgtgggcggtccggtatttggtcttaagagcgccattgacgaaggtatcatcaagggtccacgcatttatccctcaggcgccgtcattactgtgacgagtggccatggggattttcgccagcttatagatttaccacgaacgatcggcggtatgctcacccgcatggagcagaccggcggcgcgatggttgcggacagcccggacgaggtccgcgtccgtgcccgcgaacagctcatgcaaggcgcttcacaaatcaagttgacggccggcggcggagtgtcgtcgcctttcagtccgatcgacgtgaccactttcaccgaacccgaaatacgtgctgccgttgaagccgctgagaattggggcacctacgtcacggctcatgccttcacgcctgcggcgattcgaggagcacttgcagccggagtaaagtgtatcgaacacgccttcctcatggacgaacagacagcaaaactgattgcagacaggggtgtttggctgagtatgcagcctctgcccgaagaattgaggttgggctttccagtaggctcagttcaaagagccaaggccgatgaggtctggcccgggatagcgagatcctacgaattggcgaggaagtacaagatcaagacggcgtggggaaccgatgttctgttctctgcagcgctagcgcgacaacagggggccatcctggcctcactcgcccgctggtacacgcccgccgaagcgctgaccatggctacatcgaccaatgccgaactgctggccttatccggcaagcggaatccttatcccggcaaactcggcgttgtggaacaaggcgcattagcggatttgctgctcgtcgacggaaatccgttgaacgatatcagccttcttgccgaccccgtcaacaatctcaaaatcatcatgaaagacggaaaaatatacaaggatacgctcaccaagtag

SEQ ID NO: 5475 - DNA, 204 bp, BradyrhizobiumColbertium
atggcgatcgtagttgaaagaccaatccttctggtcaagaagctcgcgggtatgctcctcctgctttttggtttgctgctgacagcggtcggcttaagcagcgagtcggccggcttcaccgctatcggcattgcctttcttgttgctggcgcaatctccctggctctgaaaatcgttcggcgcaatcagagcgatccgctctga

SEQ ID NO: 5476 - DNA, 495 bp, BradyrhizobiumColbertium
atgaccccgctccgcgccggcatcctcgcggccgtggtcacgctcgtggccgaccaggccacgaagctgtggctcttgaatgtgttcgacctcgcccgccgcggcgtggtgcgggtgacgccgttcttcgacttggtgctggcctggaacatcggcatcagcttcggctggctccagagcgacaatcaggcggctcagttcgcgttgatggccgtcaaaggtatcgcggtggtcgcgctggcagtctggatggcccgctcgcacactctgctggcgaccattgcgctcggcctcatcatcggcggcgccatcggcaacggcatcgaccgcctggcctatggcgcggtggtggatttcgccctgttccacatcgagatcgccggaaaaacctataattggtatgtgtttaacctcgcggacgtggccatcgttgctggggtggcggcgctattgtatgattccttcctgggggtacccgccgcaaaagcgccctga

SEQ ID NO: 5477 - DNA, 3045 bp, BradyrhizobiumColbertium
atgtccgaaaagccgcaaaagtcccaaaagtctgaagccaaagactattcgaagaccctgttcctgccgcagaccgaattcccgatgcgcgccggcctgccgcaacgagagccggagatcctcaagcgctggtacgagatcggcctctacgagaagctgcgcgagagtgccaagggccgtgccaagttcgtgctgcacgacggcccgccctacgccaacggcaacatccatatcggcacggcgctgaacaagatcctgaaggatctcgtcaccaagagccagcagatgctcggcttcgattccaactacgtgccgggctgggactgccacggcctgccgatcgaatggaaggtcgaggaggagcactatcgcaagaagggcaagcagaagcccgacttccgcgacagcgccgcaatgatcgatttccggaaggagtgccgcgcctatgccacgcattggctcggcgtgcagcgcgaggagttcaagcgcctcggcgtgatcggcgattgggatcatccctacgccaccatgaactatcccgccgaagcccagatcgcgcgcgagctgatgaagttcgccgccaacggcacgctctatcgcggctccaagcctgtgatgtggagcgtggtcgagaagaccgcgctggccgaggccgaagtcgagtacgaggaccacacctccgatacggtgtgggtgaagttcccggtgacgtcgcccgcgcacggcgcgcttgcctccgcaagcgtcgtgatctggaccaccacgccctggaccctgcccggcaaccgcgccatctctttctcgccgaagatcgcctacggcctgtacaaggtcacggacgcgcccgccgacaattggaccaagaccggcgacctcctgatcctcgccgacgcgctcgctgaagaagtcttcaagcaggcgcgtgtgaccgcctatgagaaagtccgtgacgtccctggcgacaccatggacgcgatcgaatgtgcccatccgctgaagggcgttggcggcggctatgacttcgtcgtgccgctgctgcccggcgaccacgtcaccgacgacaccggcaccggcttcgtgcacacggctcccggccatggccgcgaggacttcgacgtctggatggcgcatgcacgcgatctcgatgcgcgcggcatcaccactgcaatcccctacaccgtggacgagaacggcgcctacaccgatcatgcgcccggcttcgtcggcaagcgcgtcatcaccgacaagggcgagaagggcgacgccaacgaggccgtgatcaaggcgctcgttgagcggggcatgctgctcgcgcgcggccggctcaagcatcaatatccgcactcctggcgctccaagaagccggtgatcttccgcaacacgccgcaatggttcatcgcgatggacaagccgattgtggacgccccgggcaaggccggggctatggacatcgcgacgggaggcaagaccaagagcggcgatacgctgcgcgcccgcgcgctgcacgcgatctcggtgacgcaatgggtgccgccgtcgggcgaaaaccgcatcaacggcatgatcgaggcccgccccgactgggtgatctcgcgccagcgcgcctggggcgtgccgattgccgtgttcgtgcgcgagaagggtgacggctccgccgagatcctccaggacgaggctgtcaatgcgcgcattggtgaagctttcgaaaaggaaggcgcagacgcctggtacgcgaagggggcgcgcgagcgcttcctcggatcgcgcgcgagcgaagactggcagaaggtcgacgacattctcgacgtctggttcgattccggatccacccatgctttcgtgctggaagaccccgtgcatttcccgggactgtcgggcatcaagcgcaaggtcgatggcggcaccgacacggtgatgtatctggaaggctcggaccagcaccgcggctggttccactcgtcgctgctggaaagctgcggcacgcgaggtcgggcaccctacgacatcgtgctgacccacggcttcacccaggccgaggacggccgcaagatgtcgaagtcgctcggcaacaccatcgagccgcagtcggtcatcaaggaatccggcgccgacatcctgcggctgtgggttgcatcctgcgactacaccgacgaccagcgcatcggccccgaaatcctgaagaacaccgtcgaaacctatcgcaagctgcgcaacaccgtgcgctggatgctcggcacgctacatcactacaagccggccgacgcggtcgcgcccgaccagatgcccgagttggagcgcttgatgctgcacgagctcgccgtgcgcgcggcagcgatcgggaaggcttatcgggagttcgactacaagagcgtggtcgcgatcctgtccgccttcctcaacagcgagctctcggcgttctatttcgacatccgcaaggacacgctgtattgcgacccgccgtcatccgcgacgcgcaaggcggcgttgacgaccatcgatctgttgtgcgcctcgatactgaaatggcttgccccgatcctcagcttcacggcagaggaggcgtggcgcatgtaccggcccgacgccgagccgtccgtgcatctgacgctgttcccgaccgatctcgaagatttgcgcgacgacgagctcgctgcgaagtgggaggcgatccgcaacgtccggcgcgtcgtcaccggcgcgctcgagctggaacgggccgccaagaacatcggctcctcgctggaggcctcgccggtgatctatgtcgccgatcgcggcatgctgatgacgctgttcgacaccgacctcgccgagatctgcatcacctcgaactacgaggtgcgtgagggcgaggcaccagcttcggcgttccgtctcgatgccgtgccgggagtcgctgtcgtggtggagaaggcagtcggcagcaaatgcgcccgctcctggaagatttcgccgacggtcggcgaagacgctgaataccccgacgtcaccccgcgcgacgccaaggcgctgcgcgagtggaaggcgctgggggtgagcgtctga

SEQ ID NO: 5478 - DNA, 144 bp, BradyrhizobiumColbertium
ttgggacttttgcggcttttcggacatgaggctgactggctcggaagggcgcggaaacgaatggcgatgcggaatcgcgggcgaaacgacgaaatcccggtcttgcgccgagccttcaggctcaggcggaagccgggccgctaa

SEQ ID NO: 5479 - DNA, 972 bp, BradyrhizobiumColbertium
atggtccagccttttaccgttatccgcgacacaacgccggattccgcgattccgaggggcgccgtggtcgccatgggcaatttcgacggggtccatcttggccatcgggccgtgatcgcggctgccctggagatgggccggacgcatggccgccctgcgctggcattgaccttcgaaccccatccgcggcggtttttcagccccaacaccccgcaattccgcctgacggacgagcgggccaagctgcgacttctggccggcaccggccttgccggcgccgtcgtcatgacattcgacaaggcccgtgccggaaccagcgcccaagatttcattcaccatgatctgatcggacgtctcggcgtcagtggtatcgcggtcggctacgacttccatttcggcaaaggtcgcgtcggctcgccgagcctgctcgtcaacgaggcgccacggctcggaatcgaggtcgacgtgcagccgcatgtcgatatcgacgaacggccggtgtcctccagcgcgatccggatcgccctcgccgagggccagctggatgaggccacgaccatgctgggcgcaccctggttcatcaccggcgaggtcatccatggcgaaaagcgcggccgcgacctcggctatcccaccgccaacatccgcctcgacgccaattgcggtctcaagcacggcatctacgcggtgcgggtcggccgcggcgccgagcggctcgacggggtagccagcttcggccgccgcccgacgttcgacaatggcgccccgctgctggaaatcttcctgttcgacttcaagggcgacctttacgggcagctcctcgactgcgctttcatcggcttcatccgcgaggagctgaagttcgacagcctcgaggccctgatccgccagatggacgacgattccgcccgcgcccgcgccatgctggccgccgccccggacgcgtttccgcggctcgggacggtcgactga

SEQ ID NO: 5480 - DNA, 396 bp, BradyrhizobiumColbertium
atggcggttgatttgtcgatgccggttctggtggtggatgactacagcaccatgatccgtatcatccggaatctgctgaagcagcttggcttcgagaatatcgatgatgcaagcgacggttcggcagcgctgaacaagatgcgtggcaagaaatacgggctcgtgatctccgactggaacatggagccgatgacgggttacgacctgttgcgcgaagtgcgcgcggatccgaacctcgccaccacgcccttcatcatgatcacggcggaatccaagaccgagaacgtgattgccgccaagaaggctggcgtgaacaactacatcgtcaagccgttcaacgcggcgacgttgaagaccaagatcgaggcggtcttcccggacatggcgagcgcgtaa

SEQ ID NO: 5481 - DNA, 855 bp, BradyrhizobiumColbertium
atgactgcgctgcatttcgccgaaggcctgcgcgagctcgtgggcggtgtggacgtcgtgctcagcgatatctggggcgtggtccacaacggcctggagtcctttcccgaagcctgcgaggcgctgcacacctatcgcagccacggcggtacggtgatcctgatcaccaacgcgccgcgtccggcggactcggtgcagcggcaattgcgcaagctcggcgtcgcggatgagacctatgatgcgatcgtatcgtcgggcgatctgacccggctctatgtcgccgagcatcccggtcgcaagatgttctggctcggtcccgagcgcgacaactcgatctatcgtggcctcgacgcagtgacagctccgctcgaggaagccgattacatcgtctgcaccggcctctatgacgacgagaccgagacggcggaagactatcgcggcatgatgctgaaggcgcgcgagcgcaagctgacgctagtctgcgccaaccccgatatcgtggtggaacgtggcgaccggctgatctattgcgccggcgcaatcgcggagctctaccgcgagctcggcggcgaggtgatcttctacggcaagccgcaccggccgatctacgagcgtgccatggcgctcgccggagaacgacagggctaccagatcgaccgcaagaaggtgcttgccatcggtgattccgtccgcaccgacctaaccggcgcgcgcgagttcggcatcgattgcctgttcgtgacccgcggaattcatgccgaggagttcgagggtctcgaccagctcgacccggcgtccgtgatggaattgttcggccacccgccgaaggcgctgatgcgcgaattgaagtggtga

SEQ ID NO: 5482 - DNA, 1476 bp, BradyrhizobiumColbertium
atgattcgcatttcgacgatcttcatcgccatctgcatggtcctggtcgcggcttcgctcgggctcgtgctctattcggtcgcgggcatcagcgggacgcaatcggcgatcgtggcgctgaccgcgctgactttcctgattctctacaacgcggtgtcgatgcggctgcgcgaccgcagcgacgtcggcggccagatcgccgacctctcgcggggcaccgccgacctcgcccgccaggtggccgagttcggccgccggcttgccgcgatcgaggggcgcatcgcctcctcaaatgcggccaactccgaccgcatccagtcggtgatcggcgaaatcaacgaactcggcgggctggtcaggcagcttgccacgaccgtggcgactcatgaggatctgctggcgggcaacgcaccggcgccagtttctgcaccggtcacaaagcccgagccggaggcgatgatcgatctggccgccccactcgaggaaaagccggtcgcgcctcctccgcttcccgcaccgcccccacggccggcgccggtcgttcaaactcaatccgccaacccggttcagaccgccaacggacgcaatcagacccagctgctggcgacgctgcgcaacgcgattgacgagaaccgcatcgacatcttcctgcaaccaatggtgacgctgccacaacgcaaggtgcggttctacgaagcggtgacgcgcctgcgcgacgagcgcgaccaattgattgccgccgaggagttcatcagcatcgcggaagcctccgggctgatcgggcgcatcgacaacatggtgatgctgcgctgcgtgcaggtgctgcggcgcctgatggtccgcaacaaggacgtcggcgtgttctgcaacgtcgcggtctccacgctcggcaattccaccaccttcgcgcaatgcctcgacttcctcgaagccaaccgggcgctggcgccctcgctggttcttgagttcaagcagtcgaccttccgcaatctcggcccggccgagaccgagaatctcgccgcccttgcccaacgcggcttccgtttctcgatcgaccacgtcacggacctgcgcattgagccgcgcgagctcgccgatcgcggggtccgcttcatcaaggtgccggctgcgctgctgctcgaccccagacaggcttcgacctccgacatccatccgtccgatctttcggacctgctgggccgcttcggcatcgacctgatcgccgagcggatcgagggcgagcgcgcggtcgtggacctgctcgactatgacgtgcgattcggccaggggttcctgttcgcgccgccccggccattgcggcccgagggggcatctgctaccgccgggacctcacctaaccaggcgaaagacattcagggacctaatggctccgctacacccagcgcaggcgcgacgtcctctgcgcctccgccacaacgcatcaccggcaacgcggcgctcgcgcgtcgcatttga

SEQ ID NO: 5483 - DNA, 123 bp, BradyrhizobiumColbertium
ttgatttcccgaccggagccggggaggacgcgtgacgtttcggtggagcgccgcgaactgcgtgcgatcaagctcgcccgcgaccgcatcgcgcgctgcaaagctttcgccgggccgacctga

SEQ ID NO: 5484 - DNA, 840 bp, BradyrhizobiumColbertium
atgtcgacatccgccgcgctcaagccagctccaacccaacccgaccttgccgccctcaagcagcgccagcacggcgcctggtcgtcgggcgactatgccgtggtcggcacgaccttgcagatcgtcggcgaacagctctgtgaggcaatcgacttgcgtgccggcagcaaggtgctcgacgtcgccgccggcaacggcaatgcgactctggctgcggcgcggcgctggtgtgacgtcacgtccaccgactacgtgccggcgctgctcaagcgcgggcgcgagcgcgccgtggccgaacatctcacggtcgagttccgcgaggctgatgccgaagcgttgccgttcgccaacgccagctatgacgtggtgctctcgaccttcggcgtgatgttcacgccggatcaggacaaggcggcttccgagctcgcacgggtctgcaggtccggcggcaaaatcggcctcgccagctggacgccgcaaggcttcatcggccagctgttcaggaccatcggccagcatttaccgccgccggccggggtgaagtcgccggcgctgtggggcacggcggcgcggctcgaagagatgttcgcaagccaggcttccgagatcgcggccgagccgcgcatgttcgtgttccgctatcgctcgccggaccattggctcgaaatcttcaagaccttctacggacccacgctgaaggcgttcgctgcgctcgacgcgaacggccaggccgcactgaatcgcgatctcctggcgctgctagaggagttcaaccacgccgacgacggcacgatcgtggtgcacagcgaatatctggaagccgtgatcaccaagcgctga

SEQ ID NO: 5485 - DNA, 1089 bp, BradyrhizobiumColbertium
gtggccgcaacggcgctgttcgtgctgaccgcggagcgctacttcaaggatttcggcctgatcagatcggggcctccacaagagcaccggagaggggaagcgaattcccccgaaacgcagccggccggggcggcgatgcagcccggccgcggtcgcaaggcgaaaagtcccttcgagatcccctgggccggctggaaggatatcttttggcggacctatcagcgcattgacgaggatcgactgctcgcgacggcaggcggcgtcgtcttcttcggcctgctcgcgatctttccggccgtgaccgcactcgtctcatcctacggcttgtttgccgatcccgcgacgatcagcgccaatcttcacacgctcgcgaccatgctgcccgagggttccttccagattgtcgaggagcaggtcgcccgcgtggtgtcgaacggcaatgcgacactcggtgtcacgttcctgttcggcctgctgctcgcgatctggagcgccaatgccggcgtcaaggcgatccttgacgccctcaacgtcgcctatgaggaacgcgagaagcgcagcttcgttcggctcaacatggtttcgctggccttcaccgtcggcggcatcgtggcgctgctgttgatggttggggccgtcgtcgccttcccccttgcgctcaatcatctcggcctggcgcccgaaaacaagctgatcgttgcgctggcgcgatggccgctgctgttcctgatcctgcttgtcgcactcgccgtcctctatcgcttcgcgccaagccgtgacgcgccgcgctggcaatggctgagcctcggcgcggtcaccgccgcgattctctggatcgcaggttcggccctgctgtcctggtacctctcggaattcgccaattacaacgcgacctacggctcgctgggcgctgcgatcggcctgatgatgtggatgtggatgtcggtgatcgtcatcatgttcggcgccgagctgaattcggaaatcgagcggcagaccctgcgcgacacgaccacggggcggccgaagccgctgggtacccgccaagccgtttccgccgacaccgtgggcgcgaacgcgccattttga

SEQ ID NO: 5486 - DNA, 588 bp, BradyrhizobiumColbertium
atgctcgcgccatcgggcgaattgctgcgcgccggcatggcgctcaagctcaaccatctcaagcgcgccgcgcaatcttatatgcgtgaccgcaccagccaggccacggggcgcgcaacgtcctatgcgatcgcggccggcctgtttgcagccgccggattgttcgcgatcgcgactttcttcgtcggcttgatcgccctttatcgctgggtcgccatcacctacgggcaattctggggattcgcggtcgtcggcgcggtgctgctggtgctggcggcggtctgtggcggcgtcgccatggcgatgatgaagcggccgaccaagccgatcgtgccacttgccagccggatgcgcgtagcgatcgccagcccgcggattccccgcggaacggtcaagcaggccgtcaaggaggtcgcgacgaccattcccctggcgccgttcgcgcccggcgagcgcggccatggcagaactgcctggcccgttcgcgccaaccggcccgtgcagctcgggctcatgcttgcggcggttgggctggcagggttcacagcggcgcggcgaaggcgtcgcagtcagagactggacgcctaa

SEQ ID NO: 5487 - DNA, 975 bp, BradyrhizobiumColbertium
gtggacccgatcctgatggcaaaggtcgcgaaaaagaccgtgcgcggccgcgccgcgccaaagctcgcgaaagtcgggccaggcgagcttctgacgctgctcgatttcgtccgttatgcggtgagccgctttgtcgaggcgaagctcgcctttgcccacggcaccaccgaccctgtggcggaagccgccttcctggtctgcgaggcgctgcatctcactcccgaccagttcgagggcttcgctcatgcgcgcgtcaccgcggcagaaggcaagaccatcctcgacctcatccatcggcgcgtcaccacacgcaaacctgctgcgtacctcgtcaacaagatctatatgcgcggcctgcccttctatgtcgacgagcgcgtcatcgttccgcgctccttcatcggcgagctcctggattcgcatttcggcggcgaggacaatgcgggctcgctgatcgacgatccaacggcagtcgggcgcgtgctcgatctctgcacgggatctggatgcctcgccattctcgccgcgcatcatttcccgaacgccgccgtcgacgctgtcgacatctccaagggtgcacttgaagtcgcggcgcgcaatgtccgcgaatacgggcttcagcatcggatcagcctctaccgcggcgacctgttcgcccccctcggcgataacagatacgacctgatcatcaccaacccgccttacgtcgacgccgaaggcatggcggcgctgccgcctgagtgcagggcggagccgaagatcgccttcgacggcggcgccgacggtctcgacgtggtgcgccgcatcctgcgcgaagcacccgatcacctcacgccggacggcgggctgatctgcgagatcggccgcggccgggaattggtcgacgaggcgtttccggagctgccgctgctctggctggacaccgaagactccgagggcgaggtgttctggattgccgccgccgatctcggttga

SEQ ID NO: 5488 - DNA, 468 bp, BradyrhizobiumColbertium
atgacctgcccagtcaccatccgcatccaggaagacgatttcgacatcgcgcgcgagatcgcgctcctgaccaggagccggaccgacatcggcgcggtcgtgagcttctccggcatctgccgctccgacgaggacggcgcgaaggtcgccgcgctgacgctcgaacattatcccggcatggcggaagaagagatcgcgcgccatgtcggcgaggccacatcgcgctggccgctgaacggcgttaccgtcatccaccgcgtcggccgcttcatgccgggccagaacatcgttctggtgctgaccgcctcacagcatcgacaggcggcattccaggcggccgagttcctgatggactatctcaagaccaatgcgcctttctggaagaaggaagagagcgccaccggcacgggttgggtcgaggcccacatccgcgacgacgaagccgccgcacggtggacccgatcctga

SEQ ID NO: 5489 - DNA, 252 bp, BradyrhizobiumColbertium
atgaaggtgaaatatttcgcctgggtgcgcgagcgcgtcggcaaggcggaggagatcatcgagccgcccgccagcgtgcgcacggtggaggaactgatcgcctggctctccggtcagagcgaggcctatgcgtatgccttcgagaagccgaaggtgatccgcgccgcgatcgaccacgcccatgtcaagccggacgccgccatcgcgggcgcccgcgagatcgcgttcttcccgcccatgacgggcggctag

SEQ ID NO: 5490 - DNA, 126 bp, BradyrhizobiumColbertium
gtggtgccggtggtctcgatgatcggactggcgctgctgtgggcttcggcgatcctgaccatgtacaccggctacgactatttccgtgccggcatccatcacctcatcgaggaggacgagggatga

SEQ ID NO: 5491 - DNA, 2058 bp, BradyrhizobiumColbertium
atggttcacaattcctccgacaaccgggacgaccgcgcgcgcaagtcgccgcaggctgccgcgaacgacgcgccgcccgaagggctggcagcgccggacctcgatcccgcgacggcaggcgacgacgaggacgattcgctgctgccggatatcctggaagagagcggtacggtcggcgaaggcccactggcgagcggtcacgaggcgatcgaacgcgcggttcgactcgcccccacctcgcccggcgtctaccgcatgctcaatgccaacgccgacgtgctctatgtcggcaaggccaagaacgtcaaaaagcgcctgtccagctatgcgcgccagagtgcgccccttccggcccgcatcctgcgcatgatcgcggcgactgtgagcgttgagatcgtctcgaccacgacggagaccgaagcgctgctgctcgaggccaatctcatcaagcagctgcggccgcgcttcaacgtccagctgcgtgacgacaagtcgtttccctacatcctgatcaccggcgatcattgggcaccgcagattctcaagcatcgcggcgcccagacccggcccggccgctattttggcccgttcgcctccgccggcgcggtcaaccgcaccatcactgcgctgcagcgcgcgttcctgatccgctcctgcaccgattccttcttcgagagccgcactcggccctgcctgctccaccagatccgccgctgcgccggtccctgtacccgggagatcgacttcggcggctattcaactctggtgcgcgaggcgagcgacttcctgtcgggaaagagccatgccgtaaagcaggagctcgccggcgagatggagaaggcggccggcgaactcgaattcgagcgcgccgcgctctaccgcgaccgcctcgccgcgctttcggcgatacagtcccagcagggcatcaatccgcgcacggtggaggaagccgacgtatttgccatccaccaggagggcggcttctcctgtgtcgaagtgttcttcttccgcaccggccagaactgggggaaccgggcctatttcccgcgcgcggagaagacctttacgccggaagaagtgctcggctcctttctcgcccagttctacgacgacaagccgccgccgaggaacatcctgctctcgcacaagatcgaggagagcgagctgctcgccaatgccctctcgatcaaggccggtcacaaggtcgaggtcaccgcgcccaagcgcggcgagaagaaggaactggtcatccacgcgctgaccaatgcgcgcgaggcgctcggccgcaagctcgcggacaccgcgacgcaaagccgtttgctcgaggccatggccgcgacgctgagcctgccgcacccgcccaagcgcatcgaagtctacgacaacagccacatccagggcaccaatgcagtcggcgccatggtcgtcgcgggtcctgatggtttcgtgaaaaatcagtaccgcaagttcaacatcaagtcggaaggactgacgccgggcgacgattacgccatgatgcgcgaggtgctggagcgccgtttcaagcgcctgatcaatccgcccgaagagggtgtagccaagggaaaggacgacgacttcccgcaatggcccgacctcgtgatcatcgacggcggccgcggccagctcaacgccgtccgtgagatctttgcaaatctcggcctgactcaggtgtcgctgatgtcggtcgccaaggggcctgaccgggatgccggccgcgagacccttttcatgcctgaacgcgaggccatcaagctcgagccgcgcgatcccgtgctctatttcatccagcgcctgcgcgacgaggcccatcgcttcgtcatcggctcgcaccgcaagctgcgcaagaaggacatccgcgaggccggtttgcaggaaattccgggcatcggcccgtcacgcaaacgtgccttgctgcaccatttcgggaccctgaaggagatcgaacgggcgtcgatcgccgatctcggcaaggttccgggggtgagcgccgagagcgcgcgcaggattttcgagtatttccatccccagccggggtga

SEQ ID NO: 5492 - DNA, 624 bp, BradyrhizobiumColbertium
atgaagaggctcgttgtgggcgcagccgcattggtcgccgccggctggacggcttcggcaccggccgccgatctcaattacgggcagcgtgcgccctacaccgtcaatcagccgctcaatgcctatagctgggcaggtccctatctcggcggcaacatcggctatgaatggggctcggtcgacaacaaccccacgaagccgtcgggcttcgtgggcggtgtgcaggccggttacaatttccagaacggtccgtgggtgttcggcgtcgagggcgacatccaggcggccggtgccgacgacacctttgcgccgtggaagttctccaacccgtggttcggcaccctgcgcggccgcgccggctatgccttcagcaacgttctcttctatggcaccgccggtctcgccttcggcgagttgcgcggccagaccttcggctgggcggagtcgcatacgactgcgggttggaccatcggtgccggcgcggaagtgggccttgcgtcgaactggagcgtcaagctcgaatatctctacatcgatctgtcgacgagccagttcgcaattacgggggtgtcaaacggctatagcgccagcgttgtgcgcgcaggcgtgaactatcacttctga

SEQ ID NO: 5493 - DNA, 216 bp, BradyrhizobiumColbertium
atggccatgacgggaacggtcaagttcttcaacggcgagcgcggctacggcttcatcaagcctgacgacggcggtcgcgatgtcttcgttcacatcaccgccgtcgagcgggcgggactgaaggatcttgccgaaggacagcgtattactttcgaagtcgaaccggacaagaaggggaagggaccgaaggcggtcaatctggtgatcctctcctag

SEQ ID NO: 5494 - DNA, 861 bp, BradyrhizobiumColbertium
atgaactaccgacacgcctttcacgccggcaacttcgcagatgtcatcaagcacatcgtgctggcgcgcatcctcacttatctgcaggacaagccggccgcattccgcgtcatcgatacccacgccggcgccggcctctacgacctcgatagcgacgaggcgcgccggagcggcgagtggctgaccggcattgcgcggctgatgcaggcgcgcctgtcgaacgagaccgcagcgctgaccaagccctatctcgacatcgtccgtgccttcaatccgaagggcgagctcagggcttatccgggctcgcccctgattgcccggggcctactcaggccgcaggaccggctcgtcgcctgcgagctcgagccgaaggcacgcaaggctctgatcgacgcgctgcgccgcgacgagcaggcccgcgtggtcgatctcgacggctgggtggcactgcctgccttcgtgccgccgaaggagcggcgcggcctcgtgctgatcgatccgcccttcgaggccaaggacgagttcgaacggcttggcgaaaccttctcggtcgccttcgcgaaatggccgaccggtatctatgtaatttggtaccccgccaagagccggcgcgccaccgacacgctggcccagacggtggcgcggctcgcagctgcagcaaaaccgccgggaaaatgcctgcgcctcgaattcagtgtcgcgccgcaggccgatagcaaggctctcacctccgccgggcttctgatcgtcaatccgccctacacgctacagggcgaactcaagaccatcctgcccgagctggaaatgccgctgggccagggcggagctgccagattccgacttgaggtgccgaggccgtaa

SEQ ID NO: 5495 - DNA, 705 bp, BradyrhizobiumColbertium
atgtttcattccagattgcattcattctcccgcctcgtgatctcgctgaccctttccatgatgcttgctgcaggcctggcctcattcgcaagcgacgcaagggctcaggacaagcggcagaacgcgcccggtgaattcgatttctatgtgctggcgctgtcatggtcgccctccttctgcgaggaagccgccgagcgcggcggccgttcgcagatgcaatgcggcggacggccctatgcctttgtcgtgcatgggctatggccgcaatacgagagcggttttccggaatattgcaagcggccggccccgcggctgaatcgcaacatcgtctcctccatgctcgacttgatgccggcgccgggcttgatcttcaacgaatgggacaagcacggcacctgctccgggctcgagggccgcagctatttcgagacgatccggaaggcacgggccgcgatcaagatcccggccgattatctcgatctgtcgcaagccaagaccgtctcgccggcggaggtcgaggaggccttcgtccaggccaatccgggtctcagcaatgccgccatctcggtcacctgcaaccggacacggctctccgaggtccgcatctgcctcagcaaggatctgcaattccgcgcgtgcgacgagatcgaacgccgcgcctgtcgccgcgaccaggtgacgatgccaccgatcagaggtgggtga

SEQ ID NO: 5496 - DNA, 468 bp, BradyrhizobiumColbertium
ttgaccatgcgcgccccctccctgaaatcgcttcgcttcgccgccgtgctcggcctcatgttcggagcgctgacgctcggcgaggccaaggctgccaatccgctcgagatgaatttctggctgagcgggccgcgctatgacggcactgttgccgattgcgacagggcgctgccgacgatcgccacccagttctgggagaaagaaagctcgttctggaattcccctttgaagatcaccggcttctccgccgttcgcgaagtcgcattccgcccctggcagtccgacaacattccgcgccggtattgcgccgccgacgctatcctcaatgacggcaaggtgcgcaaggtgcatttctcgctcatcgaagacggtggctttgccggttacggcaatggcgtcgaatggtgcgtggttgggctcgaccgcaactgggcctacaatccggcatgccgcgccgccaagccctga

SEQ ID NO: 5497 - DNA, 300 bp, BradyrhizobiumColbertium
atgcgaatcattgcggccgcgggccttcttgccagcctggttgtcccgggcatgatggcgagccagtcggcgcgtgccgactacgtgccgccgttcaagggcaacgacaccggcggcatcatcgcttactcgatggcgacccaggtcgatgcgcgtcaggtcgcggtcgatcactgcgcgcgctacggcaaggtggtgaaattcctggccgtgcagccctatgagggcggctacatctcgttctcctgccgctgggtgccctatggcgccgccgagcagccgatccgcacgctctactga

SEQ ID NO: 5498 - DNA, 531 bp, BradyrhizobiumColbertium
atgacgcgcaaactcgctttgctcggctcgctgctttgcctcgtgttctccgcaggcagagccagcaccgacgacctgccggtgcgcaaggccggtctttgggaaatgaaactggtcacatcaggctcgcccgtgcctgagatgaccatgcagcactgtaccgacgagaccgtcgacaaggagatgagcaacaacgtctccccgatggccaagcagatttgcgccaagcaggagatcaagaagaccgcgaccggctatgtcagcgattccgagtgcagcgtcgcgggcgtcagcacgacgtcgcatgccgagatcactggcgacttcaattcggcctatacaatgaagaccacctcccatgcgcaaggcggcgtcgccggcgcggcggggcgcgataccaccatgacgctgcaagccaaatggttaggagcttgcaagcccgaccagaagccgggcgacatcgtgatgcccggcggcttcaagatgaacgtgcgcgacatggacaagctgaaggcgctgcttccgaagtag

SEQ ID NO: 5499 - DNA, 1389 bp, BradyrhizobiumColbertium
atgagcacgatcgataccggcctgacgctgctcaagagcgctgccggccgcgtctccgccgccaatggctggatgggcaacgcgttcaagggctggatgccgaccggcctctacgctcgcgcgctcctgatcatgatcgtgcctatggtgatcctgcaatcggtcgtcgcgttcgtgttcatggagcggcactggaacacggtgacgcgccgcctgtcggccgctgtggtgcaggacatcgccgcactcatcgacgtctacaagggctatccgcaggaccgggatcgcgaccagatccgccgcatcgcccagcagcggctcggcctcgtcgtcgacttcctgcctgccggcgatatgccgccgccagggccgaagccgttcttctcgctgctcgaccagacgctgtcggtgcagctcggccgccagatcggccgctcgttctggatcgacacggtcggccgctccaatctggtcgagatccgcatccagctggacgatgccgtgatgcgcgtgttcgcgcagcgcagcgccgcctacgcttccaactcggagatcttcctgttctggatggtcggcacgtcgtcgatcctgttgatcgtcgcggtgctgttcctgcgcaaccagatcaagccgatcctgcgcctcgccgatgccgccgaaagcttcggcaagggccgcgaggcgccaaatttccgtccgaggggcgcacgcgaggtgcggcgcgccgcagtcgccttcctcgaaatgaaatcgcgcatcgagcgcacgatggagcagcgcaccgcgatgctcgccggcgtcagccacgacctgcgcaccatcctgacccgcttcaagctcgagctcgcgctgatcggcgacagccccgagctcgagggcatgcgcaaggacgtcgacgagatgtccatgatgctggaggactatctcgccttcgcccgcggcgataccggcgagcagtcgcagccgaccgacatggcgcaggcgctcgaggagctgcgcagcgatgccgaacgccacggccacagcgcaaccgtcgccttccacggcctgcctgtggtgacggtgaagccggcctcgttcaagcgctgcctcgccaacctcgtcaccaatgcggcacgctacggcaagaacatcgccatcaccggccagcgcgatcaccgctatttgaccgtcaccgtcgacgacgacggcccgggcattcccgctcacttgcgcgaagaggtgttcaagccgttcctgcggctggacaacgcccgcaaccaggacgaaggcggcaccggccttggtctcgcgatcgcccgcgacatcgcccgcacccacggcggcgatatcacgctcggcgacagcccgatgggtggattgagggcgagcgtccggattccggtgtag

SEQ ID NO: 5500 - DNA, 726 bp, BradyrhizobiumColbertium
gtgccgctcgctgccacgctcgcccgcccgccggtccaccccgccgacgaccccccacatttgcttctggtcgatgacgaccgccgcatccgcgatctgctctcgcgctttcttgccagcgaaggataccgggtcaccaccgcggcgagcgctggcgatgcgcgctcgaaactgctgggcctgcatttcgacctcctgatcctcgacgtgatgatgccgggcgagaccggcttcgacctcgcccgcttcatccgcacctcctcctcggttccgatcgtgatgctgacggcgcggcacgaggcggaagcccgtatcgaaggcctgcagatcggcgccgatgattacgtggcaaagccgttcgagccgcgcgagcttgcgctgcgcatcaacaacatcctcaagcgcgccgccccgccgccgcaggccgcgaccgtggagaagatcgccttcggtccctacgtctaccatctggagcgcggcgaactgcgccagggcgaggaggtcatccacctcaccgaccgcgagcgcgagatgctgcgcattctctcggagacaccgggcgagaccgtgccacgtagcgcactgaccgggaacggcagcgtcaacgagcgcgccgtcgacgtgcagatcaaccgcctcaggcgcaagatcgagaccgatcccgccaatccgctattcctccaggcggtgcgcggcatcggctaccggctggtggcctcgccctaa

SEQ ID NO: 5501 - DNA, 543 bp, BradyrhizobiumColbertium
atgcctgacataaatttcgccacttcgtctcccgacgctgccgtgccccggccggcggccgatgacggaggcaatttgcgctgggatatcatcgagctgctcttcttcgcctatcgcgatttcgtcggcgaccccgaccaggagctcgaggctttcggcttcggccgcgcccatcaccgggtgatgcacttcgtctatcgctatcccgggctcaaggttgccgatctcctcgacgttctgcgcatcacgaaacagtcgctcggccgcgtgctcaagcagctcctggatgaaggctatatcgtgcagaagaccggcgacaatgatcgccgccagcgtctgctctatgcgacgccgaagggcgaggcgctggtgcagaagctcgccggacttcagaccacgcgcatcaccagggcgcttgccgagatgacgccgcaggacgccgagaccgtgaagcgcttccttcgcgcgatgatcgaccgcgacgatccggacaaggtgctcgagacgatcttcgcttccgtcaaccacgacgccaaggagtga

SEQ ID NO: 5502 - DNA, 189 bp, BradyrhizobiumColbertium
gtggcggcgctgttctggcgcccgccctgcccgctccgggcccggctggctttgattggtttctgccggatcgccgccagccttgttacggccggtttccgtggccagcatgccgccgaggacatgcttttgcggaaggcggaagtccagtatgttttgccgaaatgccgctcgacaatcgcacggtag

SEQ ID NO: 5503 - DNA, 1083 bp, BradyrhizobiumColbertium
atgaccatgaaattcgatatccagcccgcatccaatccaacccctgaaaaggaccgcgtcgccaagctggtggaccccggcttcggacgggtcttcaccgatcacatggcgattgtccgctacaatcaggccaagggcggctggtatgaagccaagatcgaggcgcgcgccaacttccagctcgatccggccggtgccgtcctgcactacgcccaggaaatcttcgaaggcctgaaagcctacaagcgcgacgacggcggggtgaacctgttccggccggacgccaatgcgcgacggttcagggactcggccgaccgcatggcaatggcccagcttccggaagacgtcttcatcgaggccgtcgagcaggtcgtgcgcatcgatcgcgcctggatgccgggcggcgagggcagcctttacttgcgtcctttcatgatcgcgagcgagacctttctcggcgtcaagccgtcgtccgaatacatctttgcggtcatcgcttcgccggtcggctcctacttcaagggcggccctgcgccggtctcgatctgggtgtcggagaactacacgcgcgctgcggtcggcggcaccggcgccgtcaagtgcggcggcaactatgccgccagcctgcgcgcccaggccgaggccatgcagcacggctgcgatcaggtcgtcttcctcgatgcgatcgagcgccgatacgtcgaagagctcgggggcatgaacgtgttcttcgtgttcgacgacggctcgctgtcgacgccgcccctcggcaccattctgcccggcatcacccgcgactccatcatcacgctggcgcgcgacgccggcaagaccgtgcgggaggagccgtattcgctcgagcagtggcgcaaggatgcggcgagcggcaggctcaaggaagcctttgcctgcggcacggcagccgtgatctcgccgatcggcaaggttcgttcggtgagcggcgatttcgagatcggcggcggcgccgccggccccgtggccatgggcctgcgcaagcagctggtcgacatccagtacggccgcaccaacgatccgcacaactggatccgcaaggtgttctga

SEQ ID NO: 5504 - DNA, 525 bp, BradyrhizobiumColbertium
atggcaaccaagctctcgcagcccatcaagtgggtcgttctcgccgcaatcaccggcgtctccgtcttcggcatcctgaccgtcggccccacgcacgaggtcgtcgcgcaagaccgctcgccgatcgtcgacgtgcgcacctccgatcccgagatgaacgccgcgatcgtacgcgcccgtgccacgctcccgaccttctgggcctcctatgagtcgcccaagccgtccgaggccgggcattccctcaaggtccgcttctcgacccggaagggcggggagcacatctggatcggtgaggtgaagaagcagcccgacgggaccttgaccggcctcttcgccaacgagccgcgcgacatgccgggcaagcgggccggcgataaagtcgcgttcggggaagctgacatctcggactggatgttcatgcgaaacggcaagatcgtcggcggcgaaaccatcaagccgacgctgaaattcctgccgaaggccgatgccgatgccctgagggcccggctggagacgccgtag

SEQ ID NO: 5505 - DNA, 1515 bp, BradyrhizobiumColbertium
atggccgagaaacccaagaaaccgcagaaattgaaggcgcgcctgccgcgcgggctggaggatcgcgatccctcagcgatccgggcgacgcgcgagatggtcgagaggatccgcgccgtctacgagctctacggcttcgagcccgtggagacgccggcgatggaatacaccgacgcgctcggcaaattcctgcccgaccaggaccgcccgaacgagggcgtgttctcgttccaggacgacgacgagcagtggatcagcctgcgctacgatctcaccgcgccgctcgcccgctacgtcgcagaaaacttcgacacgctgccaaagccctaccgcagctatcgcgccggctacgtgttccgcaacgaaaagcccggcccgggccgtttccgccagttcatgcagttcgatgccgacaccgtcggctcggccacgccggcggcggacgccgagatttgcatgatggcggcggacacgatggaagcgctcggcattgcacgcggccagtatgtcgtgaaggtcaacaatcgcaaggtgctggatggcgttctggaagccatcgggctcgcgggtgacgaaaacgcaggccgcagactgaccgtcctgcgcgcgatcgacaagctcgacaagttttctgccgacgaagtgcgcaagctgctcggtcccggacgatgggacggcggcgaggaaggcaagggcgacttcacgaaaggcgccaatctgagtgcggcggaagctgacgttgttctcgccatcaccaagccgcgcgacgattggaaagaggccattgcggcggcggaaacctacctcgccaagagcgaagtcggtcaggccggcgtgaacgagctggaagagatcgcccggctggtcacggcgtccggttatgacgcggatcgcatcaagatcgatccctccgtcgtgcgcggcctcgaatattacaccggccccgtctacgaggtcgaactcctgctcgacaccaaggacgagaagggccgccccgtacggttcggctcggtcggtggtggtggccgctacgacggcctcgtctcgcgcttccggggcgagccggtgccggcgaccggtttctcgatcggggtgtcgcggctgcaggccgcattgacgctgctcggcaagctcgacacgcggccggaattcgggcccgtcgtcgtcaccgtgttcgaccgcgaccgcgtcgccgactatcagaagatggtcgcatccttgcgcgcagccggtatccgcgccgaactctatctcggcaatcccaagaacatgggcaatcagctcaaatacgccgaccgccgtaactcgccatgcgtgatcatccagggctcggatgaaaaggcgcgtggcgaggtgcagatcaaggacttgatcgaaggcgccaaggcggcggcagcgatcgcctccaaccaggaatggcgtgagactcgcccggcgcaattctcgtgcagcgaggccgacctcgtcgccaaggtgcgcgaggtgctggcgcgccatgacgtgagttggggctag

SEQ ID NO: 5506 - DNA, 204 bp, BradyrhizobiumColbertium
atgcctgagatcaccatcagcatggccgaaggccgcaccgacgagcagaaggccggcatgatgcgcgacatcacccaggcactggtgaagaatctcggcgtcgatgccgaagccgtcgtcatccagatcaacgaggccccgctccgccacaagatgaagggcggcaagactttcgtggagcgcgcggcggcggcgaagaagtga

SEQ ID NO: 5507 - DNA, 393 bp, BradyrhizobiumColbertium
atggacgcacgcgacttcatcaagcccggcatgagcgccgagcgcacgctggtggtgccgaccgagcgcaccgtcgggcacttcgtgcccggcatgcccatggtttacgcgacaccgatgatgatcctggagatggaaatgacctcgggcgatgcgatccgcgccgcgctccagccaggctgggtgaccgtgggcaccgaggtcgacatccgccatctcgctgccgccctcgtcggcgcaaccgtgcggaccaccgcgaaggtggtcgcggtcgagcgccgcgtcatccgcttcgaggtcgaggcgttcgaaggcacgcgcaagctcggtgaaggccaccatgcgcgcggactggtcaatgtcgagatgttcaacaaacggctcggagcctag

SEQ ID NO: 5508 - DNA, 1362 bp, BradyrhizobiumColbertium
gtgaacctctacgcaaaacttctggaacgacaggccgagcggcgccccatcaagatcggactgatcggggcgggcaaattcggcgcaatgtatcttcatcaggtcctgcgtacgccgggcgtccatctcgtcggaattgccgacctgtctccatcgcgtgcccgcgaaaacctgaaccgggtgggctggcgcacggagcaattcgccgcggcctcgctcggcgatgctctcaagaacggcacgaccttcctgaccgacgactgggaagcgcttgtgaagtgcgaaggcatcgaggtgattgccgagtgcaccggcaatcctgtcgcggcggtcgagcactgcctcggcgccttctctgcaggcaaggccgtcatcaacgtgaccgtcgaggccgacgccttctgcggaccgatcctcgcgcagagagccaggcaggccggcgtgatctacagcctcgcctatggcgatcagccggccctcgcttgcgacctcgtagattgggcgagggcctgcggatttcccgtcgtggcagcgggccgcggccacaaatggctgccgcattaccgggaatcgacgcccgaaacggtctgggatcactggggattgtctgccgagcaagctgcgcgcggcggcatgaatccaaagatgttcaacgcgttcctcgacggctccaagcctgcgatcgaatccgccgcaatcgcgaacgcaacaggcctgaaggcgccctcgcatggcctcgcattcccaccgggatcggtcgacgacatcccgacgctgatgcgcccccgttcggagggcggcatcctggaatccaagggccaagtcgaggtcgtgtcctgcctgacggccgaaggcagacccatccccaacgacatccgcaagggcgtgtgggtctgtttcgaaggcgacagcgattacatccgcaactgtttccaggaatacagcgtcgtcaccgatccaagcggtcgttacatgagctcctacaagaagtggcatctcatagggctggagcttggaatttcagttgcctcgatcgctctgcgcaacgaggcgacaggcgttgccacgacgttcaacgccgatgttgccgccacagccaagaaggacttgcgcgagggagacacgctcgacggagaaggcggctacaccgtcttcggcaagctgacgcccgccagcacctcgcttgaaaagggctatctgccgctcgggcttgcgcacaatgtgcgattgaccaaggcggtcgccaaagacgcctgtatcacctgggcggatgtgacgattgacgagaggctgcctgccgtgcgtctccgcaaggagcaggaaacgtcgtattcgtctccacaagcccgaaaggtgggttag

SEQ ID NO: 5509 - DNA, 837 bp, BradyrhizobiumColbertium
gtgatcgcagtggcagatagcagcaccctccaaaacatcaccggtaccatcctcctcgccggcgccggcaagatgggcggcgcgatgctgacgggatggctggcaggcggactcgatccacggcgggtcgcggtggtcgatccgcacatcgcgcccgagatcgccgcactggccgccaagggcgtcgtgctcaatcccgatgtgaagaccgccggcccggtcgagacgctggtcgtcgcggtgaagccgcagatgttccgcgaggcccgcgccaagctgaaaccgttcatctcggacaagacctcggtggtctcgatcatggcgggcaccacgatcgcctcgctcgatgaggtctgcggcggcgccgtggtccgcgcgatgccgaacacgccggccgcgatcggccgcggcatcaccgtcgcggttgcggcgaagaacgtcaatgccgggcagcgcgcggtggccgacgcgctgctgcgcgccaccggctcggtcgaatgggtcgaagacgaagccctgatggacgcggtcaccgccgtctccggctcgggccccgcctatgtgttcctgcttgccgaggagctcgcccgcgccggggtcgaggcgggcctgcccgaagcgctggcgacgaagctcgcgcgcgagacggtcgcgggctccggcgagctgctgcaccgatcggagcttgctgcgagcacactgcgccagaatgtcacctcgcccggcggcaccaccgcggcggcgctcagcgtgctcatgggcgagcccggcctgcgcgagctgatgatccgcgcgatcgccgcggcgacaaagcggtcgaaggaactggcgaagtag

SEQ ID NO: 5510 - DNA, 543 bp, BradyrhizobiumColbertium
gtgcgtatcaaggacaacaagaaggcaagaggtcgagacggcatgtccctgctcgaaggcgctatcgattccagaagccatccgcttgcggtggtcgaggacatcgctgccagcaacaactggccgttcgaacgctccggcgaagacgaactcacgattgtctcgaagggacaatggaccgactatcagctctccttcacctggatgggcgagatcgaggcgctgcatctggcctgcgccttcgacatgaagatcccgcccgcccggcgcggcgaggtgcagcggctcgtcgccgccgtgaacgagcagctgtgggtcggccatttcgacttgtggaccaacaccggcatggtcatgcatcgccaggcccttgtgctgccgggcggcctcaccgcctcgacggcgcagtgcgaagccatgctggccggcgccatccacgcctgcgagcgctacttccccgcgttccagttcgtggtctgggccggcaagaccaccacacaggccatggacgccgcgatgttcgacacggtcggagaggcgtag

SEQ ID NO: 5511 - DNA, 558 bp, BradyrhizobiumColbertium
atgttgcaagatccccaagccgaaacctcccaaacagagcccacgcaggttcccgcagacctgccgccggcgcccgaccatccgcgtttcgccaagccgcagcgggtggccttcgtgcaggcctgctggcaccgcgacgtggtcgaggaagcccgcatcgccttcctgaaggaggcggaagcgcgccatctcacccacgtcgacgtgttcgaggtgccgggctcgttcgagatcccgctgcacgcgcaggtcctcgccaagacgcggcgctacaccgcgatcgtcgcggccggcctcgtcgtcgacggcggcatctaccgccacgagttcgtcgctgacaccgtgatcaaggcgctgatggacgtgcagctgcgcaccgaggtgccggtgttctcggccgtgctgacgccgcagcaattccatgagaccgaggtccactacgacttcttccgcaagcatttcgccatcaagggcgtggaggtcgcggcagcctgtgcggagacgttgcttggtctggagcgcctgcgcggccaggtcgctgcgggaatcgttggatag

SEQ ID NO: 5512 - DNA, 1035 bp, BradyrhizobiumColbertium
atgagacgtctccgcattctcgtgctgatgcatccggacttcctgcctccggactcctctgacggatacaccgcacaggaaatcaacgcgtggaaaacggaatatgacgtggtaagcaccttgcgcgaggcaggccatgaggttcgcccgctcggggcgcaggaggagatcaagccagtccgcgaagcgatcgaggagttcaagccacacgtggttttcacgctgctggaagaattccattccaacgtcgcttacgaccagcacatcgccagctatctcgagctgatgagggtcccttataccgggtgcaatccgcgcggcctgatccttgcgcgcggcaaggatctgtccaaaacgctggtgcatcaccgccgcatcgcggtgccggccttcgccgttttcccaatgcgccgcaaggtcaagcgccccccgcgtcttgcgctgccactgatcgtcaagagcctgaacatggatggctccttcggcatctcgcaagcctccatcgtcgacaccgacgagaagctcgcggaacgcgtcgccttcatccacgagcggagcgaaaccgccgccatcgccgagcagttcatcgagggacgcgaactctatgtcggcgttctcggcaacaaccgtctgcgtgttctgcctgtttgggaactgaaattcggcaacatgggcgggcgcaggtcacggcacatcgccaccgagaaagccaagcacgacaccgattatcaggagcgggtcggcatcgtcgacgggcctgcaaaagacctcacgccggaagtcaccgcgcgcatccagcgtgccgcaaaacgcatctatcaggtcctgggcctcgacggctatgcgcgcatcgactttcgcctctccgccgacggcacgccctatttcatcgaagcaaacccgaatccggaaatcgccaggaaccaggagttcgccaccgcggctcaacatgacgggctccaatatccggatctcctgcaccgcatcctgaccctcggaatcagccgggcaaaggcaggtgtatcgttaggctga

SEQ ID NO: 5513 - DNA, 1029 bp, BradyrhizobiumColbertium
atgccacgccggaaatttgcttgggagaagctgtcggatgacgcgttgctcaagcaacgcctccgcagcctgaaggttacagtcgaaggcacctggctcgaagactgcgttggcaccctctacgaggaactggaagagcggggcatccggctgcggccgcacacatggatctcgagcgaatggttcagccccggcgacgtgcccggcatcgccatccctttttatctcgcccatccgcgcctgatgaagctcgagaagaagatgatgttcgacgtcgagggcggaacctggcgcgagtgcatggctatcctccgccatgaggccgggcatgccttgcagcatggttaccagttgcagcggcggcggcgctggcaacagctgttcggcccgtcgtcgaagcgctacccgcgctactaccggcccaatccggccagcagacgttacgtccagcaccttcggctctggtatgcacagagccatcccgacgaggatttcgccgagacctttgcggtgtggctgcggccgcgctcgaactggcggacccgatatgccggttggccggcgctgaagaagctcgaatatgtcgacgagttgatgggcgagatcgcgggaaagcggccgcagatcacgacgcgggagcgcgtcgacccgctgagccggctcagccagaccctcgaagagcactacaagaagaagcaggcgttctacgccttcacgccaccgaaaacctacgaccgcgacctgtcccggctgttttcagccgatccacgtcaccatcgatcaacgccggcctcgaccctgatcaggcggcaccgcgcccagatcaggcaattggtcgcgcgatggacgggcgagaaccagctcacgctcgatgccgtgcttgacgacatgatttcccgctgccgggatctcgatttgcgggccgtcggccccgaacagaagctcgtcctcgatttcatcgtcctcgtgaccgccaagacgatgcacgcgctgtttggcccgtcccggcgcaaatggatcgcgctatga

SEQ ID NO: 5514 - DNA, 954 bp, BradyrhizobiumColbertium
atgtcggccaagaacggctccatcaagctcgtcgccggcaactccaatccggccctcgcccaggccattgcgcagggcctggatctgccgctgaccaaggcggtggtacggcgcttcgccgacatggagatcttcgtcgaaatccaggagaacgtccgcggctcggatgctttcatcatccagtcgacctcgttcccggccaacgaccacctgatggagctcctgatcatcaccgacgcgctgcgtcgttcctcggcacgccgcatcacggcggtgctgccctatttcggctacgcgaggcaggatcgcaagtccggctcgcgcacgccaatctcggccaagctcgtcgccaatctgatcacgcaggcgggtgtcgaccgcgtcatgaccctcgacctgcatgccggccagatccaggggttcttcgacattccgaccgacaatctctacgcggcgccgctgatggtgcgcgacatcaaggagaggttcgacctctccaaggtgatggtgatctcgcccgacgtcggcggcgtggcccgcgcgcgcggccttgccaagcgcatcaacaccccgctcgccattgtcgacaagcgccgcgagcgtcccggcgagtccgaggtcatgaatgtgatcggcgaggtcgccggctacacctgcatcctcgttgacgacatcgtggactccggcggcacgctggtgaacgcggccgacgcgctgatcgccaagggcgccaaggacgtctacgcctacatcacccacggcgtgctctccggcggtgcggcggcacgcatctccggctcgaagctgaaagagctcgtgatcaccgactcgatcctgccgaccgatgcggtgaccaaggcgccgaatatccgcacgctgccgatcgccagcctgatctccgacgcgatcgcgcgcacggcggcggaggagtcggtgtcgagcctgttcgactga

SEQ ID NO: 5515 - DNA, 618 bp, BradyrhizobiumColbertium
atgagggacgcgtcattcactttgcgccgcgcgggttcgcgcgcgctggcggtcatgctgctggcggctgcgaccgcacttggcggctgcgccggaggtggcggcggtgccgcgaactcctatgcgatggcgccgagcggcggcagcagcgcgacggtggcgttcgaatcgatcgacggaccgccgccgcaggtgttcgaccgcatggtcggggtgctcgacagcgaatccaagctgcgcagcctgtcggtggtctcccgcgagggcactgccgcctatcgcgtgcgaagctacctctccgcccaggtcgtgcgcggcaagaccgtgattgcctgggtctgggacgtctacgacgccaaccagcagcgggcgctgcgcctctccggcgaggaaccgacctcggccaagggcggccgcgacgcgtgggcggctgccgacgacctcgtgttgcggaagatcgcccaggccggattcagcggactttccaacatgatcaacggaacgccggatgccccgggcgcggctccggccttgcggggaccagcggtggcgagcgtcatcaaggacgctccgctgtcggacatgccgacttcggcgctaggctatgccgaccaataa

SEQ ID NO: 5516 - DNA, 768 bp, BradyrhizobiumColbertium
atgacacttgcttcgtcgctgctgtccgccgtgcccggcctgcgccatgccttcttcactcgcgaggggggcgtctccagcggcatctatgccgcgctcaacggcgggctcggctccaatgacgatcagaacctgggcgccgagaaccgccgccgcatggccgagcatgtcggcgttgcgcccgaacgcttcctcagcctgcaccaggttcattcgcccgacgtgctcgtggctgatgcgccctggccgaacggaccgcggcccaagggcgatgcgctggtgacgaagacgccgggcatcgcgctcggcgtctccacggccgattgcggaccggtgctgttcgtcgatcccaatgcgcgcgtgattggcggcgcccatgccggctggaagggcgcgctgaccggcgtgctggaagcaacgatctcggcgatggagaagcttggtgccacgcgcggcgatgatgccgccgcgatcggccccatgatccgccaggagagctacgaggtcggcaacgagttcgtgacgcgcttcatcgaggcggatgcggacaacgccatgttcttcatcccgtctgtgcgcgagggccacgcgatgttcgatctcgccggcttcgttcgcaagcggctggaatccgccggcatcctgatgatcgacgatctcgggctcgacacctatgccgacgaacgcttcttcagctatcgccgctcggtgcaccgcaaggagccggattacggccgccacattcacgcgatcgcgctcgagacgtga

SEQ ID NO: 5517 - DNA, 1119 bp, BradyrhizobiumColbertium
gtgaccgactcgccgctcctcaacgagatcaaggccctgatcaaatcttcaggcccgatgccggtctggcggtacatggaattgtgcctgatgcatccgcgctacggctattacgtctcgcgcgatccgctcgggcgcgagggcgacttcaccacagcccccgaagtcagccagatgttcggcgagctcctgggactgtggaccgcctcggtgtggaagcagatgggctcaccgcagttcctgcggctgatcgagcttggtcccgggcgcggcaccatgatggcggacgcgctgcgcgcattgcgcgtgctgccgccgctgtaccaggcgctccacatccacatggtcgaggtcaatccggtcctgcgtgaacggcagagcgcgacgctcgccaacgtgcgcaacatcgcctggcacgacagcatcgacgaggtgccggaaggaccaagcatcatcctcgccaacgaatatttcgacgtgctgccgatccaccagatgatccgccacgagaacggctggcacgagcgcgtcatcgagatcgatgcgaacggcaagcttcagtttggcgcagcgccggagccgaccccgcgcttcgacgtactgctgccacccttggtgcgcgccgctcccgtcggcgccgtgttcgagtggcggcccgacggcgagatcatgaagctcgccacgcgcgtgcgcgaccaggacggcgcggcgctgatcatcgactacggccatttgcgcagcgatgccggcgacaccttccaggcgatcgcgcgccataccttcgccgatcccctgaaggcgccgggccaggccgacgtcaccgcccatgtcgacttccaggcgctggcgcgcgccgccgaggatgtcggcgcgcgcgtgcacggcccggtgacgcagggcgacttcctcaagcggatcggcatcgacacccgcgcggccgcgctgatgcaaaaggcgacgcccgaagtcgccacagacatttcggtggcgctcaagcgcctgaccgataccgggcgtggcggcatgggctcgatgttcaaggtgcttggcatctccgagccgcggttgacgggccttgccggcctcagcgacctcgatcaggcaggagaagcctcatga

SEQ ID NO: 5518 - DNA, 858 bp, BradyrhizobiumColbertium
atggaaggcgcgatgccctatctgctcatcgactttcccgccttcaagccgatcgcgatcgagatcggtccgttcgcgatccgctggtacgcgctggcctatatctgcggcatcgtgttcggctggctctatgcgcgctcgctgctgaaaaacgagcgcctgtggggcggaccggccccgatctcgctggtgcagatcgacgatttcatcctctgggtcacgctcggcatcatcctcggcggccgcaccggttacgtgctgttctacaatctgcccttcttcatcgatcatcccgccgcgatcttcagattgtgggagggcggcatgtctttccacggcggcttcctcggctgcgtcgtggcggtgatggggtttgcctatcgcaacggcatcccgatcctgtccctcggcgacatcaccactgcggtcgccccggtcgggctgctgctcgggcgcattgccaatttcatcaacggcgaattgtggggccgcgccgccgatgcgagcctgccctgggcgatgatcttccccaatgatccgacgcagctggcgcgccatccgagccagctctatcaggccggcctggaaggcatcctgctgttcacggtgctggccgtcatgatccgcctcggcgcgctgaagcgacccggcatgatcctcggcgcgttcatcctgatctatggtctggcccggatcatcggcgagcatttccgcgagccggacgcccagctcggctatctctggggcggattaaccatgggcatgctgttgtcgatcccgatgcttatcgtaggccttatacttattgtatcggcaatcaggcgcggtgcgccgaagccgatcgagacagttagctag

SEQ ID NO: 5519 - DNA, 264 bp, BradyrhizobiumColbertium
atgacccagaccaacaaccggtttttcgacgagatcggccgcctgatgaacgatgccgccggtgccgcccagggcgtcaagcgcgagttcgatacggtgatgcgcacccaggcggaaaaattcctgcgcgacatggatctggtcaagcgcgaggagttcgaggcggtcaaggacatggcgcgcctcgcccgtgaagagaacgaggcactgaaggcgcggatcgcagcgctcgaggcaaagcttggcgggacgccgacgctctga

SEQ ID NO: 5520 - DNA, 714 bp, BradyrhizobiumColbertium
atggcgacgaccgtcaaggaattgaaggcgaccgcacgtccgaagagcggcaagggggccgcccgggctgagcgtcgcgccgggagagtgcccggagtgatctatggtaacaaccagcccccggtcacgatctcgatcgaggatcgtgagctgcgccagcgcatcctcgccggccggttcctgaccacgctggtcgacatcgacctcgacggcaagaagcaccgcgtcattccgcgcgactaccacctcgatccggtcaaggatttcccgatccacgtcgacttcatgcggctcggcgaaggcgccaccatccgcatcagcgtgccgttgcacgtggtgaaggccgaaacctctccgggcgtcaagcgcggcggcaccgtcaacatcgttgcccacgcgatcgagctcgaatgcggtgccgagaacatcccgcagttcatcgaggttgacgtcggctcgctcgagatcggtcactccctgcatctgtccgacgtcaagctgcccaccggcgtgaagacgctggcgcgcgaggatgcgacgctcgtcaccatcgtgccgccttccggttacgccgaagagcagaaggccgcggctgcggctgctgctggcggcgctccaggcgctgcggctgccccggcggctggcgcggccgctccggctgctgctcccgcggcggctgccaaggctcctgccggcggcgacaagaagaagtaa

SEQ ID NO: 5521 - DNA, 606 bp, BradyrhizobiumColbertium
atgcaactctttgttgggctcggcaatcccggcgcgaaatacgcacgcaaccggcacaatatcggcttcatggctgtcgacgagatcgcgcggcgtcatggcttcacgccatggcgccgccgctttcagggcgagacgtcagagggcacgctcggcaccgagcgcgtgatcctgctcaagcccgcgacctacatgaacgagtccggccgcagcgttcaggaagccgcaagcttcttcaagatcgccgccggcgacgtcagcgttttccatgacgagctcgagctgccgccgggcaaggtgcgggtgaagatcggcggcggcatcgccggccacaacggcctgcgctcgatctcggcgcatatcggcaacgactaccgccgggtccggctcggcatcggtcatcccggcgtcaaggagctggtgcatggccacgtgctgtcggacttcgccaaggccgacagcgaatgggtggcgacgctctgcgatgcggtcgccgagcacgcgccactgatcgccaagggcacggatgcgaccttcgccaacagggtgcatctggccatgcaggcgaaggggtttttgaccaaggacgagaacggcaaggaataa

SEQ ID NO: 5522 - DNA, 1098 bp, BradyrhizobiumColbertium
atgggattcaaatgcgggatcgtcgggttgcccaatgtcggcaagtcgaccttgttcaatgcactgaccgagacggcggctgcgcaagccgcgaactatccgttctgcaccatcgagccgaatgtcggcgaggttgccgtgcccgatccgcggctggagaagctcgccgccatcgccaagtccggccagatcattccgacccggctgaccttcgtcgacatcgcgggcctcgtgcgcggcgcctccaagggcgaaggcctcggcaaccagttcctggcaaacatccgcgaggtcgatgccatcgcgcacgtggtgcgctgcttcgaggactccgacatcacccatgtcgagggcaagatcgccccgctcgcagacatcgagaccatcgagaccgagctgatgctcgcggacctcgacagcctcgaaaagcgtgtcgacaacctcaccaagaaggccaagggcaacgacaaggacgccaaggagcagctcgacctcgtcaaccgtaccctcgtgctgctgcgcgagggcaagcccgcgcgcctcgtcgagcgcaaggccgaggaggagcgcgccttctccatgctcggcctgctgtcgtctaagcctgtgctttacgtctgcaacgtcgaagagggctccgcggctaccggcaacgctttctcaagggcagtcgaggagcaggccgccaaggagggcgcggtcgccgtcgttatctccgccaagatcgagtccgagatcgcgacgatctcgcgtgaggaacgcgcggacttcctggagacattgggactggaggaagccggcctcgatcgcctgatccgcgccggctaccggcttctcgatctcatcacctatttcaccgtgggcccgaaggaagcgcgcgcctggaccatccatcgcggcaccaaggcaccggcggcggccggcgtgattcacaccgacttcgagaagggtttcatccgcgccgagaccattgcgtatgaggactacatcacgttcggcggagaagccggcgcacgggatgccggcaagctgcggctagaaggcaaggaatacgtcgtcgccgacggcgacgtgatgcatttcaggttcaacacgtag

SEQ ID NO: 5523 - DNA, 297 bp, BradyrhizobiumColbertium
atgttttcattcagcgatctgtttcagtgggaccgcttcatcacgccgacgatcatcaagaccttctactggctggtgatcgcgctgatctgtctgttcggcctctccggcatcttctcagggctcgccgcaatggcgatcagcccgttcggcggcttcctggtgctgctgtcctcgatcgccagcgtcgtggtcggcatcgtgttctcgcgcatcgtcgcggaattgatcctgatcgtcttccgcatcaacgagcatctcggcgcgatccgcgaccagggcggcgggatgcggtag

SEQ ID NO: 5524 - DNA, 492 bp, BradyrhizobiumColbertium
gtgcggccacaatctgtcattcctgcaaagctttccaagatgaccctgaccttcgaagacttcccgcccggccggttcggcacgttcggcccgcgccacgtcacccgcgacgaaattctggccttcgccgccgagttcgatccgcagccgatgcatctcgacgaggaggccgcagccaagagcatgctgcggggcctgtctggctcgggctggcatctctgctcgctgatgatgcggatgatggccgacggatttatcacccgctccgcgtcgctgggatctcctggcgtggatgaggtgcgctggttgtcgcccttgcggcccggcgacgatctcatgctcgacgtcgacgtcgtggaggcgcgcgcttcgaagagccggcccgaactcggcatcgtcaagttcaaatgcaccgtgcgcaacgcggcggggcaggcgcttgccgagatgacctcgcccatcctgatcaagcggcgcgagggagcggtctga

SEQ ID NO: 5525 - DNA, 483 bp, BradyrhizobiumColbertium
atgcggttcttcgaagacatcgcgatcggacagcgtcgcgagatcggcacctatacgttcacggccgaggccatcaagacattcgccgcaaagttcgatccgcagcgttttcatctcgacgaggaggaaggcaagaactcgctgttcggtgggctcgcggcctcgggctggcatgtcggctcggcctgcatgggcctgcttgtcgccgacggccagcgcctggcgcgagaagccgcttcacgcggcgaggaggttgccgtgtggggcccatcgccgggctttcgcgacctgcgctggatcaggccggtgctcgccggcgacacggtcgcttacgtcaatgtcgtcatcgacaagcgcacctcggcctcgcgccccggctggggcatcttgaccgcccgcaccaccggcaccaaccagcgcggcgaagaggtctattccatcaccgcatcggccttcgtgccgatgcgtggaaagagcgtttag

SEQ ID NO: 5526 - DNA, 147 bp, BradyrhizobiumColbertium
atggcagaccgcggcgcactcaaattcgttggattcatttttgcgactgcgacgctggccgtgatgctggtcgccggcatggtggtgaagggctatgccgatggcgcctacaccctcgaagcttcgaccgtcgacgcgcgccggtaa

SEQ ID NO: 5527 - DNA, 138 bp, BradyrhizobiumColbertium
atggaaagcattcggcccgacaacacggaccctgtcgcgctgcggcccgcgccgaatcagctcggcacgatcgtgctgcgctttatcggattgctcgcggttgcgattgccgtgctcgcgttcgtctacagccgctaa

SEQ ID NO: 5528 - DNA, 423 bp, BradyrhizobiumColbertium
atgaacgccatgcgtcccgagaagatcgaagccaccgagaccgagccggtcgacaccaaccttgccgccgtgaccgaagtcgaggccggcatccgcgatttcgtccgcaacgacatcgcctatctgcgccgcccggcatcgaccaccaccgacgcgccgccgctcgacccgagcgcggaagccaccgtcaacaacgtcaactcgctgatccagcgcgtcgccggcacctcgctcgccgaaatcgagaatctgatctcggagctggagagcctgcgcgacctgctgcatgccgagggccagcgcgtccagcgcgagatctccggctacgcccagctcagccaggccgcgatgaagtcgacccgcatgatcgccgacaacgtcgcgcagtggaagcgcgccgccgacggcctgcgcaacagctaa

SEQ ID NO: 5529 - DNA, 1092 bp, BradyrhizobiumColbertium
atgccgtcgcatctcgaagctcgtcgccgggcgcgcgcctatcgcgcggcccgttggttctttttcgccgcgggccgtcacattttcgcgacgatggatcagcatgttcggcgcggaatggcacatggcctgaactcgatatataacatcgaacggcatgtgccgggggttgcgggcaggacgatggaattctcgacagggtttggctggaccaggctgccattgctggcggctgcattcatcctgagctcgacgctgactctttcggcgcagatcattccgcccacggcggccgcgcctgacgacgaagcggagatggaagcggccgaggctcccagcgcgaacgacgccgacgtgctcaaggacatcgatgtcgacaagctcgactggagccagctcgcagtcgacgccggcaccggcatcgatcccatggccgccaagaagcgcgcccaggccgcccaagaaggcctggactggtcgtcgaactccaatgccaacggctcctcggcggtgaccgtgaagcagtcggtgttctcgttctgggatacgagaatcggcgccgacctgacggtgaccaacgagcccaggacgatgtccgagctgctggcgcagaaggccgccaatggcggcagcctgccgcaatcctccggcagcgcgtgggccatggcgaccgcgccgggcgcgggcaccatctgggacaagactgcggtggaagcccgggtcgatcccggcgccgagcacagcaagatcggggcatcgctgaccaagtccgtgccgctgtcgggcgacacctcgctgacgctccagaacggctacagcgtcaaccagcagggcaccaccgcgctccccggcatcggcggccacatcacccgcaattaccagaccgatcagatcgccaaggtcaccctgaacgactccggcaccagcatcaccgccggccagacgctatcaaccaccgatgacaaatggctgcgcaggttcggcgccgagcagaaactgttcgacaatgtcaccgtctccggttcggtcggcgagacctcgcaaggcacgttcaacaagagcgtagctgcagggttcaagaagagctggtga

SEQ ID NO: 5530 - DNA, 441 bp, BradyrhizobiumColbertium
atgacagagcacagtctctggcgtttctcgcgtgcgttgcaccgcgccatcaacgaccggcatttcgacgacgtcgaagccttgatcgatgaggacgtcgactgggcgctctacggcccgatcgacatgtttccgttcctcggcgcgcgtcaaggcaaggaggccgtgctcgaggtcatccgccagttcgccgacaacttccaggtccgccgcttcgaccgcgagagcatcatgctgggggtcgattccgccgcctcgatgctgcgttattcgctgacggctctggattccaacaagccgatcagcctgcgggtcgcgcagttcgcccagttcaaggcgggcaggctcgtcagcatgcgcgtgctgatcgacaccttcgatctggtcgagcaggcactcggccgcgccattcatctgccgaagatgaccagcgtcggctga

SEQ ID NO: 5531 - DNA, 510 bp, BradyrhizobiumColbertium
ttgtcggtgcgcgaggccgcgcgctaccgttgcggcgccacggggccaatgaggacaggcgggatgacagttgagaaactgaatcgccagcgtgtggtgcacctgctcgacgccttcgcccgcggagatatcgagacggcgctgtcctgctgcaccgacgatgtcgacttcctcacccatgcgccgatcgacgtgctgccacacatggtgccgcgccatggcaaggacgagctacgcgagctctggcagacgatctgggcacgctattcggagatccgctacagggcaccgcacatcctcgccgagggcgacgcggtggcaacttacgtgcaagcccatttcaggaaacgcagcaacggccgcatcgtgcagttcgacatggcggtattctaccgcttccgcggcgggctggttgcggagatccgcgagatcatcgattcctacgatctggtgcagcaggtgctggagcgggagatcgggccgttgatcacgggcgcgcgggcggattga

SEQ ID NO: 5532 - DNA, 219 bp, BradyrhizobiumColbertium
atgacaaatccgaaggaaatgccgtcagcgccggcacttgcgcgccgtctcgcctgctcccgctgcggctccgaattcagctgcgacctctcgggcaattgctggtgcgcggaggaggcggcaaaactgccgatgccgatcgagggtgaggattgtctgtgccgggcgtgtttgcgcaaggcggcggcatcccgtagcccggatggagcgcaagcgtaa

SEQ ID NO: 5533 - DNA, 699 bp, BradyrhizobiumColbertium
atgtcactcaaactcttcgaactcgtcggcaccgacgcctcgcggccgttcagcccctattgctggcgcacgcggatggcgctggcacataaggggctcgcagcggaaacactgccctggcgcttcaccgagaagagcgcgcttgcgccgcatggctcggagaaggtccccgtgctgttgcacgacgacaagcccgtcgtcgattcctggacgatcgcgacctatctcgaagacaattttcccaaccgttcgtcgctgttcggcggcgatggcggccgcgccatggcgcgcatgatcaacgcctggggcgacatcgccatcgtcggcggcatctttccgctgatcgtggccgacattccgaacaatctggccgagatcgatgctgcctatttccggaagtcgcgcgaggcacgcttcggcggcaagaccctggaagaggtcatggcgagccgcgacaccggcgtggtcgcattccgcaagtcgctggaggtgatgcggcagacgttgaagaagcagccttatctcggtggagaggcgccgaactacgcggactatatcgtgttcggcggttttcagtgggcgcggttggtcagccctttcaagctgctggagacggacgatccgatccatggctggcgcgagaagctgcttgacgcgttcgacggcatggcgcggaagtcgccgggatttgcggtgtga

SEQ ID NO: 5534 - DNA, 231 bp, BradyrhizobiumColbertium
atgagccgtggcgccgatccgctggtgctggatttcgtcgaatgggtcgcgcgcgagccgcgcgcctatgtcgaggtgatcgcgacctggaagacctcgtgcccgcgcctcaccatctgggaagatgcggccgagcgcggctatgttacgcgcgagacgattgccggcgtggggctcgttatcgccgtcaccgaatgcggcgagaagctgttgcgcgcgcatgggcggtga

SEQ ID NO: 5535 - DNA, 765 bp, BradyrhizobiumColbertium
gtgacgcccatcatgattgcggcccttggattgctgatggtggctacggcgttcctgtcggggctgttcggcatggcgggcgggctgatcctgatcggcgtgctcctggcgttgatgccgctgccgaccgcgatggtgctgcacgcgatcacgcagatggcctcgaacggctggcgcgcgtttctctggcgggcacatattcgctggcgggcggtcgcgaactatctggccggctgcgctgtcgcgctcgcggcatggtcgctgacccgctatgtgccggacaagcccatggcgctgctgctgctcggtatcaccccgttcatggcgcggctcttgcccgcgaacatcaagccgaaccctgatcggctctggcagggcacggtctatggcacgatgtgcatgggcctgatgctgatgaccggcgtctccggcccgctgctcgacaccttcttcctcggcggcgatttcggccggcgcgagaaggtcgcgacgaaggcgatgtgccagctcgtcagccatttcaccaagttgatctatttcggcgggatcatcgatcaggcggcgagcctcgatcccgtgctcgcgggcgtcgccattgcggcctcgatgctcggaaccacgctggcgcggcgcatcctcgaagccatgaccgaccagcaattcatggcctggtccaacaggctgatcaccaccatcgcctgctactacatcgcctatggcggctggctcctggttcgcaccccggtgctggccgctttcgactag

SEQ ID NO: 5536 - DNA, 951 bp, BradyrhizobiumColbertium
ttgcggcggctgctgtttctcaacggcatcaaggcattcgaggcggcggcgcggaccggcagcttcgctgcggccgggctggagctgagcgtgtcggcggcggccgtcagccgcatggtgcatctgctcgaagagcgcctcggggttgcgctgttcgagcgcaaggccaatcgcctggtgctgacgcaggcgggccgcgcctatcaaggcggtctgacgccgatcttcgacgcgctggccagcctcaccgcgcaggtgacggcgcccgcgagcgtgcgcgtgctcaccatcggcgtcggccacacctttgcgatgcgctggctgatcccgcgcctgtcggagttccgcagcgaggagcccgacatcgaggtgcgcttcaccaccggcggcgcggcggtgccgttcggcgaggacttgagctgcggcatcaagctcggcaccggcgactggcccggcctcgtcgccgagccgctgtttgccggcgatctgaccccggtctgcgtgccgcgtcttgcgagcgggctgaagcgcccggctgacctgaaaggcccgagcctgatccgcgtcgcgcattcgcccgaggactggccgatctggctgaaagccgcgaacctcgcccgcctcaacgcgcgcggacccgaattccagttttatggccaggcgctccaggctgccgccgacgggctcgggatcgccatgggcatccgcccctacatcgacgacgatctggcggccggccggctggtggcaccattcgacctctcggtgcccaagggcatgcgctggtacctcgtctatcgcagcttccagaccgagcagcgcgacttcgccgcgttccgccgctggatcatgcgggcggcgtcggaacccgcgccccgtcaggcggatcggccgctccgcggggcggaaccgaggccaagggctccgcgacaaaaacccggccgcttgtga

SEQ ID NO: 5537 - DNA, 225 bp, BradyrhizobiumColbertium
atgacgaccctttacgacggctttgacatcgaatccttcgaagctggcaaggggctgtggcacgcgcgcatccggcgggccgatttcagcccggtggccatcgacggcgtgctgtttccggccatggaagtcggcttcgcctggcccgatcgcgatgccgcgatcgccgatgccaagcaccacatcgaccgtttccgccggcgggccgagggcgacgacgaatag

SEQ ID NO: 5538 - DNA, 228 bp, BradyrhizobiumColbertium
atgtccatcatcgaattcgacgcggcgcggccgcgaatttatgcccgcgccgtgctgtcaaactgcccggaatgcgacggcgatcttgaggtgctgcgcgtgatgagcggccgcgccggctgcgagtactgggccatgcgctgcaccgattgcggcggcatccatctcgacatcctcgagccgaatcttccggccggggataatgggggaccgctgccggcggcgtga

SEQ ID NO: 5539 - DNA, 2970 bp, BradyrhizobiumColbertium
atggcgaagaaacccgcatcctccgaaaaatccggcaaatcccccaggaccaaggccccgaactcgaaagcacatcggcccgacgtgcagccgatcgggccggcgctggccgagttgctcaatcccgcgatcaatcgcggcgatgccggattgggatctggcacaggcctgcagccgccgccggacaattcgcgcgaccgccgcgccgggggcgaggccgccgcgcaccgcgcgcgcgcttcaacgccgaaggagtttccgcaggacaccgcacggccgatgccgctccggcccgatccacagccgccgggagcacgtgcatcgaccgagggtttcgcggaggcgccgcaggccaattacggcactgccgccaccattcctacgctcgatccggaactggcgcggcagctcggactgccgaccgaagaggacgatgccgaggcgctggcgcgcccaccgcgcagcaagatggaggcgctcggcgtcaaggccaccgcggatgcgcttgaagcactgatccgcgaggggcggccggagttccgcaagggcgacggctccacgaaggtgtggacgccgcaccggccgccgcgcccggaaaagtccgagggcggcgtccgcttcgagatcaagtcgtcctatgaacccaagggcgaccagccgaccgcaatcgccgagctggtcgaaggcatcaaccgcaacgaccgttcgcaggtgctgttaggggtcaccggctcgggcaagacctacaccatggccaaggtgatcgaggcgacgcagcgcccggccttgatcctggcgccgaacaagacgctcgccgcccagctctatggcgagttcaggaacttctttcccgacaacgccgtcgaatatttcgtcagctactacgattactaccagcccgaagcctacgtcccgcgcaccgacacctatatcgagaaggattcctccatcaacgagcagatcgaccgcatgcgccactcggcgacgcgcgcgctgctcgaacgtgacgacgtcatcatcgtcgcctcggtgtcctgcatctatggtatcggctcggtcgagacctataccgcgatgaccttcgcgctgaaaaagggcgagcgcatcgaccagcgccagctcatcgccgacctcgtcgcactgcagtacaagcgcacccaggccgatttcacccgcggcacctttcgcgtgcgcggcgacgtcatcgacatcttcccggcgcactacgaggaccgcgcctggcgcgtgaacctgttcggcgacaccatcgagaccatcgaggagttcgacccgctcaccggccacaagcaggacgagctcgaattcatcaagatgtacgccaattcgcactacgtgacgccgcgcccgacgctggtgcaggcgatcaagtcgatcaagtcggagctgaagcagcggctcgaccagctgcacgatcagggccggctgctcgaagcgcagcggctggagcagcgcaccaccttcgacctcgagatgatggaggcgacgggaagctgcgccggcatcgagaactattcgcgctatctcacggggcgccgccccggcgagccgccgccgacgctgttcgaatacgtccctgacaacgcgctgatcttcgccgacgagagccacgtcaccatcccgcagatcggcgccatgttccgcggcgacttccgccgcaaggcgacgctggccgaatacggcttccgccttccctcctgcatggacaaccgccccttgcgcttcgaggagtgggacatgatgcggccgcagaccatcgcggtgtcggcgacgccgggtagctgggagctgaacgagagcggcggcgtgttcgtcgagcaggtcattcgcccgacggggctgatcgatcctcccgtggacatccgcccggcccgcacgcaggtggacgatctcgtcggcgaggtgcgcgccaccgcgcaggccggctaccgctcgctgatcacggtgctgaccaagcgcatggcggaggatctcaccgaatacctgcacgagcagggcatccgcgtccgttacatgcattccgacatcgacaccatcgagcgcatcgagatcatccgcgatctgcgcctgggcgcgttcgacgcgctggtcggcatcaacctgctgcgtgagggcctcgacattcccgaatgcgcgctggtcgcgatcctcgacgccgacaaggaaggcttcctgcgcagcgagacctcgctgatccagaccatcggccgtgccgcgcgcaacgtcgacggcaaggtgatcctctatgccgaccagatgaccggctcgatggagcgcgccatcgccgagaccaaccgccgccgcgagaagcaggtcgagtacaacacggcccacggcatcacgccggagagcgtgaagaagcagatcggcgacatcctcaactcggtctacgagcgcgaccacgtgctggtcgaggtcggcggccacgacatgaccgacgacgtcatctcgatcggccacaatttcgaagccgtgctcgccgatctcgaaaccaggatgcgcgaggccgcagccgacctgaacttcgaggaagccgcgcgcctgcgcgacgaggtcaagcgcctgcgcgccaccgagctcgccgtggtcgacgaccccaccgccaagcagcgcaccgtgcagggcaaggccggcgcctatgcggggacgaagaagtacggcgacgccgccaacctgccggtcagcgcgatgaagaagaagacggtcagctcggcgctgaaggcgagcggcggcggcagcggctccagggtgcacaagccgcatctcgacgagatgcacggcccggaatccctgccctaccgcgagacccgcgcactgccggcgaagccgttcggcggaaacagccggatcatccagccgacggactcacggcagtcgggcccggagttcggcccggcgccgaaatcgacgggcgggcagccgggacggcgcggtgggtggaagaagaggtag

SEQ ID NO: 5540 - DNA, 387 bp, BradyrhizobiumColbertium
atggccggcatcgccaccgccagaaagtcccgcctgcacaacgcactcgaaggcctcgcgctgacagcgaccctccagagcttccccaccttcgccgccgcggcgttcctgctcaagctctgcggcgagcgcgacctctccggcgaccctggcgtcgccatcttcgttgccgtcgcctcgttcgtccatgcgatgctcgcggtcacgttcgggccgagtttcccgcatttgttcaggaccgtctacgacccgaagttcttcgaggcccatctgtcgctgtcagacaagatcaccgcctggcgcacccagccggtcgcctcgctccagctcgtgacaatcgtgctgatgctgtcggtgatggccgtggtggaggcgagcgtgggatga

SEQ ID NO: 5541 - DNA, 324 bp, BradyrhizobiumColbertium
atgtacatcgccatgaaccgcttccgcgtcgccaagggctccgaagccgctttcgagcaggtctggctctcgcgcgacacccatctcgacaaggtgccgggcttcgtcgaattccatctgctcaggggccccgagctcgaggatcacaccctgtacgcctcgcacaccgtctgggcgaaccacgcggcattcgaggcctggaccaagtcggaggcgtttcgcgccgcgcatcacaaggccggcgacaacaagccgctttatctcggccatccccagttcgagggcttcgaggtggtgcagacggtcggacgcggcgcgaagtag

SEQ ID NO: 5542 - DNA, 942 bp, BradyrhizobiumColbertium
atggaaattcgcaatctcggcgcctccggccttcgcgtgtcggcggtcggactcggctgcaacaatttcggtcagcgcacggatctggagacctcgcgcaaggggatccaccgcgcgctcgatctcggcatcacgctgttcgacaccgccgacatctatgccgggatgggcggctcggagaccgtgctcggcaccgtgctcggcgaccgccgcaaggacatcgtgctcgcgaccaaatacgccaagccgatggcgaccgacggcaccaagcagggtgcctcgcgccgctacatcatgagcgcggtcgaagccagcttgatgcggctcaagaccgactacatcgacctctatcagcagcacgattacgacccgctgacgccgatggaagagagcttgcgcgcgctcgacgacctcgtccggcagggcaaggtgcgctacatcggcaattccaacttcccggcctggcgcatcgcggaagccgagttcaccgcgcgcgcgatgaacgtcagccgcttcgtgtcctgccaggacgagtacagcctcctggtccgggacatcgagaaggacctgctgccggcggcgcaggagtacaagctcggcctgctgccgttcttcccgctcgcgagcggcctgctcaccggcaagtaccagcgcggcgcggccgccccggctgacacgcgcttcgccaaggcgccggccctgcgcgaccgttacgtcacgccccgcaacgaggacatggtcgagaagctccaggccttcgcgaaggcgcgcgggcacagcatgctcgagctcgccttctcctggctcgccggccgtccgcaggtgtcgagcgtcatcgccggcgccacgcgcgtcgagcagatcgaggagaacgtcaaggcgatcgcctggaagctcagtgcggaggagatggcggagatcgaccggatcacgctgggctga

SEQ ID NO: 5543 - DNA, 501 bp, BradyrhizobiumColbertium
atgaaggcatcttcatcgtgcatctcggacatcgcggtaacccacatgtcgctcatcattcgcgccgtcaccaggcaggactacgatcaatggctgccgctgtgggacggctataacgccttttacggccgctcgggtccgaccgcgctcgctcccgagatcacgcgcatgacctggcagcgcttcttcgacgcctatgagccgatgcatgcgctcgtcgccgaggacgacgggcgcctgctcggattgacgcactatctgtttcatcgcagcaccactgcgatcgaaccatcctgctatttgcaggacctgttcacgctggaggccgcgcgcggcaagggcgtcggctcggcgctgatccatggcgtctatgagcgggcaaggctcgcgggatcgccccgcgtgtactggcagacgcacgagaccaatctcacggcgcagcgcctgtacgacaaggtcgcggagcgttccggcttcatcgtctaccgcaaggtcttctga

SEQ ID NO: 5544 - DNA, 339 bp, BradyrhizobiumColbertium
atgcggctcggatggcgtgcgatttacggtccggtcctgacggcagcaaccctgctgctggctgtgcttctcgatcgcgttgtccccaccctccccgctccatcggcggcaccgctgctggtctgtcttgtggcccttgccggcgcctcgtcgggcctcgcctcggccatgaccagtgcggtcgtcgcggtgatcggtgccacgctgatcttccttcatcaccagagcgcttccggtcatggcaacgcggatctggcacggctcggcgtcctcgcaatcgcggccgtcgccaccgccggcaccaccgcgattgatcggcaatgccgtcatcacgtatga

SEQ ID NO: 5545 - DNA, 147 bp, BradyrhizobiumColbertium
gtggtagtcgttgcaattacgctgactgcggccatcctggtcgcggcgtcgctgttgatcatcgtcggcacgcgcaagggcgtggggacgtcgacgctgaacgcgcccacgctgcaacaacccgtcaagcacgcgcacatggtctaa

SEQ ID NO: 5546 - DNA, 177 bp, BradyrhizobiumColbertium
atgatgcgggcgtccggcacggcaggctttcagggcccatccgctaccgtcgcgtcttcccggctcacccatgcggtcgcggcctcgcttgccgtcgccgcactctcgctatgcttgatcgtcaccctgacggtgctgtcgaccaaggcgaccatggcgatgggcctgccggtctga

SEQ ID NO: 5547 - DNA, 651 bp, BradyrhizobiumColbertium
atgtacaagctctattcgatgcaacgctccggcaacagctacaaggtccgccttgcgctggcgctgctcaacctgccctacgaagccgttgaggtcgacattctgcgcggcgagagccgcacgccggattttctgagcaagaacccttcgggccaggtgccgctgctcgaggtcggcgaggatcgctatctcgccgagtcgaacgccatcctctggtacgtcgccgtcggcacgccgctcgcgccggagaaccgcatcgaccgcgccgaggcgctgcaatggatgttcttcgagcagcacgcgctggagccgaacatcggcgccgcctacttctggctctcgctggtcaagggcggccgcgacctccagacccattcgctggaggactggatggagcgcggctatggcgctctccaggtgatggaaaaccatctcaagaccaacgcctatttcgccgcgcgccagctcacggtggcggacatcgcgctgtacggctacacccatctggccgaccgctgcgacttcgacctttcaacctttcccgccatccgggactggctcaagcgcgtcgaagccgcacccggtttcgtgacgatggactggcgcccggccgacattgccgaccccgccagcatcgccgccggcgtctga

SEQ ID NO: 5548 - DNA, 1203 bp, BradyrhizobiumColbertium
atgtccttccttgccgctgcgctcgaccgtgtgaagccgtccgcgaccatcgcggtcacggacaaagcacgcgcgctgaaagcggcggggcgtaacgtcattggcctgggcgccggcgagcccgacttcgacacgcccgccaacatcaagctggcggcgatccatgccatcgaggccggcaagaccaagtacactgcggtcgacggcatccctgagctgaaggaagcgatcatcgccaagtttcagcgcgagaacggcgtcgtctacaagccgaaccagatcatcgtcggcaccggcggcaagcaggtgctctacaacgcgctgatggcgaccatcaatccgggcgacgaggtgatcattcccgcgccctattgggtcagctatcccgagatggtcgcgctcgccggcggggagccggtgcccgtggtctgcaccgcagcgaccggcttcaagctccaggcggaagcgctcgagcgcgcgatcacgccgaagaccaaatgggtcatcctgtgctcgccctcgaacccgacgggcgctgcctacacgcgttcggaactcaaggcgctcaccgacgtgctggtgaagcatccccatgtctgggtgatgaccgacgacatgtacgagcatctcgtctatgacgacttccagttcaccaccgtcgcgcaggtcgagccgggtctttacgaccgcacgctcaccgtgaacggcgtctccaaggcctattgcatgaccggctggcgtatcggctatgccggcggtccggcgcatctgatcaaggcgatggcgacgatccagtcgcaatcgacctcgaacccgtgctcgatcgcgcagtgggcctcggtcgaggctctgaacgggccgcaggagttcatcccggccaacaacaaggtgttcaaggagcgccgcgacctcgtggtctccatgctcaaccaggccaatggcatcgagtgcccgcgtcccgagggcgcgttctacgtctatccgtcctgcgccggcactatcggcaagaaggcgccgtcgggcaacgtgatcgcgaacgacgagcaattcgtcacggagctgctggaaaccgaaggcgtcgccgtggtgcagggttcggccttcggtcttggacctgcgttccgcatctcctatgcgaccaagacctcggacctcgaagacgcctgcaagcgcatccagcgcttctgcggcaacctgcgctga

SEQ ID NO: 5549 - DNA, 480 bp, BradyrhizobiumColbertium
atgcgccgttcgctcctcctcgccgggctcaccgccgccagcctcgttgcctccgtcacgagcagtggcgcgcagcagcggatggcgcggatcggcgtgctcgaatgccgcggcggcgccagtgtgggcttcatcgtgggatcggtgactcatctcggctgcgtgctgcgggccgacggcttgcccgatgatcgctatgtcgcgacgatccgcaaggtgggcctcgacatcggcatcacccaggagaccgcgctcgcctggggcgtgtttgcaccggtcgaccgcctcggccccggcgacctctccgggaattacgtgggcgcgcagggcagcgcctcgatcggcgtcggtctcggcggcaacgtcctggtcggcggctccaacaattcgatcgcgctgcagccgctgagcgtccagggtcaggtcggcctcaatatcgcggccggcctcgaaagtttggaactccgacccggccgctaa

SEQ ID NO: 5550 - DNA, 207 bp, BradyrhizobiumColbertium
ttggaaagggcccaccagtgcgatgcaccgtggacccgacgttttattgactgggggacttctgacgtcttgtcccattcgccgcctccttcttgtggagctcggcccatcattgggtcggcaaacgctgatgctctgcccgtccccgagatttggcaagcgtcaaacgtcgctgcggtgcgtcgtcagttggatcgagttttatag

SEQ ID NO: 5551 - DNA, 1956 bp, BradyrhizobiumColbertium
atggcgcggacgggcgcaatcccgcgcgccggcagtgtcgacgccggcacttccgtcggcgacgccacgccagaggcccgtcatcacaagatgaccgtcgggttgactgccgccacgacgagcttcatgggcgacagctacacctttctcgattgtcccggttccgtcgagtttgcccacgacatgcgcgccgcgcttcccgcggtcgatgctgcgatcgtggtctgcgaggccgacgagaagaagctgccgcagcttcagatcatcctgcgcgagctcgaggagctgaagatcccgcggttcctgttcctgaacaagatcgatcgcgccagccagcgcatccgcgagaccctcgcgatgctgcagcccgcctcccgcgtgccgctggtgctgcgccagatcccgatctggaagggcgagctgatcgaaggcttcgtcgatctcgcgctggagcgcgccttcgtctatcgcgagcacaaggcctcggaggtggtcgcgctcgaaggcggcgatctcgatcgcgagaaggaagcgcgcttctcgatgctggagaagctcgccgatcacgacgacgcgctgatggagcaattgctcgaggacatccagccgccgcgggatgccgtattcgacgatctcgcccgcgaattgcgggaggggctgatttgcccggtgctgctgggtgcagccgtgcgcgagaacggcgtgttgcgcctgatgaaagcgttgcgtcacgaggcgcccggggtcgcggagacggcaaaacgcctcggcgtacccgagagcaaggacgcactcggctatgtcttcaagacgctgcattcgcagcacggcgggaagctgtcgctgacgcggctgctcgccggccgtctcgacgatggggcgacgctgcaatcctcctcgggcggtgcggggcgcatctccggcatcctcgccgtcaacggcgcctacgacaccaagcgtgcttcggccgaagccggcgacacggtggcgctcgccaagcttgatacggtgaagaccggcgacacgatctcgaacggcaagagcccgcccgctgcattgatcacgatcgagccgacgccgccggtacttgcgatctcggtcgccgccaccgaccgcaaggatgacgtcaagctcggccaggcgctcacgcggctgcatgaggaggatccctcgctggtcgtcgtgcagaacgctcagacccacgacaccgtcttgtggggacagggcgagatgcacctgcgtgtcgccggtgagcgcttgcgcgatcgtttcggcgtcaaggtcacctcgcatccgccggctatcggctatcaggaaaccatccgcaagccgatcacccagcgcggtcgtcacaagaagcagtccggcggccacggccagttcggcgatgtcgtgctcgacatcaagccgctgccgcgcggcgaaggcttcaagttcgccgagaaggtggtcggcggcgcggtgccgcgcaactacatcccggcggtggaagagggcgtcgtcgacggcctcgcgcgcggcccgctcggctttcctgtcaccgacgtgcaggtgacgttgacggacggctcgtatcacagcgtcgactcctccgatctcgccttccgcacggcggcgcgcattggattgaacgaaggcctgccgcaatgccagccggtgctgctggagccgatccacatggtcgagatcgtctgcccgaccgacgctacggccaagatcaacgcgatcctgtcggcgcggcgcgggcagatcctcggcttcgacactcgcgagggctggagcgggtgggattgcgtccgcgccatgatgccggaggccgagatcggcgagttgatcgtcgaactgcgttcggccaccgccggcgccggcagctttacccgccagttcgatcacatggctgaggtcaccggccgcgccgccgaccagatcatcgccgcgcatcagcacgcggcgtga

SEQ ID NO: 5552 - DNA, 273 bp, BradyrhizobiumColbertium
gtgatcacgtcgtttcagatgcgcgcagcccgggcgctgcttggcattgaccagaaaaccctggccgagcttgccggcgtgtcactgccgaccatccagcggatggaggcctcgaccggcaacgttcgcggcgtggtcgagaccctgatcaaggtggtcgaggcgtttgaccgggccggcatcgagctgatcggcgaacaggcgcgcagcgacagtggcgggcgtggcgttcgcctgaaggagccggggccgccgcgccgcatcggggcatga

SEQ ID NO: 5553 - DNA, 1743 bp, BradyrhizobiumColbertium
atgagcatcacaacggatcaagcggccaagctgcatcagctgcgtcgtccgactttcgcggaactgtacctgccgaaactcgtcaccgtctggcgtgaaggttacggcgtcgcggatttccgcgccgacgtcttcgccggcctcacggttgcgatcgtggcactgccgctgtcgatggcgatcgcgatcgcctcgggcgtgacgccggaccgcggcctctataccgccgtcgtcggcggcttcatcgcttccctgctcggcggcagccggttccagatcggcggacctgccggtgcgttcatcgtcctggtcgcagcgactgcggagcgtcacggcgtcgatggcgtgatcctcgccaccatgatggcgggcctcttcctggtcgccgcgggcctgctcagggtcggcacctacatcaagttcatcccctatccggtcacggtcggcttcaccgccggcatcgcggtgatcatcttcgccagccagctccgcgatctctccggcatcacgcttgcgggaaaagagcccagcgagttcgtgccgaagctcgttgcgctcgccggcgggatcagcaccgtcaatccgtccgccgtcgcggtggccttcgtcagcatcgccatcatcgctgccttgcgccgctggcggccgtcctggcccggcatcctgatcgctgtcgtgtttgcggcggtcgcaactgccgtattgtcgctgcccgtggaaacgatcggctcccggttcggcggtattccgcgcgagctgccctcgcccgcattgcctgcgttctcgctggagaaggcaagggcggtgctgccggatgcgatcgccttcgcgctgctggccgccatcgagtcgctgctgtcggccgtggtcgccgacggcatgaccggccgtcgtcatcgctccaattgcgagctggtggcgcaaggcgccgccaatgtcggttcggcgctgttcggcggcatctgcgtcaccggcctgatcgcccgcaccgcaaccaacatccgcgccggcgcgcgcggaccgattgcgggcatgctgcattcggtcttcctgctgttgttcatgctgatcgccgcgccgctggcgagctacatcccgctcgccgcgctggcctccgtgctggtcgtggtggcctggaccatggcggagaagcacgagttcgcgacgctcctgcgctcgtcatggggcgatgccgtcgtgctgctcgcaaccttcctgctcacggtcttccgcgatctgaccgaaggcatcctggtcggcttcgccctcggcgcggtgctgttcatccatcgcatggctgagatgacgggcatcgaggagcggacgccgctggtggccgacgatcgccccgacgacggcaatggcgaacgcgtgccttacgatcccgcgcttgcggtcgatcgcgacgtgctggtgtatcgcatcaccggcgcgttcttcttcggcgctgcctcggcgatcggcagcgtgctcgacggcatcgccgaccagcgcaaggccttcgtggttgacttcgccgcggtgccgttcctggattcgaccgcggccaacgtgctcggccgggtcgccgccaaggcgcaccgccagggcatcaggctgttcatcacgggggcatcgcccacggtccgacgcgcgctgctcacccacggtgtgacgccgccgcgcgcgcgctatcgcacgagcctcgagcgcgccatcgccgacatcaagggccggaccgccgacgaggccggggcgaactga

SEQ ID NO: 5554 - DNA, 840 bp, BradyrhizobiumColbertium
atgaccgcgcccaaagctcccgcagcctgtctgatcggatggccggccgcgcattcgcgctcgccgctgatccatcattactggctgcgcacgctcggaatcgaggggggctacgtcatcgaggcggttccgcctgaggacctgcgcgatttcgtgctgcggctgccgctccgcggcttcgtcggggccaatgtcaccatcccgcacaaggaagccgtgctggcgctgtcgacgcctgacgcgcgcgcgaaggcggtcggcgccgccaacacgctgtggttcgccgaaggcgagctgcgttcgaccaacaccgatgtcgaaggcttcatcaacaatctggacgccagcgcgcccgggtgggacgcggcggaagaggcgctggtgctcggcgccggaggctcctcgcgcgcggtcgtgttcggcctgctcgaacgcggcatcaagcgggtgcatgtcgccaaccgcaccgttgcccgggccgagacgctggcaaagcagttcgggccggacgtgaggccgctgccatggaacgcgatcggcgacgtgctgccgcgcgcaagacttctcgtgaacacgacctcgctcgccatgcatgggcagccttcactcgatattgatgtcgcgcggctgccgcaagccgcggtcgttgccgacctcgtctacgttcccctggcgacaccgctgctcgccgaagcacgggcgcgtggcctgagcaccgccgacgggctcggcatgctgctgcatcaggcggtgcgcggcttcgagctgtggtttgggcggcggcccgaggtcacggccgagctgcgcgcattggtcgaggccgatctcacaaagtcttga

SEQ ID NO: 5555 - DNA, 627 bp, BradyrhizobiumColbertium
atgtctgttcaacgtgcaaccttcacacgtccgctgatcgccgtcgcgatggtggccgtctcaacctactgcgccttcgcccaaagggcgccggtgccgacgcgcgtgcgtggcacgatcgagagcgtcaatggcgacaccatgcaggtgaagtcgcgaagcggtgaagaggtcaagcttcacctcgcctccgatgtgaacgtgtcggggatcaccaggatttcgctcgccgacatcaagccgggctcgttcatcggcgcgaccaccgtgccgggaccggacggcagccagaacgcggtcgaggtccacgtgtttccggagagcatgcgcggcaccggcgaaggctcgcggccgtgggatctcaagcccaactccagcatgaccaatgcgaccgtggccgaaagcgtcgtcggcaatgacggtcacacgttgctggtgaaatacaaggacggcgagaagaaagtattcgttcccgacaacgtcccggtggtgaccttcgtgccgagcgacagatccgagttgaagccaggtgccaaggtcatcgccttcatgaagcaattgcccgacggctcgttcgagaccaaccgcgtcagcgtcggccgcgacggactgacgccgccgatgtga

SEQ ID NO: 5556 - DNA, 1137 bp, BradyrhizobiumColbertium
atgaagcatatcacctgtatcgacgatcttcgtacgctccataagcgccgcgtgccgaaggcgttcttcgactattgcgaccgcggctcctatgccgaggagacgctgcgcgccaaccgcgaggacatgcaggcgatcaagttccgccagcgcatcctggtcgatgtttccaagcgcgacacctcgaccacgatcctcggcgagccctccaccatgccgctgatcctggcgcccgtcggcctgctcggcatgcagcatggcgatggcgagatccatgcctgccgtgccgcgcaggcggccggcatcccgttcacgcaatcgacgatgtcgatctgctcgatcgaggacatcgccgccagtgtcgagaagccgttctggttccagctctacgtcatgaaggaccgcggcttcatcaaggaattgatccagcgcgcgatcgcggccaagtgcagcgcgctggtgctgaccgtcgacctgcaggtgatcggccagcgtcatgcggacatcaagaatggcatgacggtgccgccggaatggtcgctctcgaagctattggacttcgccagcaagccggcctgggtctccggcgtgctgcaaggcaagcgccgcaccttcggcaacatcgcggggcacgtgaagaacaccgaggatctcaaccgtctcgccgaatggacggcctcgcaattcgacacctccctgaactggaaggacgtggagtgggtccgcagcatctggcccggcaagctcgtcatcaagggcatcttggacgtcgaggacgcggaggaagccgccaagaccggcgcgcaggctctcgtcgtctccaaccatggcggccggcagctcgacggcgcaccgtcctcgatcgaggtgctgccggagattgcggacgcggtcggcgacaggatggagatcatgttcgacggcggcatccgctccggccaggacgtgatgcgcgcgctcgcgctcggtgcaaagtcctgcatgatcggccgcgcctatgcctatggtctcggcgccggcggccaggccggcgtcgccaaggcgatcgacatcatccagaaggagctgctcaccacgatgggcctgtgcggcgtcaacagggtggacgagatcgacgatcacatcattgcggtctaa

SEQ ID NO: 5557 - DNA, 168 bp, BradyrhizobiumColbertium
atgacgaggccgcacgctggaccgtcgccggaagagatcaaggagaagcaggatctcgatgaggcgctcgaagagggactggaggagacatttccgggctccgatcccgtcaacgtcacccagccgccgccgagccgcgaggacggccatgtgaagcgcagcgggtag

SEQ ID NO: 5558 - DNA, 1344 bp, BradyrhizobiumColbertium
atgagccgcaaatatttcgggacggacgggattcggggccgcgccaacggactgatcacgccggagctcgcgctcaaggtcggccaggccgccggtctcgcgttccagcgcggcgaccaccgccaccgggtcgtgatcggcaaggacacccgcttgtccggctacatgatcgaatacgcgatggtcgcgggcttcacctcggtcggcatggacgtgctgctggtcggcccgatgccgacgccggcggtcgcgatgctgaccaagtccatgcgcgccgacctcggcgtgatgatctcggcctcgcacaatctgttcgaagacaacggcatcaagctgttcggcccgcagggcttcaagctttccgacgacgtcgagaagcagatcgagcagttgctcgacgagcccatcgacaagcggctcgcacaaagcgcgagcctcggccgtgcccgccgcatcgatggcgtgcatgaccgctacatcgagttcgccaagcgcacgctgccgcgcgatctgtcgctcgatggccttcgcgtcgtgatcgactgcgccaacggtgccgcctacaaggtggtgcccgaggcgctgtgggagctgggcgccgacgtcgtgccgatcggcgtcgagcccgacggcttcaacatcaacaaggattgcggctcgacctcgccggaagcgctgtccaagaaggtgcgcgagatgcgcgccgatatcggcatcgcgctcgacggcgacgccgaccgcgtcatcctggtcgacgaacgcggtcatgtcgtcgacggcgaccagctgctcgcggtgatcgcgcagagctggaaggaagacggccggctgtcgcggccgggcatcgtcgccaccgtgatgtccaatctcgggctggagcggttcctgaacgggcaggggctcgatctcgtgcgcacgccggtcggcgaccgctacgtgctcgagcagatgctgagcggcggctacaatctcggcggcgagcagtccggccacatcatcctgtccgactatgccaccaccggtgacggcttcgttgccgcattgcaggtgctggccgtggtgcagaagctgcgccgtcccgtgtccgaggtctgccatcgcttcgatccgctgccgcagatcctcaagaacgtccggcacaagggcggcaagccgctcgacgattccgacgtcaagtcggcgatctcggacggcgagaagcggctcaatggccacggtcgcctgctgatccgttcctccggcaccgagcccgtgatccgcgtcatgggcgaaggcgaggaccgcatcctggtcgaggacgtcgtcgacaccatcgtttcggcgctgggccaggcggcggcgtaa

SEQ ID NO: 5559 - DNA, 1251 bp, BradyrhizobiumColbertium
ttgaacaagcctgttgtcgtctcggatgaaacgctgaccgagcccgtcgtcgtcagcgatgtgacgcccgccgccggcaaggcggcagggccggcatacatcgtgctcgccggcatcagcttctcgcacttcctcaacgacaccatgcagtcgctgatcgcctcggtgtacccgatcctgaaggacacctatgcgctcgatttcgcgcagatcgggatgatcacgctggccttccagttcacggcctcgctgctgcagccggtcgtcgggcactacaccgacaagaaggcgcagccctattcgctggcgatcggcatggcctcgaccttcttcggcctgctgctgctcagcgccgcgcagcaatatctcgtcatcctcgtcgccgctgcactggtcgggctcggctcggcggtgtttcacccggagtcggcgcgcatcgcgcggctcgcttcgggcggccgctacggctttgcgcaatcggtattccagctcggcggcagtttcggcacctcgatggggccggtgctggcggcgctgatcgtggtgccgttcgggcagggcagcatcgcctggttctcctcgatcgcgttcctcgcgatcctcatcctctggcgcatcggccgctggtacgcgccgcagatcaaggcgaggacgacggccgctgtccagtcccgtcccgacgcgccgagctcgcgccgcgtcgccgtcgcgctggccgtgctcgtcgcgctcctgttctcgaagcagctctacgtctcgagcctgtcgagctactacatcttctatctgatggaccgcttcggtgtctcgacgcaggcagcccagatctatctcttcatctttctggcggcgaacgccgtcggtgcctttctcggtggtcccctgggcgatcgcttcggccggaagatcgtgatctggatctcgatcctgggcgcgctgccgttcacgctggcgctgccttatgccgggctcgttgccagcgccgtgctcagcgtcgtcatcggcctgatcatctcctcgacgacgtcgtcgatcatcgtgtttgcgcaggagctggtgccgcatcgctttggcatgatctccggcgttttcttcggcgttgccttcggcatcggcggcctgggcgcggccgtgctcggcaagctagccgaccatacctcgatcgagttcgtctaccaggtctgtgcctggctgccggcgatcggactgctcgcggtgttcctgccaaagctgccgcgtcacgcgcgttaa

SEQ ID NO: 5560 - DNA, 777 bp, BradyrhizobiumColbertium
atggcgttcgccgccgatatgccgatcgccgcgccccctcccatgtacgcgcccccggctccgcccgccgacttcggcggctggtatctgcgcggcgacatcggcatgaccaaccagagcgccaagcgcatcgatagcgcccttccggccgggtatacgaagtcgacggaaggcctcggcttcgactcttcgccgctgttcggcctcggcgtcggttatcgcttcaacaactggtttcgtgccgacctgatcgggcagtaccgcggcaaagccaatctgcacggcagcgacaacgtcgttggacccggcttcgtcggcgtcaacaattacagcggcagcaagtccgagtgggtcgtcatggccaacgcctatgtcgacctcggcacctggtggtgcatcacgccgttcatcggcgccggtgtcggcggctcctacaacaagatcagcggcttccgcgacgacggcgtgtcgtacagcccggctctcaacaacagcgtcgcctacttcgccgacaacggaaagtggaacttcgcctgggccgctcacgccggtctcgcctacaaggtcaaccccggcttcaccgtcgaactggcctacagctacatgaacctcggcgatgcggcgcccggcaattatcgcttgttcgacaacagcgcctccggcccgacttcgatcaagatcaaggacatcacctcgcacgacatcaagctcggcgtgcgctgggatctcaacagcccgccggcctacatgccgccgccgctggtcaccaagggctga

SEQ ID NO: 5561 - DNA, 861 bp, BradyrhizobiumColbertium
atgcgtaggctggtgttggcagcggcggtgttggggacgatgtctgtcgcgcatgcggctgacatgccggacctgccggtgctgcggggcggcttcaccgaaggcttgtcgaagtcatccgtcaattgggatggcttctacgtcggtggtcagttcggctttgccacgtccgagatggacttcagccgcgctccgaaatcgatgacggatttcatgctgcgcgacagcatcctgcaggccccggttggaggatggtcgctgctgccgaagaatcacgtgcagacgacgggattcggcgcctttgtcggccggaactggcagtattacgacgctgtgatgggcgtcgaagccaactacagctacatgaacaatctcgcgagcaccgcaagtgattccatgacgagattgatcgccggcgaagaagctcccacaaatcacgtctatacctacaacacgacgctgggcggcggcgccgcgttgcagctcaaggactatgtgaccttccggggtcgggttggatggtccggcggagacttcatgccttatgccttcggcggcctcgcgatcggacgcgccgatgtatcgcggtttgcgacggtgtcgtacctgaagtacgacgacttcacggatcccaacaccggcgtcaccacgcgcacaaccatcggctccgctacgatgacgcagtccgagcaacgcgtgaacagcttcatctacggatggacggcaggcatcggtatcgaatacgcgctgctcgactgtgtgatcctgcgcggcgagtgggaacatgtcgggttttcgagcgccaagaacatctccgtcaacttgaacaattttcgtgtgggcgccggctacaagttctag

SEQ ID NO: 5562 - DNA, 591 bp, BradyrhizobiumColbertium
atgaagatttacggcgacagcaattccggcaattgtctgaaggtgaagtgggtctgcgacaagctcgcagtgccctaccagtggatcgagatcgacacccgcaagggtgagacgcgcacgccgcaatttctgaagatgaacggcgccggccaggtgccgaccgtcgcattcgacgacggccgcacgctggcgcaatccaacgccatcatccgctatctcgcccgcgacagcgcgcttgtcccgcgcgacgctttcacggcggccaagatggacgaatggctgttctgggagcagtacagccacgagccctatatcgcggtgtgccggttcctcatggtctatctgggaaaggacgtctccgagctcgatcccgaaaaggtcaagcgcggctatgcggcactcgaccgcatggagcagcacctttccggcagccgcttcttcgcgggcgacgaagtttcgctcgccgacgtgtcgctgctggcctatacgcgcctcgcgcatgaaggcggcttcgatctcggccgctatgcttccgtccgccgctggatcggcgaagccgaagcgtttctcggcctgtcgccggcgcgctga

SEQ ID NO: 5563 - DNA, 465 bp, BradyrhizobiumColbertium
atgaacgccgatgccattgtcatccgttccgcgcgccgcgaggacgttgccgcgatcgtggcgatgctcgccgacgatcatctcggtcgcgcacgcgagcgtgtggaggatcccttgccggcctcgtattacgacgcattcgcgcgggtcgagcgcgatccgaatctgacgctcgtggtggccgagggcgcgggcagggtggtcggctgcctccagctcgcgatcctgcccggcatcagctcgcaaggcggcgtacgcggcctgctcgaggacgttcgcgttgcttccgattgtcgcagccgcggcatcggcgagcgactggtgcaatgggcggtgacggaagcgaaggcgcgcggctgcaatctcgtcgagctgctcacgcatcagacgcgcgtcgatgcgcagcgctgctacaagcggctcggcttcacggcgagtcacgtcggcatgactgtccgcttttga

SEQ ID NO: 5564 - DNA, 255 bp, BradyrhizobiumColbertium
atgctacggcagcttctgacaccgagctcggtcggttcggggatttcgatgccaagctattcgatgatcaaggtcggcaacggctatgtcgtgcaggccaatgacaaatgcattttgaaggtcggcagccgccgcaaggccgcgcaattgatcagcgatgccacggacttgctgaatgcgctcgctgttgtcgaagctccagaaattgcaccggagctcccatcactgacgcgtgaggccccggaacttccttga

SEQ ID NO: 5565 - DNA, 1173 bp, BradyrhizobiumColbertium
atgaccgtagcgaagcccgcttcgcggccgaacgtgccgcatttttcttccggcccctgcgccaagcgccccggctggaacgcccaaaatctcaaggacgcagctctcggccgttcgcatcgcgcgaagatcggcaagaccaagctcaagctcgccatcgatctgacgcgcgaggtgctcgaggtccccgccgattaccgcatcggcatcgtgccggcgtccgacaccggcgcggtcgagatggcgctgtggtcgctgctcggtgcgcggcccgtcaccacgctcgcctgggagtctttcggcgagggctgggtcagcgacatcgtcaaggaattgaagctcaaggacgtcaccaagctgagcgcggcttacggtgaaatccccgacctgtcgaaggtcgatcccaagagcgacgtcgtcttcacctggaacggcaccacctcgggcgtgcgcgtgccgaacgcggactggatcagtgcgacccgcgagggcctgaccatctgcgacgccacgtctgccgcattcgcgcaggcgctcgactggccgaagctcgacgtcgtcaccttctcctggcagaaggcactcggcggcgaggctgcgcacggcatgctgatcctgtcgccgcgtgcggtggagcggctcgaaacctacaagccggcctggccgctgccgaagatcttccgcatgaccaagggcggcaagctcaacgaaggcatcttcgtcggcgagaccatcaacacgccgtcgatgctctgcgtcgaggattatctcgacgcgctgaactgggccaagtcgatcggcggcctcaaggcgctgatcgcacgcgccgatgccaacaccaaggtgctcgccgactggaaggcgaagacgccgtggatcgacttcctggccaaggacgcctcgatccgctccaacacctcggtgtgcctgaagttcaccgatcccgcgatcacctcgctctccgacgacgcgcaggccgacttctccaagaagctggtcgcgctggtcgagaaggaaggcgccggctacgacttcgcctattaccgcgatgccccggccggcctgcgcatctggtgcggcgccaccgtcgaggccagggacgtcgagctgctgacgcagtggatcgactgggcgttcgccgagaccaaggccgcgctcgcgaaggcggcgtaa

SEQ ID NO: 5566 - DNA, 1590 bp, BradyrhizobiumColbertium
atgaccaagcccaaagttctcatttccgacgcgctctcgcccgctgccgttcagatcttcaaggaccgcggcatcgaggtcgacttccagcccaacctcggcaaggacaaggacaagctggccgagatcatcggcaattacgacggccttgcgatccgctcggcgaccaaggcgaccgccaagatcctcgaaaaggcgacgaagctgaaggtgatcggccgcgccggcatcggcgtcgacaatgtcgagattcccgcggccacggccaagggcatcatcgtgatgaacacgccgttcggcaattcgatcacgacggccgagcacgccatcaccctgatgctggcgctggcccgcgagattccgcaggcggacgcctcgacccaggccggcaagtgggagaagaaccgcttcatgggcgtcgagatcaccggcaaggtgctcggtgtcatcggctgcggcaacatcggctcgatcgtcgccgaccgcgcgctcggcctgcggatgaaggtgattgcgttcgatcccttcctctcgccggagcgcgccaaggacatcggcgtcgagaaggtcgagctcgacgacctcctcaagcgcgccgatttcatcacgctgcacaccccgctcaccgagaagacgaagaacatcatcgacgcggccgcgatcgccaagatgaagaagggcgttcgcctgatcaattgcgcccgcggcggcctcgtcgacgagcaggcggtggtcgatgcgctcaattccaagcacatcgccggcgccgccttcgacgtcttcgtcgaggagccggcgaccaagaacgtgctgttcggccatccgaacgtgatctgtacgccgcatctcggcgcgtccaccacggaagcgcaggagaacgtcgcgctgcaggtcgccgagcagatgtcggattacctgctcaccggcgcgatctcgaacgccgtgaacttcccctcgatcacggccgaggaagcgccgaagctgaagccgttcatcgccctcgccgagaagctcggctccttcgcgggccagctcaccgagaccggcatcctcaaggtggagatcacctacgagggccatgtcgccgagatgaagatcaaggcgatcacctccgccgtgctgtccggcctgctgcggccgatgctgggcgaggtcaacgtcgtctccgccccggtcgtcgccaaggagcgcggcatggtggtggacgagatcgtgcgcgccgcgcagagcgattatgagagcctgatcaccgtcgccgtcaccaccgagcggcaggagcggtcggtctcgggcaccgtctatgccgacggcaagccgcgcctcgtcgacatcaagggcatccgcgtcgatgccgagttcggcaagtcgatgatctacgtcaccaacgaggacaagccgggcttcatcggcaagttcgcgagcctgctcggcgacgccaagatcaacatcgcgaccttccaccttggccgcgtcgcgcccggcagcgatgccatcgcgctggtcgaggtcgacggcgcggtaccggccgacctgctcgccaaggtgcaggccctgccgcaggtcaagcaggccaaggcgctgacgttctga

SEQ ID NO: 5567 - DNA, 1188 bp, BradyrhizobiumColbertium
atgtcttttgccacccacctcccgccatggctcctgcgcagtgcagcggcctcgatcctcctgttgatgaccggcagcaccggcgctcatgcggcccgcgcgaacggcacgatcgccggcaacggcttcagctccaccatcctgaaggtcgtttccgagaatggaacgtcgtggaccaagatcgagggcagcaccatcagcctgcccgtcaaggtccacatcacaacgccgtcgtacccgatcgtgaactacaaggtgcgtcagctcggccatcccgagggcatgtatttcgtcaacgcgtctcccgacaagaagcacgacgacgaggtgaacttctcgaccacctatgaaggctcgaccgacttcatgacggctgcagaaaagcaggccatcattgcgacctgcaacaagaagctcagcgaaggaaagggcattcgcgaaagccacaacacgttcggttcggtcggcgtcgagctgatagcctcgttcctgatcccgagcaacgatgtcggtccgcttccttcgggcgggctgggaacgccgcacaagcacacggccaacgtggccgtgccggtgaaatgcgagggcaagcatggcaaggccgacgacgtcgccgccaaggagccgaacttcagcgtcaaggacatccacctccgcttcatgacctccgccggccatgtgacgagtcccaatcccggggcgaaatgccaggtgacccacgcccgcgtccgcgtcggcaccagcaaggccggtggagtcaagttcaagctctggaccaagatcggtaacgagccgatgcagagccagttcgtcgaggcctggtcgtcgttcgtttcgccgggcaagtacgaggcggtcttcaccaagaagatctcggtgtcgaagacgaccagcgtgcaggcgatggccgaggacaagaccaatccgatcggacaatcaaccggatggaagcaggtttcgctcgactgcaccggcgccggcggcggcggcttcgccgacaggcccggcacggccaatccctcggacaagcgactgccgtcgcgcgttttcctcggcgaagcacagccggtacccaacgctccaccatcccggccgagagttggcgaagccaggcttccgccaatgccgcaggctaatgcggcgagagcgaaggatcggttttatccgtcgaagccgcacgtaaactaa

SEQ ID NO: 5568 - DNA, 969 bp, BradyrhizobiumColbertium
ttggtcgctgttgtcccaaaatcagtttgccgatatgatttcacgaacatcatgaatgacattcagctgaatcgggtcgacctgaacctgcttccggttttcgaggccgtgctcgccgaagggaacgtcgccagagctgcggctcgtcttcatgtcacgccctcggcggtgagccatggacttggccggctcaggcagcagttcaacgaccccttgtttctcaagacgccgaaaggcgtcgtgcccacagagcgcgctctccaactcgccgatgccattgcggacgtcctggcacgtgcgcggcgcgtggtggggacggcggagccgttcgatccggctcgctcgaggcgccgcttcacggtcggcgcgcccgatgcgatcgcagccgtcatgatgcctccattgctgaagctcgttcagcgcgaggctcccttcatcgacatggctttgcgatacgtgctgcgcgaagcagcctttgcagcgctggatgcgcggacagtcgacatcgctgtggttccgatcgacgacgttccagcgcgctacgtgtccaagatcgtttttgaagacaggttccagatcgccgtccgtcgtggccattccttcgcggcagaaccgacgctgaagcgttattgcgagatgcagcacgccatcgtgtccccggccggcgatacgcgcgcttacgtcgatgacgtccttgccagcaaagggctatcccgccgcgtcgcgatgaccgtgccgagtttcatgctcttgatggcggttgtcgctgaaagcgatctgatcgccgccctgcctaaggggcttctcgatgttcacggcgcccgctttggtttgctcggcatcgattcaccgttgccgatgcgaagctttcaacttcgtgccatcgttccgaaggtcgcgatgatggatgccggcgtcgagtggctgttcggcctgctggacaatccgccttcgaaggcgtcggcgtaa

SEQ ID NO: 5569 - DNA, 1173 bp, BradyrhizobiumColbertium
atgcgtgaagccgtcatcgtttcctatgcgcgcacgggccttgcaaaatccggccgcggcgggttcaacatcacgccgccgatgtcgctcgcggcgcacgccattcatcacgcggtggaccgcgccggcgtcgagaaggactatgtcgaggattgctatctcggcaattgcgcccatggcgcgccgaacatcggccgccaggccgcgctgctcgccggcctgccgaagaccaccgccggcgtctcggtgaaccgcttctgctcctcgggcctgcagaccatcgccatggccgccaattcgatccgctcggacggcgccgactgcatcgtcgccggcggcgtcgagagcatctcgattccgggcggcgccacgccgaaggaatcgatcgatccggagctgctcaaggtcgcccccgacatcttcatggccatgatcgacaccgccgacatcgtcgccgagcgctacaagctcagccgcgaataccaggacgagttctcgctggaatcgcagcgccgcatggcctcggcgcagcaggccggcaagttcaaggacgagatcgtcccgatgaagacgaagatgaaggtggtcgacaagcagaccaaggcggagagcatcgtcgactacgtcgtcgatcgcgacgagtgcaaccgtcccgacaccacgctggaaggtctcgccaagctcgagccggtgaaggggcccggcaagtacgtcaccgccggcaatgccagccagctctcggacggcgccgccgccgtggtgctgatggaagccaaggacgcggagaagcgcggcctcaagccgctcggccgcttcgtcgcgtgggcgaccgccggctgcgagcccgacgagatgggcatcggaccggtgttcgcgattccgaagctgctcaagcgcaccggcctcaagatcgacgacatcgatctgtgggagctcaacgaagccttcgccagccagtgcctgtattgccgcgacaagctcggcatcgatcccgccaagtacaacgtcaacggcggctcgatcgcgatcggccatcccttcggcatgaccggcgcccgtctcaccggccacctgctgcaggaaggcgcccgccgcaaggcgaagtggggcgtggtgacgatgtgcatcggcggcggccagggcggcgccggcctgttcgagatctatcactga

SEQ ID NO: 5570 - DNA, 3489 bp, BradyrhizobiumColbertium
atgattcgttcggatttccagttgcgaggtgtgggcgatccgcggctggccgtgcatgcgacctcaccgctggccacctggctgtggtcgaccgacggcgcgcgcgtgctgtgggccaatccggtcggcgcaaaactgttcggcgcggccaacagcgccgccctcgccgacagggtgttcggccccgccgacagccatcgccgccagatcgcccgtctcgcgcgccagctgccggcaggcgggagcgtgcggctcgaacggctgcgtggcttcggcgcccggctcggcacgctgatgacctgcgcctgcgcccggctcgatttcgccgacggcagtcacgccgtgctcgtcaccgcgatagacccggcgctgcgcaccatgccgctggtcgagcggctgcatcggctggtcgcgggcgccaaggtgccgatggcggcgttcgcgccggacggattgttcgtcggcgcgagcgaggccgcccgcaccctgctcggcttccgcgacctgttcgaggccggcctcgaacgggcccgcagcgacgcgctgcgcgaaggccgcgccgcgacgcagatcggcatcggccagatggtgctgcagcgggtcggccgaggcgccgatatcggcctggtcgcgctgatcgagccggccgccaacccggccgcggcgcgcgatgccgcgcccgcggcggcaccggacgtcgcgcacagccagccggcccagccctcgcacgagattgcgccggccgcgccctccgccgctgcgccggagcccccgcctgctccgtccgccgaggcgccgtcggacatcgcactgttcgacgccttcgccgagccggaggacatagcggcgccggcggagacgatcgcgcacgcgcagccggacagcgaggcggcagcgcctgtcgcatccgccgcgcccgaggccccggttgaaaacattccgatcgaaagcacttcgaccgaaaacactccggttgaaaaccgcagcgcggccatcgtgtcgccgcagggcgagtcgatcaccggcggcatggtcgagccttcctcgggcaagccgtcttcgggccagcaagagccgcccgcaccgcgtcagcatccgctgcgcttcctctggcagatggatgcggagggccgctttgtgcttctctccgacgaattcatcggcctgatcggcccgcgcacggccgccggcttcggccggccctggcgcgagatcgcggccgacttcgcgctcgatcccgacgggcgcgtcgcacaggcgctgcaaagccaggacacctgggccggcatcacggtgagctggccggccgacggcggcgagcgcctgccggtcgagctcgcgggcctgccggtctacgacgagatgcgcaacttcgccggcttcaggggctttggcgtctgccgcgatctcgatgcgctcaaccggctcgaggcgcttcgccgtttcgagcggctcgccgcggcgccgacgcaacatggcctctccgccgatgtcgccgggcccgcgaccgagaccgagaccgaagccgagcctcacatgaagcccgaagcggcggcggcgcctccgccgatcaagccggccgagcccgagccgacatccgggcctgaagcaccagagactgaagcaccagagcctgaactgccaaagcctgaactgccagagcccacaagcgacgcgacttcacacccaaccgatctggacacgcacgtggaaacgcctcccaatgtcgtgccgttccgccctcccggcgatacgcgcgccccgacgctgacgccggtcgagaacagcgcgttcaacgagctcgcgcggcaattgtccgagcggctcgaacgcgagcgcgagacgatcgcagccgacgcatccgagccggcggcggagatcgcagccgagccagcggcaccggagccggaggcgccgcaggccgccgccgaatggctgagcgagccggcaccgccgccgcgcggcaccagcacgcgcgaccgcacgctgctcgacctgttgccatcaggcatcctgatctatcggctcgaccgcctgctctacgccaacccggccttcctcgcgcgcatgggctatgccagcgtcagcgcgctggagaatgccggcgggctcgatgcgctctatgtcgagccgggcgtgtcgtccgccagcagcacctcgcaagccggcacgccggtgacgatcagcgcgacggtcgcgaccggcgaagcgccgctggcgacgacggacgcgcatctgcatgcgatcgactgggacggcgagagcgcgcatgcgctgatctgcgcgctgccgcagccgacgccgatcgtcgcggagagcgtcgtcaccgaggccgtcgttgccgagtccatcgtcgcagagatcgccgagcccgcagccggcgaagccgaggccgaggatctcgccgccatcctcgacaccacggccgagggcatcgtgatgttcgatgccgaaggcaacatccacgcctgcaaccgcagcgccgaggcgctgttcggctacgacggcgaggcgctgctgcagcagaacctgatgacgctgttcgcgccggagagccagcaggtcgtcgccgattatctgcaaagcctgaagagccaggacattgcgagcctgctcgaccacggccgcgaggtgctgggccgcgagaagaagggcggcgccattccgctcgcgatgatcatgggccggacgcgcccggacgggccgaacttcttcgcggtgttccgcgacctctcgcaggccaagaagggcgagagcgagctgacgcaggcccgccgcctcgtcgacggcgcggcgaatgccaaggccgacatgctggcgcggatcagccacgagatccgcacgccgctcaacgccatcatcggcttcgccgaggtgatgatctcggagcgcttcggcacgctcggcaacgagcgctacggcgaatacatgaaggacatccgcgcctccggcgagcgcgtcatcgccatcatcgacgacctgctggagctgtcgcggatcgagaccggccagctcgacctgaacttcgccgacctcaatctcaacgatctggtcgaggcttgcgtcaccgtgatgcagccgcaggccaaccgcgagcgcatcatcatccgcacctcgctcgcgcatgcgctgccgcaggtgagcgcggatgcgcgcgcgatgcggcagatcaccatgaacctgatctcgaactcgatccggctcgccagcgcgggcggccaggtcatcgtctcgaccgcgctgaccgaccgcggcgagatcgcgctgcgcatccgcgacaccggccacggcctcagcgagcgcgaggtcgccgccgcgatggagccgttccgcacaccgccgcccggcgacgccgccgacagctcggcgctgagcctgtcgctgaccaaggcgctggtcgaagccaaccgcgcccgcttcaacatcaagaacgcaggccacggcacgctgatcgaggtggtgttcgcgccggtgctggcgaaggcctag

SEQ ID NO: 5571 - DNA, 435 bp, BradyrhizobiumColbertium
atgacaggtgcgactgatccgttttctgcctcgatcatcccgttcgaggttcccgagcagatgcgtgcgttcgccgaaaagggcgtgtcgcaggcccgcgagaactacgccaagttcaaggacgccgccgaaacccacaacggcaccgtcgaggccgtgttcacctgcgcgtccaggggcgcgagcgaatacaccgccaagctggtcgagttcatgaaggccaattccagcgcccagctcgacttcgcccagcagctgttcggcgccaagtcgccgaccgaagcgatggagctgtggaccggccacgcccgcaagcagctcgagacctaccagtcccaggccaaggagctggccgagctcacccagcgcgtcgccgccgagacggccgagccgatcaaggccagcgcctccaagtattatccgcccgccgcctga

SEQ ID NO: 5572 - DNA, 408 bp, BradyrhizobiumColbertium
atgaaacagttcttcctcaagttcttcacctggtggaatggccagaccttcggcacccaactctggaccaggcggtacggagagctggtcggcgaggacgagcagggcaaccgctactaccgcacccgcggcggagccatcgatccggcgctcggtttcgagcggcgctgggtgatttacaacggctacgcggaagcgagccggattccgccgtcgtggcacggctggattcatcacgtcgtcgacatgccgccgaccgagatcaactatcagccgcgcgagtgggaaaagccgcaccagccgaatctcaccggcacggcgaaggcctatcgtccttccggctcgacgcttgccagcggccggcgcccgaaggcaaccggcgactatcagccctggacgcccggttag

SEQ ID NO: 5573 - DNA, 687 bp, BradyrhizobiumColbertium
atgtcgtccccgcttcagattggcctcctggtgtttccgcgcgtcacccagctcgatttcactggtcccttgcaggtgttcgccatggttcccgacgcaaaactgcacctgatctggaagcggattgaaccggtgccgagcgactccgtgatgacgctgacgccgaccacgacctttgcggattgcccccaactcgacgtgatctgtgtgcccggcggccacggcaccaacgacctgctcaacgatgaggaagtgctcgatttcctgcgccggcaggctgatggcgccaaatacgtcacctcggtgtgcacgggatcgctggcgctcggcgccgccggcctcttgaagggataccgcgccgccacccattggagcgcaatggacatgctcgccgagttcggcgcgacgccgacgaagacacgcgtctgcatcgaccgcaatcgcatcactggcggcggcgtcaccgccgggatcgatttcgcgctgacgctggtgtcgatcatggtcaatcgcaccatggcggaagcgatccagctccagatggaatacaatccagccccgccattcaattcgggttcgcccgacaccgcacccgccgaggtgatggcgttgctcggagcgcgcggcgcgcagaaccaggcgcggcgactcgaggcggtcaagcgggctgccgagcgcgtgatgtag

SEQ ID NO: 5574 - DNA, 939 bp, BradyrhizobiumColbertium
atgatcggcatcctgatcttccccgacttccagctgctcgatgcggcaggcccgatctcggcgttcgagatcgcagcgcgctgcatcggcaaggcgcctctcattcgcgtgctggcggcgaagcccggactcgtgcgcagttcgtccggagtcgagatgatggcgcgtgacctcaagtcggccagcacgatcacgacgctggtcgttgcgggcgggaccggggtggccgatgccgcgcgctgcgacgccacgcgcgctttcgtgcaacggctcgcaaggcgcggcgtacgcgtcgcgagcgtctgctcgggcgcctacgtgctggccgaagcaggcctgctcgacgggcgccgcgccaccacgcattgggggcgcacgcgcgatttcgtctcgcgctttcccaaggtgaagttcgagccggaccagatctttacccgcgacggcaatgtgtggacctcggcgggaattaccgcaggcatagacctcgcgctcgcgatgatcactgaggaccacggcgaggagatcgcacgacagaccgcgcggcagctcgtgctgtaccaccgccgcagcggaggccagtcgcaattttcgtcgctcctggagctgaagacgccgagcgggcgcttcggcccgctattgtcctgggcgcgcgaaaacctcgatgcgcctttgacggtggaagatctcgccgaccgcgccggcatgagcgcgcggcacttcgcccgcgcctttgccgccgagaccggcacgacaccatccaaggcggtcgagcgattgcggctcgaggccgcccgggagcgcgtccagtcctcccgcgaggcgatcgagctcgttgcggaaacgaccggcttccgcgatcccgagcgcatgcggcgcgccttcatccgcgccttcggccagccgccgcaggcgctgcggcgcgcggcgcgcgcgggctag

SEQ ID NO: 5575 - DNA, 255 bp, BradyrhizobiumColbertium
atgaagtttgtcatgattctggttctcggctcgctcgccatgggctcggcagcgagggccgatcaacccggacctgactggatgccgatggagcaggtgaaatccaaggtcatggagtccggctattcacaggtcaccaagcttgaagccgacgacggccagtgggaaggcgaaggcgtcaagaacggccagaaaatggaattccacgccgatcccaagaccggcgccatcgtgcgcgaaaagccggataagtga

SEQ ID NO: 5576 - DNA, 981 bp, BradyrhizobiumColbertium
gtggccgccgtcgcgttcatcgcagtcgcggtgccgccacttggggcgttgctgcgcccttacgtcaccgaggcgattgtccttctactctgcatctccttcatgcgcgtcgatttcgccgcgctgcacggccatctccgcaggccggcgctggtcgtaacggctacggcctggacgatgatcggtgttccgctgatcgtcgggctgatcacccatgcaatgggactgacgagccactcccccggccttgctcttgcgctgatgctccagggcatggcctcgccgatgatggcctcgccggcactcgccgcgctgatggggctcgatgccaccttggtgctggtcacgctggtgacatcgactgcgctcgttcccttcaccgcttcactgtttgcagccctgtttctcgacggaatgctcagcatctcgccgctgacgctcggcctcaagctcctcggcatcctcgccgcatcgctgctggccgcgaccgtcacccgctgggtctttggcgcggaggcgattcagcgcgcgaagcggccgatcgacggcttcaacatcatcatcctctttgtgttcgcctccgcggtgatgggcgacgtcgccggcgccttggtaagccagccgctgttcaccatgggcctcgcgctgctgtccttcgcgatctatttcaccctgctcgccatcaccgcactgctgttccgccgcattgggtatgagcgcgcgctggcgctcgggctgatggtctcacagcgcaatctcggattgatgctggcggcgacggccggcgcattgccgcctagcacctggctttatttcgcgatgacacagttcccgatccaccttgcgccgtacatgctgatgccgatcgcaaggcgactgactgcggacgtagacgcgctcaacgggacgaccaaggctgacgctcgctcgttcgcgtcgcaccgacgcaggggaggaacatcagttcaggaccccggttga

SEQ ID NO: 5577 - DNA, 948 bp, BradyrhizobiumColbertium
atgcccgttgtgctcgatcccgatgccgctgccgtctacaaggcattccaggaggccggccgccctgcctacgagacgctgacagctccggaagcacgcgcctattattcgcaggcccgctttgccaccaaccctgacgcgccggagctcgcccgcgtcgcaccgctggcgatcccggcgccgcacggcgtgatccccgcccgcctctacgtgcccaaagaaccgcgccagcgcgacggcctgtcgccggcgctggtattcttccatggcggcggctgggtgatcggcgacctcgactctcacgatgtcgtctgccgccagcttgcggtcgaaggtgcgctgatcgtgatctcgatcgactatcggcttgcgcccgagcacaaatttcccgctgccgcagaggacgccgtcgccgcaacgcaatgggtcgctgggaacgcgcgcgagctcggcatcgacgcctcgcgcctctcgatcggcggcgacagcgccggcggcaatctcaccgcggtcgtggcactcgcggcgcgcgatgccggcggccctgcgctcgcaggccaggtgttgatctatccggcgaccgatttcgccatgacgcacggctcccacagcgagcccgagaccagcgtgctcctgacccactcggtgatccgctggttccgcgatcactatctcaacagcgcggccgacatccacgactggcgcgcctcgccggcgcgcgcgcaaagccttgccggcctgccgccggcctatgtgctgaccgccggtgccgatcccctgcgtgacgaaggcgacgaatacgccgaccgcctcaggcaggccggcgtgcccgtgacgaccaagcactatcccggccaattccacggcttcttcacgatgggcaagctgctggcaaaggccaatgttgctgtcggcgagatcggcgcctggctgaaaggattgggctga

SEQ ID NO: 5578 - DNA, 1020 bp, BradyrhizobiumColbertium
atgtccaacaagcccgattcgctgttgaagccgcgcgagatgtttcgaacctttaccctgacaggccttgcggcactgctggccgccaccgcactcacggtcgcgacgccggctcaggcgcagatcggcacgattttctccgacccgccgccgctacggccgccgggcagcattccgcgcggccagctgcagcagatcccggaggacgacgaggaggtgccggaactgccgccgcagggccgtgtgctgccgtcgcgcccgatgccgctgcccccgggccgccaaggtaacgtgatgccggggccggtcgagagccagccgctggccccgccgccgggctccaccctcgcgccgccgaaccagccgccttccgcggcgatcaccccgtccggtccgcaaggcgtccccggtcagcgccagccccagcagaagggcgcgccgggcactgtcccgcagacgccggcgagcctgcagccgggcgacgaggtcgttaccgagccgccggcccagaagatcgcgaacaagaaggcgaccttttcgggcctcgacaagatcaccgggcgcatcatcaatttcgacgaggagatcggcgagaccgtccaattcggtgcgctccgggtcaagaccgacgcctgctatacgcgtccggccacggaggccgccaacaccgacgccttcgtcgaagtcgacgagatcaccttgcagggcgaggtgaagcgcatcttctcgggctggatgttcgcggcgagcccgggcctgcacggcgtcgagcatccgatctacgacatctggctgaccgactgcaaagagccgcagcagaccatcgcgactgcggcaccggacccggcggccaagccggcacctccgccgcccgcacagaagaaggccgcgcccaagcaggcgcagcagcgtgcgccgcagccgctgccgccgatccagcagcagcaaccggcaccgccgccgcctccgccgccggagcaacggccaggtctgttcggtatccccgggttcgggcgctaa

SEQ ID NO: 5579 - DNA, 639 bp, BradyrhizobiumColbertium
gtgctgctgcgcgcttatgcctgcggcatctttccgatggcggaaagcgccgacgatccgaccctgttctgggtcgagccggagttgcgtggcgtcatcccgctcgacggatttcgcgtcgcctcgcggctggcgcgcacggtgcgctccgactcgtttcgcgtcaccgtcaacactgcgttcaaggcgacgatcgccggctgcgccgcgccgcaggccgggcgcgaggacacctggatcaacaagcgcatccgcgacctctatggcggcctcttcgagctcggccattgccacagcgtcgaggcctggcagggcgacgatctcgtcggggggctctacggcgtcagcctgggacgtgccttcttcggcgagagcatgttccacacggcgcgcgacgcctcgaaagtggcgctggtgcatctggtcgcgcggctcatttacggcggcttcgagctgctcgacacccaatacgtcaccgagcatctgaagagcttcggcgcagtcgagatttcgcggcggcgctacaccgcgctgctcgacaaggcgctcgcgggcgagcctggcgatttcctgagactctccgccggtgagccgatccccggcgcacgcgcgctcgagatcatcgcctcgcggcaatga

SEQ ID NO: 5580 - DNA, 1116 bp, BradyrhizobiumColbertium
atgaaccagagcacgccgacacttctctacatcgatgacgacgacgcgctggcgcgcctggtcgatcgcggcctgacgcggcgcggctacagggtcgtccatgccgcgagcggcgaggaaggcctcgagcgcatccgccgcgccggcgcccagggcagcattgaagacagcatcgatgtcgtggcactcgaccagtacatgccgggcctcgacgggctggaaacgctcgagcagatcatggcgatcccggacgcgccgccggtcgtattcgtcacggcgtcgcaggattccagcatcgcggtgactgcactgaaggccggggcggccgattatctggtcaaggacgtccatggcgatttcatcccgctgctgcatgtcgccgccgacggcgcgctgcgccaggccgaattgcagagggcgcgcgaggaagccgaggccgagatccacgcctcgcgcgaccgctacgcggcgcttgccgccgaacgcgagcttctgctgcgcgaggtcaaccaccgcgtcggcaactcgcttcagatcatcgcctcgttgctgcaccttcaggcaagctccgccgcgcaggacgaggtcaaggcggcgctgaccaatgcgatgggccgcgttgccgccgtcgcgcaagtgcaccgccgcctctacacctcgcaggacctgaagagcgtggtcctgaaccagtatctggactcgctgctcgaggatctccgccgctccgccgagggcaaccggatgtcgcgcctgacgttgaaggccgagccgatcgagatcgatccggatcgcgcggtcgccgtcggcatcatcgtcaacgagctggtgatgaacgcggtcaagtacgcctatccggacggcgccggccccatccatgtcgagctgatctcgcggggcgacgatctccagctctcgatctccgacgacggcgtgggcgacaacgtcaaggccgatccgcgttccaccggcatgggtcagcgcatcgtcgcggccatggcttccaagctcgacgccacggtcgaacgcgatcccgcgcattccggaacccggatcgtgctgaaattcggccgcgtgcccgcagtccccggcaagaccagcaccgccgccgcaagctga

SEQ ID NO: 5581 - DNA, 441 bp, BradyrhizobiumColbertium
atgacccagcctgtcaccatcatcatgatcgaggacgacgagggccatgcccgcctgatcgagcgcaatatccgccgctcgggcgtcaacaacgaaatcgtctcgttcgccaacggcaccgacgcgatgctgcacctgttcggcgccgacggttccgggctcgtgcagaagggcaatgcgctcctgatcctgctggacctcaatctgccagacatgaccgggatcgacatcctgaggcagatcaaggagaacaaatatctgaaggcctcgcccgtggtggtgctgaccaccaccgacgattcccaggagatcaagcgttgctacgagctcggctgcaacgtctacatcaccaaaccggtcaactacgagaatttcgccaatgccatccggcagctcggcctgttcttctcggtcatccaggtcccgccagccgccacatga

SEQ ID NO: 5582 - DNA, 1527 bp, BradyrhizobiumColbertium
gtgacggctgaggcccagcgacggcgggcgttttggcaggtcctgctgttttcggcgggccttttggtgctgaccgcgatcagcgccggctcggtctacttggtcaacaaggcccggcaggacgccgaatgggtggttcacacgatcgaggcgcagaaccagatcaacgctctgctgctcgaaatccggcgtgccgagagcaccgcccgcggctacctgctgacgcaagcgacggacttcaaggccgaccatgagaaggccgtggcggcaatcatcccggcgctcgacaggctcacgcgtctgaccggcgacaaccctgcacaacgtgcgaacatcgagaagttgagcgcggcgatcgagacccggctcggccagttcgctcaggagatggatttcataagtcagggtcatccggacaaggcagcagcggtggtccgcgaggtcggctccaccgataccactgccgcgattgccaaagtcgcgacggcaatgattcgggaagaggaacggctgttccggctaagaacggtgaactccgaccgcagccagactctggccgcatcgatgaccggcatcggctccgggctcgtcgtggtgttggcgctgatctccatttggctggtgcgccgctcggcgctcgcccgtgacgaggccgaagcacgcttgcgcgatgccaatgtcaatctggaggccgtagtcgacgagcgcactgccgacctgcgcgaagccaacaacgagatccagcgctttgcctatatcgtcagccacgacctgcgctcgccgctcgtcaacatcatgggcttcaccagcgagctcgaggagctcggcggcgacatcttccgccgtatcagcagcctcgcccgcgctcgtggggatgggacgccgccggcgcccgcaggacccggtgagatcgcgctcgaaggcgccgacaagcagctctcggaggatttttccgaagcgctcggcttcatcaagtcgtcgatcgccaagatggaccgcctgatttcggccatcctcaacctcacccgcgagggccggcgcgaattccagccggtgaagatcgacacacgcgagctgatcgcggccatcgtctcgacagtggcgcaccaggcggcggaggcccgggccgagattcacctcgagcctctgccggacatcgtgagcgatcgtctcgcgctcgagcagatcttctccaatctgatcgacaacgcggtcaaatatctcaagccgggcgtgcccggcgagatcagaatcagcgggcggaccaagctcggttacgctatcttcgagatcagcgacaacggccgcgggatcgatccgagggatcaccagcggatattcgacctgttccgccgtgcgggaacccaggacaagcccggccagggcatcgggcttgcgcatgtgcgtgcacttgtgcgtcgcctcggcggcaccatgtcggtatcatcggaactgaacgcgggcagcaccttcaccatcaccctgcccatcgcctggaatgtgaacaaccggaacgcagatcgatga

SEQ ID NO: 5583 - DNA, 1359 bp, BradyrhizobiumColbertium
atgttcgacaagatcctcatagccaatcgcggcgagatcgcgcttcgtatcctcagggcctgcaaggagctcgggatcgcgaccgtcgcggtgccctccaccgccgatgccgatgccatgcatgtgcgcctgtcggacgagagcgtctgcatcgggccgccgccctccaaggacagctatctcaacgtgcccgcgctgctcgcggcctgcgagatcaccggggcggacgcagtgcatcccggctacggcttcctctccgagaacgcccgctttgcggaaattctcacagagcacaatctgcatttcatcggcccgaaggccgagcacatccgcctgatgggcgacaagatcgaagcgaagaagactgccaagcgcctcggcatccccgtggtgcccggctccgagggcgctgtcggtcccaatgacgacgcgatggcgatcgccagggagatcggcttcccggtgctggtcaaggcggccgccggcggcggcggccgcggcatgaaggtcgcgcacagtgaggccgacctccagctcgcgctgtcgaccgcggccaatgaggccaagtccgcctttggcgatgcctccgtctacctggaaaaatacctccagaagccgcgccacatcgagatccagatcctcggcgacggccgcggcggcgcgatccatctcggcgaacgcgattgctcgctgcagcgccggcaccagaaggtctgggaggaaggtccatcgcccgtattggccgccgccgcgcgggccaggatcggcgagacctgcgccaaagcgatgcgcgagatgaaatatctcggcgtcggcaccatcgagttcctgtacgaggacggcgagttctacttcatcgagatgaacacgcgaatccaggtggagcatcccgtcaccgagagcatcacggacatcgacctcgtgctggagcagatccgcatcgccgcgggcggcgacctgccggccaagcaggacgaggtccaggtcatcggccacgcgatcgagtgccgcatcaacgccgagaacccgcagaccttccgcccgtcaccagggcgcatcctgcaatatcatccgcccggcggcctcggcgtccggatcgattccgcggtctatcagggctacacgatccccagctattacgactccctggtcggcaagctgatcgtgcatggcaagacccgcgccgaatgcctgatgcggctgcgccgggcgctggacgagatggtggtcgagggcatcgagaccacgctgccgctgttccgcgccctggtccgtgaagccgacatcatcaacggcgactaccacatccactggctggagcaatatctcgccggaaagatggaacccgcccagagataa

SEQ ID NO: 5584 - DNA, 495 bp, BradyrhizobiumColbertium
atggcgcgccagccagacgacaaagcagccgcaaagttttccagcgaggattccgcgctcgtccgcgagctggccctgctgctcgatgagacaagcctgaccgagatcgagatcgaacgggcgggcctgcgcctgcgcgtcgcgcgcaacatcagcgttgccgcgaccatgccgatgccgatggcacccgctcccgccgccgttccggtggcagcaagcgccgccgcgtccgccccagccgcctccgatctgtcgaagcatcccggcgccgtgacttcgccgatggtcggcaccgcctattgggcgccggagccgggcgcaaaaccgttcatcgatgtcggcaccaaggtctctgtcggccagacgctgctgatcatcgaagccatgaagaccatgaaccagatcccctcgccacgcgccggcacggtgacgcagatcctggtcgaggacggccagccggtcgagtacggcgagccgctggtgattattgagtga

SEQ ID NO: 5585 - DNA, 468 bp, BradyrhizobiumColbertium
atggccgaacctgcaaccgacacgatcctcgtcctgaacgggccgaacctcaacatgctggggacgcgcgagcccgaaaaatacggccatgcgacactggcggacgtcgaggcgctgtgccgggacgcggcggcgagcttcggtctcaaggccgactgccggcagtccaaccgcgaaggcgagctgatcgacttcatccacgaggcgcaccggcgcaagatgaagggcatcatcatcaatgccggcggctattcacacacctcgatcgcactgcacgatgcgctgctcgcggtgcagattccggcggtcgaggtgcatgtgaccaacatccacgcccgcgagagctttcgtcaccattcctacaccgcgcgcgcggccttcgcgtcgctgtgcggtttcggcatcgaaggctaccgcctcgccatccagggccttgccgccaagctcggcatcaggcccaacgcctga

SEQ ID NO: 5586 - DNA, 810 bp, BradyrhizobiumColbertium
atgttgaaccgctttatgatctcggttgccgcggccgcactcgttgcgggcaccggcctggcgaatgcacagggcaccatgggccgcgacagcggtggcggcgccggcggcgcacagatgcagcagtcgcagccctccggcggcggcgccgatcgcggcggctcgatgggccgcgactccatgagccacgacaaggggactgtcggccagtccggcggctccgacaccatgaagtccggtcgggcttcggaggacaagtccggcgcgacgaacaagaacgcggccgacgacaagtcgggcaccaagggccagcgcaccgacgaccgtgcacagggccagacggacaagtcgcagcaggacaagtccaagagcatgagccaggacaccagcaagtccggcagcaaggaccagaaggacatgaaggctgagggcagcaagagcggcgcctcgaccaacaacgccgagacccgccagggcaccggtgcgagcaccaaccagaatgcgcagggtcagggctcgtcctcgacgacggtcggccaggccggcgccgctgccaagctctcgaccgagcagcggacccagatcacctcggtcatccgcgagcagcgcgtcgctccggtgacgaacgtgaacttctcgatctcggtcggcacccgcattccgcgggagggcatcacccttcactccctgccgtcccgggtcgtgacgatctatccggagtggcggagctacaagtacgtcctggtccgggaagagatcgtgatcatcaatccggatacctacgagatcgtggccgtcctgaacgtctaa

SEQ ID NO: 5587 - DNA, 132 bp, BradyrhizobiumColbertium
atgaatgactttgcacgaagcggccagccttcggcgaaagaaaaaggccggcttttctgccggccctcgatgttctcggtaatcctacaacgtgcgatcagcaagtcgcctttccgcagcgtgcgatgctga

SEQ ID NO: 5588 - DNA, 768 bp, BradyrhizobiumColbertium
atgctttcgctgcgcctgcttgctcccgcgctgttcgcgctcgccatgttcggcgcatccgcccctgcgtcggccgacagcttctccgatgcgcagcgcaccgacatcgagaagatcgtcaagaactatctcgtcagccatcccgaggtgctggaggaggccatggccgagctcagcaagcgccaaacagcggccgagacgcggaagcacgaggccagcatcgcgcagaacgcggacgcgatcttcaactcgccgcgccaggtcgtactcggcaacaaggacggcgacgtcacgttcgtcgagttcttcgattacaattgcggctactgcaagcgcgccatgggcgacatgctcgacatcatgaagagcgacccgaagctgaaggtcgtgctgaaggagtttccggtgctgagccagggttcggtcgaagcggcccaggttggggtcgccgtgcgcatgcaggatcccacgggcaagaagtatctcgacttccaccagaggctgctgaacggccgcggtgccgcggacaaggcgcgcgcgatccaggcggccaaggaagccggcctcgacaccgcgagaatcgagaaggatatcgccagccccgaggtccgcgccaccatcgaggagaacttcaagctcgccgaagcgatgggcatgaacggcacgccgagctacgtgatcggcaagcagatcgtaatcggcgccgtcggtgtcgaagccctcaaggaaaagatcagcatcgcacgctgcggaaaggcgacttgctga

SEQ ID NO: 5589 - DNA, 1401 bp, BradyrhizobiumColbertium
atgttgctccagatcgcattgcgccggaaggcctccgccctcaccgccctcgtgacggccgccgccatcgcgctgacgccattctcgtctgcgcgggcgcgggccaagggaccgccggtcctgcgcgacacagagaccgagcagttgcttcgcgaatatacgcgcccgatcctccgcgtcgcgggtctggagaagcagaacatccagatggtgatcatcaacgacagctcgttcaacgcgttcgtcgcggacggccgccgcatattcgtcaattggggcgcgatcctgcagtcggagacgccgaaccagatcatcggcgtgctcgcgcacgagaccggccatctggccggtggccatctctccaagctgcgcgagcagctcgccgccgcccagacccagatgatcatcgcgatgctgctgggtgccggtgccatcgcagccggcagcgcgcagcgcagcggcgccggcaacaatgggctcgccaatgccggcgcggccgccattgcagctccgcaggagatgatccgccgcacgctgttgtcctaccagcgccagcaggaggagaacgccgaccgcgccggcgtgaaattcctcacggcgacccagcaatcgccgaggggcatgtacgagacgttcaagcgcttcaccagcgagagcctgttcgcggcccgcggcgccgatccctatctccagtcgcatccgatgccggccgagcgcgtcgccgcgcttcaggagctcgccagctccagcccgtactggaccaagaaggacgatcccgcgctgcagctccggcacgacatggtccgcgccaagatttccgccttcatggagcggccggagacggtgtatcgccgctatccgcagaccaacgacagcctgccggcgcgctatgcccgtgcgatcagcacctatctgcacggggatctgcgcagcgccctcgctcagatcgacgcactgatccaggtgcagccgaacaacccctacttctacgaggtgcgcggccaggcacttctggagagcggcaagccggccgaggccatcgctcccctgcgcaaggcggcgcagctttcgaacaatgcccccctcatcgagatgttacttgggcaggctctggttggaaccgataatagggcctacaccgacgatgccgtccggattctccgtgccgcggtcgcacgagagccagaggcggcgctcggctatacccagctcgcgatggcctatggccggaagggagactatgccgaggcggatctcgcctccgcccaggccgcttacctgcgcggcgacaacaagactgcccgcgagcttgctacgcgcgcgaaaacccgtttcgccgtcggcacgcccggatgggtcaaggccgacgacatcgtggcggcaaagccgccgcgcaactga

SEQ ID NO: 5590 - DNA, 243 bp, BradyrhizobiumColbertium
ttggtcaaacggtcttggtcaagcagttgcgtgattggtttggcgattggcggcggaccggatacgcgatatgcccttgtaagccgtgccctttatgagccgtacaatgcggccagtctggggcgcaagcgccccgtttttcggaccggacggtcggttcgccagcgaatagcagaaatcgatgcacgacgcgacattgaggaaccggttggggcaatggctcgagccctcccgccgcagtga

SEQ ID NO: 5591 - DNA, 1113 bp, BradyrhizobiumColbertium
atggtgatggacgtcatggccgcggcggcccgaatcgaggccgccggcggccatgtgattcacatggaggtcggccagcccgcggccggcgcgccgagcaccgcgatcgcggccgcccatgccgcgctcgaggcgggacggatcgattatacctccgcgctcggtatcccatccttgcgcgagcgcatcgcgcggctttatcgcgacacctatggctgtgatctcagcgccgagcggatcgtcgtgaccactggctcctccggcggcttcattttggctttcctttcgatgttcgagcccggcgatcgcgtcgccgtgaccgtgccgggctatcccccgtaccgtcacatcctcaccgcgctcggctgcgagccggtcttgatcgaaaccacgaacgagacgcgccacgcgctcacaggcgaggcgctgctcgcggcgcatcgcaaggcgccgctgaagggcgtgctggtgggcagtcccgccaatccaaccggcacgatgatgtcacgcgaagcgctcgccggcctcatcgcggcggcggaagatgccggcatccgcttcgtctcggatgagatctatcacgggctcgactatgcgtttccagccgtcacggcggcggcgctgaccgagcacgcaatcgtgatcaactcgttctccaagtatttttgcatgactggctggcgcgtcggctggatggtcgtgcccgagattctggtgcggccgatcgagcgactccaacagaacctctcgatctcggtgccggcgctgtcgcagatcgcggcagaggccgccttcgacggcgcggccgagatggaggcgatcaagcacggctatcaggaaaaccggcgcattctgagcgagggtctgccgaaggcaggtctcagcaagttcttgcccgccgatggtgcattctatctctatgccgacgtttcggatttcacctcggacagtttcgcgttcgcaaagcagatgctggagcaggcacgcgttgcggcaacgcccggagtcgatttcgatcccgttcacggccgctcgttcattcgtttctcctatgcgcgctcgccaggggagatgcgtgaggcagttgaccggattgctgattggcttaaatga

SEQ ID NO: 5592 - DNA, 558 bp, BradyrhizobiumColbertium
atgtggccgacccggccaggcgaatccgtcggcgcgctgcgcgccatcgtgctggtcgcgctcggcacggcgttgatggcgctgtccgccaaggtgaatctgccgctgccttatgtgccgatgacgttgcagactctggtggtgctgatgatcggggccgcctatggctggcgcctcggcagtgcaaccatgattgcctacctcgccgagggggcgctcggcctgccggtgttcgccgggccggtgggcgggattgcgccgctggtcggcccgacagcgggctatctgttcggcttcgtgctggctgcattcgtgaccggctggctcgccgagcgcggctgggatcgcagcgtgttgctgctgtttgccgcgatggcggttggccatgtcgccattctggccgccggcttcggctggctggcttttggcctcagcctcggcgccgcgaaagcctggcaggtcggcatcgtgccgttcattgcggcctcgctcgtcaagaatgcgctgggcgcggcgttgctgccggcagcgcgccggatcgtcgagcgccgcgggtaa

SEQ ID NO: 5593 - DNA, 1233 bp, BradyrhizobiumColbertium
atgaacagtgcaatcgttctcggcggcggcatgatcggcgtgagcgcggcactgcatctgcagcagcgcggctgggccgtcacgctggtcgatcgcagggagccgggccgcgagaccagctacggcaacgcggggatgatccaggcggaagcggtgcgcccctatccgatgccgcgcgacttcgcttcactgttgaagatcgcgaccggccgcaccaacgacgtgcgctacagcctctcctcactccacctccacgtcgagcccctgctccgctactggtggcattcggcgccgaagcggcatcgcgaggcgatcgaggcgtgggcacggctgatcgcctatgcgacggccgagcacgacgtcttgatccgcgaggcgcacgccgacaacctcatccgccgcgccggctaccgcgcgttgtttcgcgactccgcgtcattgaatctcgcgctcaaggctgcggaggaagatcagcgcgaattcggcgtgaactttcgcgtgctgtccggcagcgagcttgccagggccgagccgattttgcgcgacgatcttcctggagcgatccattggctcgacacctggaccgtttccgatcccggcgcgctggtcacggcctatgccgagttgttcgagcggctcggcggcagggtcgtgctcggtgatgcacgctcgctgcaacagaccgcgaccggctggtcagtcgacaccgaccaggggcgcatcgatgctccccacgcggtcgtgacgctcgggccgtggtcgcccgacctcctccacaaattcggctatcgcattccgctggtgcgcaagcgcggctaccacatgcattacagcggcggcgcctcgctcgacctgccgctcatcgacaagactggcggctatgccatgggtccgatggccaaaggcattcgcatcaccacgggtgcggaattgaccggcgcggacgcgctggcgacaccggtgcagctcgccagcgccgaagcctccgcgcgcgagctgatcgacctcggcaagcgggtcgaaccggatccatggttcgggacgaggccctgcacgcccgacatgctccccgtgctcggccgcgctccgcgtcacccaggcctctggatgaacttcggccatggccaccaaggctttacgctgggacccgcgaccggacgcctgctggcggagatcatgaatggcgagacgccggccgtcgatcccacgccgtaccggcccgagcgcttctag

SEQ ID NO: 5594 - DNA, 3159 bp, BradyrhizobiumColbertium
atgcccaacaagatgttgatcgatgccacccacccggaagagacccgggtcgtcgtggtccgcggcaatcgcgtcgaagagtttgatttcgagaccgcgcaacgcaagcaactgcgcgggaacatctacctcgccaaggtcacaagggtcgaaccctcgctccaggccgccttcgtcgaatatggcggcaaccgccacggcttcctcgccttcagcgaaatccatcctgactactaccagatcccggtcgccgaccggcaggcgctgatcgaggccgaggaacaggcccatcgggaggcggaggaagaaagcgagaatcggtcgcacggccgccgccgttcacgccaccgcaacgcccgccgccgcggtcatggcgaacgcgtgcgcagcgacatcgtcgaaggcctcgatgccggcgccgatcccgtggcccagcgcgtggagggcgagcccccgcatggcgagggcacgccgcacgagggcgagcatctgcatgccgacgcggagcatcacggcgagcacgacgcccatcatgaacatgatcacgacaatcatcatcatgatgacgagcaccaccacggcgacgttggcaatggccacgagcacgatcatcacgaccatgaccatgccgatgagacgcccgcgcctgtcgcggccgtcggcgccgaaccggtgcttgcgaccgaagccgttgccgagccccaggaatctcacgccttcgaagctcatgtctccgagacaccagcttccgaggcacccacggaggccctggcggaagcggtaacgtcagccgcggagccggccgatgccgtctacgccgccggcgagagcactgaagcgtcgcaggccgaagccgcggaagcagccggcgatgatgatgatgacgacgacgatgatgatgaagaggacgaggacggcgaggaagccgaagaggaagtcgtcgaatccgtcggcggggacgacgtgctggaggaagtgccggagcgcaccttccgtccgcgccgtcagtacaagatccaggaagtgatcaagcgccggcaggtcatgctggtgcaggtcgtcaaggaagaacgcggcaacaagggcgccgcgctcacgacttacctctcgctcgccggccgctacgccgtcctgatgccgaacaccgcccgcggcggcggcatcagccgcaagatcaccagcgcgcaagaccgttcgcgcctgaaggaagtggtgcaggatctcgacgtgcccgagggcatgggcatcatcctgcgcacggcaggcgcctcccgcaccaagcccgagatcaagcgcgacttcgaatacctcatccgcatgtgggaaacggtgcgcgatctcacgctgaagtcgcaggccccgaccctcgtctatgaggaaggctcgctgatcaagcgctcgctgcgcgatctctacaacaaggagatcgacgagattcaggttgccggcgaagctggctaccgcgaggcgcgcgatttcatgaagatgctgatgcccgccaatgtcggcgcggtgaagcagtatcgcgacggtcagccgctgttctcgcgcatgggcgtcgagagccagctcgatgcgatgttctcgccgaccgtgcaattgcgctccggcggctacatcgtgatcaaccagaccgaagcgctggtctccatcgacgtcaactcgggtcgctcgacccgcgagcaccacatcgaagacaccgcgctcaagaccaacctggaggcggccgaagaggtcgcccgccagcttcgcttgcgcgacctcgccggcctgatcgtcatcgacttcatcgacatggacgagaagcgcaacaaccgcgcggtggagcgcaagctgtccgattgcctcaggcaggatcgcgcgcgaatccaggtcggccgtatctcgcatttcggcctgctcgagatgtcgcgccagcgcatccgtgccagcgtgctggagagctcgaccgatccatgcccgcattgcggcggcaccggccatgtgcgctcggtgtcctcggtggcactgcagctgctgcgcggcctcgaagagatcctgatgaaaggcgcgacccacaatctcgtggtccgcacccgcaccgacgtggcgctctatgtgctcaaccacaagcgcggccatctgcgcgacctcgagaacgggttcaaggtcacgctctctgtcatcgccgatcccggcgtcagcggcccacaggcttatgtgatcgaccgcggtgagcaggtccatacgctcgaagccgccaaggccctgcttgctgcgcaggccgccgcgagcccgccgccacaggccgaagaagcctatgacgacgaagatggcttcgacatcgagactgaatccgaggtcgaaaccgacgagaccgagggtcttgccgacgagcaggcggccggcgagtccgcctccgagcaggacggccagcgccgcaagcgccgtcgccgccggcgcggccgcggtggccagcgcgagggcgagttgcgcgaggatacggccccgacgctgcccgagcctgcgatgatcgccggcgaagccgaggacgagaccgaggccgagcaggacggcgaggagggcgaggaacaggccgcccgcggcgagcagcagggcagcgatcgcaggcgccggcgcggtcgccgcggcggacgtcgccgtcgcggtggcggcgaggaaggccttgccggctccatcaacgacgaactcggcaccggccagccttcggaagctgccgacgcggtcgccgattttgacggcttctccagggaagctgcgccctctatcgcgcaggtcgagcacgcccaagccgagcacggtcaagccgagcacatcgcggagcaaaccgctgagccgcaaatcgcgcagcctgagccgcacctcgaggcgcagatcgaggtggccgcgaagccggagccggagccggctcctgctgccgcgacggcagaagagccggccgacgacaaggccacgcgccgacgttcgacggtccgggaaaaggtgagcttcctgtcgaacggccggagcgagccgacagcgccggttgcgcaggcagccgagcaggtcgctccgcccgcaccggcggccgaacccgcgccgcaagccgcaagcgaaacccccgcggccccgcgccgcgccggctggtggtcgcgccgcttcggcggtggcggcgaatag

SEQ ID NO: 5595 - DNA, 1296 bp, BradyrhizobiumColbertium
gtggcgagccgcacaaatcgacggattttgctgggaggcgtgttgctgtgcatcgcggcattgccgtgtgctgattcctcgcgcctcgttgctgcggaaagccagcagcaacccgctcacgcagcagcgaattttccggtcgcgtcggccgcccggctggccggcgacggcaagcacacgcgcttcatcctcgacatcgaccaggccgtcaccttccgcgcggtcacgctggccgacccctaccgggtggtggtggatgtgccgcaagtcaattttcggctgccagccggtaccggcagcggaggacgggggctcgtcaaggccttccgctacgggctcgtgatgccaggcggctcgcgaatcgtgttcgacctgaccgggcccgcgaagatcgccaattcttacgtcgtggaggccgccaacggccaaccggctcggctcgtgctcgagctggaggaggttgatcgcaccgcctttgcctcctcgtcgcagccagaaagccgtcctgaactgcggcccgcaatcgcggaatcgccgcctgccgccgctcccagcgcgccgacgccggatgctccgcaacagaaggccgacggccgtccagtggtggtgatcgatcccggccacggcggcatcgacaacgggacacagtcgagcggcgagagcgagaagaacctggtgctggctttcgggctggcgctgcgcgacaagctggagaaggccggaaaataccgcgtggtcatgacgcgggacgacgacaccttcattccgctcggtgaccggaccaagattgcccgcaatctgaaggcggccctgttcgtctcgatccacgccgatgcgctgccgcggacggagggcgacgcgcaaggcgcgacgatctatacgctctccgacaaggcatccgacgccgaggcccagcggctggcggatgcggagaatcgggccgatgcgatcgccggcttcaacctcgcggaagagccgaccgacgtcgccgacatcctgatcgacctcacgcagcgggaaacccgcactttttcaaaccgtttcgcccgccttttgatgactgaaatgaagcagacggtgcggatgcacaagcatcccttgaagtccgcaggcttccgggttctcaaggcgcccgatgtaccctcggtcctggtcgagatcggctatgtctccaacaagggggacctggaacacttggtctccgagggatggcgatcccgcgccgtgggctcgatggcccaggcgatcgacgggttcctgaccaagcggatggccacggccggcacctcgaactga

SEQ ID NO: 5596 - DNA, 2505 bp, BradyrhizobiumColbertium
atgcgcttgctggtgcggttcatgggcttcctgttcgccgcgggaacggtggtgttccttgtcggtgtcggggccgtggcaggcctgatctggcatttctccaaggacttgccggactactctcagcttcaggattacgagccgccggtgatgacccgcgtgcacgcggtcgatggctcgctggtcggcgaatacgccaaggagcggcggctgtacctgccgatccaggccgtgcccaagctcgtgatcaacgcgttcctcgcggccgaggacaagaatttctacgagcatggcggcatcgactacaccggcatggcgcgcgccggtctggtttacattcagaactacggctccaaccgccgtccgcagggtgcctccacgatcacccagcaggtcgccaagaacttcctgctcaccaacgaggtctccttcacccgcaagatcaaggaagccttgctggcgatgcgcatcgagaagacctactcgaaggacaagatcctcgagctgtatctgaacgagatctatctcggtctcggcgcttacggcatcgcggccgcctcgctggtctatttcgacaagtcggtgaacgagctgacggtggcggaagcgtcctacctggccgcgctgccgaagatgccggccaccctgcatcccgtgcgcaaccgcgaccgcgccatcgagcgccgcaattacgtcgtcgaccgtctgcttgaaaacggctggatcaagcaggccgacgcggacaaggcgcgcaaggagccgctggcggtcaccagccgctccaacggcgcccacaccttcgccggcgaatatttcgccgaggaagtccgccgcgacatcttcgagcgctacggcgagaagaagctgtacgagggcggtctgtcggttcgcaccacgctcgatccgaagatccaggtcatggcgcgcaagaccatggtggccggcctcgtgagctatgacgagcagcagggctatcgcggcgccatcagcaagctcgatatttcgggcgactggggcgtgaggctcgctgagatcaaatcgctctccgacatctcgccatggcgcatggcggtggtcctggagaccagcgagcagtcggcgcggatcggcttccagcctggccgcgagctcggcggcgccgtcagcaagcagcgcgagaccggaatcgtcacggtcgacggcgtacgctgggcacggcccctgcaaggcggcaccaggggcaagactccaacagcggtgtcgcaggtgctccagcccggcgacgtgatctatgccgatccgctctacaaggacggccaccccgtcgagggccagtaccggctccgccaaatcccggaagtctccggtgccatggtggcgatggatccctggaccggccgcgtgctcgcgatggtcggcggcttctccttcgatcagagccagttcaatcgcgccacgcaggcctatcggcagccgggctcgtcgttcaagccgatcgtctattcggccgccctcgacaacggctatacgccctcgacggtcgtgctcgatgctcccatcgaaatcgaccagggtcagggcgccggcgtgtggcggcccgaaaatttctcctcaggcaagttccagggtcccgtgacgctgcgcaacgcgctgcggcagtcgctcaacacggtgacggtgcgcctcgcgcaggacatcggcatgccgctgatcggcgaatacgcccgccgcttcggcgtctacgacgaactgccgaactatctctcctacgcgctcggtgccggcgagaccaccgcgatgcgcatggtcacggcatactcaatgctcgccaatggcggccgccgcgtgaagccgaccctgatcgaccgcatccaggaccgctacggccacaccatcttcaagcacgaccagcgcgaatgccgcggctgcgacgcgccgggcggttggaagaaccagcccgagccgcagttgatcgaccgccgtgagcaggtgctggatcccatgacggcctatcagatcaccgagctgatggaaggcgtggtgcaggctggaacggccaccgtgatcaaggatgttggcaagccggtcgcgggcaaaaccggcaccaccaacgaggcgaaggatgcctggttcgtcggcttctcgccggacatcgcggtcgcagtctacatgggctttgataagccgcgccctctcggcaggggcaatgcggcgaccggcggccatctcgctgcgccgatcgtgcgtgacttcctcaagctcgcgcttgccgacaagcctgcggtcccgttcaaggtgccggctggcatcaagctggtccgcgtcgtcgccaagaccggcatgcgcgccggccccggcgagaccggcggaaccatcctcgaagccttcaagcccggcacggcgccgccggacaattattcggtcatcggcgttgccgacgccgacggacgcggcatgccgctctcgcagcagcagcagccggattccggcttcctcattcggccgggcaccggcgggctgtggtag

SEQ ID NO: 5597 - DNA, 117 bp, BradyrhizobiumColbertium
atgcctcctcagcagcccgaccgactgcttgatctcttctaccaaccgttcgatttcggcgcgcatgttgttctctgtcttgcggaatcccgcgtgcagttcgagagggggatgtag

SEQ ID NO: 5598 - DNA, 969 bp, BradyrhizobiumColbertium
atgcaggagcgcacctcgcttgaggatgcgctgtccggcatcggcaaggtcgagcaggagctcgaagacgatatcggcatgatcgagctcggcgaggccgagggcgatgagggcgtcgtcgccgaagccgaagctgcgctgaagaacctcaagaaggaggtcgcgcggcgcgagctcgaggcgctgctgtcgggcgaggccgatcgcttcgattcatatctcgagatccatgccggcgccggcggcaccgagagtcaggattgggcgcagatgctgctgcgcatgtacacgcgctgggcggaaaatcacggtttcaaggtcgaattcctcgaagagtccgagggcgaagaggccggcatcaaatcggcgacgatccaggtctccggccacaatgcctatggctggctgaagacggaagccggcgtccatcgtctggttcgaatctctccgttcgattccaacgcgcggcggcacacctcgttctcgagcgtgcaggtgttccccgtcatcgacgacagcatcaagatcgacatcaaggaatccgacgtgcgcgtcgacaccatgcgctcgggcggcgccggcggccagcacgtcaacaagaccgaatccgcggtgcggctgacgcatatcccgacgggcgtcgccgtggtctgccaggccggccgttcccagcacaagaaccgggcccaggcctgggacatgctgcgcgcgcgcctctacgagatcgagctgaagaagcgcgaggagaaggccgccgccgaccaggctgccaagaccgacatcggctggggccaccagatccgctcctatgtgctgcaaccgtaccagatggtgaaggatctgcgcacgggcgtgcagacctccgacaccgcgggcgtgctcggcggcgatctcgatgagttcatggcggcgacgctggcgcagcgcgcgttcggcaccacgaccggcgagatcgaggacgtggactag

SEQ ID NO: 5599 - DNA, 840 bp, BradyrhizobiumColbertium
atgggtcacggcatggccggccgctatctcgatgccggcttcacggtgacgctgtggaatcgcagcaagtccaaggcggaagacctgatcgcgcgcggggcgcactgggcgacctcgccggaggatgccgcgatcgatgccgacgcggtcgtgaccatggtcgccgacgacgaggcctcgcgtgcggtctggctcgggccgaaaggcgccgccaagaccgcgaaggccggcaccatcgcgatcgaatgctccaccgtctcctacgaccacgcgcgagagatgggccgcgagctgaacgcgcgcgggctcatctacatcgactgccctgtgaccggattgccggatgcagccgcggccgggaagttgactctcctggccggcgccgacgcagccgatctcgaacgtgcgcggccctatctcgaaccgatcggctcgaccatccgccatttcggcccggtcggtgccggcacggtctacaagctcatcaacaatctgatgggcgctatccagatcgccggactcgccgaaggcatcgcaatcgccgagcaggccggtctcgacatgaacctcgtgctggaatcgatccaggctggcgttgccgcaagcccccaggtgcagcgtcactccaaacgcatggtcgcccgcgatttctccggcgcgaccttcacggcagcgctgcggcacaaggatgccgcctacgctgtgaagctagcggagagcctgctcgccgataagccgatcgttgcacgagcggcggtcgaggcctatgcgaaagcgaaggcggcgatgcctgacgacgatgaggggcggatgatcgagctggtgtcgcggcggaagtag

SEQ ID NO: 5600 - DNA, 789 bp, BradyrhizobiumColbertium
gtgctcatcaacttcacgctcgcgccactcgaaaagatcatcccctggggccagccggggagctattgccttcattggtttggtctcactttcggcgagtattggatacaagccggtgaagccacactcttcgaatacagcgaccatgcccgggctgccggtgcagagcgctattgcacctatcaagtcgtccgcctctacgaggacttgatggacatgcttccctacatactcgagccggttcctgatgcgctcgtgccgtacatctccggcgacggggccggaattctgcgaagcgcccacgaggcctggtgcgagagagccgatgacgtccccgatgaggatggcctttttgactttgccgacgttgcaatcatgtgggttggaaagcgtcgtctggacagttcgtacctggctccatcggccaacatcgcaatctggtccgatgaagagcatgtgcacatcgagtgggataatcgcgatcgccaactcggtggatcgccggcgtggtcggcgagcctcggctcctatcgcgtgtcgcgaggcgaattcatcgaagagatgaactcgtttcacgttcgcctcatggagcagatggcggcccggatcgagcaggtggcatcaggccaacttcgatccgagatacagatcgacctggcagcactggcgagagagcacgaacaacggacgtgctcgctcgacgctgccttgaagatcgttccggcgacggactggcaacaggtcgaaagagctgtcggtgaaatcctcgttgcgcgaaacgggctgtag

SEQ ID NO: 5601 - DNA, 912 bp, BradyrhizobiumColbertium
atgaccatcaatgccaacaggatcgatggtcgggactggtcgctgcttgcggcgctctccattctctggggcggttcgttcttcttcaacggcgcggctctgcgcgaattgccgccgctgacgctcgtgttgctgcgtgtcgcgttcggagcggccattcttgcgccattgctccgcatgcaggggatcggctttcccaagagcatggcggagtggacgccgttcgtcgcgatcgggctgctcaacaatgtcatcccgttctcgttgatcgtgatcggccagacgttcattccgagcgggctggcgtcgatcctgaacgcgaccacgccgatgttcaccgtcatcgtcatggcgatggcaggcgaagagacgttgcagatgcggcggattgccggcgtcgcattggggatcgtcggcgtggtcatcctgcgcggatggggtattgaggcaaggcctgggcaggggctcggcatcctgctctgcctcggcggcgccttcagctacggtcttgcagcgctcgccgcgcgccggttgctgaaaaactcagccccgctcggaacggcgacatttcaactgatggcttcaaccgtgatgatggcggtggtcgccggcactgtggagcggccctggcaactgccgatgccggcccttgcgacctggcttgccgtgcttggcctcgccacgctctcgaccgcgcttgcctatatcgtcttctttcagatcgtgcggcgctcgggcgcgagcaacgtgatgctggtgacgctgctcattcccgtcaccgccatccttctgggatggctggtgctgggggagccgatttccatgcgtgcgatcgtgggcgcgatcgtcatcggcagcgcgctgctcgtgatcgacggacgtgcggttggcctgctgcgccgcggcgcatga

SEQ ID NO: 5602 - DNA, 1356 bp, BradyrhizobiumColbertium
atgtcgaaaagttctgcccaatactcgcagtacccccaacatcaccctcacgatcacggacgagccttccagcgccgcccggctgctgcggcggcggcaactgcgattcccctgcccgccaccgacgatgcctacaccatcgtccatgccggcaagcaggtccgctttgggcccgtcgtattctggatcgtcgttggcaccgtggtgctgctggggctgtggtcggcggcgacggccacctattttgccttccgcgacgacgttctgacccggctgatcgcccgccaggccgagatgcaatacgcttatgaagatcgaatcgccgagctgcgcgccagggtcgaccgcaccaccagccgccagctgcttgaccaggagcagttcgaccagaagctagaccagatcatgaagcgccagacggcgctggagtcccgggccacggcgctcggggccatgcccgacgtgactggctcgattccccgctcggccccacagcgcggcgacgcaacccataccacaccgaagccatcgccgatcagcgacaccgtcatcttcgtggcgccgccggaccgggaagcgcgcctcgaatcgcgcgcgccgaccgtggtggcagcgccgagcagtcaatttgcccggaatcaaagcttcgagaacgtgctggtccggctcacgaactcgcttgaccaggtcgagcggcgccagatggcggcgctcagcgccgtcgaggaaagcatggactcacgcatgcggcggatgcgcggcgtggtcagcgatctcggcttgaaccttgcccatctcgaagccgccgtgccgcgcaccgcgatgggcgggccgttcgtgcccatcaagctgacggccaatgccggaccgttcgagaagcagctccatcgtatcaacaccacacgcgccgagatggatcgtctcaatcgcacgctggcgttggtcccctaccgcaagcccgtcatcggcgaggtagagttcacctccggtttcggcgtgcgcagcgatcccttcctgggccggcccgcgatgcacaccggcctcgatttccgcgctgccaccggtgacccggtccgcgccacggcctttggaaaggtgatttccgccggctggtccggcggctacggccgcatggtcgaggtcgatcacggcaatgggctttccacccgctacggccatctctccgagatcaacgtcaaggtcggcgagatagtgaagatcggccaggtcatcgggctcgtcggctcgaccggccgttcgaccggtccccacctgcactatgagacccgcatcgaaggcgaagcggtggatccgcaaaaattcttgcgcgctggcgtccggctcagcgcgggttga

SEQ ID NO: 5603 - DNA, 690 bp, BradyrhizobiumColbertium
atgtccaagaaatcccgcaagaaatcgtccaaaacgtcctccggcagcccgaccgccaaaaagaagaccgcaaaaacgcaggcatcgactcaaacaaggtccgcgaaaacacagcggacgccggcaagcaaatcaaccgggaccatagcaaaagcaggatcacataaggccgcatcgaaacagttaaatacgtccaaatcgtctcccccacccgctcgggcgaagtccggcctggccgaaggccaaaaggcccccggcttcagcctgccgcgcgacggcggcgacaccgtcacactggcggactatgccggccgcaaactggtcctgttcttctacccccgtgccgatacgcctggctgtacccgcgaggcgatcgacttcactcgcctcgccgaagccttctctgccgctggcactgccgtgctcggcatctccgccgacccgttgaaggcccaggagaaatttcgcgacaagcacaagctcgccatcccgctcatctcggatgagaaacatgaggtgctcgaggcctatggcgcctggggcgaaaagtccatgtatggcaagagcttcctgggagttcttcggacaacgatcctgatcggggccgacggtaaggtggcacgaatctggcgcaatatccgggtcgatggtcatgccgacgacgtgctggaggcggcaagaagcctttaa

SEQ ID NO: 5604 - DNA, 3810 bp, BradyrhizobiumColbertium
atggcggcagtgccggcgcagggggcttcgcgtcctgtggacggctgcggtcccggcggcgctcacccctacgacgggcgcttgtatcaagaggcaatggcaaggaatacgtcgccccaggactacaaccggaattttgatcggcgcagcggccaatacgagccgcaggaatgggacgatgccgagtgggatccggatcaggaagcggcggcgggccatcgcgcacgccggctgctggcgcgttccggttcgggtttccatcgtttcggagacggattcggttcattgcgccgttggatgggtggaggccgctggctgaagcgtctggccgttgtcgtcggcgccgtgctcgtcattttcgtcggctgtttcggtgcgctgtggtggcggctcggcgccggtccgatcaatctggatatcgcaacgccatggctggcggccgcgatcgaagacaatatcggtcacggcaacacggtcgaggtcggcggtacccagatcgagcgcgccggccgggttcgcatcgccgtacgcatccgggacatcatcgttcgcgatcgcgatcaggccgtggttgccagcgcgccgaaggccgaggtgaagctgtcgggtgcgggtctgctgatggggcggctgcgcgccgaaagcctcaatctcgtcgatgccgagctcgcgatccgcatcgcgcctgatggcactgtcaccgtgtccgccggcgacaccaccaagccgcttgcgaccggcgtcgcgtccaagaaggacgcgggcctgccgccgacattcccccgcaacggggttcccccgccgccgttcgctgctcagccaacgagtcccgaagcgccgcaggcctcaccgcaggcggcggggcagagcggcatcctccaaagcctcgactggctcgacagtctgagcatgacgggactcgacggccagaacctcaacgagatcggcctgaagaacggcaatctgatcgtcgacgaccagcagcgcggcagcaaatggtcgttcgagaacatcaccctcagcctgcgccggccgagccgcggcggtatcgcgctcagcctcggcgaggagggcgcgcgcccgtggatgctgcgcgccacgatcggccctgccgagaacggcgtgcggtccgtcgacatcaaggccgacaaggtctcgacctccaacatcctcctggcgctgcgggtgaaggacctcacctacacggcggatatgccgctgacgggcgagctcaagggcgagctcggccgcgacggcgtgccgaccttcttccgcggcaagatcgcggtgggtgccggcaacatcatcgacaccgatacgcccgactatccgatggggatcgactcggccgagatcaacgtcgagtgggacgccaaccggcgcgtgctggtcgcacccttcaaaatcctctccggcgcgaaccgcctgacattgctggcccatctcgagccgcccaacggcaccaggaatgactggcagctcggattcagcggcggttcgatcctgcttggcggcatcgataacgagccgccgctcgtcttcaaccgcattgcgatcggctttcgcttcgacaccgatcacaagcgcctcctgctgacacaggcggatgtctccaacggcgagatcggcgttgccggcactggcgccatcgattattccggcgagccccggctcactctcggctttgcgggaacgccgatgtcggcttccgccttgaagcggatgtggccgacgctgatcgtccccgaactgcgcgaatgggtgatcgagcggatcgagcgcggaacgctccagcgcatcgagatcggcgtcaactcgccgacgaagaacctgccgcgcaagggaccgccgatcccggacgacggcctgtccgtcaacatcgtggcgagcggcgtcgcagttcgccccgtggatggcatgccggtggtgcgcgatgccgatctgagggcgcgcgtgaccgggcgcaccgcgaccgtgaacatcgggcagggcgttgccgatacgccctcgggccgcaaggttacgatctcagacttcgtgttcgaggtgccggacatggcgcccaagccgtcgccgtcgcgaagccggttccgcgtcgatggcccggtgcctgccgccgctgaaatgctcgccaatgaccggctgagcgatctctccgcgacggtcatcgatcccaacaccagcaaggggacgttcaccgcgaacatccagctcggcatgccggtcaagggcgagctgaccaaggccgacaccacctattccgtcaccgccgacctcaacggcttcgccgccgagaagctggtgatgaaccagaagctggaggcgaacagcctcaagatcatcgccaacaaccagggctaccaggtcaagggcgacgtcaagatcaacggtcaggcagcctcgctggactatcgcaagccggctgagggcgacgcggacgtgaggctgcaggcgacgctggacgatgccagccgcgcgcgcctcggcttcgatctcagccccgccgtcagcggatcgttgccgatcaggctgtcgggcaagatcgcgagcggcgcggatcagaccacgaagctcggcgtcgaggccgacctgacgtcggtgcggctcgacaacatcctgcccggctgggtcaagctgccgggcaagtccgcgaaggccagcttcaaggtggtgccgacggcgcaatcgacgcgtttcgaggacatcctgatcgagggcggcggtgcctcgatcaagggctcactcgaggtcgacgcgaacggcgatctcatgaacgcgaatttcccgatttacgcgccgacagacggtgacaaggcctcgctcagagttgagcgcagccaggagggcgtcatcaagggcacgatgcgtggcgacgtgttcgacggccgcggtttcctgaagtcggcgatctccggccattccaaggaggacaagagcaagctgaagaacgtcgatttcgatatcgacgtgaagctcggtgccgtggccgggttcaacggcgaggccatgcgcagcgtcgatgccaagatgtcgaagcgcaacggcgccgtgaaagccttgacgctgagcggcaagatcggccgcgacacgccggtggcagccgatcttcgcggcggccgcgcgcagggcagtcgcgaagtgatctatctccagaccaacgatgccggcgcgctgctgcgcttcaccgacacctacaccaaggcggtcggcggccagatggtggtggcgatggagccgccgacatccgagccgaacaccgcccgcgaggggctcatcaacgtgcgcgacttcacggtgaagggcgaggcgcagctcgagcgcgtggccgccggcgcgcccaacggcaccggcaacggagtctcattcaacgcgctccgtgccgagttcacccggcagaacggcgcgctgacgatccgagacggcgtggtcaaggggccgatgatcggtgccaccatcgagggctcgatcgactatcccggcaaccaggtgtgcatgagcggcaccttcgtgccgatgtatggcgtcaacaacatcttcggccagatccccctgttcggcatcttcctcggcggcggcaacaacgaggggctgatcggcgtgacctacgaggtcgtcggtacaccggccgcgcccgtgatgcgcgtcaatccgatctcggcgatggcgcccggcctgttccgcaagatattcgaattcaacaccggcaagcagaactcgccgttcgatgaattcccgtcgcagtcgaacgacggctcgacggcatcgacccgtcagctgtcgagcggctgcagcgtctcgcggcggcagtag

SEQ ID NO: 5605 - DNA, 1695 bp, BradyrhizobiumColbertium
atgaatctgctgagtcacctgaagatccgcaccaagcttgccagcatggtctgccttgcggcgctcacagtcacggccatcatcggcgtatcgtcggtgctcagcaagagccgcatgatggaggaccgcgtcgagcagatgcggaccgcggtagagctgctctacaactatgcacagtcgctccaggacgaggtcacagcaggcaagctgacgccggccgaggccaagagcatgttccaccagcgcggtcgccgcatgagcttcaacggcggccaaggctacccggtggtctataatgaggacacctccctggtcgtcaacggcgccaatcagcagctcgaaggcaagatcaccggcgccaaggattccaatggcgtgctgatcgccgacgccattatcaaggcgggcagcgagaccgcgcagggcggcgtgacctcctatctctacccgcgccccggccagaccgagccggtccgcaagaccgtgttcgcgcgcaaattcgcaccatggaacgtgaccatcagctacggcgtctacgtcgatgatatcgacgccgacgtgcgcggcttgacgctggagctggccgcgatcggcggcggcctgatgttgttgatggcggcgctgtcctggctgattgctcgcgacgtgctcggcgcgctcgatcgccagaagaatcgcatgcaggagatttccgaaggagccatcgacaagccggtcgaggagaccgaccgcggcgacgagatcggccgcatggccgagaccctcgaagtgctccggcagaccgcgctgaccgcgcgcacgctggaagccgagcaggtcgccatcaaggcccgcaccgagcaggagaagcgcgacgccctgatcgccctcgccgatcgcttcgacgcctccgtcggccagctcgtgggcctgatggcctccggttccggcgagctcgagaacaccgccaagtcgatgtcctcgactgccgagggcaccaaccgccgcgccgccgtggtcggctccgccgccaccgaggccagccagcgcgtccagacggtggcagctgccgccgaggagctctcctcctccatcaccgagatcagccgtcaggtcgcgcagtccgcggaggtcaccggccgcgccgtggacagcgctcgccgcaccgacaccatcgtccgcgcgctgtcggacggtgcgcagcagatcgagcatgtggccgagctgatctccagcatcgcggcccagaccaacctgctcgcgctcaacgccaccatcgaagccgcgcgtgccggtgaagccggccgcggctttgccgtcgtcgcttccgaggtgaagtcgctggcgagccagaccgcggaagccacccgcgagatcggcgacaagatcgcccagatccagggcgcaaccaaggaagctgtggacgcgatcggcggcatcaccgccaccatcgaggaggtcagccgcatcgccacctcgatcggcgccgccatcgaggagcaaggcgccgccaccgccgagatcgcgcgcagcgtctcgcagacggcggaggcgaccagggaggtcaccaccaatatcggcgtggtctccaccgccgcaaacgagaccggcaacgccgccggcatggtgctggcagcagcttcgagcctctcaaaacaggccgagcagctctccggcgaagtcggcacgttcctggccggcgtgcgcgcggcgtag

SEQ ID NO: 5606 - DNA, 210 bp, BradyrhizobiumColbertium
gtgactcagcagattcatcacagcccctacggaatggttgttattgctcgcatgggtagcatgaagttcttaccaatcatgaacgtaggcatggccggcctgccgcgcgggacggctgccgcaggcttatgcgcaaccgtgcaggcgaatctgctcttgccggcaggcggcggccgatccggagtcgaaaatcgacatggaccttggtag

SEQ ID NO: 5607 - DNA, 411 bp, BradyrhizobiumColbertium
atggactttccctatctcacccgctttcagccggttctcctgagcctgtttcgcttcatcaccggcctgttgctgtttcagtacggcgtcgccaagctgttcaagtttccggctgttccgatgttcgccaaagtcgagctgatgtcgctttacggcgcggccggggcgcttgaactggtgcttggcgcactactgatgatcggcctgttctcgcggctgtcggccttcatcctgtccggtgaaatggatttcgcttatttcatgggccatatgttcaggggcgaaaccccggtgttcctgccattgctgaacaacggcactctcgcgatactcttctgcttcgcgtgcctgtatctctcggcagctggcggcggcccgatcagcgccgacgccgcaatgggcaagaaataa

SEQ ID NO: 5608 - DNA, 120 bp, BradyrhizobiumColbertium
gtgaacacgttcgaaaaaccgcggcgcgtgcggatcaacgaccgctactgcgatgttttgtccgacatgacgaaaatgtcagggcgcattgatcccaagtggcttgcgagacgaaactga

SEQ ID NO: 5609 - DNA, 1272 bp, BradyrhizobiumColbertium
atggaccagaacgcgcccaaggaaacgacagcggaagcgagcaaggaacaggtcggaagcaccaggcaggacgcagtccgcatcgcgctcgtcgtgctctgcctgtgctttgcgctggctgttcttggtcgcgggctgagcgagagcttcacggtcttcctcaagccgatctcggaagatctcggctgggaccgtgcccaggccgtttcgatctattcactgacctggctcatcagcggactgaccgcccccctggttggccgcctgttcgatcattccggaccacgcatcgtctatgcgctcggcttgctcttgctcggttcggcctttctgagcgcgagccatgcgcaagcactctggcaattccagctttcgatcggcatctgcgtcggcatcggcgttgccttcatcggcaatgtgcccaactcgatcctgctcggccgctggttcgggccgcggctgccgaccgcgatggcggtggtctactcggcaatgggcggcggcgtgctggcactgctgccggcctcgcaactcctgatcgatcatctcggctggcgcgagacctaccaggtctacggtcttgccgcgctcgccctgctggtgccgctgctgctcctgccttggcgcctgttcgcggccggctcgccgcatgtggccaagaagagcgatccggacttcgtcgacaacggctggacgctcgtgagcgcgatgcgccaccacgccttctgggcgctgttctcgacgttcttcttcaccgcggtcggcatgtatgccatcgcggcgcagatcgtggcctatctgatcgacgccggcttcccgccgctccaggccgcgaccgcctggggcttctccggcgtcgtgctggtgttcgggatgctgggtgtttctgcgctcgacggcttgatcggacgccgcccgtcggtgctgctcagctacgcgatctcgatcctcggcatcgttctgctctggctcctgcagtactatccgaacgtcgtcctgctcaccggcttcgtggtctgcttcggcagcatgatgggctcccgcgggcccctgatcaccgcaactgcgatgaagatcttccgcggcaagcgcgtcggcaccatcttcgggacgatctcgatcggcagcggcctgggctcggcgttcggctcatggagcggcggcctgattcacgatgcgactcacggctacgatctcctgctcatcttcgcgcttgcgagcgtcgtgctcggcatgattccgttcctggtcgttcccgccttgcgggagtag

SEQ ID NO: 5610 - DNA, 1254 bp, BradyrhizobiumColbertium
atgactgcatttaaatcggatttcctcaataccctgcaggaacgtggattcatccaccagtgctccgatttcgaggggctggatgcgcttgccgccaagggtgaggccatcgcctatgtcggatacgattgcaccgcccgctccctgcatatcggcaactatctgaccatgatgatgctgcactggctgcagcaatccggcaacaagccgatcacgctgatgggcggcggcaccaccatggtgggcgatccctccggcaaggacgagacgcgcgccatgcgcaccattgccgagatcgaggccaacaaggcctcgatccgcggcgtgttcgccaaggtgctgcgctatggcgagggcaagagcgacgccatcatgctcgacaatgcggagtggctgaccaagctgaactggatcgagatgctgcgcgatgtcggccggcacttctccgtcaaccgcatgctgaccatggactccgtgcggctgcgtctcgagcgcgagcaggagatgagcttcatcgagttcaactacatggtctgccaggcctatgacttcgtcgaactcgccaggcgcaccggctgccgcctccagatgggcggatcggaccagtggggcaacatcatcatgggcgtcgatctcggccgtcgcatgggcacgcatcagctgttcgcgctgacgacgccgctgctgaccactgcgtccggcgccaagatgggcaagaccgcgcaaggcgcggtctggctcaatgccgaccagttctcgccctacgacttctggcagtactggcgcaacaccgaggatgccgatgtcggcaagttcctgaagctgttcacgacgcttccaatggccgagatcagaaagctcgaagcgctcggcggctccgagatcaacgaggccaagaaggtgctcgcgaccgaggcgaccgctctgctgcacggtcgcgaagctgcgaatgaagccgcggagaccgcgcgccgcaccttcgaggagggcgcgctcgccgagagcctgccgacggtggaaattccgcgcggcgagctcgacgccggtctcggcgtgctcaacgccttcgtcaaggcgggtctcgtcgcctccaacggcgaagcccggcggcagatcaagggcggcggcctgcgcgtcaacgatgcgcctgtcgccgacgagaagatggcgctgtcggcggacaatctgacgccggaaggcgtgatcaagctgtccttcggcaagaagaatcacgtcctcatcaagcctgcatag

SEQ ID NO: 5611 - DNA, 1101 bp, BradyrhizobiumColbertium
atgttgacggcactcggcttgatgagcggcacctcgctggacggggtggatgtcgcgctgatcgagaccgacggaaagcaggtgaaggcgttcgggccgtccggctaccggccatacagcccggccgagcgcaacgtgttgcgccaggcgctgagcgaggccgtgcatctgcagcagcgcgacgcccggccgggcattctggcgcaggccgagcaggccgtgacgggtgcccatgccgaggcggtggccgccttcctggcgcagaaccgcatgaggccggaggacatcgatatcgtgggcttccacggccagaccgtgctgcaccggcccgagaagcggctgaccgtccagatcggcgatgcgccgttactggccagggcaatccatatcccggtgatgcatgatttccgtgccgccgacgtcgaggcgggcgggcagggcgcgccgctcgtgcccgtctaccaccgcgcgctggctcattcgctgggaagcgaaggaccgatcgtcgtggtcaacgtcggcggcgtctccaacatcacttatatcgacggcaacgatgcattgattgcctgcgataccggccccggcaacgcgctgctcgacgacttcatgtaccgcaccatgaatcaggcgttcgatgcggaaggcaagttcgcggcgctcggcaaggtggatgaggcctggatcgcacgggcgctggaactgcccttcttcgcggcggccccacccaaatcgctcgatcgcaacgatttcgctgcactcaagctcggcgccatcgagccggccgacggcgccgcgacgctcaccgccttcactgcggctgcgatcgcccgcgtcattccgcttttgccccggcggccgcggagctggatcgtctgcggcggcggcgcccgcaacctcaccatgctgcgtatgctgcgggagcaggtgggctcggcaagggtggaggcggccgagacgctcggctgggcctccgacgccatcgaagcgcaggctttcggcttcctcgcggtccgcggcatgaaaggcctgccgctatcttatcccactaccacgggtgtgccgatgccggtgaccggcggggtgatcgcgcgtccctga

SEQ ID NO: 5612 - DNA, 678 bp, BradyrhizobiumColbertium
atgaccgtttcgttgaaactgatcagccacaagctttgcccctacgtgcagcgcgcggtgatcgcgctgaaggagaagggcgtgccgttcgagcggatcgacatcgatctggctgacaagcccgactggtttctgaaactgtcgccgctcggcaaggtgccggtgctggtggtgaccaccggggagggcgaggtcgcgctgttcgagagcaacgtgatctgcgagtacctcgaggagacgcaagccggtgcgaagctgcatccggcggatgcgctgaagcgtgccgagcaccgcgcctggatggagttcggctcggcgatcctcggcgacctctgggggctggaaaccacgagcgatccggcgacattcgaaggcaagcgccaggcgctggttgcgaaattcaggcgtgtcgaagccgcgctcggcgccggtccgtatttcgcgggccgcgcattcagtctggtcgacgcggtattcgcgcccgtcttccgctatttcgatctgttcgacgaactaaccgagcacggcatcttccaggacgcgccgaaggtcagggcgtggcggaccacgcttgcgcagcgtccgagcgtacgcagcgctgtcgacgccgactatccgcaattgctgcgcgccttcctcgtacggcacgacgcgcatcttttgaagcttgcggcctga

SEQ ID NO: 5613 - DNA, 648 bp, BradyrhizobiumColbertium
atgcccgaagtcattttcaccggccctgctggccgcctcgaaggccgctaccatccggccaagcagaagaatgcgccgatcgcgatgatcctgcatccgcatccgcagttccacggcacgatgaaccaccagatcgtgtaccagtgctactacgcgttcgcgcatcgcggcttctccgtgctgcgcttcaatttccgcggtgtcggccgcagccagggttcgttcgaccacggcaccggcgagttgtcggatgccgccgccgcgctcgactgggcccagacgatcaatcccgaagcgcgcgcctgctgggttgccggcttctccttcggcgcctggatcggcatgcagctcctgatgcgccgccccgaggtcgagggcttcatctcgatcgcgccgccggccaacctttacgacttctcgttcctcgcgccctgcccgtcgtcgggcctgatcgtgcatggcgagaaggatgcggtggtgccgcccaaggacgtcaacacgctggtcgagaaactgaagacgcagaagggcatcgtcatcgaccagcagatcatccccggcgccaaccacttcttcgacgccaagctcgagccgctgatggaaaccatcacggcgtatctcgacatgcgcctggcgaacgtgcgctga

SEQ ID NO: 5614 - DNA, 1140 bp, BradyrhizobiumColbertium
atgcttgcccgggtctatctcgattggaacgcgaccacgccgctccgttcggaagcgcgggctgctattctggctgcatacgacctgatcggtaatccatcctcggtccatgccgagggccgggaggcacgacgactggtcgaggaggcgcgctccgcgctggcgggcgcggtcggcgctcagccgcgcaacgtcgttttcacctccgccggcaccgagtccaatgcgcttgcgctctcgccgggcctgcgggggcggtctggcggacctgtcgagcggctgctggtctctgcggtcgagcatgcttcggtgctggccggcggccggttccctggcgacaagatcggcctcatcccggtcacgcgctccggcgtggtggacctcgatcgcctgaagatccagctgcaggatggcccgccagccctggtctccatcatggccgccaacaacgagaccggcgccctccagcccgtcgctgaggcggtaagcatcgtccacgcggccggcggcctcctgcacgtcgatgcgatccaggcgctggggaaaatcccattcgatatcaatacggtaggcgccgaccttgccaccttttctgcgcacaagatcggcggccccaagggtgtcggggccctggtgatggctgaaggcataggcggcctcgagccggtcctgcgaggcggcggacaagagctcaaccgccgcgccgggaccgagaatgtcgcgggcatcgccggcttcggggcggcggtaaaggctgcccttcaggctctggcgaaggatgtggagcgaatggcaagcctcagagatcttttggaaaatggccttcgcggcatcgccggggcgacggtctttgcggacgatgtggcgcggttgccaaacacggtgctcttcaccgcgccgggcctgaaggccgaaaccgccgtcatcggcttcgacctggagggcatagcggtctcctccggctccgcctgttcctcagggagggtccagccatcccacgtcttgtcggccatgggctatgatcccgctgtggcccagggagcggtgcgtctcagtcttggctggtccacccaaccggaggacatcaatagggcgttagaggcttggcgaaagctgggtaataccctacttaagggctaa

SEQ ID NO: 5615 - DNA, 132 bp, BradyrhizobiumColbertium
ttgtacggctggcattccatcctccgctcgcggtttcaaggaccgcggtggatcaaactcggacgagtattacgatatttcactgcggaaagcacgggcttagaaccgttcaagccgtgtttcgtcgcttag

SEQ ID NO: 5616 - DNA, 1497 bp, BradyrhizobiumColbertium
atgccagccgtacaagagacggtcgagcgcgtgaagcgcatcgacgtcgaccattatcgttatgggtttgagaccctgatcgagtccgacaaggcccccaagggactgtcggaggagaccgtcaagtttatctccgagaagaagaacgaacccgcctggatgctccagtggcggcttgaggcctatcggcgctggctgaccatgcaggagccgacctgggcgcgcgtcgactatccaaagatcgatttccaggatctctattattacgcggcgccgaagccgaagaagacggtctcctcgctggacgagatcgatccggagatcctgaagacctacgagaagctcggcatcccgttgcgggaagtggccatgctcgaaggcgtcgagcccaagccgggcgaggaggacccggcccgccgcaagatcgcggtcgatgctgtcttcgactcggtctcggttgcgaccaccttcaaggccgagctgaagaaggctggcgtgatcttcatgccgatctcggaagcgatccgcgagcatcccgaactggtgcagaaatatctgggctcggtggtgccgacctccgacaacttctacgccacgctgaactcggcggtcttttccgacggctcgttcgtctacgtgccgccgggcgtgcgctgcccgatggaactgtcgacctatttccgcatcaacgagcgcaacaccggccagttcgagcgcacgctgatcattgccgacaagggctcctacgtctcctatctcgaaggttgcaccgcgccgcagcgtgacgagaaccagttgcatgccgccgtggtcgagctcgtggcgctcgacgatgccgagatcaagtactcgaccgtgcagaactggtatcccggcaattcggaaggcaagggcggcatctataatttcgtcaccaagcgtggcgactgccgcggcgccaactccaagatctcctggacccaggtcgagaccggctccgccatcacctggaagtatccgagctgcatcctgcgcggcgacaattcgcgcggcgagttctactcgatcgcgatctcgaacggcttccagcaggtcgatagcggcaccaagatgatccatctcggcaagaacacgtcgagccggatcatctccaagggcatcgccgccggcaggtcgcagaacacctatcgcggcctggtcaccgcgcaccgcaaggcgaccggggcgcgcaacttcaccgcctgcgattcgctgctgatcggcgacaaatgcggcgcgcacaccgtgccctacatcgaggccaagaactcgtcggcgacgttcgagcacgaggcgacgacctcgaagatctccgaggacgtgctgttctactgcatccagcgcgggctcagccaggaagaggcggtcggcctcgtcgtcaacggcttcgtcaaggacgtgctgcagcagctgccgatggagttcgcggtggaagcgcagaagctgatctcgatctcgctcgaagggtcggtcggctag

SEQ ID NO: 5617 - DNA, 750 bp, BradyrhizobiumColbertium
atggctttgcttgaagtgaaagacctcaaggttcgtgtcgaggagcgtgagatcctccacgggttgacgctgaccgtgaacgagggcgaggtgcacgcgatcatggggccgaacggctccggcaagtcgacgctctcgcacgtcatcgccggcaagcccggctatgaagtcaccgacggccaaatccttttcaaaggcgaggacctcctggagatggagccggacgagcgcgccgcgaagggcgtgttcctggcgttccagtatccggtcgagattcccggcgtcgccaccatgaacttcctgcgcaccgcgctcaacgcgcagcgcaaggcgcgtggcgagagcgaatattcgacgcccgacttcctgaagaaggtccgggaagtctcgaaatcgttgaacatcccgcaggacatgctcaagcgcggcgtcaatgtcggcttctccggcggcgagaagaagcgcaacgaggtgctgcagatggcgctgttcgagccgagcctgtgcatcctcgacgagatggattcgggcctcgacatcgatgcgctgcgcattgcggccgacggcgtcaacgcgctgcgttcgcccaagcgttcgatggtcgtcatcacccactatcagcggcttctgaactacatcgtgcccgacgtcgtgcatgtgatgtcgagggggcgcgtggtgaagagcggcggcaaggaattggcgctggagctggaagcgtccggctacgcgcaattcgaggccgcgtaa

SEQ ID NO: 5618 - DNA, 1305 bp, BradyrhizobiumColbertium
atgaacgttgctgtggcaaagaccggaggtggccgcgcggtgagcgatctgttcgccagcgccgaaggccggctgccgggttcgcccgaagtgatcgcggcgcggcgcgaggcattcgagagctatgagcgtctcggcctgccgcatcgccggatcgaggaatggaagtataccgatctgcgcgcgctggtcggcgaggttctgcccctggcagcgatccccgatgcgggcgcgctgaagcgcgccgcggaggcggtgaaggcgcatgcgatcgagggcgcccgcaaggtggtgctggtcgacggcgtgttcgcggccgatctgtccgacgtgagggcactcgcccccgaggcaggcttcaagaccctgcgtgagacgctggagaaggatgccggcctgctgaagaccgcgagcaccgatgcggtgatcgcgctgaacgccgcgatggcgaccgacggggtcgtgctctcgatcgctgacggcgcgcaattgtccgcgccgatccagatcatccacatcgcgactgccgcgtcggcatcggccttcacccgctcgcgggtcgcgatcgggaagggcgctcgcgccaccatcgtcgagacttttgtggcggcggaagcgaaggcctaccaggtcaatgacgccgtcatcgtctcggtcggcgacaacgccgacgtcgcgcatatccggctgatggacgatgcgcccgatgcggtgaacatcacgtcgcagttcatcacggtcggggccaacaccaagctgaacctcttcagcatgaccagcggcgccgcggtcagccgtttgcagggattcatcacgctggcgggcgagggcagcgagctctcggtgaatggcgtgaacctcctgaaaaagaccgagcacggcgacaccacgctggtggtcgaccatgccgtgccgaactgcgtcagccgcgagaccttccgcgccgtgatcgacgatcgcgcccattcggtattccagggccgcatcatcgtccgtcccgacgcgcagaagaccgacggcaagatgatgacccgcgcgctgctgctctccgacgaagccgaggcggacaacaagccggagctcgagatcttcgccgacgacgtctcctgcggccacggcgccaccgccggcgcgctggacgacagtctcctgttctatctgaaggcccgcggcctgccggagaagcaggcccaggcgctgttgatccaggccttcgtcggcgaggcgatcgagcagatcgccgacgatggcttgcgcgagcatgtgatcggcatggccgagcgctggctggagcggcgctcatga

SEQ ID NO: 5619 - DNA, 1248 bp, BradyrhizobiumColbertium
atgagcacgcatccggcagtcaagaacggcgcttatgacgtcgcgcgcgtgcgccaggatttcccggcgctcgccatgcaggtttacggcaagaatctggtctatctcgataacgccgcatccgcacagaagccgcagtcggtgctcgatcgcatgacgcaggcttacacgagcgagtacgccaacgtgcatcgcggcctgcatttcctcgccaatgcggcgacggaagcctatgagggcggccgcaccaaggtggcggagttcatcaacgcgccccgcaccgaggaagtgatcttcacccgcaacgcgaccgaggccatcaatctggttgcctcgtcctggggtggcccgaacatcaaagaaggcggcgagatcgtcatctcgatcatggagcaccattccaacatcgtgccctggcacttcctcagggagcgtcagggtgccgtgatcaaatgggcaccggtcgatgacgagggaaatttcctcatcgacgagttcgaaaagctgctgacggccaagaccaagctggtcgcgatcacgcagatgtcgaacgcgctcggcaccatcgtgccggtcaaggacgtcgtcagaatcgcgcatgcgcgcggcattcccgtgctggtcgacggcagccagggcgcggtgcatctaccggtcgacgtccaggatctcggctgcgatttctacgtcttcaccggccacaaggtctatggccccaccggcatcggcgtgctctgggccaagtacgaccacctcgtcgcaatgcgcccgttcaatggcggcggcgagatgatccgcgaggtctcgcgcgacgtcatcacttatggcgatcccccgcacaagttcgaggccggaaccccgcccatcgtcgaagccgtcggcctcggcgccgccatcgattacgtcaactccatcggcaaggagcgcatcgccgcgcacgagcacgatctcaccacctatgcccaggagcggctgcgcgagatcaactcgctgcggctgatcggcacggcgcgcggcaaggggccggtgatctccttcgagctcaagggcgcgcacgctcatgacgtcgccaccgtgatcgaccgtcagggcatcgcggtccgcgccggcacccattgcgtgatgccgcttttagagcggttcaacgtgaccgcgacatgccgggcctcgttcggcatgtataatacgcgggaagaagtcgatcatctggcacaggcgcttttgaaggcgcgggatttgttcgcatga

SEQ ID NO: 5620 - DNA, 339 bp, BradyrhizobiumColbertium
atggagacccagtcggcgctgccgcctgaggagaccgagcgtctcaccaacgagatcatcgcggggctcaagaccgtgttcgacccggaaattcccgccgacatctacgaactcggcctgatctacaaggtcgagatcaaggacgaccgttcggtcaacgtgttgatgactctgacgacgcccaactgcccggccgcaggcgaactgccgaccatggtcgagaacgcggtcgccagcgttccgggcgtcggcgtggtcgacgtcaaggtcgtctgggagccgccgtggtcccccgaacgcatgagcgacgaggcgcgccttgtgctcaacatgtggtga

SEQ ID NO: 5621 - DNA, 402 bp, BradyrhizobiumColbertium
atgacccaggtgacaccagcatcctccactccgaagccgcggcggccgcgcccgcaggtgatgcggctgacggatgccgctgcccagcgcatcaccgaactgacccaacgtgcagactcggagatcgtcggcctgcgtgtcggcgtgaagaatggcggctgcgccggccagtcgtacacggtcgaatacgcccacgagatccgcccgaccgacgaggtcgtcgaggacaagggcgtgaagatcctggtcgatcccaaggccgtgctgttcctgctcggcaccgagatggactacaaggccgacaagatgcaggcccagttcgtcttcaacaatcccaaccagatctccgcctgcggttgcggcgaatcggtcgagctgcggccggccaagatcgacgggtag

SEQ ID NO: 5622 - DNA, 477 bp, BradyrhizobiumColbertium
atggaccgagaattcctgaccgacctgttcgccgatttcggccccgtcaccatccgcaagatgttctccggctacggcatctccgccgacggcgtcaatttcgcgctggccctgcgtgccggcctgttcttccgcgccgacgagatgaccatcccggacttcgaggccgagggctccaagccgttccagtatcagacgcgcgccagaaccgtgatggtgaactcctactgggagcttcccgcacgcctgttcgacgattccacggagcttgcgcaatgggcaagggcggcactcgccgcagcccggcgcgccaaggtgaagaagcagccaaaagcgaagaaggcggcggcgaagaaatctgctgcaaagaagcgtccgaccaagaacgctgccaagacgacggcgggtccggtggacaaagcaactcgcgcgccgaggcttgcagagcgtaagcggaagcgtcgttcaagagtgtga

SEQ ID NO: 5623 - DNA, 1068 bp, BradyrhizobiumColbertium
gtgatcaaggtgctcgacgaacacgaacgcacgatggcgttcgccgaggtggcgctcggtcagatccgatcgcttcggcagacggcaattccccgcaattacgagatctggtacgtctacgccaccggctacaatgctccgctcaacaagatcatcaacgagacgctggcgcgcagcggcaagctgaccgaggccgatctcgagcagatctacgagacctatctctcccacatcaagaccaccgaccgcatcgacaaggttggcgcgcgcgtcatcggcgagatcgacgacgtcatgaaggtcttgggcgatgccctcggcatgaccggcgcctatgatgccaacctgtcgggcgccaccgaagaactgtcgtctgccaagagccgcgagcaggtcaaggcgatcgtcgaggcgctgctgcgctcgaccagcgagatgcgcgaagccaacaaggcgctggaagaccggctgacgctgtcgaagaacgagatcagcaatctccagcagagcctcgaagcgatccgcgccgagagcctgaccgatccgctcacgggcctcggcaaccggaaatatttcgaccgcatgatcggcatggccgtgcagggcgcactcgcctcgggcgagccgctgtcgctgctgctgttcgacatcgatcacttcaagtcgttcaacgattcctacggccatctcaccggcgatcaggtgctgcggctggtcggcctctcgctgaagcagaccatcaagggccaggacatcaccgcccgctatggcggcgaggaattcgcggtcgtcctgcccaatacgacgctacgccaggcgctcacggtggccgaccacatccgccgcgctgtgatggcgaaagagctgaagaagaaatcgaccggcgagatcctcggccgggtcacgatctccgtcggcgtctcgctgctgaaagagggcgacgacaccgacgcgctgatcgagcgcgcggatgcctgcctctatgccgccaagcgcaacggccgcaaccgcgtcatctgcgaatccgatccggaatacgcggccgagacgcacacccgggtggcgtga

SEQ ID NO: 5624 - DNA, 1521 bp, BradyrhizobiumColbertium
atgtccttctcagatctcggactgtccgaaaaagtcctcgccgcagtagcggccaccggttacaccacccctacccccatccaggaacaggcgattccccacgtcctcgcacgcaaggacgtgctcggcatcgcccagaccggcaccggcaagaccgcggccttcgtgctgccgatgctcaccattctcgagaaaggcagagcccgggcgcgcatgccgcgcacgctgatcctcgagccgacccgcgagctcgcggcccaggtgaaggaaaacttcgaccgctacggcgccggccaaaagctcaacgtcgccctcttgatcggcggtgtctctttcggtgatcaggacgccaagctgatgcgcggcgtcgacgtgctgatcgcaaccccgggccgcctgctcgatcacaccgagcgcggcggcctcttgctcaccggcgtcgagctgctcgtcatcgacgaggccgaccgcatgctggacatgggcttcattcccgacatcgaacgcatctgcaagctcgtcccgttcacccggcagaccctgttcttcaccgcgaccatgccgccggaaatccggcgcatcaccgaaaccttcctgcataatccgcagaaggtcgaggtctccaagcccgccacgacggccgtaaccgtgacgcaggcgcaggtgcccgccggacgcgaggcgcacgagaagcgcgagttgctgcgccgcctgctgcgcgacgccaaggatctcaagaacgcgatcatcttctgcaatcgcaagcgcgaagtcgccatcgttcacaaatcgcttcagaagcacggcttcagcgtcggcgccctgcacggcgacatggatcagtcggcccgtaccgcggcgctcgaacagttccgcaggggtgaactgccgctcctggtcgcctccgacgtcgcagcgcgcggcctcgacattcccgaggtcagccacgtcttcaactttgacgttccccatcacgccgacgattacgtccaccgcatcggccgcaccggccgcgccggccgtaccggcaccgcaatctcgatcgtgaccccgctcgaccagaaatcgatggcagcgatcgaaaagctgatcggccagagcattccgcgggtcgaaggcgattacgaagccccggccgagccctccgaggcaagcgagcgtccccgcgagcagcgcggccgcgaacgttcacgtggcgggcgtggcaagccgcagcgcggccgggatcgtgaacgcagccacgagccgcgcgaggcccggggcgaggcaagaatttcttcggaaccaagacattcttccgaatcaaggagctcgtcggagtcgcgccagctcgccgagccaaggcatcgatccgacgacaagcgtcgggcggacacacgccagcaggccagtacggcgcacgtgccctcgatcggccgtcccgagccgcgccgccagcgcgaagtcgataccgagccgggcgatcactcgcatctgccggcgtttctgctgcggccggttcgctcccctgcgggagcctga

SEQ ID NO: 5625 - DNA, 972 bp, BradyrhizobiumColbertium
gtgtttcgctggtgtaccgacgaggtcgagccgagggatcgcttcgactattggcgcgaggtgcgcgccaagggattgttcggcgtcacggccgagctcgcgcgcgaacggcgcgcggacttcgttggcgaattctcgctgcgccagctcggcggtgccagcctcgtcgagctgaaggcatcgccctattcggtcgagcgcagcacgtccgacatcgccgccgccccaggtgacgcgatctgcgtctatcagcagctcggcagtggcggctggttcggcggcattcgcgcaagcgccttttcgattgccaacggcagcttcgctaccagtcataccaacctgccctaccgcaccgcgccgctcggcgccgggggcttccatctgcgcatcctgaaaatcccgttgagcaacatcccggcacaggacagccgcatgcgcgaacttgcgccacgaacgtttttcgaccccgctctggcgcccctgctcgctgcctgctttgccgatctcggcgagatcgctggtgccgccaccgatgctggctctgccgttcagacgcccttggttcaagctttagggcatctggctttgatggagcgcggtgtcgtgcggcccggcagcaggcgcggacaggccgcgctgcggacggcccgcctctcgcaagcccgccgcctgatcgcgcaccatttgcaggatcccaatctcgccccagccatggtggccgatctgctcggggtgtccgtgcgacacctgcacatgctgttcaagacagccgagaagagcttctcgcagacggtgacggaggaacgccttgagcagagccgccgcctgatgcaggagaagccggagcggctgatcgccgacatcgcggcatcgtgcggcttcgagagcctggcgacctattaccgggtcttcaacgctgcctatggcatggcgcccggcgacttccgggcggggaccaccgaccggcgttaa

SEQ ID NO: 5626 - DNA, 1572 bp, BradyrhizobiumColbertium
atgaactgccgttccaacggatcggcggcagggccgtcctgcaacaggaattttgcgatgacgcgtcggcttttcggaattctggcggccattggcctcgcggcgggcctgagcggcttggcaggtcccgcttatgccgagaagcgcgttgcgctcgtcgtcggcaacaacgactacaggaacgtcccgaagctgctcaaggcggtcaatgacgctcgcaccatgggcgacacgctgaagcagctcggcttctcggtgatggtcgccgagaaccagagccggcaacaattctccgagacgctgctcgccttcgacaaggcgatcgagcacggcgacactgcgttcttcttctacgccggtcacggcttcgagatcgcgggacagaactatctgctgccgaccgacgtgccggcggcgacggaagggcaggaagagctggtgcgtgacgcttcgatcctggccgaccgcatcgtcgagcgcctccagaacaagaaggcgcgcacctcgatcctggtgttcgatgcctgccgcaacaatccgttcgagcgcaagggcacccgcgcagtcgccggcggcggcgggctcgcgccgatgacgcagctgccggaaggcgtgttctccgtgttctcggcaggcccccgccagaccgcgctcgatcgcctgtccaacgacgatgccaatcccaattcggtgttcacgcggaccttcgcgaaggaactgctcaagcccggcgagaacctggtgcaggtggcgcagcgcacccgccgtgccgtcagcgagatggccgagaccgtcaagcacaggcaggtgccggtttatttcgaccagatggtcgacgacgtgttcctcagcggcatggcgaaggataccgccgcgcgctccgacgatccgccgccgcagaaacttgcggcgctgccgccggtatccgttccgcagctgcccaaggaggagacgctcaacgcgccgatcgcgagcttctcccggcacaatggcggctggagcgtggtgttctccttcgccgatccgaccctcggcatttcctggcgtatggccggcaagggcgatttccgcgagaccggcttcatcgacacgctcgatccgcgcacgcgcaagcggatgccgaacccctcgatcgagctgccgccggatgcgcagcccggcaccatcgaggtccgctatgtcgatcagtccggcgacttgcaggggccgttcccgatcaggttcgatcccgaggctgcgctgatccgcgatcagcgcaagattctcgacatgacgtcgacgagctggctgtcgttccgcgagttcaacggactcctggtctactacacccacctcgtgtcctaccgttgcgcaatccgtgaggtgcgcatcggcatcgacaccgccgttcccaaccaggtgctgaagatgccgccttgtgacatgcgcgaccctagcgcgatcagcgccgggatgccgctctacatgaagctcgcgccgagcacgcagactgtctcggtcgagttgacctatcgcgatggcagcgtgtccgagatcaagagcttccggagcgtcaaccgcagcaacaattga

SEQ ID NO: 5627 - DNA, 216 bp, BradyrhizobiumColbertium
atgacaaaattcatcatcgtcgtgcttcttacgacgtttccggttctggcccaaacgactccagttctcaccgtgccgccgcccacggaccgcgagcgcgtccaagcggatcgtgcgaaggcagccgaggacgagaaggtggctccgatcacgcgcccttgggatcgcgacgctgacggcaagcgcccatgggagcggaagtcggcaaagccctag

SEQ ID NO: 5628 - DNA, 360 bp, BradyrhizobiumColbertium
atgcgatgtcgccggtcggcggcgtcggcgtcaatctcgccgtgcgggacccggtcgcgaccgcaaaacctcctggcagacaatctgcagcagggctgcctgtccgaggacgagctcgatgccgtgcgccgccgccgcgagcgtccggtgaagatgacgcaacgcatgcaggtggtcgtgcagaacaacatcatcagcggtgccttgcagagcggcgaccggccgctgaaggtgtcgccgatcctgcgcctcgtcaccgcgctgccatggctacgcggcatgccggcgagcttgcttgtgctcgtggcgcggcccgagcatgtgcattcgaaggccgcaagatttggcgcagcaatttag

SEQ ID NO: 5629 - DNA, 768 bp, BradyrhizobiumColbertium
atgcgtaataaattgattgccgccttcgcctgcacgacggctctggtttcgaccggcgcggcttctgccgccgatctcgctgcgcgctacacgaaggcgccggcctatgtcgagccattgttcacctggaccggcttctatgtcggcggccacatcggtggcgcctggaccaaccagcagttcatcaacaacgggaccggtgcggcgttcggcgacctcattccgggcgagggctatcgccagcgcggatcgggcatcatgggcggcgcgcagatcggctacaactggcaggccaacaattacgtgttcggcatcgagggcacgatttccggcctcgacaacaagggcacggtcgtaaacaacgtgtttggcgccgcggacgacgtgttctcctggcgcgccaacgtgctcgcgaccatcgtcggccgcgccggcttcgccgtgcagaacaacctcttctacatcaagggcggctatgccggcgtgaacaaccgcctctcggtcaccgacacagtcggtgtggcgacgggttcgggcggacaaacccactgggccaacggctggactgtcggcgccggctgggaatacggcgtcacccgcaactggatcgtcggcctcgaatacaactacgctgccttcggcagccagacctatcagctcggcggcacctccggaaactacacgttcgatgccaagccgcgcgacattcagtgggccgtggtgcgcgcgagctacaagttcgacgcacccaccatctcccgctactga

SEQ ID NO: 5630 - DNA, 771 bp, BradyrhizobiumColbertium
atgacatccagccggttcgatctcagcggcaaggtcgcgatcgttacgggaggcaatggcggcatcggcctcggcatggcgcgcggccttgccgacgccggcgccgacatcgccgtcgtcgggcgcaacgaaaccaagtccgccgcggcggtggccgatctccggcagcgcggcgtgaaggcgatcgccgtctccacggacgtgacggacatggcggcgatcgcggccatgatcgatcgggtcgtcaaggagctcggccgcatcgacatcctcgtcaacaatgccggcatgagcatccgaaagccgccgcacgagctcgagctggacgagtggaataaggtgatcgacacgaatctcaccagcgccttcgtctgctcgaagctggcctatccggcgctgaaggcgtccggcaacggcaaggtgatcaacatcggctcgatgatgtcgatcttcggcgcgagcttcgcgaccgcctatgcggcgagcaagggcggcatcgtgcaatacacgcgcgcctgcgcgaatgcttgggcgcccgacaatatccaggtcaatgccatcctgccgggctggatcgatacggatctcacccggggcgcgcggcagcaggtctcggggctccacgagcgcgtgctggcgcgcacgcccgcagggcgctggggggacattgacgacttcgccggcatcgccgtgttccttgcctcgcctgcttcgaatttcgtcacgggcaccgcgattccggtcgacggcggcttctccgtgatggcctga

SEQ ID NO: 5631 - DNA, 186 bp, BradyrhizobiumColbertium
ttgcgcagatttctgcttgtggcaggcctgcttgcgacagccgtcggtctgctctggatcggacagggcacgggcaccgttccgtggccgcgatcgagcttcatggtcaaccagttgcaatgggcgggctatggcgcagccatggccggcttcgggctggtgctgatctggcagagcaatccatag

SEQ ID NO: 5632 - DNA, 225 bp, BradyrhizobiumColbertium
gtgcacagtaaccgcagcttcggtgtggatacaatggcgccaccggtcccggctggcggcgggaagggagcgtgtccgtcaaaggcaactcgctgcttggcaatcagtgccgatggtcggctggcgaaacccggctcgcgggacgcggtattgcagtcaagcgttggtcgccccgcccaaacgaaaaagccccggcgatgccagggctttgacgttcgatcgtga

SEQ ID NO: 5633 - DNA, 606 bp, BradyrhizobiumColbertium
gtgcagaccaccgtcggcgcagtcccgctgacgatcgaccagcgccagggcggctcgggctggttcggcacggtcggcgccggctacgactggcagttcagcggcacctgggttgccggtgtgtttgctgacggtcagttcggcagcatccgcggcaccgtgcaggatccgatctttggcctcaccggtcaccagaagctggagacctcctgggcggctggtgttcgcctcggctggctggttgccccgaatgttctttcttacgtcaacggcggttactccggcgcccacttttgtcgcaccaatttcaccaacctcgccggcactccggccggtatccacctcgacgggtatgaccgtcacggttggttcatcggcggcggcgtcgagaacagcctgaacatcttcggcatcacctcgcccggctggttcatgaagaccgagtatcgttcggccttctacaacgccaccactcgtgacgagctgttcgatgccggcaacattccgaccggcaacagcatccgtacgaaccactggaaccagacgatctcgacctcgctggtctaccgcttcaactggaccggtccggtcgtcgcgaagtactga

SEQ ID NO: 5634 - DNA, 2043 bp, BradyrhizobiumColbertium
atggccaagcagttgaagcccaaagcaaaagatgacttttttggcggcgatgagccgaaaccccgcgcgcccaaggcggcgccgcgtggaagcggcggagaagccgactacaccgcggccgacatcgaggtgctcgaaggcctggaaccggtgcggcgccgacccggcatgtatattggcggcaccgacgagaaggcgctgcatcacctctacgccgaagtgatcgacaactcgatggacgaggcgctggcggggcatgcgaccttcatcggagtcgagctgagtgcggacgggttcctgaccgtcaccgacaacggccgcggcatcccgatcgatccccacccgaaattcccgaagaagtcggcactcgaagtcatcatgtgcacgctgcattcgggcggcaagttcgacagcaaagtctacgagacctctggcggtctccacggcgtcggcatctccgtcgtgaacgccctctcctcgcggctcgaagtcgaggttgcgcgcgggcagaaactgcatcgcatgattttcgagcgcggccaccccaagggcaagctcgaggatctcggcaaggtcaacaatcgccgcggcacccgcgtgcgcttcaagcctgacacggacattttcgggcccaaggctgcgttcaagccgcagcgtctgttcaagatgacgcgctccaaagcgtatctgttcggcggtgtcgagatacgctggaactgcgcgcccgagctgctcaaaggcgtcgaggacgtgccggccgaagcgacgttccacttccccggcggcctcaaggattaccttgccgcggcgatccacgccgacacgctggtgcacccggacatcttctccggcaagtcgggccgcaacggcgcgcacggcgcctgcgaatgggcggtggcctggaccgcggatgcggacggcttcctatcctcctataccaacaccgtgccgacgcccgatggcggcacccacgagtccggcctgcgcagcgcgctgctgcgcggcctgaaggatcacgccgagcgcgtcggtcagggcaagcgcgcggcgtccgtcacctcggaagacgtgatggtgggcgccgccgtgatgttgtcggtgttcgtgcgcgagcccgagttccagggccagaccaaggaccgcctcgccaccgcggaggcgcagcgcatcgtcgagcaggcgatgaaggatccgttcgaccattggctgtcgggcaatccgaacatggccaaccggctgctcgatttcgtgatcgaccgcgccgaagaacggctgcggcggcggcaggagaaggagaccgcgcgaaaaaccgccggcaagaagctgcgcctgcccggcaagctcgccgactgcaccgacgccggcaccgaaggctccgagctgttcatcgtcgaaggtgactcggccggcggcagcgccaagcaggcgcgcgaccgcaagacccaggccgtgctgccgctgcgcggcaagatcctcaacgtcgcctccgccggcaaggacaagctgaccgcgaacgcccagctctccgacctcgtgcaggcgattggctgcggcacgctcgcgcaatatcgcgaagaggatctgcgctatcagcgcatcatcatcatgaccgacgccgacgtcgacggcgcccacatcgcatcgctcctcatcaccttcttctaccggcagatgccgcggctgatcgacgagggccacctcttcctcgcggtcccgccgctctacaagctgacgcacggtaccaaatcggtctacgcccgcgacgacaagcacaaggacgagctcatcaagaccgcgttcaacgccaacgccaaggtcgaggtgaatcgcttcaaaggcctcggcgagatgatgccggcgcagctcaaggagaccaccatggatccggccaagcggacgctgctcaaggtggtgctgctggccgacgaccgcgacacgactgcggattcggtggagcggctgatgggcaccaaagccgaggcacgcttcgccttcatctcggacaaggccgaatttgccagcgaggagctactggacgtctga

SEQ ID NO: 5635 - DNA, 531 bp, BradyrhizobiumColbertium
atggagcagtatgcgcacgccctcgctgaattcgtgcgcgttcaccaggcctgggcggcgccggtcgtgttcctgctcgcattcggagagtcgcttgcgttcgtctcgctgctcgttccggcctggggtgcgctggtggcgatcggcgcgctcatcggggtcagcggcatcagcttctttcctgtctggatcgccggcggcctcggcgctgcgctgggtgactgggtctcctattggttcggctaccgctacaaggagagggttgcccagatgtggccgctctcgctctatccggatctgctgcccagaggagaggcgttcgtgcgtaactggggcatacccagcatcttcatcgggcgcttcttcggtcccctgcgcgcctcggtgccgctcgcggccggcattttcgaaatgccttattggactttccaggccgcaaacttcgtctcggccctgatctggtcggccgtgctcctgctgtttggcgacgtgctcgccaagatcatggaatggatctggcgcgtgatctga

SEQ ID NO: 5636 - DNA, 666 bp, BradyrhizobiumColbertium
atgtacacgccacctttcttcaagcaggaccgcgccgtaagcctcaaatttgcggagcagcgcggcttcggcaccatgtgcgccttcgacggccacaagcccgtcgcttcgccgctgccgttctatctgacctatgcggctgacgggacgccgcaggccgcgttccatctcgcccgtcacaatccgctggtaaagctggctggcggtgatgcgtcatggctgctcgcggtcaacggtcccgatgcctatgtatcgccggactggtacgtctcgccggaccaggtgccgacctggctatatcagtcggtgcatctgagcgggccggtgcggctgctgtcggacgaggagctgtcggtgcaggtcgacacgctcagcgacaagttcgagagccggctgttgccgaagaagccctggacctcgggcaagatgacggcgggccggctcgaggcgatgaagaaggggatcgtgggcctggtcatgatggtcgaggaggtcgagggcagcttcaagctgaaccagcacaaatccgacgccgactatgcagccattgcggacgcacttggtggcggcgatgccgacgcccggcagatctcacaactgatgcggcaagccaagccgcaagctttcaaagccgacacgaacctgctcgaagggagcacgccatga

SEQ ID NO: 5637 - DNA, 984 bp, BradyrhizobiumColbertium
atgagcctcgctgacaccacgaaagccccgaccaccagcgcggccaagaagcccgcgaccgtcttcgtcgacggcggctccggcaccaccggcctcggcatcagcgagcggctgaagctgcagagcgatgtcgaggtgaagaccattgccgacgacaagcgcaaggatcccgcggcaaagaaggcgctgatggaggaggtggacctcgtcatcctctgcctgcctgacgatgccgccagggagacggtcgcgctcatcgacagcatggggccgtccggtccgaaggtgctggacgcctcgaccgcgtaccgggtcgcgccggactgggcctacggctttcccgagctgacgccggaccaggccggaatgatcaaggccgcgagaaaagtctccaatcccggctgctatccgaccggcgcgatcgcgctgctgcggccgatcgtcgatgccggtctgttgccgcaggactatccgatcaccgtcaatgcggtgagcggctattccggcggcggaaagtcgatgatcgcgagcttcgaggacggcagcgcgccggccttcgagctctatggcctcggcttcgagcacaagcatctgccggagatgcagctctatgcgaacttgacgcggcggccaatcttcattccctcggtcggcaattaccggcaaggcatgctggtctcggtgccgctccagctcgacacgctgccgggcaagcctggcggtgccgacctgcagacggcgctggccaagcgttacgccggctcaaagtacgtcaaggtgatgccgctgcagaacgaggcgaccaagagcggccggctcgagccggaggcgctcaacgagaccaacatgctcgagctctacgtcttcgccagcgacaagtatcatcaggctgtgctggtcgcccggctcgacaacctcggcaagggcgcctcgggagccgctgtgcaaaacatgcggctgatgctgggcctgccggaggagtga

SEQ ID NO: 5638 - DNA, 399 bp, BradyrhizobiumColbertium
atgacacgcgaattgttctggctgacattgacggtgatcctgacgggggtcctctggattccctacatcatcaaccgatgtcaggttcgcgggctcagcggtgccatggccaatccctcgcgcggcgacaagccgcaggcggagtgggcgaaccggctcatgttcgcacatgacaacgcggtcgagaacctcgtcatcttcgcgccgctggtgctgatcctgaacgcgatcgactattccacgaaatggaccgtgctggcctgcgccgtctatttctggtcacgcgtcgcacacatgatcgtctatgcgctgggcatcccggtgttccgcacgctggccttcaccgtcggcttcctcgcccaggccgtgctggcgctggcgatcttcggggtagtttag

SEQ ID NO: 5639 - DNA, 1518 bp, BradyrhizobiumColbertium
atggccggtcaggacgccgagcccgccatcgcaccctcgccgcgcgacaagcgctttgccgatccggaatggaagtcgaaccagttcttcgatttcgtcatgcagttttacctgctcacggccaaatgggcgcaggagctcgtgcgcgatgccgaggggctcgatccgcatacgcgccgcaaggccgagttctacgtccagcaggtcaccaacgcgctgtcgccgtcgaatttcgtgctgaccaatccggaggtgctgcgcgagaccgtggcgagcagcggcgagaacctcgcgcgcggtctgaccatgctggccgaggacattgcggccggcaagggcatgctgaagatccgtcagtccaatccggacaatctagtcgtcggcgtcaacatggcgaccacaccgggcaaggtgatctaccagaacgagataatgcagctgatccagtatgcgcccacgacggagaaggtgctgcgcacaccgctcctcatcgtgccgccctggatcaacaaattctacatcctcgacctcaagccggagaaatcctacatcaagtggtgcgtcgaccagggcatcaccgtgttcgtgatctcatgggtcaatcccgacaagcggctcggcaagaagagctgggaagactacatgaaggaaggcccgctcacggcgatggacgtgatcgagaaggtcaccggcgagatgaaggtgcacaccgccggctattgcgtcggcggcaccatgctcgcgaccactttggcctggctcgccgagaagcgccgccagcgggtatcgtccgcgacgttcttcgcggcccaggtcgacttcacccatgccggcgatctcctcgtcttcgttgacgaggagcagatctccgcgctcgagcaggacatgaagaccgccggcgtgctcgaaggctcgaagatggcgatggccttcaacatgctgcgctcgaacgatctgatctggtcctatgtcgtcagcaattacctgaagggccagcagccgagcgcgttcgaccttctgcactggaactcggacgcgacgcggatgaccgcggccaaccattcctattatttgcgcaactgctatctggagaaccggctctccaccggcacgatggtgctcgacaacacattgctcgatctctccaaggtgaaagtgcccgtctacaatctggccacccgcgaggaccatatcgcgcccgctgaatcggtgctgtacggctcgcaattcttcggcggcccggtgaagtacgtcctgtccgggtcgggccacatcgccggcgtcgtcaatccgcccgcctcgaacaagtatcagtactggaccaacgacaacatcaaggacgtcaacatcgcgcagtggatgaagggcgccaccgagcacaagggctcgtggtggccggactggcgccaatggctgggcgagctcgatcccgaggaggtcccggcgcgcgcggtcggcagcgaagccttcccaccgatcgaggacgcacccggcagctatgtcagggttcgcgcataa

SEQ ID NO: 5640 - DNA, 660 bp, BradyrhizobiumColbertium
atggctgcgctgaaacttgcgatcggcaacaagaattactcgtcatggtcgatgcggccctggctcgcgctacgggccaacgacattcctttcgtggagacgctgatcccgctttacaccgatgatcccgccgacaaggaacagatcctgtcattcagccgcgccggcaaggtgccggtgttggtcgacggcgacatcacggtctgggattcgctcgcgatcatcgaatacatcgccgagcgctatccggaagtgaagctgtggcccgacgatgtcgctgcgcgcgcgcatgcgcgctcggtgtgcgccgagatgcattccggcttcgccgctctgcgcaacgaatgcggcatgaacctgcaccggccgatccgtcccgtggcgctgtcggccgacgccaagtccaacatcgcgcgcatcgaggagatatggcgcgagtgtcgcacccgctatggcgcgacgggtccgttcctgttcggccgcttcggtgcggccgacgccatgtatgccccggtcgtgcatcgcttccgcacctacgccatcgaggtggcgcccgacaccaaagcctacatggaaacgatgatggcgttgccggccttccaggaatggacgcgtgaggggctcgccgaaacgcttcggatcgcgaagttcgaggactga

SEQ ID NO: 5641 - DNA, 192 bp, BradyrhizobiumColbertium
ttgaagcacaaattccctgtgggatcgcgcgtcctgttcacggccagcaatgttgcgcgccccgctgcgagtggctcgtatgaggggatccgcctgctgccgacagaaggcgacgactgccagtaccggatcaagagctcaaccgaagccttcgagcgcgtcgccaaggaaagccagctcgcgctctcctga

SEQ ID NO: 5642 - DNA, 1002 bp, BradyrhizobiumColbertium
atgaactgggcatgggccacttcgctcgaacaaatctggatctcgccggccttcccgatgtggatgacgctggcggccgccggatttttcggattgatcctgctgatcacgctgatgcgtgccgacaggtcggtcgccaacggcgcgctgactgtcattacgctgctatcgatcgcgatcgccggggcggccaccgtgcgcgtccagggaccggaagggcagcccgctccagccgaagcgcgcgcgcaagtggcggtgacagcaagcctgccggcgctgtcctgcctcgacgatctcgccggcgatgccgtcgctgcgggatgtgagaaggcgctgttcggcgcgccggatgccgccgctgcggccgtctcctacacggccgccaggattgatcggctgaccgctcttggcgacgtcgccacggccgagccgggcctgacattggacatgaaggtgctgcgcaagtcgctcgagcgtgatcgctacggccttgtcgcgcatgtgctgatcacgcgcgatggctgcacgccgttcgattgcgccgcgttccgctcgctgaccgaccagcagcatgtcgccgccaacatgagctctcatctctacgacacgctgatcgcgcgctatgcgccggcctggaatgcgccggcagcggcatcgggggtgccggtcaccgccgcccttaccgggctgccgccgtcgctgccgacgggcaagccgaccaatgcggagttcccgagcgcttcatcgacgccgccggtgagcatcatgaatccagagccgacggcaacgacgcggcaggcggcgcccgccgcaagtgccgcgccggccccgcgtgcgcccgccccgacttcggcacatgctgcagcgcctgcggcaccagcaccagctgcggctgcgaagaagccaccggcaccgaaggcggcacgggctcccgccccaccggttccgctcgcgcctccgccgccaacgacggctgcgcccgcggctgcggataacgagtag

SEQ ID NO: 5643 - DNA, 441 bp, BradyrhizobiumColbertium
atgccgctacatctgatcaagctcgccgtcggctgcgactccgtcaaggaactgaaggagtgggtggccgaacggatgcagaccgccaagaagaagggtctgccgcaacatcacatccacatcacccgcatggtgcccaagcgcgacgccgagatcctggcgggcggatcgctctactgggtgatcaagggcgagatcgccgcgcgggaaaagatcatcggaatcgagccgttccgcgacaaggacggcattggccgctgccggatcgtgatgcagccgaaggtgatctcggtctcgccgcggccgatgcgaccgttccagggctggcgctatctcaccgacgattcggtgcctgccgatctcggcaagtccgcagccggctcgatcgcggcgatgccggagccgatgcggcgcgaactgcgcgagctcggtctgctctaa

SEQ ID NO: 5644 - DNA, 729 bp, BradyrhizobiumColbertium
gtgtcgctggttcgcctcgccaagcggcgcgccagccgcgtcgtggtgtcgatcttcgtcaacccgacccaattcgccccgaccgaggatttcggcgcctatccgcgcacctggaaggccgacatcgccaagctcgcggccgaggacgtcgatatcgtctggcacccgggcgtcgaggccatgtacccggagggctttgccacccgcatcgtgccggaaggaccggcgctggccggcctcgaggaccgcttccgcccccactttttcggcggcgtcgccaccgtcgtcggcaagctcttcacgcagtgccggccggacgtcgcgatcttcggcgagaaggatttccagcagttgcgggtcgtgacacagatggcgcgcgacctcgacctcggcgtcaaggtgatcggctcccgcaccgtgcgggagcgcgacgggctcgcgatgtcctcgcgcaacgtctacctctcgcccgaggagcgtcagaccgccacggtcctctaccgtgccatgaaggagagcgccggtcgcatccgtgccggcgattcaattgcgccggcgatggccggcggcgccgagatgatcaaggcggcgggctttgcgctcgactattacgagctccgccatgcgcagacactggcgccggtcacctcgcgcaaggacggccccttgcggatcctggtcgcggccaagctcggcagcacccggctgatcgacaatatcgcggtctga

SEQ ID NO: 5645 - DNA, 114 bp, BradyrhizobiumColbertium
atgcggcacagcatcccgcgcgacatcgcactcagtcttggcaagtggatggatcatagacgaaagacggcgacgcgattcatgatgaagccgggcgcgctgccatttgcatga

SEQ ID NO: 5646 - DNA, 924 bp, BradyrhizobiumColbertium
atgcttttgcaggctagccaaggccaatccggctcggcgcatgtggttgtgctcggcaacgagaagggcggctccggaaagtcgaccactgccctgcatatcgccgttgcgctcctgaaagccggccagcgtgtcgccaccatcgacctcgactgccgtcagcagagcttcacccgctacatcgacaaccgcgcggcctgggcgcgtcgcaccaagctcgacctggaactgccggtgcatcgctgcatcaagctcggcgagaccatgcagatcgcggagaacgaaaactcggagttccagcagttcatggaagccgtctcggcggtcgagagcagcttcgacttcatcgtcatcgatacgccgggcaccgacagttatctaatgcggcttgcgcattcgatggccgatacgctggtgacgccgatcaacgacagcttcctcgatttcgacgtgctcggcaccgtcgatcccgccaattacgcggtgaccggcgagagccactatgccgagatggtccgcgacgtcaggcgcaagcgccgccagctcgacggcgcaaccaccgactggatcgtcgtgcgcaaccgcctgtccatgctcggctcccgcaacaaacagctcgtcgccgagggtctgaaggatttgtcgctgcggctcggctttcgctacgtcgacggcttcgccgaacgcgtcgtctaccgcgaattcttcccgcgcggcctgaccgccctcgacgagatcgacgaggccacactcggcatgcggcccaatctcggccatcttaccgcgcgagaagaggtgacgagcctgctgcgccagctcaggctgccgcttgacgagcgcgggcgccgccgcgcggccaatcgtgccgagtggttcagccaggtcgaccagccgctagaggtccacgatatcctcggcgcttga

SEQ ID NO: 5647 - DNA, 861 bp, BradyrhizobiumColbertium
atgaagcgtggaattgccgttctggtttcggtcagtgctctctgcggcatcgcctatttcacggcgagcaagtgggcgatcaagcacgagacagtcaccttctacgatgcctcgcgcgacaatcgtccggtgcccgtctacgtcgcggtgcgccgcgacaaggaaatgcaggccaatgccggcatgatcaagctgccggttgccgtgatcaatcatggcaacaccgtcaagaataccgagtacggcttccttgcgaacattttcgctgcgcggggctacatggtcttgagcccgcagcatgacttgccgactgatcctccgatggtgacaaaacccggcgagctctacgtctgtcggctgccccagattctgcgcggtgtcgccaatatccatctcgcgatgcatgagatgaagaaggttcaacccaacgccgactacgacagggtgacgatggtcggccactccatggggggcgacatcacgatgtactttgccaaggagtatccggacgaggtcaagcgggtggtcacgctcgacaacctgcgcgtgcccttcgtcaccgccggcaagttcaagatcctctcgttccgctcccaggatccgcaattcaagaccgacgctggtgtgctcccgacggacgaggaatgcgagaaggcgggtatccaggtcgtgaagaccgaattccagcacaacgacatgcgcgacaccggtccggatgtggccaagagttcgatccagagcatgctcgacaagttcctgagcgcgaccgatagcgacgtggcgccggtcgacacgcaatcctcgccgcccaagatcctcgagcctggtccggtcgccctgatggcacccgccaagagctga

SEQ ID NO: 5648 - DNA, 678 bp, BradyrhizobiumColbertium
gtggggacgtccacctcggaggacatcgcggcctttgttgccaaggcgcgggcactgtcgccgcatgcaccaggcgcgaaggggcggctgattttcgcgctggatgcgaccatgagccggcagccgacctgggacatggcctgcgcgctccaagctgagatgtttcgcgaggccgcggctctcggcagtctcgatatccggctggtgtattatcgcggcttcagcgagtgccgcgctacgggttggatctccgacagcaccaagctggcggcgctgatgagcaagatcgattgccgcggcggcgatacccagatcggcaaggtgctgggcgaggcccgccgcgaggcggttgcatccggcgtccgggccgtggtctttgtcggcgacgccatggaggaagaaatcggcgagctctgcgcaaaggctggcgagcttggcatgctcaaggtgcccgtcttcatgtttcaggaaggccatgatcccatcgccgagcagacctttcgcgaggtcgcgcgtctgaccggcggtgcctggtgccgattcgatccgggtgctgccgcgcaactgcgggagctgctgcgggcagccgcggcctatgcggcgggcggacgcgaagcgctgctgcagctggcgaagagcgcaagcggcgcggccaagctgatcggccagatgaagtag

SEQ ID NO: 5649 - DNA, 726 bp, BradyrhizobiumColbertium
atgaccctgattgccggcgctgtcgctgttatcacactttacctgctgctccagatgttccgctccgccaatccggcggcgctcgcgcgtgtcgtcaagttcggtggcggcgtgcttgcgctggcggtcgcagccttcacgggtttgcgcggcgaactggcggttgcgattccgctcggaatttttggcgccgggctactcggctggaccccgttggcgaatgccggcttcggcaatgtcggaggattgttcggcggcggcgcgacgcgcccgtccggtcaggcctcgcgggtgcgctcgcaatttctggacatgcggctcgaccacgattccggccagcttacaggtcagatcgtcgcagggcctcacgccgggcgcgatctcggcgagttcgatcttgctggcctgctggaactggtcccgaccttcgacggcgaaagcgttgccttacttgaaagctatctggaccgccggtttcccgcttggcgtcagaacgcgcagagcgatgcggcaggggggcagcgccgcacggcggcgagcggcaaaatgacggcggaggaggcctatcagatccttggcttgcagccgggagcgagtcgcgacgacatcagccgggcgcacaagtccctgatgaagaaactccatcccgaccaggggggctcgacgtatctcgctgcccgggtaaacgaggccaaggatactctgcttcgcacgcataacggctaa

SEQ ID NO: 5650 - DNA, 1857 bp, BradyrhizobiumColbertium
atgcttcgtaaaaacttgtcttcctcgcgttgggcgcgggttggcgttttcgggcttcttacggtcaccaccgcgatcatcctcaccactgacgctgccgaggcgcggcgtcaccggcgccattatacgcaccacaaggtgcagcgcgacgtgtcggagagctccagcccgaaattcgcgtccatcatcgtcgacggcaattccggtgcggtgctccaggcaacaagccctgacgcaatccgccatcccgcctccctgaccaagatcatgacgctgtacctgctgttcgagcgtctcgaatccgggaagctgaagctcgacaccgagatgcccgtctcgcagcacgccgcagatcaggatccgaccaagctgaatctgcgtgccggccagaccattcgcgtcgaagacgcgatcaagggcctcgtcacccgctcagccaatgacgccgccgtggtgatcgcggaagcgattgccgggaacgaaaacgacttcgcccagatgatgacgcgcaaggcgcgctcgctcggcatgtcccggacggtctatcgcaacgccaacggccttcccaatgacgagcaggtcacgaccgcgcgcgaccaggccacgctcggtcgcgccattcaggagcgcttcccccgctattatcgttatttcgcgacctcgacgttcaactggcgaggacagtcgatccgcaaccacaaccgcctgctcggcagcgtcgagggcgtggacggcatcaagaccggctacacccgcgcttccggcttcaatctcgtcagttcgatgcgtcgcggcaaccgacacctgatcggtgtcgtgctcggcggccgcagcggcggctcacgcgacgccatcatgcgcaaccttctcgcggagaacctcgagaagggcgcaaccgtccacaccgtcgccgccgttaccgagcgcaacaacgccgacgtcagtaccatcgccgatgcgtcggatacaccccgcgccgccccgcaggtccaggccgtcgcggcccctgcttcggaggctgccccgtcgcgccttgccgcacgtctatcgacgttggccgctgcgactgccgcaataccgcccgccccgtccagatctgaagctgccaagcccgaagttcggccgacggagtccaaggtcgagccagcgccgctcaccaacggcgtgatctcgagccagccgctctccatcattcccggctcctccgagccaatgaagccggttcgcgtcaagaccgttcaagtcaaggccggcgccgtgaaggtcgcctccgccgccccggcccaggtcgccgtccaggccgcgccgccggtcaccagcacgatcccgccccgctccgaggtcgcggaaacctccggcgcggtcgtcgccagggccgatctcatcaacaggccggagccggtgagccggccggaagcgccgaaggccgagatggtccgggccgagctgccgcggcagccggcgggcttcggcaccggcaacggcatccttggggtgctcccggccgcgaccgcggctgctcccgctcccgccgctccaaagctcgcgtctgccgacccggcgtcacacccggtccaaatgagcaccaactccaagccggccgtcactcacagcggctggatcgtccaggtcggagcgctcgagagcgagaccgaagctcagcagcgcatcgacgccgcgcgcagctccgcccgcggcctgctgagcagggcagacccgttcaccgagccgattgtcgccaaggacaatcgcaagctctaccgtgcccgcttcgccggcctcgagcgtgaccaggccgaagcggtctgccgcacattaaagcgcgccgagatctcttgcatcaccgtgcgcaactga

SEQ ID NO: 5651 - DNA, 339 bp, BradyrhizobiumColbertium
atgttcaaggttgaagattttcagaactacgggaaagagcagttcgagcagtgcgttgcctccgcgacctcggtgcagcacggcctccaggcgatcgccagcgcttatggcgactacactaagaagtcgttcgaagacaccaagtccttcgtcgagaagctttccggcgtgaagtcgctggacaaggccatggaagcacagaccgatttcgcccggtccgcctatgagaccttcgttgcggaatcgcagaagatcgccggcctctacagcgacctcgccaagcaggcgttcaagccggtcgaaaccatcgtgtcgaagttcaccccggccgcgaactga

SEQ ID NO: 5652 - DNA, 303 bp, BradyrhizobiumColbertium
atgatcagcctaataaatgtcttcacggtagatcccgccaaccaggaccggctcctcgttttgctcacgcgcgcaaccgatgaattcgtcagccgggcacctggctttgtttcctcgacccttcatcggagcctcgacggcacgaaagtgaccatgtatgcgcagtggcgcagcgcggaagactatgagtccatgcgccaggatcctggaccgctaccctttctcgaagaggcgctcacgatcgcgaaatttgagccgggcatatatgaggtcgtgcgctcattctcgcccattgataggtag

SEQ ID NO: 5653 - DNA, 2184 bp, BradyrhizobiumColbertium
atgagtatgccgggaaacggtcaaagagacaaaggaacactcacggcgggattggagctaatcgagactcttcgtggcgacgccggcgccatcatggacttccgagccatccccgagacagacgccgcgaagaaagcgctcaccagccgccccattcgcttgcgtcaccgcggcacgctgccggatctgtgggacaagctgaagcgcctcaacaataagggcttcgccatctattacaccctgaatctttcagatggcaaaggcaccaaacgcgcaaacttccggaaggtcttggcgctgccacttgatcttgacacagcaccgctgccgaaaaagtggctccgcggcctagagcctcacgtgattatcgagacctcgccgggcaagcaccaatgcattttcatcattgaacccacgaacgacttcgtcgcagcgaagcagatggttcagcgccttgcgaaagcatacggcggcgatcctagcgtttgcgatgtgccgcgtgtgctgcgcatgcccggcttcaagcatcagaagggcaagccgttcgtcagccgaatcattgaggcgcggcaatacgagcagccgcatacgatggcagcgttagacgaggcgctgccgcggctacgccgaaacgagacggcgcccagcgatgagccccccgaagggttcgacactatcgggcttgaagacgttgaattgatgctcaaggatgcagaccccgcgcacatcgtccccggcaaccccgaatgggaagaagtcgcgatggcgctgcacacgctcagcaacaacgaccacgacgtcaaagaattctttcttgattggtgtcaggaagacccgaactatgcgggccaggaacaccgcgacgcgaacgaacttagatgggactcgtttaccgccgacaagccgggcggccgtggcgctggcaccttgcggcgccgactattggacaacggtatcagcccggagaacctgaatgtcatcttcggtcgcgcgacgcctgatgaagactttgaggaggaccccgcgctgaaatgggattttgaatcggttgaagactgcccgaagaatgcaacagtctataggaccgatagcggggttcggtatcaactcgcaagtgaggtcgaaccggagccgatcaactggctatggccgaaccgggttgcgcgcggaaagctgaacttcctcgccgggccacccgatcagggcaagtctcaaattactattgatttgatcgctcgcgtcacaacaggggtcgcatggcccgataagtccggcgagccggcgccgggctcggtcatcgtactggccgcagaggatgacgccggggacaccatcgttccgcgcctaaaggctgcaggtgccgatgtttcgagggtaatgattgtgcagatgatggtcaaacccttgaagggtcggcctgagcgcatgttcaaccttgccaacgatctgcccggtttggcggagcttattcggacctgcaacgacgttgcgcttgttgtaatcgatccaatcaattcctacatgggcgccggcgggcgcaatgggaccgacacatttaaggcgtccgaagtccgttccgtcttgagtccactcggccacctcgccgaacgccatgacgtggcggtgctattcttgtcccatcttaccaagaatagcggcggcaatgccccgctcacgcgcatgctcgactcgcaggcgttcaccgcgattgcgcgctgtgggtggttcgttgcgccggagatgcgggataggaaggaaaccgcccgcaagttctttgtcaagggtaagagcaacatcggcgcccctgtgccgggactcacatatgagattgaagagacgaccgtcacgaccgccgccgggcttgtgctgaaggtgccgcgtatcaaatggaccggcgaaacggagatgtccgccgggcaggtcttccgccagatggacaacggtggcgaacaggagaagggttcggccctcgaagcggcgatcacgttcctagaggacgaattggcaagcgggcctaagccgtctgacaaattaaaggaccgggcggaagagcggggccatagttggcgcaccgtccgccgcgctgccttcgaaggtattggcgttaggagcgagcgcagcggctttggcaagggttccgcttacgtgtggtcccttcccggccccgagatcgacttcggctag

SEQ ID NO: 5654 - DNA, 492 bp, BradyrhizobiumColbertium
atgaagagcttcacccagccgttcaatccagaatacgacacgatgtatctcgacgattattgcgagtcgggctcgcgtcatgaagggccggtgagcgccatgcgcgcacgtgttcccgagtcgcgcgtcaagtacctgtgtttccgagcttggtctcccgatgaaaccccggagaatgtgccggcggagtggaagccctggttcgacgatcagatggcttatcagcgcgaagcccatgacgaatcgctcgaagttatctgccggcgctatggcagcaagaccggcaagccggctgacatcccggaagcgaaccacgccgcggcggccacctattggcggcgctggcaggctcgccatgaaatgcgtgccgcctttgagttggaactataccgcatcggctacgacgaactgaaggcggaagaggctgctcagaagctcgctgatgagcgtgaggccgcccacgacatcgccaacacgtttggctttggctga

SEQ ID NO: 5655 - DNA, 330 bp, BradyrhizobiumColbertium
atggcgccgctgaagcgggcgtaccttgcggcgcttgctgcccgcggccgtgaaccggccgacaaggcaattcagaaatacacgaatggtgcgcgaggccagcatagttggcgacaggtcaaagaggccgacgttgcgaaagcaatcgcggaccttgagcagctgaccttcaagggcgacgacgggcaggccaagactgagtcgcgcctgcaacggatggcgaatgccgcctatggtcgcggcgaacggccgaagccggcttgcgagcttgatcccgtcgcaatcttcgagcgctggaacaatccggcgcccgctgatcgcactaagtaa

SEQ ID NO: 5656 - DNA, 948 bp, BradyrhizobiumColbertium
atgcccaccgaacagatcacccacttttcgagcaaccccggttcggctgtcaaagcgccgatcgacaatcttccgcctacagcgcagcagatcgccaagcacgaagacgacctcgttgagttggaatacgcacagtatgagcggaaacaacagcgggccgcggaaatccgattagaaattgcgcgggcacagaatgaaaagcggaacaacgaacgcgctcaaatcccgtcagaggagattgacagggccgccgacgaaacggtcgcggcaaagaagctggaattgagcgcccttgacgaggacttcgaggccaaacgccgcttacagccgggcaaccaatctcaggcttgcaaggacttcgcccaagccaacgtccttaggccgctgaagtcgtacaacttcaaatgcgagcttggcgacaatctggtcgcagagcatgaggcctgtcgggccgctcgcgccgccaagctcgatgaagcggaagccgtcagacgtgcacacgtacccgcctctgtcatcgcgtccgcgattgatcgcgtccttcccggcgcgtcggcaagcattgagcacgctcttcggaagctgcacactcccaacgaattttcatcgggccgcttttccgcaccgtctctcgaattgccgatgctgacgattccgaatggtgctggcggcctctctcggctgaacgacaccgctacattgatctttgctgtctttggcactgagattcgtgagcggctgaaagcaatggctctcgccggccacgacgctgagaacgccattcccatcgccgatcggcccgccatgctgaagaagatcgaagctgagattttggaaatcgagcggaaggctgagttcatctaccgaaccggccgggctcgcggcatcaacaccggtccgcgcttggcggcgagtccgctcgcaatcttggatatcgaattcgcgtga

SEQ ID NO: 5657 - DNA, 159 bp, BradyrhizobiumColbertium
gtgggctgcgtgacgtgcttcgtcggcgcgaatccaattgacgatttccttgccgtggtcgcgttcgccggtatcaagagcgccggtaaagcctttctcggaagcgctgccaaagccgtggatgtgctggacgcacgcaagacgaacatctctgtctga

SEQ ID NO: 5658 - DNA, 789 bp, BradyrhizobiumColbertium
atgctatccaccatcgcggactacaccaggctgaccaaggacatgggcaagtcgctgacgcaggtggcgaagcagccggatgtcagccgcgagaccgactatttcctcagccatatcggcaacgtgaagagtattgacgatttcctgaaggactatcgtctgtattcctatgcgatgaaggcttatggcctcagcgacatgacctatgccaaggcgttcatgcgcaaggtgctgaccgagggggtaacgagcaaggacgccttcgccaacaagctgaccgacacccgctaccggcaattcgccaccgccttcaatttcgccgccctcggcgacaaggcgacccagaccgccgcggccacgaccggaacggcgacccagtacgtcacgcagaccatggaggagaaggccggcgatcagaacgaaggcctgcgattggcgctgtacttcacccgcaaggcttccacgatcacgaccgcctatcagatcctcgcggacaaggcgctgacgcaggtcgttcagaccgcactcggcctgccggcgacgatcagttcggccgacatcgacgcccaggccaagatgatcgcgagcaagatcgagctcaccgacttccaggatccggccaagatcaccaaattcgtgcagcgctttgcggcgatgtgggatgcgacccaggcccggaacgacagctcaaccaaccccgccctggtcctgatcgccggcgccgcgacgtcgatcagcatggacaccaacgtgctgacgacccttcagaacatcaaattcaacaggtaa

SEQ ID NO: 5659 - DNA, 711 bp, BradyrhizobiumColbertium
gtgggtctgtcggcgcaagttgcactcgagaagcggctccagacgatcgccaacaacgtcgccaacgtcaacacggcggcgttccgcaccgacgtggtgaagttcgaaaccgtgctgtccaaggcaggccctactgcggtggcgttctcttcgccgggcgacaacgtcatctcgcgcgagatgggcaacatcaccgaaagcggaaacccgctcgatgtcgccgtggtcggacagggctggatcgccttcgccggtccgaacggcacggtctacacgcgtgacggccgtctccagatcgcccccaacggcgatctccagaccgtgagcggctttccggtcgtcgattccggcggcgcgcagatcacgctcgacccgaacggcggaccgatctcgatcgcgcgcagcggcgccatcacccaggacaacaacgagatcggcaccatcggcctgttcaacattccggccgacgccaacctcgagcgctacggcaattccggcgtgacgcccgaccggcccgcgacggccattgcagatttctcccgggacggcttcaagcaaggctatgtcgagggctccggggccaatccgatgctcgaactgacgcggctgatcgcggcctcgcgcgccttcgacggcaccaattcgatgatcgagggcaccgagagctcgctccagaacgccatccgggcgctcggcgaacccggcaaatag

SEQ ID NO: 5660 - DNA, 1326 bp, BradyrhizobiumColbertium
ttgaacgctcttcggcaactcgaatgggcgctgctcgagctgcagcagagcactccgctggcaagcgtcagcggcgcaatctccgagatcgcgccgacgcatttccgcgtctccggcctctcgcgcttcgtcaagctcggcgagctcatcggcgtcaactccgccggcaagcgccagatcggcgaggtggtacggatcgacaatgacggcatcgttgccaagccattcgaccggcagtttggcggcggactcggctcggtcgcttaccggatgccccccctgtcgttcgcgcccgatccgagttggaaaggccgcgtgatcaacgccgtcggcgcaccgctggacggattgggacccctcacccagggatcgcaggcggtctcggcagaggcggaggcgccctcagcgatgaagcgcgcacgcgtgcacaaaccgctgcgcaccggcgtgcgcgtgatcgatctgttcgcaccaatctgcgccggccagcgcgtcggcatctttgccggatcgggcgtcggtaaatcgacgttgctcgcgatgctcgcccgcagccagggcttcgacaccgtcgtgctggcactggtcggcgagcgcggccgcgaggtgcgcgagttcatcgaggacgtgctgggccccgaccgccaccgtgccgtcaccatcgtgtcgacaggcgacgaaagcccgatgatgcggcggctggcgccgaagactgcgatggcagtcgccgaatacttccgcgaccggggcgaatcggtcctgctcatggtcgattcgatcacccgtttcgcccatgccgcccgcgaggtcgcgctggcagccggggagcctgcggtcgcacgcggctacgcgccgacggtgttcaccgatctgccgcgcctgcttgaacgcgccggccccggcgaggagggagccggcaccatcaccgggatcttctccgtgctggtcgatggcgacgatcacaacgagccgatcgcggacaccatccgcagcacactcgatgggcacatcgtgctctccaggcacatcgccgatcaggcgcgctatccggccgtcgacgttctggcctcggtgtcgcgcctcgctcataacgtctgggatcccgaggagcgggagctcgtgagcaagctgcgcgccatgatcgcgaaatacgaggacacgcgcgaccttcgcctgatgggtggatatcaatcggggcgcgattcgggcctcgaccaggccgtcgacatggtcccgcgaatctacgacgcgatgcggcagggcgcgtcggctccgccgagcgccgatccgttccgcgagctgcgggataccctcaagggcgagtag

SEQ ID NO: 5661 - DNA, 636 bp, BradyrhizobiumColbertium
atgccattggcgcgagaagccgtcgagctgctggttcaggcggcgagggcttggtatttcgaaggcaatcagcatggattgcgcgaccgggagtggatggcgctgcgctttcttggccgcgccaacaggttttcgcgcacaccgtccgcgcttgccggcttcatcggcgccacccgggcgactgcatcgcagatcgtgaagactctggagagcaagtcctttctggtgcggaagccgtcgcatgaggacaagcgttccgtcgtcctgcacgtcacctcccagggcgagaaatgcctgagccagcacgacccgatcaatcatgtggtgaatgccgtcgcggcactcgggaccgacgaatgtatcaggctgcgcgactcgctgcgcgaaatcctcaatcacctcgatgcggcccatcagcgtctcgacgccagcatctgccgggactgcatgtttctcgccgagcgcagcccaagcaccggcaagggacgaacgaccgccgagttcatgtgtcggctctatcgtgctccgatctcgctcgaggagactgaactgctctgcacgagtttcgagcgcacgcgcgaccgccccaagatcgagcagcatctcgaccgcgcgcgcgtggcgggccaaggctga

SEQ ID NO: 5662 - DNA, 1065 bp, BradyrhizobiumColbertium
atggcgcgcaacatattgattctgggagcttcttacggctccctgctgggcacgaagctgctcatggccgggcacaacgtgacccttgtctgccgcgccaagacagcggagctgatcaatcgcgacggtaccgaggtgcgcatcaagctgcgggacgaggcggtgcaccgtgcgatcctctcacgggatttgcccggcaagcttgatgcggtcacgccggccaatgtcgatctgtcacgttacgacctggtggcccttgcgatgcaggagccgcaatacaccaaccacacggtgcgcgttctcatggtcaagattgcggcggccaaactgccgtgcctgtcgatcatgaacatgccgccgctgccctatctgaagcgaattccggcgctcgccggcatggatctcgaagaggcctacaccaatgcgcaggtgtgggagcggttcgagccgggcctggtaacgttgtgctcgcccgacccccaggcattccgtccgccggaagaagccgcgaacgtgcttcatgtcgggctacccaccaacttcaaggcatcgatctttgccgacgagaagcacaacaagctgctgcgcgaattggaggccgatatcgacgcggtgacgctcgacggccatgacgtgcccgtgaagctaaaggtgttcgactcgctattcgtaccgctggcaaaatggtcgatgctgctcaccggcaattaccgctgcatcacaccgaacgagccgcagtcgatccgcgatgccgtgcacggcgatctcaagcgttcgcagacgatttacgatcacgtcgacgcgattgcccgtcggctcggcgccgatccgcaggatcaggtgccgttcgcgaaatatgccaaggcggccgagagcctgctcaagccgtcgtcggccgcgcgcgcagtcgcgagcggcgcacccttcattgagcgcgtcgacctcctcgtgaagctgatctcgcatcagctcggcatgcccaacgccgagatcgaccgcacggtcgagacggtagaccagaagctgaatgagaagatcgtgcagggcggatccggcgcgcagtaa

SEQ ID NO: 5663 - DNA, 123 bp, BradyrhizobiumColbertium
atgctctggcgcgaccggggcgcccgctgcctcaggcgtccggacctagtcacgcccaaccgcgcggtcaggctcgtcgccgtgacaggcctgatctggcttcaatcattcctgatcgcctga

SEQ ID NO: 5664 - DNA, 1515 bp, BradyrhizobiumColbertium
atgacagttgcaatcgagatggggcagaccacggcaggcgccgcggccgccatggacctcgaggaactgctggcgacccgcctcctggtgcaaggtaattcgggctcgggcaaatcgcacctgctgcggcggctcctggagcagagcgcgccgtgggtgcagcaggccatcatcgatcccgagggagacttcgtcacgctggcggagcgcttcggccatctcgtgatcgaggccgaggatcacaccgagcgcggccttcaggtcgccggcgagcgcgcgcggctgcatcgcgtctccaccgtgctcaacctcgaagggctggatgccgagaaccagatgcgccgtgccgcggcgttcctcggcggcctgttcgacgtcgaccgtgaccattggtatccgatgctcgtcgtcgtcgacgaggcgcagctgttcgcccctgcggtcgccggcgaagtctcggacgaggcgcggaagctgtcgcttggcgcgatgaccaatctgatgtgccgcggccgcaagcgcgggcttgccggtatcatcgcgacccagcggctggccaagctcgccaagaacgttgccgcggaagcctccaacttcctgatgggtcggaccttcctcgacattgacatggcgcgcgcggccgacctgctcggcatggaacgacggcaggccgaagcctttcgcgatctcgagcgtggacagttcatggcgctgggacctgcgctgtcgcgccggccgctgcgtctgaacatcggcccgaccgagaccagcccgcgcaattccacgccgcggctgatgccgctgccggaagcaacgttggaggatgcgcgcgccgtgatcctcgccgcgccgccgcccgatgccagccgcccgcagcgcaggcccgctcccgatctgctcgagcagctgcgtgccgcaaggacggccgcgacagcggagatcaggcccgaggtggtcgaggtgccggtcagcgccgaggagttcgcgcagcggcgcgagcgcgtggatcggactctgcgtgccgtgctggccgagcctgacgccgggttccgcgccatcggcgtgctctatcaggaattcgtggtccgctgccgtatcgagggcctcggcgcggcggtgcccgatctcaacgagtttcgccgcatgctgacgcatgcgcgcgccgggctcggcaccgagcttgccgaggacgacgcctggcaggatgtgtcgctgcgcgcctcgatcctgcctgacgacatgcagggcgtgttcatgatgatcgcgcgtgcggcgaaggaaggctggccctgtcccggcgacgcggcgatcgcccgtgcctacggctcgcattcgctacgtcgcgcgcagcggctgctcggctacatggaggagcagggcctgatcgtcgtccagctcgacgggggcggacgccggatcgtgacgctggtggaactggcctgggcgacggcaccgggcgatcccaacggcgacgatctgccggtggaagaggtacagagcgcggcttcgctctga

SEQ ID NO: 5665 - DNA, 258 bp, BradyrhizobiumColbertium
gtggccatcgacgttgaccgcatgaagcacttcatccgaaagctcgccagcaccatccgtatcctcacctgcttgggcatggcccggaccttcggccactaccagcactccggctgggacggcgacatcaactacgcccgctacagctggcgcggccgcgagtggatcattcccaccggccccgcggagacccggacagaaatcttggatcgcatgggcccgccgtccgcctgcctgcgcaagggtggtctgctgtga

SEQ ID NO: 5666 - DNA, 234 bp, BradyrhizobiumColbertium
atgatcgtcatcatcccctgcccggcctgccatggcgaaggccgcgatattcgctacggcgtggtctacgagcccggctgtggccacccgcacatgggcgaggtcgaccacggcatgtgcaccgcctgtgaaggccgtggcgacgtcgaggaggagcacccgccccgcaccctgatggacctcgagcaggaggatttcgacatcatggaggctgcctgtggccatcgacgttga

SEQ ID NO: 5667 - DNA, 318 bp, BradyrhizobiumColbertium
atgagcgccaggcgcaagcccaagccccttccggagcccaccgccgcccagctcgacgaggccatgctggccttcgagaagctccgcatgcggtaccgcctcgagcattacgaggacgccccgccccacgagcggttcgtggtgcgcgtcgttccagaaatgttggcgccgaaagcgatccgcacgggcgcgatcgtcggcgctcgcgaggccacctacaccgtccaccgcttcccggatgaagcctccgcgcgccgctggcgcgagcgggagatcatccgtgagaccatcgccgccggcatgagggcacagccatga

SEQ ID NO: 5668 - DNA, 210 bp, BradyrhizobiumColbertium
atgaaccgccgccccctcactcccgccatggtcggcgaggccgcggcccgcgcgttggcgcagggcctcgacttcaatcgccacaccacccattacgtcgcccaatacctcgtcgtctacgacaaggagtgccagggcgccgactacaccggcgcggtctcggccgttcgcctgtggcagcacgagcagcgcgcaggagcggaatcatga

SEQ ID NO: 5669 - DNA, 249 bp, BradyrhizobiumColbertium
atgagcgatcccaccgcagctgaactcgacgcccacgcggaggccggtaatcagttggccggcatagtctggccgctgctcgaacagcagaaggccggtaccgtcatgaattgcgtcggcaatctcgtggtgctgaccttcgccagcatcaacttcgaccagccccagcacgcgctcgaagagttcgacaactggaccaaatacacgcgggaaatcatcgccgcaacgatccgggagcggctgtcatga

SEQ ID NO: 5670 - DNA, 192 bp, BradyrhizobiumColbertium
atgtggatcctcgcatcgctcccgttctggctgatcggcttgggctgcctgttcctttcgctcatcgcgttcggtcagctcatcaccaagagattgcacaagaacacgccgggcgagctattcggcatcggcctgttcttcatgatcgtcgccggcatctttctgccgatcgccgcgaaggtggcgtcatga

SEQ ID NO: 5671 - DNA, 384 bp, BradyrhizobiumColbertium
atgcacatgatcgatccggaagacatcctgaagcaggtcgcggccatcaaggagcgcgcaaagcccaagatgggcggcgtcgatcaagatgcctgcaacgcccgcttggagcacgacatcagctcgcacctgttcgcgtggcgtgcaggcgagagcaaccgccagaccgatcccgagcacatcaccgaggcgctggtttcgctctcaacgtcgcatctggccgcgcacatgttcgagcgcgtggaccccgagcactatgtcagcttcgcgatgggtgttgcgaacgacctcctgcggaatctcgtcacgctggcggacagcgcgccggacgagcggaaggagttctcgcaggtgctccactccaaagagatgggagtggcatag

SEQ ID NO: 5672 - DNA, 201 bp, BradyrhizobiumColbertium
atggctgagaaaacagccgcctaccttgtctgggtgcagggcctcaacggcccctgcccgcagatctggcacgacgatggaggccgcttcgtcggccccagcgacgtgcgctcgctcatccgcatcccgctcccggccggcaccaagctcgatctcgaagtgctggccgagctctatcccctcacccaggaggccgcatag

SEQ ID NO: 5673 - DNA, 195 bp, BradyrhizobiumColbertium
gtggcgatctttgaggcagccaatgaagcggaccgccaccgagcgcgcatgcgcaagcagcgcctagcccgcgagcgcgatgaaatcctgcagctcggccgcgcggcgcgcgccgccggcctgtccgtcgccgacatcgacgcgatggcggttcccctgtcccccgaagacgaaaggctcatgagccatggctga

SEQ ID NO: 5674 - DNA, 654 bp, BradyrhizobiumColbertium
gtgacgttcgcaatcaaacccctcaaccagggcaaccggcacctgcgcggcgccttcgcaacctgcggccattgcggcgtgctgaagaccatccgcgtgaacaccttcaccggcacgcccaacgatcagaccgagctcgagcagcagttcgtcatcaagaagctcgaggagatgggctggctgatcggcaagaaggccgaacagcaccgctgccccggttgctattcggccatcaaggccaagcaggcccgcaagaacgaggagaacaaggtcgtgacgcttccagtgaagcctgcggagcccgaggccccgcgcaccatgtcgcgggacgacaggcgcatcgtgttcgagaagctcaacgaggtctacgtcgacgaaaagatcggctatggccccggctggaccgacgcgaaggtcgcgaccgatctcggcgtgccgcgcgcctgggtgaagcaactgcgcgacgagatgttcggccccgaaggctccaacgaggagatcagggccaccatcaacgaggcgcagaccctgctcaacgagatgaaagaacgatgtgaggtcgtgagaatgcatgccgaagcgttcaaggctctcatggacaaggccgagcagatcgacaagcgcgtgcgccagatccagcaggacctccgctga

SEQ ID NO: 5675 - DNA, 234 bp, BradyrhizobiumColbertium
gtgctgaccactgaggaagaggccaagaccaagtggtgcccggaggttcgcaccgggctgaccgccggcatggccgtgaaccatcacgtcaacggtgacgtggacgaggaaacgcgctgcatcggctcaggctgcatgatgtggcgctggcggcagatgctttccgccgacggcatgagcgtcgtggatgatccggagcgccgcggattctgcggaaaggcgggccgtccgtga

SEQ ID NO: 5676 - DNA, 303 bp, BradyrhizobiumColbertium
atggaagagcagcaggaacacatcgtcgtcggcaccaccgtgcggctccgggacatcccggggccgctgttgcgcgtcatccggatgcagaatgaccaggccacttgcttctggttcagtaggcacggcgagccctgcgaggagcaattccccgtcgtcctcctgatgaagtgcgcgccctacgtccaccggccgcgggaggagggctacggcggcgttcgcggcgccaacactgacgatgccgccgccgagcgcttcgagcgcgaaaccgcacctgtggaggccgccagtgctgaccactga

SEQ ID NO: 5677 - DNA, 348 bp, BradyrhizobiumColbertium
gtgagccaggacagcaccatcgacgtcgccaacttcatcagcgaagcgcgcgctgtgatcgacaagcacatcgaggaggcggggcggatcgtgcaccgcctcaactctccgcccgatgagatcagcccggcgacgaacagcgacaagctgttcgcggcgatcctcgccttccacaccgctctcgtcgattggacgatcgcaagcgagatccgcgacgacaagctcaaggcatctgccatggtcgacgtcggcctacgcctgttcctcgacaacgtgcgggaccaattcatcgcggcggaagccgagaagcgcaagcccaagccgaacatcatcggcctgcggcaataa

SEQ ID NO: 5678 - DNA, 396 bp, BradyrhizobiumColbertium
atgactgagcaggcacaggcggaacaggccaccaccgagaggatgaaggcgtcattcgagagcgcaaacattggcggccaagccatcatgcggtccgcgctcgcgctctcgacgatcatcgactcccagctcgaccgccccgtcaaggtcgacgcgatcatggcgtccctcaaatcgctcgtgacggacatcgaggtcgcgacctacgagcgcatctacaaggtccgcgagaaggcgcccaatctcccgctggaggtcatcattgagaaggcggcactgctcgcctgtgatctcagtgaagagtttggccgcaagcaggcgaacatcatgcagctcttcatcgacgagatggaggagcgcattgccgccaaggagaaggcggaggccgtctcgtga

SEQ ID NO: 5679 - DNA, 264 bp, BradyrhizobiumColbertium
atgatctcgaacaccggcaccgcaccggcaggtcacggcctcgtctccgcctcccgcgaggaggagttcgcggctttcaaccagctgccgcctgcctgccgggccgcgctgaacgattccacggtcaaatggtcggcaatggccgtcctgcgccgcttcaaggtgaagggcctcgatccctcgaacccggaccacgacacgtccatcgccaatgagctgcgggcgatcgacgcaaccagagcagccgataggagcgttcaatga

SEQ ID NO: 5680 - DNA, 618 bp, BradyrhizobiumColbertium
atgagctggcccttcggcgatctgcagcagggtaagtatggcgcgatccttgctgatccgccgtggcactttgacgtctggtccctgaaatcatccggcagccgcaagactgcagtcggtggaccgagccgacatgcctcaaagcactacaacaccatggatgtgcagcagatggtccgcctgccggtgctcgatctggcggcgaaggattgcgtgctgttttgctggacgacgtggccccacctgaaagccgcgctgtggctcatcagcgcgtgggggttcacgtacaagacctgcgccttcgactggatgaaggctgatccctattgcctcttcgctgacgagaccacgcccgacatgggcatgggctactggacgcgccagaacaccgagccgtgcctgctcgccacgcgcggcaagccgaagcggatcggggccgacgtccgccagggcatcatcgctcctcgccgagagcacagccgtaagcctgacgacatccatgggcgcatcgagcgcctggtgggcggtccttacgtcgagcttttcgcgcgccgtcgcgtcgaaggttgggattgctggggcaacgagaccaccaagttcaacgaggccgccgaatga

SEQ ID NO: 5681 - DNA, 303 bp, BradyrhizobiumColbertium
atgacggacaaccctcagatggatctgttttcaccgcgcaaggagtatccggaggatattccgcccgaagtgtgcgacctgtttgagcgccttgctcttcaggtgcgaagccgcggcttagagcgatactccgcggacgcgctaacgcatcaaattcgttggcacttcaatatcgagcgtggtgatcgcgagttcaaggcgaacaacaattggacttccgtgctcgcccgctggttcctcgccaagcatcccgagttgcccaaattcttcgagacgcgcgagcgccggaaggaggctgcatga

SEQ ID NO: 5682 - DNA, 351 bp, BradyrhizobiumColbertium
atggtccggcgctgcaccaatccaaacgtgaagcattttgcccgctacggcgggcgcggcattcgcgtctgtgaacgatggatgatcttcgagaattttctggaagatatgggcattcgtcccgatggtcgctcgatcgagcgcgacgacaacgatgggcattatgagcccggcaattgcagttgggccaattcaaagcagcaagcccgcaataggcgcaacactaagtttgtcctgctgcatggcgagcggatgtcgctcacggaagccgccgaacgtttggagatgtcgccgcattcgctgcgagctaagatccgcagaggccatccagtcgagggagttgtcgcatga

SEQ ID NO: 5683 - DNA, 915 bp, BradyrhizobiumColbertium
atgtctgaagcggtcaacggcgaagccgtcgacaagattgcaatcctcgcccgcagcgcggccgagctgcaggttgcgagcatcagcgtcagcggcgtgggtctgccctcgtcgttcccgctggcgttcgacaagcgcatgaacggcgcagggctgcagagcctccgcgtcgaggcggagaagtggcgcatcgcgcccgagcgcaagaagggcatcgccaagctggcaacgctgcagagcttcatcgaccttaccaaccgccacaaggacgagcacagcgtcatcttcgcgctggcggattggccgacgccgtctctgacggcgatcatcaattacaacaagtcgggcgagaccggcgaagcgcgcttcggcgatcaccggttcgtctatccgttcccgctgacggacgagttcaaggcgtgggcaggcaaggacgcgcagaagatgacgcagggcgagttcgccgccttcatcgaggagcgcgtgttcgagctcgccgacccgacgcccgctgaagcggatcagttcgagaagatcctgcggacgaacttcgcctcgccgagccgcatgatggagttgtcgcgcggactgcaggtcaacgtggagtcggtcgccaagtccggcgtcacgctgcagtcgggcgaaggcgaaatccagttcgtcgaggagcaccgtgaccagcggggcgagaagctgatcgtccccggcctgttcatgatctccctgcccgccttcatcggcggcgatcctgtccgcatcccggtgcgcctgcggtaccgcgtcagcggcggcgcgatcagctggttctaccagatgtatcgctggaaggagtacctgcgcgagcgcgtgatctccgacctcgaaatcgctgccgcctccaccgagctgaacacgttcgaagggtcgcccgagtag

SEQ ID NO: 5684 - DNA, 336 bp, BradyrhizobiumColbertium
atgtcgtcgcgcctcatcaggcgtttctcggaaatcatcggcctgctcgatcgggacttcgaaccgaagctcgacacggcggtccgcgaactcgtcgagtccctcgtcgatctccccacggagaagggcaagggctcgatcaccgtcacgctcgacttcgaatacgagaagggaatgttcaaccttctcccgaacgtgaaggtcaagctgcccgaggggcagaagttccgtcgcacgcccttctgggcgcacgagggagcgctttccacccagcacccgtcgcagatcgacatgttcgtccgcgactccaccaagagcatggcccagcagggctaa

SEQ ID NO: 5685 - DNA, 228 bp, BradyrhizobiumColbertium
atgccgagagacaaagagaacgcgcgccgctggcgccgtgagcacaagcgcaggctgcgcgccgcacgccgcgccatgccgctgcatcgcaagctcggcatcgagaccatcatcgtgcgcgtcgcgatcctcgatgatccgcgcatgggcaagcgcttcgatcgacaatcgcgcgcctacagccacagccatctctaccgcgagagcatcacgctcgcgcgcgtctga

SEQ ID NO: 5686 - DNA, 489 bp, BradyrhizobiumColbertium
atgacgaagctcacggctgacatcgtgcgtacccgcctctcctattgcaggctgactggcgagtttcgttggcgcgtgcgtggccattccattcgccctggcaagctggctggaactcgcactcagcacggctatatccagatcaagatctgcaacgagattcatctggcccatcgcttggcttggctgcacgtcaccggcgaatggcccaacagcaagatcgatcaccgcgatcgagatggcacaaacaatcgcttcaccaatttgcgcgaagcgaacactcaacaaaacaaagcgaactcttgttgctctgctgcaagcaccatcggcttcaagggcgtcgaacgcagtctcgatcgatacatggcgcgcatcaagaaagatggcgtccgctactaccttggcacgtttgatactcctgaagaagcaaacgctgcctatttccgtgctgctcaagaactctttggtgagtttgcgagggcgtcatga

SEQ ID NO: 5687 - DNA, 309 bp, BradyrhizobiumColbertium
atgtttcgaaagaggaatttgatctcggcgcaacttcttgccgaggcgagggcttgggctgacgaattgaccgcgatggaaatccgcggtcccggcgatctcgaagccgcatggcgccggttggaagcgcgctacagtgtgccttacagcaccttctggagtctccgctatcgagatgatctgaaggacatctgggcgagcctccattgcctgctcaggctggccgtggaagcggagcgcgcgcgtcgagcttctcagatggcgcgcgacaaccacatctcctccatcctcaatggagatgtcgcatga

SEQ ID NO: 5688 - DNA, 285 bp, BradyrhizobiumColbertium
ttggacgtggccgctgagatcacccccatcgcgacctttggcgaggcgaacgcgattgaggctgaagaagattgctggcttgtcctgggtgacgtcgtcgaagggatcaaggatcggtgcgctgccccccgcactgatgctcccggccggggcaatgtgctcgcgttccccggccgggctgaccccgaatacgtccgtcggcgcgcgatcgagatcgagcagttcgaggacagttttcggcgcggccgcaagtggagccgcgacaatcggccgccgcgtaaatag

SEQ ID NO: 5689 - DNA, 297 bp, BradyrhizobiumColbertium
atgcgcgagtggcggaagacgcacaggctgaacgatgaagcgaagatgcgcgacaacgcgcgatcctacgctgggacctacaagcggcgcggcaagctcgatcccgagccctgcatgtgctgcggatcgcccgacgccgagatgcatcatccggaccatgagcgtccgctcgtggtcgtctggatgtgccgagcctgtcatctgtcgtggcatgccttctggcgcgatgtcgttctcgtcgcatggcaattttggtccgcaagggcgaagcgggacctgcggagtgacgccgcatga

SEQ ID NO: 5690 - DNA, 258 bp, BradyrhizobiumColbertium
atggaacccgagtacaacgccggcgagatggcgattgtggagccaagcctccccgtcgtgccgggcgaggtttacatcttctatgcggagcgggacggggaggcgagggcaaccatcaagaagcttcggcggccggccgccgatcggtggctggtgactcagcacaatccaccagagggggcgagcaaggacttctcgctttcacgcaaagaatggtcaatcgtccaccgcgtgactggaaagttcgcccggcgatga

SEQ ID NO: 5691 - DNA, 291 bp, BradyrhizobiumColbertium
atgtccaatattccatccactaagcccaacgtcctcacccgcagtaacctgatcgacgaagagaccggcgaggtcaatctttgggttctcaagggcatcgcgcgtcgcgaagccatgaagacctggggcgcgatcactccgatgtcgctccgcgcggcgcttcgcgaagccgccgatctgatccctgagatgcggtgcgcctggcgtcagcgtcatggcctgccgatcgagatatccatggtcacatccttcgcgcccgaccgcgacggcgtgcggcggagtgcgttctga

SEQ ID NO: 5692 - DNA, 174 bp, BradyrhizobiumColbertium
atgtctgaaaccactcgccagcgcgaggctgtcgcgcgtctcaccaccttctgcgagcggctgatccgcgacggcaagttgcccggcgcggtcgaggccgagcttcgccttcacaccaacgccgcctgtgccgccttcaacatggcgccggtccacgagagggagcccgcctga

SEQ ID NO: 5693 - DNA, 129 bp, BradyrhizobiumColbertium
atggacatcttcgtcatgggcttcgccctcggcgccgtcgctggcgctctcattgtcgctgcctggatgagcgaccgcgcgccgtccgtccagatcgatcccaccgagcatggaggctccccgctatga

SEQ ID NO: 5694 - DNA, 936 bp, BradyrhizobiumColbertium
atgactgtcgctgaactgaagaaggtcaacatcgtccccgacgagtggacgtggtggcgcaacgcgctcaagggcgtgttcgagacgatccatgctgacgagccgaggaccggctactaccgctcgcgccgcaaggacaaacagagcgggcaggtgacgtttcatcgcgtcgcctattggtaccgtcccgatggctcgctcgcatgtcaggtcgacggcaagcccgtcgatgatctccgcgctcgcgagatgtggccctacgtctctcagcggccgatcacctatgaggtgttcgatgctgtctcgaagggcgcgccctggccggacatcaatgaagccgtcgcaggccacaatcaggcgccggtcgcggatacgatcgaggcgatccaagagcgcatcgatgatctcgcccgcgaggccgagcgcatgatgaaggccggcggcgcgaccgagcaggccatcgccgatcaggcgtccgatctggcgaacaccttcggcgagctgcagaacaagatcgtcgacctccacaagaaggagaaggcgccgcatctcgaagccggccgcgccgtcgacaagaagtggttcggcctgcgcgatcgtgccgaggagttgaagaagcgcctcaaggctgtcgtcgtcacgccatggctgacgcagaaggccaaggaggcggaagccgcaaaggtcgctgcggtcacgtcgggcaagtccgtcgatgaagcgccccaggtgcgcgtcacctccggctcgtcgaagcgctcgaccggcctgcgcacctattacttcgcggagatcacggacaaggccgcgctcctcgaaagcctcaaggatcacccgcgcctcgtcgcgctcctgcaggagatcgccgacgacgccgcaaagaagcaggtcgctttgccgggctgcgtcgtgaagtctgaaaagagggcagcctaa

SEQ ID NO: 5695 - DNA, 1176 bp, BradyrhizobiumColbertium
atgaaccagatggtcgcagtcgaacagccgcaggcgcagcaaccgcgcctgccgacgctcgtcgcgggcgctccaatccgcccgatcgtgccgcaggatttcgagggcgcgtggcgcattgcctccgccgtgtgccgcgccggcatggcgccgaaggggctcgacgctccggagaaggcaatggtggcgatcatgcacggcctcgaggtcggcctgacgccgatgaacgccctgcagtccatcgcggtggtgaacggccgccccacggtttggggagacggcgccattgcgctcgcgcgcggctctggcctgctcgaatggatggaggagaagttcgagggcgaggagggtaccgacgccttcaaggcggtgtgcacggtcaagcgcaagggcgagccgaagcccgtgcacggcgagttctcgatcggcgatgccaaggtctccggcctttggacgaagcgcggccgcgacggccagccgactccctggcaacagtacccgaagcgcatgctcaagatgcgcgcccgcgcctttgcgctgcgcgacggctttgccgacgtactcaagggtctcgcgatcaaggaggaggtcgaggactatcagacggtcgcccatgtggctcgcgaggagcctccggcgccgccggccgcgcaggtcacgcatcagcccgtcacccaaccgcaggaagacccgcccgcgacgccggccgaggaactggtgacgacggccgccccggcggagaccgtggagtggtccgagcccgaggaggccgtcacggagcccgccgaggagcagccgcccgtgccgccgatgtcggccggcgcatcgccgacgttcacccacaccgacgctgccgccgatggcaagcctgttgggaccgtggagagcgactttcccggcgacaagccgcaggcatccgctcccgatggcggcatccccgagttcctgcgccgcaagccggagcagaagcaggaggagcccgtcacggagccggccgagccggattggctcgccgcgctcgaaaacgcactgtcaggggtcgagagcacggatgatctcgccgatgtgcaggccaagtaccagacgccctacaagggcaaggtgtcgaaggctgactatgcccgctcgcagacgctggtgatggaagccttccagcgcatcagcgaggctgaatag

SEQ ID NO: 5696 - DNA, 462 bp, BradyrhizobiumColbertium
gtggcccagcggctcgccaacatcgcgccagtcggctcgctcctgaagggctgccggcgcgagaccaagaccaagccggtgaagccgaagcacggccgcgtgcgcgacaacgcgcacctcgatgccatccggcagttgccgtgcatcaatccgctctgccgccgagatcctgccggcgtcgccgcccatgtccgcttcgcctgcgccgagactggcaagcccgcgacggggatgcaggtcaagcctgacgacgcttggacgctgccgctttgcccggcctgccacaccgacgctccggacgcccagcacaagggcaacgaaattgctttctaccgccgcatcggcgtcgacgctctcaaggcttgcacggcgctctacgacgcctcgccgaacgtcgagcacatgcgggcggtcgtcttcaccttccataccttcgcgatgatggagtcgagcaatggctga

SEQ ID NO: 5697 - DNA, 1080 bp, BradyrhizobiumColbertium
atggctgacaattccaagatcgagtggaccgacgcgacgtggaatccggtcacgggctgctcggtgctgacgccaggctgcaccaattgctatgcgatgaagctcgcgggcacgcggctgcgcaagcatccgtcgcgcgccggcctgacgaaagcgaccaacgccggtccggtctggaatggcaaagtgcgcttcaacgaggagtggctgacgcaacccttgtcgtggcgcaagcagcgcatggtgttcgtctgcgcgcacggtgatctcttccacgaggacgtgcccgacgcttggctcgacagagtgttcgcggtcatggcgctggcgccgcagcatacgtttcaggcgctgacgaagcgcgcgaagcggatgcgggaatactgcaaccagatcacggcgcccggacggcagtgggcacagatcgctcattttggcatgcaagcgcagtttccagaggaggcgatccgcgaagcgatggatcggctgggcaagccgttgcccaacgtctggttcggcgtctcgaccgagcgccagcaggaagccgaccagcgcattccggacctgctcgcgaccccagccgcggtgcggttcatctcggccgagccgctgctcgggccgatcaacctgacgcagatcatgcggcgtgcggccgacgacgactggacctattgcgacaatgccttgaccggcttccgagcccacaagtgcggtgggtggcaagacaccaagctggattgggtgatcgccggcggcgagagcggcgatggcgcccggccgatgcacccggattgggtgcgctcactgcgcgaccagtgcgccaaaaccggcgtgccgttcttcttcaagcagtggggtgcgtggagccagttctacgatcgcgaccgcgacgatccggactggcgcaacgtcccgcaggtcgacaaccagatgggccgcggggccacccgctggcataatctcgcgggcggcatcggctttcacggtgagcgcctggttgccatgcgcaacgtcggcaagggcgccgctgggcgtctcctcgacggcctcgagcacaacggcatgccggagcgtgcctga

SEQ ID NO: 5698 - DNA, 471 bp, BradyrhizobiumColbertium
atggcgaccgagctgctcatccgcgtcgagggaacgcgcctggttggcgccacggccggcgacctcgagctgatcgacggactgccgcagagcaaggagtttcttgcccgcctgacgtcggccaacaagcggagcgtgctgcagaaccgcttctattggcggctcctcggcctcgtgatcgagaaccaagatcactaccgcaaggccgagcagctgcatttctggctgaagatcaagctcggctatgtggagcaggtcgagtttcacgacaacaggatggtaacgcgagttgcctcgacgtcgttcgagcgcatggatagcgaggacttcaagcggtacctcgacgctgcgatcaccgtcatctgcgaagagatcatccccgggatggaatccgcgcgcctcgtgcacgaggtcgaggagcatctcggtctttcctacaacgcgctgtggcagggggctaaggcagcatga

SEQ ID NO: 5699 - DNA, 270 bp, BradyrhizobiumColbertium
atgaccttcgtcgttcagttcatcgactccggccgcgaaccgaccgtggcacccaaccccgcctatccgaacggaatggatgtcgatctgcggcctgaggacaagcggactgtcctgcacgcgaagtgctgctacggcgttccgtacccggcgccgcgctgcggtgcctacgtcgtgacgtgtgagtcctgcggcctccgcgtcgcgctcacggtcgccggtcggccggacgatccgcgcaccgtcacgctgccgtgcaagggaaattga

SEQ ID NO: 5700 - DNA, 387 bp, BradyrhizobiumColbertium
gtgagccgcgggccgctgaccttcaagcagcgtgacgtcacccgcgccctcaagggcgcggttgcggctgacgaaagtgtattcatttatttcatgcgcgccggggagtttgtgaagatcgggcgatcaaagcagtggaagctccgcatgcgcgagatgcagaccggctctccttacacgatcgttccgctattggtgatcgttgccgatgctaagacggagagggagttgcatcgccggttcaaagcggaccactttcgaggcgagtggtttcacaattctccgaaattgaatgcatttatcaaagataacctattccgctgcgtagcgaaatctgctgacgacgatctgcgcggccccgtctacaatgaatgggactatgtgtga

SEQ ID NO: 5701 - DNA, 1299 bp, BradyrhizobiumColbertium
gtgagcacgatggggcaggacaagatcaggtacttcctctatctggaaggccggtggcgctggcgtcccaccaagacgatgaaggcgcacggcttcagcatcgtagccatgggcaaaggaggccctggcctagatgagaacggccacccagccgccagcgtcgaggataagcgccgcgcgctcgagctgaatgctgagtgggacgctgtgcgccttggcttcgaagcccccaggaagatcgaccggcccacgttcccagaaggcagcgtgggcgacgcatatgtgcgcgtgatggccctgcgcgcagcggagcgcgcccagaaggggatcgtttggacctccgagcagaagagtcgggacgattggccgcgcgcatggaagtggctcgggccggagttcggcgactgcgaccccaagacgatccagcccgagcacttcctcaggatcgacaagcgtaccggccaacctgccggcttgatggtcaagatcgaaaacacagtttccgtgaccgagcggcaccggaccatcaaggtctggcgcgctctctggcgtcggatgcaggccctaaaatacgtcggcaaggacgccgaggacccctctaaggccgtaacgaactcggcaccggacccgcgggatgctgcatggcagcgccgagaagtcatgatcctcgttcagcgagcctggcgcatgggctattacgggctggccgcctgtattgcggtcgggtgggactcgatgtgctctcccgtggatgtgcgcagcctgacgccagcccaggcccgcagcgacgccaacggggtctggttcgagctcggtcgcgccaagaccggccgggccgccgcggcaaccctatcaccgtggtccctggcgctgctgacggcatacgtgaagaagctcggggtggacatcgcgccgaacgctccgatctttaggaaccgctccggcgcgccgtattccaaggataccctgggagacgatttccgggatgtccgggaggcgatcgacaagaccgatcggcggcagctcgccgacatgcgccggtccggcgcgatcgagggcgacgccggcggcggctccgtcaccgaccaggccaacaagatggccaacagcgtcgacacgaacaagcgcctgcggaagacctacaacccggtgaatgtcgccgccgtgcggcggttcgatgaggcgcgcctgatcggcgcccgcgccctagaacaaaaaccggacgaaagtgtcagggagccggtcctcctgacacttttccgcaacgcagcgaaaaagtcggatacagcaaatgattga

SEQ ID NO: 5702 - DNA, 74 bp, BradyrhizobiumColbertium
gcgggagtagctcagttggttagagcgccggcctgtcacgccggaggtcgcgggttcgagccccgtctctcgcg

SEQ ID NO: 5703 - DNA, 204 bp, BradyrhizobiumColbertium
atgaaccactcaattcactctgctgatcgtgcgacccacctgaagatcgtggtggtggcgctggtggcgggtaccctcgtggccggcttcggtatcgcagcccgcacccatgccgactacagccagacggcccagtccacccaggtaatcaaggccggaaagccggtggtggtgaccagcgcggcgacctcggaaattcgctga

SEQ ID NO: 5704 - DNA, 132 bp, BradyrhizobiumColbertium
atgcgcattcgtctccgcctgggccgccgcgtcacgctgttcgcccgaaccgtccgcaagatgcggctgatatcggaccagcgcctgaagcagcgggtttcggtcgcacgacatccgccaagcaggagatga

SEQ ID NO: 5705 - DNA, 231 bp, BradyrhizobiumColbertium
gtgacggtcaccgacggcaggttctgcgcgccactctgcgccgatgattgtgcgagcgatgcctccggcatcaagacccaagcggatgcggtcgccagcacggccgaccgcagcattccaagactgttcaacgcgccaccccaaagctgcatctatcgtcatgccgtctgtcccgaaacggcatgcgcttgcgatgacgcttatgtgagcgcgcgcgaattccctaattga

SEQ ID NO: 5706 - DNA, 1383 bp, BradyrhizobiumColbertium
gtgctggcgtcggcctcaaggacggacacgcggggcatcaacttcctgccctatcagggaacagtgaccaacgcgccgttcggcaagattccgaccagcttcttcgtcggcgatcccgccgtcgacaagttcacgcgcgaacaggagatgctcggctaccagttcgagcgcaatctcaccgacgacctcacgttccgacagaatgcgcggtttgcgcacatcgacttgacgtaccgcggctacatcggaaacggctgggacaacgtcaatacggcgacgatgggccgatacaattggtatgcgaagaacaccgcgaaccaggccaatctcgacaaccagctggagtatcgcttcaacacggggccggtgcggcacacgatgctgttcggggtcgatctcaaaggttatcagatcgacgattaccagagcttcaatttcggaaccgtcccttcgatcaatgtcttcaatccggtttacggcatcaatgtcccgctcacgggcgctccgttccggaacttcctgatcacgcagaaacaggcgggcacctacctccaggaccagatgaagctcggcaatttcacgctggtgctgagcgggcgcaatgactgggtcgagaccacgcaggaagcccgggacacgggggcagcgctggccaataacaatgatagccggttcagcggccgggcaggcttgatctacaatttcgacaacggcatcgcgccctatgtctcctatgcaaccagctacaatccaatcatcggcctcaacgcccaaaaccagctgttccggccggagaccggccagcaggccgagattggtgtcaaggtcgctcccaggggatttgacggctacttcacagcttcggtgttcgacttgaagcgccagaacgtgccgaccaccgacccggtgatcaccaccctgcagaaccagaccggcgaagtgacctcgcgcggcgtcgaacttgaagccgtggccaatgcgacgagggagctaaagtttattggcgccttcacggcctatcatctcttcaccagcaaggatctcaatccggcgctggtcggcgtcttgccgaccaacacgcctcagctccttgtctcaggctgggccgactacaccttcaaggacggaccgctcgcagggttcggcttcggcggtggcgtccgctacgtcggctcgtcctgggccgacaccgcgaacacgctcgaggttcctgctgtcgtgctcggcgatctcgcgcttcattacgaatggcagaactggcgcacggcgctgaatgtgatcaacctgaccgacaaggtctatgtcgcgagctgcgcgtcggcttcgtcctgtttctacggcgaccgccggcgcgtcaccgccagcgtttcctacaagtggtga

SEQ ID NO: 5707 - DNA, 366 bp, BradyrhizobiumColbertium
atgagcggcattcttcagaactatcttccactcgtcgtctttataggagtagcgggcctgattggtctggtgctgctgatcgcgcccttcatcgttgcgttccagcagccggacccggaaaaactgtcggcgtatgagtgcggtttcaacgccttcgacgatgcccgtatgaagttcgacgtccgtttttatctggtcgccatcctcttcatcatcttcgatctcgaagtggcgttcctgttcccgtgggcggtggccttcggcaagctcggcgcgaccggcttctggtccatggtcgtgttcctcgccgtgctgacggtcgggttcgcctatgaatggaagaagggagcactcgaatgggattga

SEQ ID NO: 5708 - DNA, 588 bp, BradyrhizobiumColbertium
atgggattgaaccccgtcgcatccacaggtccggtcgtcgcgccggccccaaagggcatcctggacccgtcgaccggcaagccggtcggggccaatgacccgttcttcctcgaggtcaattccgagctgtccgacaagggcttcttcgtggcagcgaccgacgacctcatcacctgggcgcgcaccggctccttgatgtggatgaccttcggtctcgcctgctgcgccgtcgagatgatgcaggtgtccatgccgcgttacgacgtcgagcgcttcggctttgccccgcgcgcctcgccgcgccagtccgacgtgatgatcgtcgcgggaaccctgaccaacaagatggcgccggcgctgcgcaaggtctatgaccagatgcccgagccgcgctacgtgatctcgatgggctcctgcgccaacggcggcggctactatcactattcctactcggtcgtgcgcggctgcgaccgcatcgtgccgatcgacatctacgtgccgggctgtccccccacggcggaagcgctgctctacggcgtgctgctgctgcagaagaagatccgccgcaccggcaccatcgaacgctaa

SEQ ID NO: 5709 - DNA, 612 bp, BradyrhizobiumColbertium
atggacgacgccaagctcgacgccctggggcagacgatcgttagcgcgcttccgggcgccgccaccggtcactcggtggcctttaaccagctgaccgtggatatcgagaccagcaagatcgtcgaggtggtcaaataccttcgcgatgatccgaactgccgtttcgtcaacatcaccgacatcacggcggtggattaccccgatcgcgagaagcgtttcgacgtgatctaccacttcctgtcgccgaccctgaatgcgcggatccggctcaaggcgcaagccgacgagaccacgcaggtgccctcgctgatcgacgtgttccccggcgcggattggttcgagcgtgaggcctacgacctctacggcgtattcttcgtcggtcatcccgatatgcgccgcatcctcaccgattacggtttcgaggggcatccgctgcgcaaggacttcccgctcaccggcttcgtcgaggttcgctacgacgaccaggagaagcgcgtggtgtacgagcccgtccgcctcaatcaggaattccgcaagttcgatttcctctcgccgtgggaaggagcggactacccgctgcccggggatgaaaaagcggggccgaagagctga

SEQ ID NO: 5710 - DNA, 1197 bp, BradyrhizobiumColbertium
atgaacgagcaaccgcagaacctgcgcaacttcaccatcaacttcggcccgcagcatccggcggcacacggtgtgctgcggctcgtgctggagctcgacggtgaggtggtcgagcgcgtcgacccgcatatcggcctgcttcaccgcggcaccgagaagctgatcgagcagaagacctatcttcaggcgatcccgtacttcgaccggctcgactacgtcgcgccgatgaaccaggagcatgccttctgcctcgcggccgagaggctgctcggcatcgaggtaccgcgccgtggccagctgatccgcatgctgtattgcgagatcggccgcatcctctcgcacctgctcaacgtcaccacgcaggcgatggacgtcggcgcgctgaccccgccgctgtggggcttcgaagagcgcgagaagctgatggtattctacgagcgcgcctcgggcagccgcatgcacgcagctttcttccgcgtcggcggcgtgcatcaggacctgccgcagaagctggtcgacgacatcgaggcttggtgcgatcccttcctcaaggtggtcgacgatctcgaccggctgctcaccgccaaccgcatcttcaagcagcgcaacgtcgatatcggtgtggtctcgctcaaggaagcctgggagtggggcttctcgggcgtcatggtgcgcggctcgggcgcggcctgggacctgcgcaagtcgcagccctacgaatgctatgccgagatggatttcgacattccgatcggcaagaacggcgactgctacgaccgctatctgatccgcatggaagagatgcgccagtccgtgcgcatcatgaagcagtgcatccagaagctgaatgagcccgacgggaaaggcccggtcgtcgtcgccgacaacaaggtcgcgccgccgcgtcgtggcgagatgaagcgctcgatggaagcgctgatccatcatttcaagctctacaccgaaggcgtccacgtgccggccggcgaagtctatgccgcggtcgaggcgcccaagggcgagttcggcgtctatctcgtcgccgacggcaccaacaagccctacaagtgcaagatccgcgcgccgggctttgcgcatctccaggccatgcatcacatctgccgcggccatctgctcgccgacgtctcggcgatcctcggctcgctcgacatcgtgttcggagaggtcgatcggtga

SEQ ID NO: 5711 - DNA, 561 bp, BradyrhizobiumColbertium
ttggcgctggtgacgggatcgaagatctcctctcacttctcgcacatgggctacatcgcttgtgcgaatttgctgcgcaggacgctgcccgagcgcaacatcgcgatcaggctcaatcccgacgcggtgtttgaatttccctacggtgacggatattggagcaagctgctcaaccgctcctatcactacgaggacgaactagagctgctgttcgccgactccgtcgacgtcgattacacgctgctcgattgcggtgccaattacggctactggtcggtgctggtatcgagcaagccgttcggcgcgcacaaggcgatcgcgatcgaaccgtcggggcagaattatccgaagctcgccaacaatgcgcgggtcaataatgaccgcttcgagacgatgaagtgcgccatcggctcggcccgcggcaccgcgcgcctgtcgggcaccaagcacgaggcttcagcatcgctggcgatccgtccgctggcggcgaggaggtgccggtcatcgcgctcgacgacctcatcgatgacgggaagattgcgaccagtggcaagtacctga

SEQ ID NO: 5712 - DNA, 246 bp, BradyrhizobiumColbertium
atgtgcgaggagcacggcagcgaccgctcacatgcggtgtcgcgctacatcctggaacagaccccgctgaagctgatcgtgttcgatccgcgcagcaggcggatggaaaccgtgaccgagctgtcgatcctcgaccgcatcaaggtctcgacccacgtcggctacaacgttttcggcaccgcaagcgcgttctggcaggacaggatcgatgccctgaacgcgaaaaccgcgcgccgcatgcagtga

SEQ ID NO: 5713 - DNA, 612 bp, BradyrhizobiumColbertium
atgtccgttcgccgattagcaccgaaggaagtccagcccgcgagcttcgcgttcacggaggagaaccttgcattcgccaagcagcagatcgcgaaatatccggccggccgccaggcttccgccgtcatcgcgatcctctggcgggcgcaggagcagaacgagggctgggtgtcggaagccgccatccgcgtcatcgccgacatgctcgacatgccctatatccgcgtgctggaagttgcgaccttctacacgatgttccagcttgctcccgtcggcaagaaggcccatgtccaggtctgcggcaccacgccgtgccgcctgcgcggcgccgaggatctgatccacgtctgcgagaaccgtatccatcacgagcccttccatctgtccaaggacggcaatttcagctgggaagaggtggagtgcctgggtgcctgcgtgaacgcgccgatggtgctgatcggcaaggatacctacgaggatctgaccaaggaaagcttcggcaaggtgctcgacggttttgcttcgggcaatccgccgaagcccggtccgcagaatggccgccagttctcggcaccgatcaccggaccgaccacgctgaaggagaccacctga

SEQ ID NO: 5714 - DNA, 165 bp, BradyrhizobiumColbertium
atgaagaagtggggatttgtcgcgatgcacgccgtcgtggcggccacgttcatgttcctgctgcagcgcttcttcatgaacgcatcgcaggagaccagtctgctctgggcgctgttcttcgccgtctgcgccgccggacttgcctacaagcagtccattcgttga

SEQ ID NO: 5715 - DNA, 1326 bp, BradyrhizobiumColbertium
atgctcgaggacaaggaccgcatcttcaagaacctctacggcctccacgattgggggctcgagggcgcgcggcgccgcggcgcctgggacggcaccaagaacatcatcgacaagggccgcgactggatcatcaacgagatgaaggcctcagggctccgcggccgcggcggcgccggcttcccgactggtctgaaatggtccttcatgccgaaggagtccaccgacggtcgtcccagctatctcgtcgtcaacgccgacgagtccgagcccggcacctgcaaggaccgcgagatcttgcggcacgatccgcatctgctggtcgagggctgcctgatcgccagcttcgcgatgaatgcgcatgcctgctacatctatgttctcggcgagttcatccgcgagcgcgagcgccttcaggccgcgattgaccaggcctatgaggccaagctgatcggcaaggacaacgtcaacggctggccgttcgacctctacgtcgcccacggcgccggcgcctatatctgcggcgaggagaccgcactgctcgaaagcctcgaaggcaagaagggccagccgcgcctcaagccgccgttcccggccaatgtcggcctgttcggctgcccgaccacggtcaacaacgtcgagtcgattgcggttgcccctgacatcctgcgtcgtggcgcggcttggttcgccggcatcggccgtccgaacaatgtcggcaccaagctgttctgcatctccggccatgtcgagcgtccgtgcaacgtcgaagaagccatgggcattccgttccgcgagctggtcgagaagcattgcggcggcatccgcggcggctgggacaacctcaaggcggtgatccccggcggctcgtcggtgcgcatggtgccggccgagcagatcatcgacacgccgatggatttcgactccttgagcaagctgcgctcgggcctcggcaccgcggccgtgatcgtgatggacaagtccaccgacctgatccgcgccatcgcccgcatctcctatttctacaagcacgagagctgcggccagtgcacgccttgccgcgaaggcaccggctggatgtggcgcgtcctcacccgcatggccgaaggccgcgcccacaagcgcgagatcgacatgctgctcgaggtgaccaagcagatcgaaggccacacgatctgtgcgctgggcgatgcggcggcctggccgatccagggcctgatcacgcatttccgccacgagatcgaagcgcgcatcgaccagtattcgcacagggccgatgtcgacgatatcggcgtccgcgatcccgtgaacatggtcgcggcggagtaa

SEQ ID NO: 5716 - DNA, 2076 bp, BradyrhizobiumColbertium
atgaccaagctcatcatcgacggcaaagaaatcgatgtccctgccgaatacacgttgctccaggcgtgcgaggcggccggcgccgagattccgcgcttctgctatcacgagcggctgtcgatcgccggtaattgccggatgtgcctcgtcgaggtgaagggcggcccgaagccggtcgcgagctgcgcctggggcgtgcgcgactgccgtccggggccaaagggcgagccgccggagatctccacgcgttcgccgatggtgaagaaggcacgcgaaggcgtgatggaattccttctcatcaaccatccgctggactgtccgatctgcgaccagggcggcgagtgcgacctgcaggaccaggcgatgggctatggtgtcgacaccagccgcttcgcggagaacaagcgcgcggtcgaggacaaatatctcggcgcgctggtcaagacctccatgaaccgctgcatccagtgcacgcgctgcgtccgcttctcggcggaagtcgccggcgcccccgagatgggtgcgatcggccgcggcgaggacatggagatcaccacctatctcgagcacgcgctgtcctcggagttgcagggcaacctcgtcgacatctgcccggtcggcgcgctgacctcgaagccttatgcatttgcggcgcgcccgtgggagctcggcaagacccagtcgatcgacgtcatggacggcctgggatcagcgatccgcgtcgacacccgtggccgcgaggtgatgcgcatcctgccgcgtatcaacgaggccgtgaacgaggagtggatctccgacaagacccgtcacgtcgtcgacggcctgcgcacccagcgcctcgacaggccctatatccgcgaggccggcaagctgcgcgcggcgacctggcccgaagctttcgccgcaatcgccgccaaggcggcgcgcaccgacggcaagcgcatcggtgccatcgccggcgacctcgccggcgtcgaggagatgttcgcgctgaaggatctgctcgccaaatacggctcgggcaatttggcggtgcagggcggcgatgccttcgatcccgcgctcggccgcggctcctacatcttcaatccgacactagcaggcgtcgagcaggccgatgcgctgctcatcatcggcgccaatccgcggaaagaggcggcggtgttcaacgcccgcatccgcaagcgttggcgcaccggcggcttcaaggtcggcgtgatcggcgccaggcccaacctgacctacgattacgatcacctgggcgcgggcaccgatacgctgggtgagctcgcggccggcaagcactctttcatggacgtgctgaagaacgccaagaatccgatcatcatggtcggcgcgggcgcggctgcccgccacgatggcgccgccattctcgccgccgctgccaagctcgcgctcgacgtcggcgcggtcaaggacggctggaacggctttggcgtgctgcatgagaccgcctcacgcgtcggcgcgctcgacatcggctttgctgcgaccggcggcgggttgaacgccgcgcagatgacgacgttcggcacgctggatctcttgttcctgctcggggccgatgagatcaaggcgccggacggcaccttcgtcgtctatatcggcacccacggcgatcgcggcgcgcatcgcgccgacgtgatcctgccggccgcggcctacaccgagaagtccgctatctacgtcaatacggagggccgcgtgcagatgaccggccgcgccgcgttcccgccgggcgaagcccgcgaggactgggcgatcatccgcgcgctgtccgaggcgctcggcaggaagctcggctacgactcgctcgctcagctgcgccaggcgctcttcaaggcggtgccgcatctgatccgtctcgaccagatcgaggccggctccgccgaccagatcaagaagctggcggggaagggcggcacgccggagaaggcgccgttcaagcccctgatcgaggacttctacctgaccaatccagtcgcgcgtgcatccgccgtcatggcggagtgctcgcgcctcgcctccgggcacatgctgaccgcagcggagtga

SEQ ID NO: 5717 - DNA, 1068 bp, BradyrhizobiumColbertium
atggaatttttcgaaagcgcattctggaccgggttcctctggccgctgatcatcatggtcgcgcagagcgtcctggtgctcgtcgtccttttggtcgcgatcgcctacatcctgcttgccgaccgcaagatctgggcggcggtgcagatccgccgcggcccgaacgtggtcggtccctggggcctgctgcagtccttcgcggacctgctcaaattcgtgctgaaggagccgatcatcccggcgggggccaacaagggcgtgttcctgctggcgccgctggtgtcgtgcgtgctcgcgctggccgcctgggcggtgatcccgaccaatctcggctgggtgatcgccgacatcaatgtcggcatcctcttcatcttcgcgatctcgtcgctgtcgatctacggcatcatcatggccggctggtcgtcgaactcgaaatacccgttcctggccgcgctgcgctcggcggcgcagatggtgtcctacgaggtctcgatcggcttcgtcatcatcaccgtgctgctctgcgccggcacgctgaacctcaccgccgtggtcgaggcccagcacacccgtggccttgccagcctgatcgggctgccgcagttgacgatcctgaactggtacgtctggccgctgtttccgatgttcgtggtgttctacgtctcggcgctggcggaaaccaaccgtccgcccttcgacctcgtcgaagcggaatccgaactcgtcgccggcttcatggtcgaatacggctcgactccctacctgctgttcatgctcggcgagtatgtcgcgatcgtcacgatgtgcgcgatggccaccatcttgttcctcggcggctggctgccgccggtggacctgccgcccttcaactgggtgccggggattatctggttctcgctgaagctgttcttcatgttcttcctgttcgcgatggcgaaggcgatcgtgccccgctaccgctacgatcaactgatgcgcctcggctggaaggtgttcctgccgctgtcgctcgcgatggtgatcgtggtggccggcgtgctgcaattcgccggcatcgcgccgaagtga

SEQ ID NO: 5718 - DNA, 495 bp, BradyrhizobiumColbertium
atgggtatcaatatcaacgccactgcacgctcgctcctgctgtcggaattcgtctcggcgtttttcctcgccatgcgctacttcttccagccgaagccgacgctgaactatccgttcgagaagggcccgatctcgccgcgcttccgcggcgagcacgcgctgcgccgctatccgaacggcgaagagcgctgcatcgcctgcaagctgtgcgaagcagtgtgcccggcgcaggccattaccatcgaggccggcccgcgccgcaacgacggcacccgccgcaccgtgcgctacgacatcgacatggtgaagtgcatctattgcggcctctgccaggaggcctgcccggtcgatgccatcgtcgagggcccgaatttcgagttcgcgaccgagacccgcgaggagctctattatgacaaggccaagctgctcgccaacggcgaccgctgggaacgcgagatcgcgaaagcgatcgagctcgacgcgccgtaccggtga

SEQ ID NO: 5719 - DNA, 639 bp, BradyrhizobiumColbertium
atgatccttcccgcgctgttcttctatctcttcgccggcgtctgcgtcgcctcggcggtgatggtgattgtctcgcgcaatcccgtgcactccgtgctgtacctgatcctggccttcgtcaacgcctccggcctgttcgtgctgatgggcgccgagttcctcggcatgatgctgatcgtcgtctatgtcggcgcggtcgccgtgttgttcctgttcgtgatcatgatgctcgacgtcgacttcctccagctgcgcgaaggattcatcgagtacctgccggtcggcctcgtgatcggcggcatcttcctgttcgaactgctgctcactgtcggattctgggtcatcaatcccggcgtctccaagaccatcacggcggcgatcccggccgatgtcagcaacaccgaggcgctcggcctcgtgctctatacgaagtacatccactacttccagctctcgggcatggtgctgctggttgccatgatcggcgccatcgtgctgacgctgcgccacaaggccagcgtgaagcggcaggacatcaacgttcagaacgcgcgcacgcccgaaatggcgatggcgatgcgcaaggtggcgccggggcaggggctctcggacgccgatgcggcggagtgggtgaaatga

SEQ ID NO: 5720 - DNA, 309 bp, BradyrhizobiumColbertium
atgacgatcgggctcggacactacctggcggtcggcgcgatcctgttcacgctcggcattctcggcatcttcctgaaccgcaagaacatcatcgtcatcttgatgtcgatcgagctgatcctgctcgcggtcaacatcaacctcgtggcgttctcgaccttcctcggcgacattgtcggccaggtcttcgcgctgttggtgctcaccgtcgcggcggcggaagccgcgatcggtctcgccatcctggtggtctatttccgcaaccgcggttcgatcgcggttgaggacgtcaatctgatgaagggctga

SEQ ID NO: 5721 - DNA, 2103 bp, BradyrhizobiumColbertium
atggttcaggcaatcgttttcctgcctctgctgggcgccattctggccggcctgatcgcgctgttcggggcgcatgcccgcaacccctcgggcgacgaggtcgagcatcacggcgaccacgggcatgcgcctgcccatgcatccgatacgatcaatcaggacgcctcggtcatccacgagacccatcacgagcccggcgacgggcatgacgatcacggtcatggcccggccgagccgcccgcggcgggctcgcgcggcgccgagctgatcacaacgaccctgctgttcgtctcggccgcgctatcctggatgacgctggtcgatgtgggcttcatgcaccacgactacaggatccagctgctgccctggatcttctccggcgacctccaggtctggtggacgctccgcgtcgacacgctcaccgccgtgatgctggtggtggtcacgaccgtgtcctcgctcgtgcacctctattccattggctacatggacgaggacccgaaccggcctcgcttcttcggctatctctcgctgttcaccttcgccatgctgatgctggtgacggcggacaacctcgtgcagctgttcttcggctgggaaggcgtgggtctggccagctacctgctgatcggcttctggtaccagaagccgtcggcgaacgccgccgcgatcaaggccttcgtggtcaaccgcgtcggcgatttcggcttcgcgctcggcatcttcgcggtctttatgcttgtcggctcgaccgatttcgagacgatcttcaatgccgcccccggcctcaccggcaagaccatcaacttcctgggctggcatgccgatgcgctgaccctgacctgcctgctgctgttcatgggcgcgatgggcaagtccgcgcagttcctgctgcacacctggttgccggacgcgatggagggtccgaccccggtgtcggcgctgatccacgccgcgaccatggtcaccgccggcgtcttcatggtggcgcgcctgtcgccgctgttcgagctcgcgccgaacgcgcaggccgtcgtgatgttcttcggcgccaccacggcgttcttcgcggcgaccatcggcctcgtccagaacgacatcaagcgcatcgtcgcctactcgacctgctcgcaactcggctacatgttcgtggcgatgggggcaggggcctattcggtcggcatgttccacctgttcacgcacgccttcttcaaggcgctgctgttcctgggctccggctcggtgatctacgcgatgcaccacgagcaggacatccgcaacatgggcggcctctggaagaagatcccctacacctatgcggtgatggtggtcggcaccctggcgctgaccggcttcccgctcacagccggctatttctccaaggacgcgatcatcgaggcggcctatgcctcgcacaatccgttcgcggtgtacggcttcctcatgacgatcgtcgccgccggcctgacctcgttctactcctggcgcctgatcttcaagaccttccacggcgagccgcatgacgagcatcactacgaggccgcgcacgaggctccgctctggatgctgatcccgctcggcgtgctcgcggtcggctcgttcgtcgcagggctgccgttcaaggagctgttcgccggtcacggcatcgaggagttcttccgcgagtccttgaagatgaacccgcacatcatcgaggagatgcaccacatcccgcagaccatcgccttcctgccgacggtcatgatggtgctgggcttcctcgtctcgtacctgttctacatccgccgtccctacctgccggtcgagctcgcgaacacgcagccgatgctgtaccagttcctgctcaacaaatggtacttcgacgagctctacgacatcatcttcgtccgtccggcgaagtggctcggataccagctctggaagaaaggcgacggcttcatcatcgacggcctcggccccgacggcgtctcggcgcgcgtgcttgatgtcacccgcaacgtcgtcaagatccagaccggctatctctatcactacgcattcgccatgctgatcggcgccgccgggctgatcacctggttcatgttcggctttggaggccagtaa

SEQ ID NO: 5722 - DNA, 1509 bp, BradyrhizobiumColbertium
atgacaacctggcccatcctttcggtcacgacgttcctgccgctggtcggcgcgctgatcgtctatctcagccgcggcgatgacgaggcagccaagcgcaattcgcgctggatcgcgctctggaccacgctgatcaccttcgcggtgtcggtgatcctggtcatgcgcttcgatcccgccaacccggacttccagttcgtcgagaaggcgaactggctcgccaccggcatcacctaccacatgggcgtcgacggcatctcgctgccgctggtgatcctgaccaccgcagtgatgccgttctgcatcatcgcgagctggaaggcgatcaccaaccgcgtccgcgaatacatgatggcgttcctgatcctggaaacgctgatgatcggcaccttctcggcgctcgacctcgtgctgttctacctgttcttcgagggcggcctgatcccgatgttcctcatcatcggcgtctggggcggtccgcgccgggtctacgcgtcgttcaagttcttcctctacacgctgctcggatcggtcctgatgctgctcgccatcatggcgctgtactggaacggcggcaccaccgatatcccgaccctgatgcacaccgccgtgccgcgcggtttgcaaacctgggcgtggctcgcgttcttcgcctcgtttgcggtgaagatgccgatgtggccggtgcacacctggctgcccgacgcgcacgtcgaagcgccgaccgcgggctccgtggtcctggccgcgatcctcctgaagatgggcggctacggcttcctgcgcttctcgctgccgatgttccccctggcctcgcacgacttcgcgccgctggtgttcacgctgtcggccatcgccatcatctacacctcgctggtggccctgatgcaggaggacatgaagaagctgatcgcttactcgtccgtggcgcatatgggcttcgtcaccatgggcatcttcgccggcaccatgcagggtgtcgccggcggcgtcttccagatgatctcgcacggcatcgtctccggcgcgctgttcctctgcgtcggcgttgtctacgaccgcctgcatacccgcgagatcgcggcctatggcggcctcgtcaaccggatgccgctctatgccctgaccttcatggttttcaccatggccaatgtcggtctgcccggcacgagcggattcgtcggcgagttcatgacgctgctcggcaccttcaaggtctcgatcccgaccgcgttcttcgccagcttcggcgtgatcctgtcggcggcctatgcgctgtggctctaccgcaaggtcgtgttcggcgcgttggtcaagccgtcgttggcgaacatgaaggatctcaccttccgggagtgcctgacgctgttcccgatgatcgcgctgacgatcctgtttggcgtctacccgaagccggtgctcgacatgtcggccgcctcggtccagcaactcgtcaacaactacaactccgccgtgacggccgtgaaggccgccgcactgctccagtaa

SEQ ID NO: 5723 - DNA, 1437 bp, BradyrhizobiumColbertium
atgaactttgtgattgcaggttatcaactggcgccggtgctgcccgagctcgtgctcgcggtcggcgcgatggcgcttctgatgctcggagcctttcgcgggcaggggtcgaccagcaccgtcacctctctggcggtggtgctcctgatcgtggtcggcgcgctcgtctacatgcagcccgcgggcaagcaggtcacattcggcggcagcttcatcgtcgacgacttcgcccgcttcatgaagatcctggccctgatcggctcggcggtgacgctggtgctgtcgaccgagttcctgtccgacccctcgcgccgcatcttcgaatatgccatcctggtgctgctctcgacgctcggcatgatggtgctgatctcggccggcgacctgatctcgctctatctcggcctcgaactgatgtcgctcgcgctctacgtcgtggcggcctcgaaccgtgacaatgccaagtcgaccgaagccggcctgaagtatttcgtgctcggcgcgctgtcttcgggcatgctgctctacggagcctcgctggtctatggcttcaccggcacggtcagcttcaccgggattgccgcggccgcgacggtctcgaatgtcggcctggtgttcggcctcgtcttcctgctcgtcggcctctgcttcaaggtctcggccgtgccgttccacatgtggacgccggacgtctatgagggcgcgccgaccccggtcaccgcctttttcgcgtccgcgccgaaggtggccgcgctcgccgtcttcacccgcgtcacgctgaccgcattcccaggcatcgtctcgcaatggcagcagatcctggtgttcgtctcgatcgcctcgatggcgctcggctccttcgccgcgatcggccagaccaacatcaagcgcctgatggcgtactcctcgatcggccacatgggctttgccctcgtcggcctcgcctccggcacggtcgagggcgcgcagggcgtgctgatgtacatcgtgatctatgtcgcgatgacgctcggctcgttcgccatcatcctcgccatgaagcgcaacggccaagccgtggagcagatcaccgatttcgccggcctgtcgcggaccaatccgctgctcgccttcatgttcgcgatgctgctgttctcgctcgccggcattccgccgctcgccggcttcttcgccaaatggtacgtcttcgtcgcggccatcaaggcgaacctgttcacgctcgccgtcatcggcgtgctgaccagcgtggtgggtgcttactactacctcgccatcgtcaagacgatgtacttcgacgagccggccggccaggtcgatccggtgcgcatcgaggtgcggacggtgctggcggtcgcgggcctgttcaacctgctgttcgcgttgtttgcgggtcccgtggtgagcgtcgcctcggccgcggcaaagtcgctgttctag

SEQ ID NO: 5724 - DNA, 807 bp, BradyrhizobiumColbertium
atggctttcgcgctcggtcctcgcgcattgtccgcgggctacaagctcgcggcgttcgatcggaccggctcgaccaataccgaggcgatcgagcgcgcccgcgccggcgaacgcggcccgatgtggttcgtgacatctgagcagaccgccggccgcggccgccgccagcgcgcctggatcgcgccgaggggcaatctcgcagccagcgtcctcgaagtcctggacattgcgcctgcggtcgccgccacgatcggttttgcggcgggtctggcgcaagaggcggcgctggaaaaggtgagcctcgaggccgcattgcggttcggtcctgacaggccccgctacgtcctgaaatggccgaatgatgtgctcgccggcggcaagaagctggtcggcattggcctcgaggccgaggcggtcgggagcggcctcgctgtcgtcgtcggcatcggtaccaacgtggttgccgctcccgagggcacgccgaccccggcggtgtcgctggccgcgctcggcgtgcagatcagcgccgaggagctgttttcggccctctcggatgcctgggtcgagttccgcggcatctgggacaatggccgcggcttcgccgagatccgcaagctctggctggagcgcgctgccggcctcggtgagaaggtctcgatccacacgggaaccatgacgctggaaggcgtttttgacactatcgacgacaccggctgcctgatcgttcgcacccccgaaggccgccttgtgccggtggctgcgggcgaggtgttcttcggtcccgttgcctccgtgggagctgcgtga

SEQ ID NO: 5725 - DNA, 1671 bp, BradyrhizobiumColbertium
atggcaaggccggaagaattggtgtttgcgccgctcggcggcgtcggcgagatcggcatgaacctgtcgatctacggcctgggcaaccgtcaccagcgcgcctggctcgcggtcgatctcggcgtgtccttcggcgacgaggagcatctgccgggcatcgatctgatcatgccggacatcgccttcctggagaaggagcgcaagaacttgatgggtctggtgttgacccatgcccatgaggaccatttcggcgccatcatcgacctctggcccaagctgaaatgcccgatctacgccaccaagttcagcgctgcgctgttcgaggccaaatgcgctgccgagcgcaacgcgcccgagatcccggtcaccgtggtgccatcaggcggtcgcgtcgatgtcggcccgttcaacgtcgagttcattcccgtcgcgcattcgattcccgaagcgcatgcactggcgatccacaccgatgccggcatcgtgttgcacaccggcgactggaagatcgaccccaccccgaccctggggcccccgacggacgagaagcggctgcgcgaactgggcgagcagggtgtgctcgccctgatcggcgattccaccaatgccgtgcgcgacggccgctcgccatcggaagccgacgtcgcccggaccatcatcgagctcgtgaagacggccaaggggcgggtcgcggtgacgaccttcgcctccaacgtcgcccgcatcaaggccgtggccgacgctgcgaaagctgccgaccgcgaggtcgtcgtggtcgggcgcgccatggagcgtgtggtgcaggtcgcgcgcgagaccggctatctcgagaacgtgcagaatttccgctcgcccgaggtctacggccatcttccgcaggacaaggtgctggcgctgtgcaccggcagccagggcgagccgcgcgcggcgctggcccgcatcgccaacgacgaccatcccgagatcacgctcaaccgcggcgacagcgtcatcttttcctcgcgcaccattccgggcaacgagaaggccgtcagctcgatcgtcaacaatctggtgctccagggcgtcgagatcatcaccgaccgcgacgccctggtccacgtctccggccatccccgccgcgaggaattgcgcgacctgatttcctgggtgaagccgcagctcctgattccggtccatggcgaggccctgcacctgcacgagcacgcaaagctggcgcgcgccgccggcgtgccgcgcgtgctggtgtgccgcaacggcgacctcgtcaagctcggtcccggtgatcccggcatcgtcggcgaggtgccttccggccgtctctacaaggatggcacgattttggaggactccaagtcccgcgccgtggtcgagcggcgccgcatggctttttccggctgcgccttcgtcgccatcgccatgaccgggcagggcgagctggccgacgagcccgaagtcgatctggtcggcatccccgagaagaacaggtcgggcgagactttcgacgacctcgtctttgacgccgtgatgtccacgatcgaggggctgccaagggcgcgacggcgggatccggatgctctggccgagtcggtgcgacgtgcggtccgggccgtgatcaacgaacattggggcaagaagcccccctgtctggtacatgtactgacagtgtaa

SEQ ID NO: 5726 - DNA, 405 bp, BradyrhizobiumColbertium
atgctgggccggctcaaccatgtcgcgatcgcaaccagggatgccgtcaaggctgcgaagatctatggcgcggcgttcggggccgagatttcggaggccgtcccgctgcccgagcacggcgtcaccaccgtgttcgcgaccttgcccaacaccaagatcgagttcatcgagccgcttggtgagtcctcgccgatcgcgaagttcctcgagcgcaatgcggacggtggcatccaccatgtctgctacgaggtcgtggacatcatcgcatcgcgtgacaccttggtgaaggagggcgcgcgggtgctcggcgacggcgtgccgaagatcggcgcccacggcaagccggtgctgttcctgcacccgaaggacttttccggcgcgctggtcgagatcgagcaggcgtaa

SEQ ID NO: 5727 - DNA, 276 bp, BradyrhizobiumColbertium
atggccatccagatctccaccgcgctcgcgatctacttcgtcatctggtgggtcgcgctgttcgtaacgctgccgttcggcgtgcgcagccagcacgaagatggcgtcggcgcacccgggaccgatcctggcgcgccgatcctgacgcggatgggccgcaagctgatttggaccacgatcatctcggcgatcatctacggggtcggcgtcgcggcctatcatgccggctacctctcgatcgagcgcctgtcgaaattgatgggaatgccgttctag

SEQ ID NO: 5728 - DNA, 354 bp, BradyrhizobiumColbertium
atgacttttcagcgtatcgtggtcgcgcttctggtcctgatcgtcgccggacttggtgccgtcggctatttcgaatggaaaatggccgtgcaggttcgcaccctgaaggccttcgtcgagggctacgtcttcaacgaggccgtgatggcctgcgagcaggcgaagagttcgacgccgttcaaatggaacggcggcaagagcacctcggtgatcggcctgaattcggtcaagaccgacaaatacagcgtctacgccagctacacgctggtggcggacagcgtgtattgtgattacgatcccatcaagagaaaggccgacatcggttccagcttcctggagcgggaaaccttctag

SEQ ID NO: 5729 - DNA, 237 bp, BradyrhizobiumColbertium
atggcatcggaagccgcagcggatatcatcgatctctaccagcgcaaggccttggactggatcgagagtcgcgcccaaagcagtctgttcgaacgagcttggcttgaccgttttcgtgcgctgctgccgcctgccggctcagttctcgatctcggctgcggctcggcggagccgctggcggagtatctgatcgggcttgatcatcccgtcacgggagtcctcttcggccatgattga

SEQ ID NO: 5730 - DNA, 375 bp, BradyrhizobiumColbertium
atgattgatgcgtcccgacggcgtttccccgagcaggaatggatcgtcgcagacatgcgccagcttgcgatgggccggaatttttgcggcatccttgcctgggatagcttctttcacctctgtttcgacgaccagcgccgcatgtttccgatcttccgcgaccatgcaaggcctgaggcggcgctgatgttcacgagcggtccggcccggggcgaggcgatcggcgcgctcggcggcgagccgctctatcatgccagcttggatcccgccgagtatcgatcgctgctcgaccgcaacggattccgcacggtgtcgtacgtgatagaagaccccgattgcggcggtcacaccatctggctggcgcagcgcatttga

SEQ ID NO: 5731 - DNA, 264 bp, BradyrhizobiumColbertium
atgagtattctttggaccatcatcattggctttctcgccggtgtgatcgccaagttcatcatgccgggcgacaatgaaccttccggcttcatcctgacgaccatcctcggcatcgtcggcgcgttcgttgcctcctacctcgggcaagcgctgggctggtatcgtccaggcgaaggggccggtctgatcggtgcggtggtcggcgccatcatcgtgctgtttgtctacggtctcttcgccgggcggcaacgtcgagcgatctag

SEQ ID NO: 5732 - DNA, 432 bp, BradyrhizobiumColbertium
atgactgcccttttggccatgctggccattgcaggatatcagaaccgcgacaaactggctgagctgatgaagggcgcagggggtggcggctcgtccgcaggcggtcagcagccgctcggaggaatgctcggcaatctcggcggcatgctcggagcgggcggaatcggcggcctcctcaacggcgggattggcgagctcctggagcggttcaaccaaaatgggcagggcgaggtcgccgattcatgggtgaagcccgggcctaacaaggacatttcctcccagcagctcaaagaagccgtcggcagcgacgtcctggagaagcttgcacaacagaccgggctttctcaggacgatatcgtcgcacggctgtcccgcgagcttccttccgcaatcgacaaatacacgcctgacgggcgtctgcccgaggcatag

SEQ ID NO: 5733 - DNA, 1287 bp, BradyrhizobiumColbertium
atgaccggggaccgggcaggggattatcggattctacatgaagccgacctgcgggattatctcgcggggattttggagctcaaggcgctgctcggcggcgatccgtcctcctgggagatcacggaggtcggcgacggcaatctcaacctcgtctttatcgtcaagggggcgcgcgccggtatcgccgtgaagcaggcactgccttatgtccggctggtcggcgaaagctggcccttgccgctgtcgcgggcccattacgaatatctcgctctgtcccggcaggccgagctcgcgcccggtctcgtgccgtcgctgctgcatcacaacgaacccttggccctgaccgtgatggagttgctcgagccgcacatcatcatgcgcaaggggctggttgcggcgacgcaatatccgcggttcgtggacgacatcaccaccttcatggcgcagaccttgttcttcacgtccgacctcgcgctgtccgcagccgagaagaagcagggcattgctgcctttgccggcaaccacgcgctgtgcaagatcacagaggacctgatcttcaccgatccttaccgcatcgccgagcagaaccgctggactacgccctatctcgacggcttggccgctgagctgcgcgaagacatggacctgcatattgcggtctcccgcctgaagctgaagttcatggcaagccctgaagcgctgcttcatggcgacctccacaccggctccatcatggtgacggagaacgagacgagggtgatcgaccctgaatttgcgttctacggtccgatgggattcgatgtcggcgccgtgctggcgaacctgctgatggcctactttgcatcaagcggccatgagcgcgcaccgggcgatcgccgtgcgttcgagacgtggctgctggagaccgtcgagcaggtctggaatgagttcgcccgcaagttcctcgatctctggcgcgccggcgcggaaggcgatggctatcctgtctcgctcttcgcgggcgagaagggggcggcacggctggaagccgaacggcaggcctacatgcagcgcctgtttgccgacacggtcggcttcgccgcggccaaggtcatccgccgcatcttcggtctcgcccacaacatcgacttcgagctgatcgaagacccgcaggcgcgcgcgacctgcgaggcgcgggcggtgcggctggcgcgggcaatgatgatggagacgaaggcgtttccggcgatcgctgacgtcgccggcgctgcgcgaaaactgagcgactggatgccggagctgtcctga

SEQ ID NO: 5734 - DNA, 981 bp, BradyrhizobiumColbertium
atgaactgggttgcaaggagctggctcgctctggtgctgacgctgctatcgctctcgaattcgcttggcgaggcatctgcccagcagttcccgccgagccagatcaaaatcgtcgtgcccttcccggccggcggcaccacggacattctcgcgcgtttcatcgcacaacagcttggtgagaagcttggggtaccgaccatcgtggaaaatcgtgctggcgcgtccggtaccatcggctccgagatggttgcaaaatcaccggctgacggcagcgtgctgctcatcgccgccacccaccacgtcattaatccgagtctgtttcgcaagctgccgtatgacacgcaaagcgcattctcgccggtggcgctggtcgcgagggctcccaatgcgctcgtggtctccaaggatttccccgccaagaatgtcgccgaactgatcgcaatggcgaagaaagatcccggcaaactgtcgtttggctcctccggcatcggcggcgccaatcatttgtccggagaactcttcaagcaaatggcaggcatcgacatcgtacacatcccctacaagggagcggcgccggctatgaacgacctgcttggcggccatatcccgatcatgttcgacaccctgccgaccgtgctcccggccgcctcggctggcaacattcgcgtgctcgccgttaccagcatgacgcgcgcggcgtcgcttccggacgtgcccactctcgatgaagctggcgtcaagaatttcgaggcgacggcatggttcggcatgtacatgcccgccgcggacggtagcactgcctactctcggatggtcgaggtcatgggcgatcttttggccagtccgaccatcgctgagaaattcgcaacgcagggagtcactcccggcacattggcgggcacgaatttcagccggttcgtacacgccgagatcaacaaatgggcggccgttgtcaaggcggctaatgtgcctctcgaataa

SEQ ID NO: 5735 - DNA, 453 bp, BradyrhizobiumColbertium
atgaccaccagcttcgacactctttccgttggcgacacgatcgacggtccgaaattcgacgtgtcacgtgaatcgatccgcctgttctgcgatggctcgctcgactacaaccctctgcatctcgacgacgactacatgaggaacaacttcggcaagactaatttcggcggcatcatcatgcacggcatgaacaatttcgggctgatcacccgcatgctgaccgattgggcctacccagccggcgccattcagcgacgcttggagacgcgctggctcaagccggtcaagccgggcgacaccattcaaccggtgggggtggtgaaggcgaagcagacgacgcagaaatcccgctgggtgctgatcgacgtactggtccgcaatcaaagagccgaacacgtcgcggcgggcgaagccatggtcgagtttccgctgtctgattcgatcgcggcctga

SEQ ID NO: 5736 - DNA, 477 bp, BradyrhizobiumColbertium
atgacgcaagcgcccacgttcgagaccgatttctggaaagacgccaacttgcgaaaggtgtgggacgagatcgtgcctggcgaacctcgcaagacgattccgtacaagctgacgttggaagccatccagctctactgccgctcggtcggggaagatcacccgctttacttcgacgaggcttacgccaggaaaaccccgtatggcggcttaatcgccccgccgtcgattcacattctgctgatgttcgcctgcacgccgaacgacgattggatgcgaacgccgggcaccatcaatgccggccagtcctggagctacaacaagccggctcggcctggcgatatgatcaccctgcatgcgcgcgcattggacaagttcatcaagcgcgagcgcctcttcgtcgtccacgacaacgtgttcttcaatcagcatggcgaagtcatctgttctggccgcggacagaccattcgtcccgcctga

SEQ ID NO: 5737 - DNA, 771 bp, BradyrhizobiumColbertium
atgccgaaggagagtgacggctatgtccgcgcgatcgaacgaggttttgccttgattgaggcgctcggtcgatcaccgggccgtcacacgctttcggaagctgcagctcatgcaggactcaaccgcgcgacggcgcgacgcatgctcagtaccctcgtcacgttgaaatattgcgaagccgacggccgttacttccgcctgcggcctcgtgcgttgggtctcggattgtcctatctcaacgcattgccgttctggggctttgctcagcgggcgctcgaagatctgcgcaacgacatcggcgagtcctgcgcgcttgccgtgctcgatgaaagcgacatcgtctacgctctcaggcttccggcgcggcgcattctgtccgccaatctgggcatcggcagccgtcttcccgcgcatctcgtgtcgctcgggcgtgtccttctggcgaaccttcccttggacgagcgagaccgctatctcgcaagcacgccccttaagtcagtcacaccgcgcacgatcacggatgccaagcgtcttgcgcatgaactgcaattgacgcgagagcgaggctacgcttgggtcgatggcgaactcgatccggccatttgcggcattgccgttccaatccgcgatcaagccggcagcgtcgttgccgcggtcagcatcaacttgatttccggcacgctcacggaggcagccgcaaagaagcgctatctcgtgcggcttcagaagaccgcccaggatattcgaacccaatcgctctcgccgtcgtga

SEQ ID NO: 5738 - DNA, 372 bp, BradyrhizobiumColbertium
ttgaagccggcaggtgcagtgcagcttcatctgggagttcacggcgccgtcgagctgcgccgcctggggttggcggagtttcgcagcgcgcatccggacatcggcctgcgggtgctgcagcccgccggcctgcatgaactcgtcgagggcaaggtcgatctgttgattggccgcggtctcagccaccatcccggttatcgctgcgaccggatcgatgggagatcgggcctcggtgattggctggttgcgcccgaaggtgccgctgattgccctgagatcgtcagcttccgcgaatggctgcgctctctgccggccgacatcccgcgcccaagccagcttcgtcctcgtctggtcgacgtcggcagacgttga

SEQ ID NO: 5739 - DNA, 261 bp, BradyrhizobiumColbertium
atgacctacgcccttcccccgctcaacgcgcttcgcgccttcgaggctgccgcccggcatctcagcttcaagctcgccgcgcacgagctgcacgtgaccccggccgccgtgggccagcaggtgaaggcgctggaggctcgcctcggcgtcagtggttcgagcggctgcacaagcagctcatcctcaccgccgcaggccaggcttacctgcccggaatatccgagggctttcgccacatcgcggaggcgacctcgcaattga

SEQ ID NO: 5740 - DNA, 393 bp, BradyrhizobiumColbertium
atgcccgccgctcacattgtcagccacaatcccgcaacggtccatgctcccgccggtggttacagcatggggtttgaaatcagtcagcatcgacggctgttgtttgtcagcggtcaagtgccggagacgtccgacggcagcgtgcccgaaggtttcgaagcgcaatgcgagcaggcctggcgcaacgtcatcgaggtgctcgccgctgccggcctcggcgtcaggcatctggtcaaggtcaccaccttcctgacggatctcggtcaggtcgtgcccaatcgcgttgttcgccgcaggatgctggcgggacacgaacccgcgctcacggtcatgattgcgcaaaccgtcgacagcaaatggctgctggagatcgaggcgatcgccgcagagtga

SEQ ID NO: 5741 - DNA, 711 bp, BradyrhizobiumColbertium
atggccgagatccatcccttctaccagaagcatcgggaagcaatggaggcgaccatgcgtggtcgcctcgacattgccgagccgatgttgcgcgagcgcacgcatctctccgatgtccatgagatcaggcgggaggtgatggacgaatttgggatcgtcctcacccagatgccctatgtcggcggtgcagccagccgcatgagcgatttcttcatgcgcctgaccggtttcatggccatcagccgggtgctccggcgccacggcgtgccggtgccggtgatcggtgagatcgagcgggaaacctgcgcggcacaattgctcaccgagccggaagcagagcgccttgccttgggacgtcagttcatgtcgcccgaaaaccaggtgttgctgcgcgagcaggccgcgaggagcaccacggagagccatgagaaggagtttccggacgacttcgtctacgatttcgtagagccggggccaggtgacgagtttgaattcggcatcgactacaaggcttgcggcttctgcaagctcgcaacgcgccatggcgacacggagattctgccgaacatctgtggcctcgacttcgatgcctacgccacgcgaggcattcgcctggaaaggacacggacgctggcgggcggcgccagccactgcaatttccgcttctcgcgactggcatcgatacgagaagccgaggatacgaaaggctga

SEQ ID NO: 5742 - DNA, 1026 bp, BradyrhizobiumColbertium
atgagcagcgagacggctttggcgacaggaccacgggcgcggggcctcgcgcccttcttgcgctcgcagatgcgcaacatcgccccgttcctgacgctgatctgcctcttcaccttcttcgccttcgccagtccctccttcgccacgctcgacaatctcggcaacatcctgacgcaggtatcgatcaccggcatcatcgccgtgggcctcaccttcgtgatcctctgcgccgagatcgatctttcgatcgccgccatcgccaacgtcaccggcatcgcggtggcctacttcacgctgcaggaatcctacgtcaacatcgccaacgtgccgctgcccggcgcggttgcgatcctgctgtcgatcctgctctgcgccctgctcggccttgtcaacgcgctggggctgaccgtgatcggaattccctccttcatcatgaccttggcgatgatgcagatcgccgccggcatctccgcgctgttggtgcgcggccagatcgcgtacaaggtgccaagcctgatcacgactctcggctcgggctcgatcggcggcattccttggctggttatcatcgccgcgctgatgctgctcggcggccatctggtgctgacctacacgcgcttcggccgctacgtctacatggtcgggggcaaccgcgaggccgccgaatattccggcctcaacgtcaagctgatcctcggcgcggtgatggtgatctcggcggtctgctcgggcatcggcggcatgctcggcgtcgcccatttcggcagcgcgcagcagaacgagttcgacacctacctgctcgactccatcgccgcggtcgtcgtcggcggcaccagcctgttcggcggccgcggcggcatcggcaacaccatcgtcgggcttttcgttctcggtgttctcaacaacggcctcgaccacgtcaacatcgacagcttcttgaagatcctgatccgcggcctgatcctgctggccgcgctgatcatcaatgtctacgcgcagcgcttgagggagaaagccgcggaatag

SEQ ID NO: 5743 - DNA, 1503 bp, BradyrhizobiumColbertium
atgcctgagggacaacagcccatcctggaactgcaaggcatcacgaagagcttcggcggggtcgaagcgcttcgtggtgtggacttcgcgctctgtcccggcgagatccagggtctcgtcggcgaaaacggcgcagggaaaagcacgctgatgaagatcatcgccggcgtgcataccgagttctccggccgcttcctggtggacggccgggagacacatttccgctccgcgcgcgatgcgcacgcggccggcattgccatggtgcaccaggaactcagcgttgcccccgacctgacggttgcggagaacgtcttcctgggcaaccagccgaccaaccgcctcggcctcgtgcaatggcggcggatggcgcgtgaggcaggcgagcagctcgcccgcttcggcatcgacgtcgatccgatgtccaggctcggcgaccttccgatcgggctgcagcagctgatcgagatcgcgcgcgtgctgttctccggagcccggatagtgatcctggacgagccgacctccgccctctctccgcccgaggtcgagcggctgttcgcgacgctcaagcggctgcgcgaggaaggcacctccatcgtcttcatctcgcacttcatagaggacatcctgcgcgtgtcggacaccgtgaccgtgttccgcaacggacggaaggtcgcggagactgcgagcgccgcgaccagcaagagcgcgctgatcgaggccatgatcggccgcggcggcgaagcgctcgagcacagttacgccgacgacctgatgctaccgcggccgagcgagagcgcagtgatcctgaaggccgagcaattgtcgctcggccgcagcctcaacgatgtctccttcgaggcccgcgccggcgaggtgctcggcatctacggtttcatgggctgcggccagcaggagctgtcgcgcatcctgttcggcaagctgaagccggacggcggcacactcgccgtcgagggtacgccgaagaccttcgccagcacggcggcggcgcggcgtgctggcgtagcactggtgcccgagagtcggcgcgacatgctgtttcaccaggagccggtctacaagaacatctcgatcagcattctcgaccgcatttcgtccctgctgctcaagccagggcaggagcgcgacatcgccaaacgccaggtcgagcagttgcagatcaggccgccggtggtcggtctcgatcttggcatgctctctggcggaaaccagcagaaggtcgccctggcgaaatggctgacctatccgccgaaactcctggtgctgtgcgagccgacccgcggcatggatgtcggcgccaagaacgacgtcatcaacatcgtccgcgacctccgcacaaaagggctggcgatcatcgtgctgtcgaccgagccggaaacggtgctgtcgctggccgaccgcatcctcgtgctcaagcgcggcgcattggtgcgggagttcaggaacgagccggtcagcaaggaccgcctgctagaggcggcgtga

SEQ ID NO: 5744 - DNA, 1023 bp, BradyrhizobiumColbertium
atgtccgggacgaaagatttctcgacgacgaggcgcgatcttcttcaggcggcagcgaccgccggcgccgcaactgccttgctcggcagcatgggcataacccccgcacttgcagccgcagtcggacgaagcgagaagccgctgaaggcagcgttctccaatgcgggccttcaggccacctggtgcgcgcaaggcaagcaggccgcggagttctggggtaagctcttcaacgttgaagtcacatggttcgacggccagctcgacgcagtgaagcagcgcgcggcgatcgacaacatggcctcgcagaaatgggacttcgtcgcaatccaggccttcggcatcgggaccctcacccagccggtgcagaagatgatcgacgccgggacgccggtgatcgacatggacacgctgatcgcgccgctcgaccagatcaacgtccactccttcctcgcccccgataacgagttcatgggagcctcggtcacgcaggcgctgtgcaacgccatgggcggcaagggcaagatcatcatgacgcagggcgcgctcggccacaccggcgcgcaaggccgcgccaagggcttcaacacggtggtcaagcaatttccgggcatcgaggtgctcgacacccagccggccgactgggacgtctccaagaccgcccgcctctgggaaacgtacctgaccaaatacccgcagatcgacgcggcgttcttccacaatgacgacatggcgctcgcggccgccaacatcatgaaggcgcggggccgcaccaatatcctgatcggcggcgtcgatgccatgccgccggcgatccaggcggtgagcgagggccgcatgttcgcgaccgtgcgcaatccgtcctgccgcatccatggcggcgcgatcattgcgggcgtgtcggccgtggtcggcggagagaagagcggacagggcatcccgaagaacgtcgtcaccgatggcccggtcgtcaccaaggccaacgccgccgggatgcagtggatgcaggatcacttcctgatctaa

SEQ ID NO: 5745 - DNA, 258 bp, BradyrhizobiumColbertium
ttgtgctggttgcagcgcaaagcgccaggcgggagcagcggcgaagtcgtcgatgtcggcgagcaatgtgtcccagccttgtgcgatctcgctcgatcattcatcgccgggaagctcgcgcagcgtatcccgagcaagccagcgaaatcgaagatgtcctcgatgctcagcgcgagcatcgctccctttcaccgggatcgctgccctccgtgccgaaacgtcggctgcgcctccgggtgctcgtcgagcgggcgttga

SEQ ID NO: 5746 - DNA, 375 bp, BradyrhizobiumColbertium
atgcgcgcacggctgcaaaagttcctacctctggtcctgctggccctggtgatgcaggtgctggcgccgattgccgcttgcctggtggcgggtcaggctgttgccgatccgctctctgccgccgtcatctgccacagcgcgagcgagcagggcggcccgaacgatcggaccagtgcgcccactgcgcatgccggcgcgtgcgccctgtgctgcctggcccaggccaacgcgacgctcgattcgcctacgcatgaagcactcgcggttcctgtccgccatgccgagcgtgtggtgtggcatccggcgcatgcgtccgccatcactgcctacgagggttcgagcgcccaagctcgcgcaccgcctcagtcttcctga

SEQ ID NO: 5747 - DNA, 2406 bp, BradyrhizobiumColbertium
atgttacgcattcgtgcgatcagccgcgcgggcttgcccgtgctttgcgggctggtgtcttcgatcggtgcagacgcgcttgcccaaggcgcctcggaaccgcttcccacggtcaccgttgaggcgccgcaggcttcgcgccccaagccggcgccccggccatcgcggctgcgctcagctgcggccgggcgcgccgcgagacccgtcgcgcagaacccgaccgccagcgcgccggcccaaaatccggccatgtctgccggcgcggcgcgggagggcctcaatcaatcgcccgccggccagactgcgacgacgatcgatcggagccagttcgacaatcgccccgcgttctcggtcagcgatgtcttgcgggacagcccgggcatttcgatcaagcaggggaacggtcctcgcgatttcggcatctcaattcgggggtccaacgcgcggaacggcttcgccatccgcaatctcgtgatcttcgaagacggcttccccgtcacgcagccggatggactgtcgcggagcgacctgatcgatccccacgcctatgctgcgatcgacgtgatccgcggcccttcctcggcgctctatggcaactacgcaacaggcggtgcgctgaattttcggacacggcccggcggcacgatcgacggtgtcgaatatggcgtcgacggcggcagctacggctatctcaacaactacctggcagccggcaagaaggtcgggaatttcgagggttcgctgtttgcaagcgatgtgcgtggtgacggctatatcggcaacagctggttcaatacgcagaccgtcaacttcctcggcacgctcaaggcaacgctggacgatcgcttcacggtcaagatcatcaacaacgatctcagtgcgcggctgccgatccggcagtcgctgaaccagtactacctaaaccccttccagcaggggtgcgcgaccggcgccaccgccgcgcccggatgcggtacggtcaggctgttcaacaatggtttcaactcaaccgccggaaccgacacggaaacggccgtccaggccgggctaggccgcaacgatcgccgcaccatcgtcggcggtcgatgggagcacgattttgacaacacgctgacttggcgcaatcagttcgtcttcgacgaccggaacatcactcagccaaccgggacgacggcagcgatcggagattttccatcgtacaactacatgagtgatctcaccaagcgtggagagattttcggcctggagtcgaccgcgttcttcggcgcgttcttcaacaccctgacggcgtcgagcgacacgcggaacgtaatgcctgggggcaatgctacgctcggcaggctctcgagcaatctcctcagcgaaacgaccaattatggtgtgcgtgccagggaagagctcaggctgacgacctcgctgacggcggtcgctgccgttggttgggagacgacgctgctgaagggaacaaacacggcctatgcatactcaggtcccaccggcatcaccaccacaactctcacgtcggcggacaggcagtttcaaaatgccgcgccggagttggcgctcctctacaatctcgaaaacgagtggctgttccgcggacgggttgctacggggtacggcaccccgcaggtttcgaatctcttcgttcttccgaacggcctgtcgggcaacaacacccagcttcaggcgcagaagaatctcggctacgatctcggcttcgattggacgccgaacaatacgctcaagctcagcgcgaccggcttctacgagttcttccgcaacgagatcgtcagtcaggcgacgcctgccggctcgcccaacgcgacttacacgttcaacgcgccgcgatcggagcatcgcggcgttgagcttgccgccgactggaagttccatccggggtggcggttcatggcggcgtacacccatctcgacgaggtctacaccgagtatgtcgagagcatcaccaatggcgccgtgttcagcttcaaccgtgcaggcaacaagattcccgggatatcgcccaacgaactaacggctcgaattggctacgacgagttcgtcggaccgctgaccggcctcggaggcttcgtcgaggttcaatggaaggattccttctacatggacaacgccaatctgctgaaggcaccgggctatgaactggtcaacgtcaacgtccactacaaagccgatctggtgtccgacaccgtcagatcgctcactctgtttctcgaggtcagaaacgtgctcgaccgtacctacgtcgcttcggcgaacaacatcgcgaacacagtcacggcgacaggccttcaaaaccctgcgagcgttctcgcaaacacgacgggatccatttatgcgggctcgccgcgcacattcgttgcgggtatgaaggtggccttcagatga

SEQ ID NO: 5748 - DNA, 1212 bp, BradyrhizobiumColbertium
atgatccgaaccagtttgctcgcgctcgtggccctcggactcgcggtgggcacggcgctcgcacagatgcgtgccccgcctgcatccggagcggcgtgcgaggagccgacgctgcgctgtgccaccaaggtgacgtcggccttcggtccagacggcacgttgtggctggtctggatggcgggagggcagatctcggtcgcaagctcgcaggatacgggccgcagtttttcgccgcccacccaagtcacgacgaagcggctgaacctcgactggggaccggatgcgcgcccgaagatcgtggtcgatcgcaagggcggcatcgcgctcacgttctctatcttcagggacgaggccttcaatggtcaggtgctctacacgcgctcggctgatggcgggaagagctttgccgagcttaagcccatcaccgccaacaacgagagccagcggttcgaggcgctggcgctcgatcaggatggaacggtgctcgcggcctggctcgacaagcgcaatcgtgtctctgcgaaagaggcggggcggaagtacgagggcgcggcgctgttctttgcctcgtcacgcgatggcggtgccacctacgcggaggcccgtctcgcgcacgagggcacctgcgagtgctgccgattagggctggcgttcgcggcgccggggcggccggccgtgatcttcaggaacatcttcgaaggcggcgtgcgagatcatgcggtcatgaccttcaccgcagtctcgacaccaggcgaaatccgtcgggtcagcaacgacgattggcagatcaatgcctgcccgcaccacgggcctagcctcaccatcgggccgaacggaacctatcatgtcgcctggtacacgaacgggaagactcgtaagggattattctacgcccactcgcgtgacgaggggcgcacattctctgtgccgatcgcgctcgggcgcctggatcgcagtccgacgcgccccttcgtgctttcggccccggcgggaacggtgatggtgtggaaggagttcgatggcgaaaagacctcggtccagatgacgatctcccgcaatgacggccagacgtggtcgccgccgaaggcgatagcgagtacgagcgacacgtccgatcaccccttgctggtctccaatgacaagcagacctatctatcgtggatgacgaaggcggacggctatcggttgacagctatcgaggatcagccatga

SEQ ID NO: 5749 - DNA, 498 bp, BradyrhizobiumColbertium
atgagatttcgatttgcaggcattgcgagtctgaacgttctgatcgcatccgcggctgctttcggagcttcgcccgccttgaagccattcgaacgcggcacctggcaaggcgtcatcagggggcatgccggccgtccggtactggtgcatttctggggcgtgacctgtggcccatgcaaagtcgaactgccgctgctcgggcagttcgccaaggatcatcctgacatcgacgtcgtcacggtcagcgccgatctcgtgccgaacctgccggcggcgacgcaatcgatgctcgacaaggcgggtctgtcgtccaccgaaaatttcatcttcaacgacggcttcgtcgagcgcttgcggttcgagatcgatccggcctggcagggcgacatccctcggaccatgctgatctcgcgggacgggaccatcacgacgatcgaaggctcggctgaaatcgccgatctggaaaaatggtcggcgcagcagttctccaaacactga

SEQ ID NO: 5750 - DNA, 537 bp, BradyrhizobiumColbertium
atgaagacaatctcgaaaaacgtgctgctcgctgcgttcgctctcgcgatctccgccgcaccggcgctcgccgacgacgtgaaggccggcgatctcgtcatctcgcaggcgtggagccgtgcgactccgggcggcgcaaaggttgccggcggctatctcgttatcgagaacaaggggacggcgccggacaggctggtcagcgtctccgccgatattgcgggcaagtccgagatccacgagatggcaatggataacggcgtgatgaagatgcgagcgctcgacaagggactggtgatcgaccccggcaagaccgtgaagcttgcgcccggcggctatcacctcatgctccaggagttgaagggcccgttcaagcagggcgacaaggtgccggtgatgctgcaattcgagaaggccggcaatgttgccgtctccctcgacgtccagggcgtcggcgcgcagtcgccgggcgacgccgggcattcaggtcatatggacatgaagaaaatgccggatcattcgggaatgaagatgaagtga

SEQ ID NO: 5751 - DNA, 1320 bp, BradyrhizobiumColbertium
atgcggttgtcgcggttctttctgcccatcctgaaggaaaacccgaaagaggcggagatcgtctcgcatcgactgatgcttcgcgccggcatgattcggcaggaggcggccggcatctatgcctggctgccgctcggctttcgcgtgctcaagaagatcgagcagatcgtgcgtgaggagcaggaccgctccggggcgatcgaggtcttgatgccgacgctgcagctcgccgatctctggcgcgagagcggccgttatgacgcctatgggccggagatgctgcgcattgccgatcgccacaagcgcgagctgctgtatggaccgaccaacgaggaaatgatcaccgagatcttccgcgcctacgtgaagtcctacaagaacctgccgctgaatctctatcatatccaatggaaatttcgcgacgagcagcgtccgcgtttcggcgtgatgcgcggccgcgagttcctgatgaaagacgcctattcgttcgaccttaacgaggccgcggcgcgcgtcgcctacaacaagatgttcgtcgcctatttgcgcaccttcgcgcggatggggctgaaggcgattccgatgcgggccgagaccggcccgatcggcggcgatctcagccacgagttcatcgtgctggccgagaccggggaatccggcgtattcatcaaccgtgacgtgctggacctgccggtgccgggcgaggacgtcgattatgagagcgatttgacgccgatcatcaagcaatggacctcggtctatgcggcgaccgaggacgtccacgacgccgctcgcttcgagcgggaggtgccggcggacaagcgcgtcaacacccgcggcatcgaggtcggccagatcttctatttcggcacgaaatattccgagccgatgaaggcgctggtagcggggcccgacggtgttgatgtgccgatccatggcggctcctacggcgtcggcgtctcgcgcctgttaggtgccatcatcgaggcctgccatgacgatgccggcatcaaatggcccgaggccgtggcgccgttccgcgtctcgatcctcaacctcaagcagggcgacgccgcggtcgatgcggcaagcgagaagctttatgccgaactcacggccaagggggtcgacgtgctgtacgacgacaccgaccagcgcgccggcgccaagttcgccgccgccgatctgatcggcatcccctggcaaatcatgatcgggccgaagggcctcgccgacggcaaggtcgagatcaagcggcgaagtgacggctcccgcgagaccatgtcgcctgcggatgcggtcgcccgcctggtcggctga

SEQ ID NO: 5752 - DNA, 1281 bp, BradyrhizobiumColbertium
atggatgagaccatgaccgagaccgtgcaaaccgcgccttttgcgccattcgagtggatgctgtcggcgcgctatttgcgggcgcgccgcaaggagggattcatctcggttatcgccgggttctcctttctcggcatcatgctgggcgtggcgacgctgatcatcgtcatggcggtcatgaacggctttcgcaaggaactgctcgacaagatcctggggctcaacggccacatccttgtccagccgctggaatcgccgctgacggactggaaggacgtcgccgaccgcctcagtcaagtcgagggcatccggctcgctgcgcccgtagtggatggtcaggcgctggcatcatcgccctggaacgcatccggcgtcctcgtgcggggcatccgctccgacgatctcaacaatctcacctcgatcgccaagaacatcaagcagggctcgctcgaaggcttcgacgaagggcagggcgttgcgatcggccggcggctcgccgaccagctgtcgctgcatgccggcgacagcgtgacgctggtggcgccaaagggcgcggtcacgccgatgggcaccacgccgcggatcaagccgtacaagatcgcggcggtgttcgagatcggcatgtccgaatacgatcttggcttcgtgttcatgccgctcgccgaggcgcaggcctatttcaaccgcagcaacgacgtcacctcgatcgaggtgttcaccaccaatcccgaccggatcgatgccttccgcaaggccgtgacggaggcggcgggccggccgatattcctggtcgactggcgccagcgcaactcgaccttcttcaacgcgctccaggtcgagcgcaacgtcatgttcctgatcctgaccatgatcgtgctggtcgccgcgctcaacatcgtctccggcctgatcatgctggtgaaggataagggcagcgacattgcgatcctgcgcacgatgggcgcctctcagggctcgatcatgcgcatcttcctgattacgggtgcgtcgatcggtgtggtcggcacgctggtcggcttctgcgttggcctcgtgatctgtctcaacatcgaatcgatccggcaatttctttcgtggctgaccagcaccgaactgttctcgccggagctctatttcctgtcgaagctgcccgccgagatcgatgtcggcgaaaccacggccgtcgtcatcatggcgctgacgctgtcgttcctggcgacgctctatccgtcgtggcgcgccgcgcgcctcgatcccgtcgaagcgctgcggtacgagtga

SEQ ID NO: 5753 - DNA, 705 bp, BradyrhizobiumColbertium
atggagcagcagcagggggcggaagatgtaccggtcatttatctccacgagataaagcggcagtacttgcagggcgaggtgccgctgacgatcctcgatggcgccaagctggcgctgtgggccggccagtcggtcgcgctggtcgcgccgtcgggctcgggcaagtcgaccctgctgcatatcgccggccttctggaggcgcccgattccggcgaagtctacgtctcgggtgcgccgacctcgcagttgcccgacatcgaacgcacgcagctgcgccgcaccgacatcggattcgtctaccagtcgcaccggctgctgcctgagttctcggcgctggagaacgtgatgctgccgcagatgatccgcggcctcaggaagtccgagagcgtcaagcgcgccaaggagatccttggctatcttggcctcggcgaccgcatcacccaccgccctgccgagctgtcgggcggcgagcagcagcgcgtcgcgatcgcgcgcgcggtggccaacgcgccgcgtgtgctgtttgcggacgagccgaccggaaatctcgatcccggtaccgccgagcacgtgttccaggctctgatgcagctggtcaaggcgacgcaggtgtcgatgctgatcgcgacccacaacatggagcttgccggccgcatggaccggcgcgtctcgttgtcgaacggtcaggtggtcgagctcgactaa

SEQ ID NO: 5754 - DNA, 123 bp, BradyrhizobiumColbertium
gtgggcgaccgcttcattggcattgacgagatcgagctccggaattcgtcaaatggtgagaggcacgcgatattcggagaggccggtctggttgctgagccgcgcctgacgccgggaacctaa

SEQ ID NO: 5755 - DNA, 3150 bp, BradyrhizobiumColbertium
atgacgacagcgaccggggtaccctcggccgaccgtaacgccgtcttagccaccctcggcgaccatattcgggagatcggtaaccccgacgatctcgcctatgccgcggctgagctgcttggccgcagcctcaacgtcagccgggcaggctacggtaccgttgatacatcagccgagaccatcacgatcgcgcgcgactggaacgctcccgggatattgagcctggccggcgtgctgcgctttcgcgactatggcagctatatcgaagacttgaagcggggcgagacggtcatctgcgccgatgcagagagggaccctcgcgtaggcgaccgcgcccgagctctcgaggcaatttcggcgcgcgccttcgtcaacatgcctatctccgagcccgacggggtcgtggcgctgctctacctcaacaatgccaagccgcgcgaatggagccccgccgagctggcgctaatccgcgaggtcgccgagcggacccgcactgccgtcgaacgccgccgtgctgagacggcagtgcgcgagaacgaggcacggctgctcttcctcgacgctctcaacaaggaaacagccaaaacccgcgatgcggatagcgtcatggcggtgacgacgagaatggtcggtgagcatctcggggtctcaaactgcgcctatgccgacatggatcctgatcaggacggcttcaccatacgcggggattgggcagctccgggtgcgatgcacatcctcgggcactacagccttgctgatttcggtaagaaggcggttcgagagctgggtgcgggcagaccgctcatcatcaacgataacctgacggagattgcgccggaggaagccgccgctttccagcgcatcgggataggctcgaccatctgcatgcccttggtgaaggaagggcgactgaccgccttgatggcgatacatcaccggggcccgtatcgctggagacagcacgaacttgccctgcttaccgaggtgacggagcggtcatgggcgcacatcgagcgggtcagatcggagcaggcggcccgcgaagctgccgaacgcctggtccttgccaacaaggcggccggcatcgggacgtgggactatgacccggtcaacgacgtcctccgatgggataaccgctgcaaggaggtattcggtctctcaccggacgccgacgtgagctacgaagggtcgttcctgaggggcattcatcccgacgacagggagcgcgcgcatcaagccgtatcagcggccctacagcctcgttctccgggaagttacaacatcgaataccgaaccatcggtatcgaggatggcatcgagcgctggatcgccgcaactggtcacgcaattttttccgacgaccaggccactcgattcatcgggaccgtgctggatatctctgcgcaaaagaaaaccgaacgtcatctcaggatactcaacgacacaggagcatcggtcgctcgcgaacgtgatctcggcaggatcgtgcagatcgtaacggacgccggcgtcgagctgaccggcgctcagttcggagctttcttctacaacgtcctcgctgcggatggcggcagctacatgctctattcgctgtccggcgtaccccgatcggctttcgagagcttcccgatgccgcgcgccaccggcgtgttcgagccgacgttcaaggggctgggcgtggtcaggtccgatgatatcctgaaggatccgcgttatggcaagaacacgccgcactacggaatgccggcgggccatcttccggttcggtcctacctggcggtccccgttatctcgcgcagcggcgaggtgctcggaggacttttcttcggccatgcggatgtcagaaaattccaggccgagcacgaggccgcactgctcggaattgccggtcatgccgcgacggctatcgataacgcgaggcttttgacccggctcgaggccctcaatgccgagttggagcaacgggtcgccgatgagatcgccgagcgtatgaaggccgaagagcaactgcggcaatcccagaagatggaagctgtcgggcaattgaccggcggcattgcccacgacttcaacaacatgctggccgtgatattgggcagcttgaaccttgccaagcggcggctcggcaagggagaggtcaacatcgatcgtttcatcgagggcgccatcgatggtgcaaaccgtgcggccacgttgacgcaaaggctgctcgcgttctcgcgtcagcaacctctcgcgcctgaggtcgtggacgtcaacaagatggttggcgggatgagtgagctgctcgagcgatcgctcggcgagctcgtccgcctcgagacggtgcttgcggtcggcctatggcgcgtcaaggccgatccggctcagctggaaagcgctctcatcaatcttgcggtcaatgcgcgggatgccatgccgaagggcggcagactgaccatagaaaccggcaacgcttcgatcgatcgaaaatatgcccgcgaatacgccctggcacccgggcagtacgttctcattgccgtgacggacaacggaacaggaattgcggccgacgtgctggggaaggtcttcgatccgttcttcacgaccaaggtcgtgggcaagggcaccggcctcggcctcagccaggtctatggtttcgtgcggcagtccggcggccatgtgaagatctactcggaaatcgatgtcggcacgacggtgaagatctatcttccgcggttcgcgggcgaggaggccatcccaactccatcacaaggcgtgacacatcccggtgcaagtctgcagagcgagaccattctcgtcgtggaagacgatgagcgcgtccgcagcatctcgtccgaaagcctgcgcgagcttggctacaccgttgtcgaggccgcgagcgccaacgaggcgatcaggaaaatcgaaagcggtttcatccccgatctgctgttcaccgatgtcgtcatgcccgacatgaccggagcggaacttgcgaccgaactgtcgaagcgacttccggaactgaaagtgctgttcaccacgggttacacgcgcaacgcgatcgttcacaacggcatgctcgacgccggcaagcatctgctgtccaagccctttgcaatcgaagacttggccgccaaggttcgtcaactgctcgacgagggctag

SEQ ID NO: 5756 - DNA, 1227 bp, BradyrhizobiumColbertium
atgttcgcccgtatcctgctcctcgtggtctcgctgctgcttcccagcaccttgggtgcacaggcggccccggcggaacaagccggccttgcgtcgaggttgacgatctatctcgccaagggttcgcccaacgcatgcggcccgggctgcgatcgctggatcgccatcgagggcgagatcgatcgggaggctgcagcgcgcattcgccgcttcctcgccgccgtcaaggacctgcagcgtccgatctatcttcattcgcccggtggcaacgtcgagcaatcctacgcgatcgggcgactgctgcgcagccgcagagcaattgccaggatcggccggacgatcccgaccgcctgcgccgcgggcaagcaggcggatgccgcgtgcctgaagatcaagaatgcgcgcggcgaggtggaggccgaactcaccactcagcgtgccatgtgcaattcagcctgcggctacctgtttctcggggcgacatcgcgcgaggtcgcccccgacgcggtagtggcggtccatagttccaggctggtgctggcctttgacgggcggcccgacccggcggcagtcgcggaatacagacggcggcggctattggcggccgatcgtgaccgggccgccttcatcaccgcgatgggaatcaaccgcgagctcgatgctctgatccggacagtgaagttcgaaagcctgcacgtgctgacgcgatccgagctctacggtttcggcatcgatacgcgaccgcttgccgagacgaactggacgctggagaaagaggcgcggccgttcgttcgcaagatggcgacgacgaagaaggagagcgcctccaagttcagaacgatggagttgcgcctgtcctgcgagaacagcaagggcgtgccgctgacgttcgcgtccgaggtcgacgagacggctcgcggcaaaagcacgatcctgatcgcggccgacaccgagaaggtgaccggaggatctccgcttcgcttcggcaagtacgcggtgtggcgcggcaacatcgacgccgacatggtcaacacgatattggcttcgcgctccctccaggtccgcgaaaccacgcagatgccggacgacaagacgagcaacacgaaattcgagatagacctgacgggcctaccgtcagtgtgggaccggctgagggcatcctgcgcatcgccggcggcaggcccagcaagtctcttgccggcgatgcttcggcatacggctccctaa

SEQ ID NO: 5757 - DNA, 840 bp, BradyrhizobiumColbertium
atgtgcagaggcctttcgaccggactgttgcgtcacggttacagcaattctgtcgatcgctgttatgacgacgtcacggcccgggggcctctaagaaactggaacgggaatcaaatgaagaagaatttgttgcttgccgctgtcagcctcgtcgcgctcagcgcggctgcgccggcgctggctgctgacctcgcggcgcggccttacaccaaagctccgccggcggcgatcgctgccgtttacgactggagcggcttctacatcggcatcaacggcggcggcggttcggctcgcacgacctgggatctggttggcgtcggtcgtgaaggttcccacgatgcgtcgggcggcacggttggtggccagatcggctatcgcatgcagtcgggtcagttcgtgttcggcgttgagggccagggcaactgggccgatttctcgggcgacaatgtcagcctgatcttccccgccaatcgtaaccggacccggatggatgcatttggtctcatcaccggtcaggtcggctatgcctggaataacgtgctcctgtacgtgaagggcggcgcggccgtcgtcagcaacaagtacgagctgtccgccgtcggcggtccgctgctcgcctcgaccagcgacacgcgctggggtggtaccgtcggcgcaggcctcgagttcggctttgcgccgaactggtcggttggtgtggagtacaatcacatcttcctggccgacaaggacgtgacctttgctggtttcgccggaaccgatcgcatccgtcaggacgtcgacatgggcctcgtccgcctgaactacaagttcggcggcccgatgattgcccgctactaa

SEQ ID NO: 5758 - DNA, 795 bp, BradyrhizobiumColbertium
atgacagagaactcagataactgggagccgcacgaacgcctcgcatggcaagcgaagacgccaaagaaggaacgagaagcgctcgacaacgcgcccttggcgaccctgcgtgcaataccagcatcatcaagcgctttcatgctcaccagcgatttggccgagcgctatccgaggccgcaggcggccaagggcaaggcgtacgcacgccacaagacactggtcgactatgcgaacgccgtaggcgcattcatcgccgatctgcttgctgccgtcgaacgcgatcggagcgagggctggctcatgtgctcacacgacaagggcgactacaccggccaatacgtcaaatggcgcatgttcgatggtgttaggacggcgtggcttgaggctggcctgatcgagcataagccgggttatccgggcaggctggagttcggcaacccaggtccaagctcgggcaagctaacccgctacagggccacaccgaggctcttggagattgctgcgggacacggcattacaccggccaacgtcctcgaacatttcaagttcgagttcatgatgccttccgagctaatccggctcactaagcctcccgagccgacaccgaatacaccaagggtcgctgagctacgccgtgatgtcgccgaactgaacgcgttcttcgccaagcagacccttacacatccgaaacatccgacgattaagcaccttgggtggatacgaatattccacgcgtacaccaagggctaccgatggaataagggcggccgcctctactcccagcctcggctctga

SEQ ID NO: 5759 - DNA, 126 bp, BradyrhizobiumColbertium
atgctggagcgctggggcgtgaaggctctcaaagcggcaatcgacaagattaactaccccggcctcgacctgtcgcgtgtcaagccgctgcgcgcgtcacatgtggcacgccgaggacctaaatag

SEQ ID NO: 5760 - DNA, 183 bp, BradyrhizobiumColbertium
gtgacccgcggggcagtccagcaattccgcgacctcgcactcaacgatagggcacacatggcgacctacgtttcggaggtcgtggaagccctgaacgaatccttggcgatcgcctacggcatcgaccgcgaactatacgcaagctacgtgcttgcacgcgatcagcccgacggtccttcgtag

SEQ ID NO: 5761 - DNA, 255 bp, BradyrhizobiumColbertium
atggccgctgtcaccatccgcaatctctccgaggaggcgcaccgcgccctgaaagtccgcgcggcgcaacacaatcgcagcacggaagcggaaatgcgcgccattctggaggcagccgtgcgtcccgagggccggctgcggctcggcactgccctttcggagatgagccgcaagatcggactcaccaatgccgatgtcgaggccctcgaacagggccgcgacgcgcgtcccgctgagccgatgcgcttcgaatga

SEQ ID NO: 5762 - DNA, 426 bp, BradyrhizobiumColbertium
atgatcctgctcgataccaatgtggtctccgaggcgatgaagcccgatccacacccatcggtccgtgactggctcgacgcccaggcggccgagacgctgtttctctccagcgtcgccgtcgcggaactgctgttcggcatcggcgcgctgccgcgcggcaagcgcaaggacaggctggcatctgcgctcgacggcgtgttggacctgttcgcgacccgcatcctggccttcgataccgccgcggcgcggcgctatgccgacctcgccgtcaaggcgcgcgcgttgggaaaaggcttcccaacacccgatggctacatcgctgcaatcgctgccgcacacgggtgcgcagtggcatcgcgcgacacgagtgcgttcaatgctgcaggtctgacggtgattgacccctggaccgtgaccagccgatag

SEQ ID NO: 5763 - DNA, 333 bp, BradyrhizobiumColbertium
gtggcggttcacaaaggcttcaaagcgctcgacactctcccgcacgtgttgaccgcgcttcatatcgccgacgtgtctgacgttcatattgttcgccctgccgacgttccgaacgccaattggctgcgaccgggaatcccgggcgcaggccagcaggcgttcggggatgcgctcctggccaagcacaaattcgtcgtgatcccaagtgcggtgtccaatcacagctggaatctgatcttcgacccgaccagggcgaaaggcgcgtaccagcagcaccttcaggaagcgttcgcgctagatacgcgcctgcatccttcgacatcaccgccctaa

SEQ ID NO: 5764 - DNA, 483 bp, BradyrhizobiumColbertium
gtgactgccacagccgagaagccggctccaaaggggccgggcaatgatctgcagaaggtggccgatttgctcggcgggccacgcatcttgtcgcgccgcatcacaagcgccctcgacgcccacgaactgctgctggacggactgccaggctctgcgttgacccactttgtccgtcacctccttatcattcaaacggactcgttggaaaaagccttcggaatgagccttcgcacctttcagcgacgcaaggacgctccggacaagccgctcagccaggagcaaagtgggcggacctggaagtttgccgaaatcctggccaaggccaccgacgtgttcggttcgcaggaagaagccgagcagtggctcgagcgtccggccatcggtcttgaccagcgtcgtccgatcgacctgcttgccactccggccggcatcgagctcgttgaacagtacctcacacgcctcgcatacggcgtctatgcatga

SEQ ID NO: 5765 - DNA, 246 bp, BradyrhizobiumColbertium
atgatgtcggtcgaggaattccgcagattgaagaccctggctcgcgaagaaatcccgctcgaagcgattgcacggcagccgacagtgttcggccacgaacccgacgatgtgcttggctatcccgagcacgacccggtcgaggccgtccatcacatggcaaaggatgccgctgctggcatcaaccaggacctggtgcgccgagaagccgaaaggtttgcaaaacactttgttcgaggcgccaagtga

SEQ ID NO: 5766 - DNA, 576 bp, BradyrhizobiumColbertium
atggatgcgtcgccgattgtgatgctgtcagcgatcgagcgcctggattggctgatggagccctgcggcacgatctggatgaccgacatggtcatggaggaagtcgcgcgcgatccggactcgggtaaggatccgcggagccgctggcttgcctacacgcgttcgtggatcgccgcgaacaaattccgcattcgccgcgtggaaaccgacacctacagaacgtaccaacttgcgttggacggctggagggctcagggctcggatcccgagaggaagcccaattcccgcgatctaggcgaagccagcattatccagacgctgaagagctttcgtggcaaggtgctgccgcggcagacaatcatcgtccttatggacgagtccgatgggcgagacgcattgaagggaacgcgccggatcaacctcgatgtgttcggtacccgcgcgttcgtcgaggcactatacgcgcactttggaatcgcggaggccgagcacgcctggcaggcaatcttgaaggtcatcaccgcggatgaatccaaggatgacgatgatccgttcatcgtacgccgagcgatatag

SEQ ID NO: 5767 - DNA, 291 bp, BradyrhizobiumColbertium
atgctcgaagtccgccagacagacacctttgcgagttggctccgggcgctcaaagacgcaaacgccgttgcgcggattgccgcccgcatccgccgcctcgaactgggcaacctgggcgatgtgaaaccggttggcgaaggcgtcagcgagctgcggatcgactacgggccagggtatcgtatttacttcattcagcagggcaataccgtggtgatcctgctttgcggcggcgacaagcggacccagaacaaggacatcaggaccgccaagcggatggcgaaggaggtttga

SEQ ID NO: 5768 - DNA, 363 bp, BradyrhizobiumColbertium
atgccacttaagacaaccaagttcgacgttcaggactatctgaagacgcctgatcagcaggcagcctatctggaagcagcgcttgatagcgacgatccttcgttcattgcagtcgctatcggagatctagctaaggctcggggagtttcaaaattctctcgcgaaactggactgagccgcgaagcgatctacaagacgtttcgcgtgggcggcaatccaacgctcgatacgctgagcaaggcgacggtcgttcttggctacaagctagctcttgtaccgagaagtcggaccgttggctcgtcggcaaatagccgcccgagcgataagcgcggtactggcgccaaggcaaaaaagcttgcttga

SEQ ID NO: 5769 - DNA, 120 bp, BradyrhizobiumColbertium
ttgccgcgctttttgaaggcgaggtacttcatctatatctcctcatacggcttggttctcgacagcccgggcttgttcgacatctgtcggctcgcgctggcgccccaaggcgaacgctga

SEQ ID NO: 5770 - DNA, 879 bp, BradyrhizobiumColbertium
gtgaacggggaaagcgagacgattctcggcggcatcatcacacccgagcgccgaaaccgcatcgtccttgctaccaagttcacagatgcgcccgaaggcgacgatcccaatgccgccggcaatcaccggaagagcatggtgcagtcgatcgaggccagcctgcgacgtctgaagaccgaccgcatcgacctttactacgtccatagctgggatttcaccacgcggcccgacgaggtcatgcgcggccttgatgacctcgtccgtcagggcaagatcctctacgccgggatcagcgacacgcctgcctggatcatctcgcggtcgaacgagctggccgatctgcgcggctggacgccgttcgttgcgaaccagatcgagtacagcctgctcgagcgcacgcccgagcgcgagcaacttccgatgtcgcgcacgctcgacctcggcgtcgtagcctggtcgccgctggcgtccggcctgctcaccggcaagtacacccgcgcggatggcggcagtaggcggcgcctcgacacggctccattcaaggagcgcgacgagcgcaatctcaagatcgcacgcttggtcgacacgatcgccgatgagctcggcgtagcgtccgctcaagtggcgttggcatgggtacgggatcaaggtgtgatcccgatcgttggcgcgacccgcaccgatcagatcacaagcaatctcggctacgtggacctgacattgacgtccgaacatctggcacgcatgaacgaggcgagccgcatcgagctcggctttccacacgactttgtcgagagcgcacgtggcttcgtctacggcggaatgttccaccggatcgatcgccatcgtgaggaagggattcgactgagcagaagctga

SEQ ID NO: 5771 - DNA, 303 bp, BradyrhizobiumColbertium
atggacagcaaggaagaacttcccatccagggcggcgctcgttgctcgttggcccttgagctcggaccgcagaacatccgcgtcaacgcggtcgcgcctggcgcggtgacgatcaccgatttcgggcgcaacaatccgccgccgaccccggaggggatcaggaccggcaatagcaaccatggcatcggccggatgggcacgacgatggagatcgccaaggcgatgatgtggctgatcgccccctacgccagcttcgtggctggtgaagtcttcgccgtgaatggagcgtcccgtgtcggatga

SEQ ID NO: 5772 - DNA, 690 bp, BradyrhizobiumColbertium
gtgacgaggcgagcgcgcgggcgtgccttctacttccgcagcgatgtgcgcgacgctacccaggtcgaacggttcgtcgctgtggccgtcgagcgccacggcgccctccacatcgcctacaacaatgccggcgtcgttttcgggaacggcagcctcaagggcaacgccccacttgccgatatctcggccgacttcttcgacgatgtctggctgaccaatacgcgcggcgtcttcctggcgatgaagcacgagatcccgctgatgctcaggaacgcgccttggggccgcttcggcctgcgcggcgtgatcgtgaactgcgcctcggtttcgggtcatggcggcttcgccggcatcggcagctattcgacgagcaagcacggcgtgctggggctcacgcgctgcgcggcgctcgattacggcgcgcgtggcatccgcgtgaactcgatctcgcccggcggcgtaaacacgcccatgcgtcgcgcctcgatcgaagcgcaaggcggcgatcctgaccagcttccggcacccgacattcaataccggacgaacaccgtcgaggagatgtcggacgtcgtgctctaccttgccgaaggtgacgcaccgtcctcgatcttaggcaccgacatcgacgtcacaatgggaatggtgaccgggccccttacgccgcccgacccgcgcaagcgcggatag

SEQ ID NO: 5773 - DNA, 666 bp, BradyrhizobiumColbertium
atggtacttcgcgaacgtttggagcgcatctctgccgagactgcgacgcagcttccggccgaagagatggccaccatgtccgccgcgaccgacgcgctgcgacggtcgggcatcctcgccggcgtgctcaggcccggcgagcgcgctccggatttcgtactgctggacgagggaggggaggccatctcgctggccgacctgcgccagaaggggcctgtggttgtgagcttctatcggggcgtgtggtgtccctactgcaatgccgatcttcaggcactcgaggaagtcgcgcccgagatcagccgtctcggcgcggcgctcgtcgcaatctcgcctcagacgccgcccaacagccgcaaggcgaagcgaaaggatgggctgagcttcccgatcctgagcgatccgggtaacgagatcgcagcggccttcgggctgcgcttcacgctcgagcctgccgtgcagaagctctatcgcggttacggcgtggacctgccatcgttcaacggcgacgacagctggacgttgccgatgcccgcccgcttcgtcgtgcgcgcggacggcgcgattgcctacgcggaggccgaccccgactacacccgccggcccgagccgtcggaagtggtcgccgcagtggcagagctcggagggaggccgcgtgataaatga

SEQ ID NO: 5774 - DNA, 1434 bp, BradyrhizobiumColbertium
atgcacactcttcctgcagcagaacgcaccgccgggcgccgttcgcctggcgaagcgatcacgcaggtaggccgggccgtagcgctcgcgggagtcgtgctgccgcttttctggatcggcatcttgaaattcagccagaccgagatcgacgcgctcaaaccagtcctcggcggcaccccttggcttgtctggatgtatcccgttttcggcgaggcgggcgcctcttacctgctgggcatcgtcgagctggtcactgcggctctgttcgtcgcgtcgacttggtcgtcgcgtgctggcgtcgccgcgggctcgctgggagcgctcaccttcgttgtcacctgctctaccatgctcgccctgcctgtctgggaagcggccgaaggcggatttccctggctcaacgcggtaggctcgttcctcatcaaggacgtggcgctgctcggcgtcagctcggtcgtgctgggcgagagtctgatgcgccttcgcggaggcgcgcgtacgaaggccgggagcgccgtcccgctggccgtcgctgcaatggtcggttcgtccgcctgctggggcgtggccacagttatgtcaaagagcgcgctcggccatgtgccgcccttcacgctgcttgccctgcagctcggagtcagcgtagcgctcctatggatcgcagtcgcactgtccggccaacgagccccgctcgacgcggacgggcggcgcgccgctctctccggcgtgctcgagccggggctcgcctacgcagtcggtacgagcggcctcgctctcaccggggcggcacacgcttcgttgatcgcggcgaccgaaccgctccatgtcgtgctgatcgcctgggtgctgtttgccgtccgcccgcaacgggcgacgctcgccgccatcttcatcgccgtgccgggcgtcgccctggtcacggccagcgatccggcgggcgccgagaactcgcttctcggggacggactcatcgttctcggtacactcttcgcggcggcttacgtcgttactacaagccgactatcgaccaaaatagcccccctgccgctcgccgcgctgcagcagacgatcggccttggttttgtcgtcctcctgttgctcggcgcgctggttctaggaattgagcggctgaacctcgctgccatgcccctgtctacttggctgctcgccggcacctccggagtcgtccaatatgcgctgccgttctggctttaccttgtcgggctgcgcgcgcttccggtcgggaccgccgcgctgttcctggcgcttaccccggtcttcggtgccggcggcgcagttctgtttctcggtgagcacctctccgtgctccaggtcctcggctgcgggctggtgatcggcgcagtcgcgtcggctgcgcttcgcggtggcgcgaagacggtcggcgccgctccggagaaggaacagaacgcctga

SEQ ID NO: 5775 - DNA, 555 bp, BradyrhizobiumColbertium
atgaccaaacacgctcacgagaacgtggttggcgcgctcgccctggcactcgccgacgccatgctgcgcgacgcgcaggccaaggcgcccgaacttgggccagcagcggcggctctcgcgcttctggggcatgaatcgggcctgaccatcgagcggctgcgccgggcgcttgccctttcccatccgggtgcggtgcgtctggttgatcgcctgagcgccgatggcctcgtcgtgcgcgagccgtcgacgagggaccggcgcgcagtggcgctcaggctcactgccgacggagagaaaatatgccgtaacgtcatcgcctcacgcgacggtgcgatcgcgcgcgcgctgggcgcactgaccgaggacgaacttgcgagctttcgcggacttgcggagaaggtccttcgccgcttcgtaggcgacctcgaccacgcttactctgtttgcaggctgtgcgactacgatgcttgcggcgactgtccggtcgacgacgagctgcgtcggcgcgcggcggaaaaggcggcgagtgctcagcgcgagccgtcctcccgataa

SEQ ID NO: 5776 - DNA, 618 bp, BradyrhizobiumColbertium
atggcagcccgaaaacaatcgacaacgaagagcgatcatgcgcgggcgcaaatcatcgagggcgcccttcaagccttggagcaaaccggcgtcctgcgcaccacgacacggcatatcgcggccgcggccggggtgccgcttgcagcgctgcactatcattttgagaacaagagcgcgctcctggtagccgtcctggaggcgctcaacgaccggatcgcgcaacgcataagaagtgtcggtaccttggagagtgccgatctggatacacgtataagccaacttctgcacaattcatggcgcgcgatctcgcgaacgaggtcgatacaaatcgtgcaatacgaactgacgctgtatgctctccgcgaaggagcggaatggttggccgaacgtcagtacgatacctatgttcgcttctatcgggatgctctgatggcaggacgacacaagtcgcagaatgtttcttccgcaaattgcactttgctcgctcggttcattttcgccgggctcgacggtctcaccttacaagaactagctcaacccagccctgagcgttcaaagaagagcatcgatgcccttatcagcgcggcgcaatcctttgccaaggaattgatcggctag

SEQ ID NO: 5777 - DNA, 1158 bp, BradyrhizobiumColbertium
atggatcgacgtttgtttttaagcggcgttcttcttacggcagtttcatccaaggtcgcgcaggcgagggcagcaacggatcggatcaagatcggcgtcctgttcgcgctatcagggcccgcggcctttctcggcgagtcgcaagagaaagcattcaagatgcttgtcgaggagaagaatgcccgaggagggttggccgggcgcaaaattgaatacgttctctatgacacggaaggaaacggcacgaaggcgattcaacaattgcgtcggctggttgattccgaccatgtcgatgttgtttttggcccgaacacctcggccgaggccctcctcgtcaagcccgtcgtggcggaactggagaccccacttctgagctttagcggagcggttgagatgacggtgccgccgagtccttgggtttttcaggcggtgccgaataaccggctggccgttcagcacttcctcggctttctcaagcgaaagaacttcagaaaaattgcgttcatcgcctctacggactcgttcggacaaggcggagcgacaatgttcaaacagcttgcgccggattacggcctcacgatcatcgcagctgaggagtttggtcttcgcgacaccgatatgacgccgcaaattctcaagatcaaaggcctgagcccggaggcgatggtcatctggagtattaatcccggtccgagcattattctgcgaaatgcaagggccatcgggtttgacaaggcgatcttcaacagcaacggggttgcttcaccgcaatttatcgatcaggtcggcttcgctggtgaaggtacgtggctttcagcgccgcgcctcctttctcccgacagtttgcccgatagcgacccgtcgaagcccgtcgttaccaaactttatcagagctacgttgcaaagtggaagaaacaacctgcggcgtttgcggccataccgcacgatgcgctcctggtgctcgaatcagcgctcggtagtgtcaatggtgcggtgacccggaaaaatctccgcgatgccattgagtctgtgaccggcgtcgttggcgccaacggctcctataacttctccagccagaatcacatgggattggacgatagttctcatccgatggttatgatgaggattgtgaacggtacgtttgtagtggagccgtga

SEQ ID NO: 5778 - DNA, 876 bp, BradyrhizobiumColbertium
atggatgccctgggtcaaaacctcgtctccgccctcgtctcgggcgccatctacggcgttgcaggccttggtttcaccgtggtgtataatgccacgaaggtgatgaatttcgctcaaggcgaatttcttatgatgggggcattgatctccgcatttttcgtaacgtcgtttggagtgtacgtcgtcttggcgatcgtgatcgcgaccatcgcgaccgtcttgcttggtgtcactctcgatcgatgggtcatccagctcagtcgccgcaagacaccgttgaacgcggttatgatcacgcttggtgcggctattactttccgcgggctcgctgtcgtcgtaatcgggcgggacgttctgttcgaacctccgttcggtggcattccaaccatcactttcggaaatgtgtacgtgtcgagccagggcgtctggatcctgttgatgctcatcgttttcagtgtcggtctgtcttacatgttcagcaaaacgcggattggtatgtcgatgcgcgcagccagcgacaatccgcgcgcagcgatgctttgcgggatcgatacacgatggacctccatgcttgcgttcggcctcgcgtccgcgaccggggcggtcgctggtgcattcgtcgcgccgatctcgtcagctttctatgagagcggactttttttcggcctgaaaggttttgcctctgcgatgctcggcggtctcgggtatcctgtgggggccattatgggcggcatgctcattggtcttgttgagacgctttcggcgggctatctcacatccgtttataaagatgcgatcgcgctgactgtgctgatccttgttctgctggtgatgcccgacggcttatttggccgcgcacaagtcaagcgtgtgtaa

SEQ ID NO: 5779 - DNA, 261 bp, BradyrhizobiumColbertium
atggtggtcaaagctgagctcaaggcggtattgatagcggccggaatcgtgctgctaacctttgttctctctccaagcgattttcacctcacggttctgaccgtcgccgcgcttcacggcatagccgccgttgcgctctcgcttgatttggttgcgcaggcgtcatttcgctcggctctgccgcctttttcggtatcggagcgtatggcgttgcttttaccgtgcagaacggcattccgacgtttgcagcgctggctctag

SEQ ID NO: 5780 - DNA, 492 bp, BradyrhizobiumColbertium
atgacgctgctgctggtctgcgtcattggattcaatctggtgcacagcgcacgaggacgagcgatgcgcgcgttgcgatcatcggagatcgctacgtcgtgcctgggcgtggatacagttggcgttcgcgtgatggtattttcactttcctccgcgctgaccggactggcgggtggactctatgcgttcttcatgggctcgtttgccgcgacggcatttgaacccggattgtcgatcgacatcttgatgatggttctgatcggttcgacatccactttgtggggcgctgtcgtgggcgctctcgcgatcaccattctgcccaaccttctggatggcttcgatctctacaaacttctggtgtttggattaaccatgatggcggtcatggtgtttttcccggatggcttagtgcagagcgccgtcgatggcgtcaggaacgtggtgcgtaagccgtcggaagatgcttcgatccggaacggatcgccaccatga

SEQ ID NO: 5781 - DNA, 777 bp, BradyrhizobiumColbertium
atgagccttgtcatcgacaatttaacgaaacgcttcggtggtatcgcggctgtagacggcgtatcatttcttgcacctgccggcaggatcaccgcgctcatcggacccaatggtgcgggcaagaccagcgttctgaatctcatttccgggacggcgtttgcggactgcggtcagatcgagctgaacggcgaagacattcgcggctggcccgcgtgggcgagagcacgcaagggactggcacgaaccttccagactcctcagttgttcgaagggatgacggtgctcgagacggtgatggtgggctgtcatgggcgggcgcttagcggattgttttctgtgttggcgcggacaaggaggatcgcacgagaggaggagatgcttcgcaaggaagccgaacgcgccctcgactatgccggcgttccctccagtttatggcgccgtattgcgacggagctcgcctatgggatccaacggcgcatcgagatcgcgcgcgcggtcgcgatgaacgcgacgacgtttttactggacgaaccggctgccggtctcaatccttctgaaacccatgaattgtccggtcttttgctgcggctgaagtccgatggaagatgcatgctgctcattgagcatgacatgcaactggtcatgaggatttctgaccacgtggtagtgatgaatttcggccgcaagatcgctgagggtagttcgcgcgaagtccagactcatcctgatgttctgcaaagctatctcggcatggagtcgaacgatgctcagggttga

SEQ ID NO: 5782 - DNA, 708 bp, BradyrhizobiumColbertium
atgctcagggttgactcgctggtcgtcaattacggagtcatcgcggccctgaaaggagtttcgcttgaggtggcgcaaggagagatcgtgacgttgatcggcgcgaacggcgcaggcaagtccactctcctgaacgccatcagcaaggtagttgacatccgctcgggtgaggtgtggctggatggaatcccgctgcacaagctgcgtggatgcgtcgtcgcatcccagggcgtggtgcaggtgccggaagggcgccaggtctttaaggacatgaccgtttttgagaacctggcgatgggaggttatcgtcgcagccggtcggaaaacgcggagatgtacgagaaggtattttccatgtttccgcggctcgccgaacggcgcaagcaattggcgggactgatgtccggaggcgagcaacagatgctggcgatcgggcgctcgcttatggcgaggccccgcgttctgcttctggacgagccatccatgggcctggcgccgcttatcgtcaccgacattttcaaggtgctgaagcgcctcaatgacgaggggcaggcgatcctgctggttgaacagaatgcccgcgccgcactgaagctggccaggcgtgcatatgtcatcgccaacggtgaaatcacccatcaggggccggcgtcaaagttgcttgatgatccgcatgtgcggacaacttacttaggtatagaacactga

SEQ ID NO: 5783 - DNA, 990 bp, BradyrhizobiumColbertium
atggcgcccatccgcgtagtcatgttcggccttggaacggttggccaggaagttgcgcgcgcacttctgacgaagaagggcgtgcagatcgttggtgcgatcgacaagggcgcggcagtcggccaggatgttggacgtgttatcggcggatcgccgctcggcgtaacggttaccagcgatgcttcgttcatgaagcaagccaaggccgatgtgatgatccattcgacgtccaccaaggtgaaggatgtctacgagcaagtccttccggcgctcaatagcgggtgcaatgtcatcacgggtggcgaggaaatttccagcccttacgtgtacgataaggagtacgcaacgaaactcgatgaggtcgccaaagcgaacaatgtgcgggttctcggcaccggcttttggccgacctggatggatattgacatcccgcttctgctcagcgccggatctcgaaacgtcggctatgtccgctactcccgtaagtcggatttccggccatacatgaacagcgtggtggcgaaacatttcggtgttggcgtgactgtgagcgagttcgagaagcagaaagccgccggagttatcgtcgggcatgtcggatttgaaggctcctttgagcggttgagccactatttcgggtggaatatcgatatgatcgagaaaaccgttcgcccgctttatgatgattacggcgtctcgcatgccgtggagacttccgcagtggcaaaggagaaaggacgcatccgggcggaaatgtctctgcacgccgctactcggccggacatcgagagttacgatgtcatcgaaatcagaggcgagccggatatacaaatgactatctcgccggccgtgggcggccctcgcccggtggcgaacatgctggtgaatcaaattccgttctgcttgagcagcaagcccggcgtggtcatgcggcctacggtgcaagcgttcgcgttcggcgcggactgcgcatcgttgatccattcctga

SEQ ID NO: 5784 - DNA, 1023 bp, BradyrhizobiumColbertium
atgaaggtaatctggagcgatgctcagttggcttatgagccccatttctatctaatccgcggcaaggtcacatcgagttatgaagtcgccggtcgcgccaaaatgcttctcggtgcctgcaggcaaatggggttgaccatcgctgatgcgccggtcgcaccaagagaggcactggagcgtgtccataaacccgattacatcgagttcctccagcatgccgcccgggaatggcgcgcggagggcgggaccgagctacttcccacgatgtatccgacgccagagatgttgcaggacggtacgacgatccccaagaacgttcttggccgggccggctggtatgtggtgggaataggtgctccgatatccgaacacacctggacttccgtcgccgctgctgccgattgcgcggcggaagcagcgcgtcaggtttccaacggtattcccgtcgcgtatgcgctgacacggccgcccggacaccatgcctatccggcacgtgcgggtggacattgcttcttgaacaacgcggcaatcgctgcggaggaattgcgtgcgggcggagcccggaaggttggcatcctcgatcttgatgtccatcacggcaacgggatgcagcacattttctatcatcgttcagatatcagtacggtgtcgattcacggggatccgagctatcagtatccctggtttgtcggatatgccgacgagcgaggttccggagcgggcgaggggcacaatctgaatatcccgctaggtcgcgacactcgcgacgacgagtggattgcagcgatatcgcgcggcctggaggcgctccagtgctgcgacgtgcttgtcctcgcgcttgggtttgacacgagcaagcatgaaccgctcggcttttttgggatttcggacggtgcttacgcccacgccggcgcgctgctttcgaaagcgcgcaaacctctcgtaatcgttcaggaggggggatattgcgtcgatgacctcggccggctgcttacaaattttgtgacggggttgaaggactag

SEQ ID NO: 5785 - DNA, 1506 bp, BradyrhizobiumColbertium
atgaccgtttatcgccccaccgttgcagaactccagcaagccgcgatcgaactcgggctaatcctttcgctcgaagacgctgcttcttttcattcgctgatgcagggacagcttgatgcttacgacctcgtagatagcatggtggcgccactccccgaggttgcttatccgcgaccgcccggggtccgtcctcaccctaaagataacccgtttggcgcatgggcggtgaagagtcgtatccaaggtgcgcccgaaggcaagctcaagggcaagcgcgtcgccatcaaagacaatgtctgcgtggccggcgttcccatgatgaacggctcgtcaattctcgaaggctatacgccggagattgacgcgacaattgttacacgcatgttggacgagggtgcggagatccttggcaaatccgtctgcgagtattactgcgcgtctggcggcagccatacctcagcaaatggcgtggtcgagaacccggttgtaccaggctacaatgccgggggatcctcatccggctcggccgctctagtgatggccaatatcgtggacatggcaaccggcggcgatcagggtggatcgatccgtatcccggcgtcatattgcggagctgtgggtctgaagccaacccatgggttggtaccttacaccggcatcttcgcggtcgaactgactgtcgatcatgcggggccgatcacccgaacggttgcagacaacgcgctcatgctggaagtcatagctggtccggatcggcttgatccgcggcaatcgggagcagttgctcaaccgtatacacatgctctggatcgaggcgtggcgggcctgaaggtgggcgtcgtcacagaaggattcggcacgcccggcgccgaagcggaggtcgatgcccgggtccgggaagctgcggaccgtctcggcgagatgggagcccacgttcattggctttcggttccgctgcatgccgcgggcgcagcgatctggacgccaatttttcttgagggtgcgacagaactcatgatgcgcggcaacgcgtatggcaccaacatgaagggggttttcctcgagagtttgctggacgctcactcccgttggcgtgaccgggccaacgaactgtcggagaccctcaagcttggaatcctgactggccattatatgtcgtcgcgaaatcgcggccgctactacggcaaggcacaaaacctcaatcgattgctgacggccgactacgacagggccctcggccaagtcgatgtgctgcttatgccaacaacaccgatggctgcgacccggttgcccgcccctggtgcttcgcgggaagaaatcattgctcgtgcattcgagatggtcggcaatacggcgccgacctgcctaacgggccatccggccatctctgttcccgccggcaaaacctcggacggccggccgatcggcgccatgctcgttgcgcgtcacctcgacgagatgacgctgtacagagcagctgcgggtttggaagcttgttatcgctga

SEQ ID NO: 5786 - DNA, 114 bp, BradyrhizobiumColbertium
ttgagccgatcatggctactctcctggattctcatgataccgatcgtgctgttcgccgcgccaataatcaagcgccttaccagcctgattgtgcggaagagcgaggagcattga

SEQ ID NO: 5787 - DNA, 1077 bp, BradyrhizobiumColbertium
atgactaagtacaacatcctcatccttggcgcgtcctatggttcgttgcttgcctcgaagattcttttcggcgggcattccgtcaggctgatatgtcttcccgcggaagccgatctgatcaatgccgagggttttcgaattcgtctcccgctgcgacgcggtgatacgtcagtcgaactcgattcccgcaagctgcccggccgggttaccgcgtctggcacggagggcgtcgacccccgagactacgatcttgtcggccttgcaatgcaggagccccaatacggatctcccggggttcgaggattgatgaaggatatcgcagcgagcggcgtaccgtgcatgtcgatcatgaacatggccccactgccctatatgcggcgtatccctggccttaactccgacgctctcctgccctctttcaccgatccggaggtgtgggcagattttaccccgggacgggtgaccttgtgcagtccggatccacaagcgatccggtcccccggccaggacgtgaatgtgctccaagtgaccttgccgaccaacttcaaagttgcacgtttcgacgatgaaaggtgcaacggcatgctgaggcagctcgagcatgacattgattcagcgagcctcgatatgccggaagggccaatcgaacttccggtgaagcttcgatttcatgaatctctttttgtaccgctggcgaaatgggcgatgctgatggcaggtaactatcgatccatcacagacgaggggatgtgctccgtacaggacgcggtccatgctaatctggaagaatctcgctccatctacaactttgtcaacgaaatatgcgtgaagataggtgctgcacgcgccgatctcgtaccattcgagaagtacgcagccgctgccgcaagcctgtcccgacctgcgtccgccgctcgcgctgtaaacacgggcgccgttaacatcgagcgcgccgacaagctggtgaggcttgtagccgcggagaaaggcatgagccatcctatactggatgccatcgtggcgcgtgtcgacagaagactagcggcgaacagagcccggaaggcgggtgccgtgtga

SEQ ID NO: 5788 - DNA, 744 bp, BradyrhizobiumColbertium
gtgacaatcaaagcaattgttttcgatgcgtacggcaccctctacgacattcagtcagtcgctggtgtgaccaatcatgcctttccgggctatggcgaactgatcacgcagatctggcggatcaagcaactcgaatatacgtggctgcgctccctgatgcgacgctatgaagatttctcggtgattacgcgcgattcgttaacctacacactcaagacactaggcttgccctatgatgaaaagctgttcgaaacaatcatggacaagtatgtcaatctcgatctctatccagacgcgaagccgacgctgctgggcctaaaaaactacaagcttgctattctttcgaacggcagctctgacatgctgattagcctggttcgcaatacaggtttggacgcaatcctggatgcaaccatcagcatcgatactaaaagaatcttcaagcctagcccggaagcctactctcttattgagccccggttgaatgtgaaaccatccgaggtactttttgtctcgtcaaatccgtgggacgcgattggcgcgcagtcggcaggattgacggtagcttggatcgagcgggtgaccccgcaaacgatcgcggaaaatgtcgcaaaaggcgattgcgttgctcctcttaccttgtttcgtgccctgcgcacgcagatggacgagctaggattcgtcgttcaccacagggtggccagcttggaagccttggagaacatcgtagcaaggcattcctag

SEQ ID NO: 5789 - DNA, 1347 bp, BradyrhizobiumColbertium
atggacggcgccttctatgcgctgggtccgctggttgcattctgcacggtactgtttttgatagccgagccgctgcgcaattccggaaagtatacccttggcgatgttatcagaagccgcatgcaaactcgcacttccttgctcgcagcgattacgggaacggttgtcgtcaatttcgcctacctaatgccccagatggcgggagccggggtgctggtgcaactgctgacagggattccctacaatctggcggtgatctttgttggcatcagcatgatcatttacgtcgcgtttggtggaatgctggcaactacctgggttcaaatcgtaaaagccgttctgatgctcggggccggcgcaatcattctgatgatggccctgtccttcgttcacttcaatcctctgacgctattttcgaacgtcgaagcgaagtatgggacagggtttctagcgccgggaaactacctgaaaaatcctttcgatcagatttctctgggtctgggttatgtactgggtctcgcgggtctgccgcatgtcatgacccgcttctatacggtaccggacgcgcagaccgcccggcggtcggtcgtgtgggtgatgttcctggccggcgctttctttgcagctaccacgctctttgggctggctgctgccgacttcgtcggccacgacgccatccgagctgctgacaaaggcggcaatcttagcctgccgcttcttgcccagcatcttggaggtggcaagggcagcttcggaggcgagcttatgctgggttttgtcgccgcggtggcagtagcaaccattctcgctgtcgtctcagcgcttacgttatcgacctcaagcacgatcgctcacgactattacgtcaattggctcaaaggcggcaaagtcgacggaaagcaggaagtgctcgtcgcgcgtgttacgacggtggtcattggctttctcgcgattgcgctaggcatcctcgcccaaggtgtcaacgtcgcggtgctggtcatcttggcaatttgcgtggcagcgagcgcgaacttccctgttctggtcctgtcgctgttctggcggcgcttcaacagcgctggtgtcgtgtgcggaatgctttccggcctgacgagctcagtcatcctcgctttgataggacccgcgatgcgcgggagcgaagccctatggccgctcgtcaatccgacggtcgtttcgatgccactgggcttcatgggggccctgcttggttcgctgcttgcaggccgagacctagataacgaaagacgtttcgataggttcttgatgcaagtccatacgggctcttcactggacgaatccagcgctgccaggagtccgcggccgtga

SEQ ID NO: 5790 - DNA, 315 bp, BradyrhizobiumColbertium
atgtcgcttggagacgcaccggcgggcgtcgcgaacgcggacgttcgatcgctcatagctgcaaaggttcgtttcctggtgcctatgaccgcgatctttatggtcagctatatcggtctgacggtcttggcaggattcgcaaagggctggctgaccattaaagttgcggggccgcttaacttgggcttcgcgctaatctttctcaactatctgatttcctggctgcttgcggtcgtctacgaacgcatagccaatcacgttttcgatccactcgcagcggaggcagtttcctccagctatggaccgctgtcatga

SEQ ID NO: 5791 - DNA, 924 bp, BradyrhizobiumColbertium
atgttgattatcggtgttcgcgattatggagatcgggcggtgaacctggatatcgactgccttcgttcattcctcgtcgtagctgaaacgatgagcttttcacgagcggctgacacggtaggtcggtcgcaatcgacgatcagccaacaaatcgcgaaacttgaaattcaagttggtcggccgttgctgtcgcgccgaaagggcagagtgttggaattgacgtcggagggcgaccgcctcgtgcagtatgctcgccggattctgcaactcaatgatgaagcgtgcgcctcattgtgcgaggatcttctgacgggcttcgtgcggctcggcgttccgctggatttcttcgggcgggacttcacagtgtggcttgcccgcttcaaggcaaagcatcctatggtcggccttgaagtagaggctaatcagtctgaaggcctgcaaaagcgcagcgcccgcggggattttgatcttgctttcttcaaacaggaggctggtgccaagcttggcatcgttgcacaacgcgaacaactggtgtgggttactgggccgaattttgcgctagacgaattggaatcgattccgctgatactttttcccgaaggctgtacgtaccgccgctgcgcgatagcgtccttgcgggagcagaagtccaagtggcacctcagctttgtaagtccgagctttgactgcctgaagtcggcggcgatcgaaggtatggggataactgttcttgcgagagcattggtatccccgcctttgcagatcgttcggcacgcccgccgtcttccccaactgccggcgatcgaactagcctattctcatggtcgtcgtggcaattctcgtgtagttgctgagctaactaatcatcttgccgacagcttggctgccgctggtacccagccgtcaccgattgccattctgtga

SEQ ID NO: 5792 - DNA, 132 bp, BradyrhizobiumColbertium
atgtacctgccgcgcttcttgcaggaaaccacgcagatgatctgtgcttctgcgacggggatcgcgagggtttctttcgaggtgttcggccccaaactcgtgcggcgccatctcgcagacgcccactcctga

SEQ ID NO: 5793 - DNA, 1566 bp, BradyrhizobiumColbertium
atgtttgctccgcacggtctctgcctgcagtgggatccggagcttctcgttgtgcacattatttcggatacggtcatagcgttatcctacttctccatcccattcgcgctcgcctacttcgtctggaaacgcagggacgtggagttcggctgggtattctgggctttcgccaccttcatcatggcgtgcggtatctcgcacgtgatgtcgatctatacgctttgggtgcctgcatacggtctcgaaggcgtcgtcaaatccatcaccgcaatcgcctctattgccacagccatacttctttggccccttgtccccaaactgctggcgctcccttcgccggcgcagcttcggctggcgcatgcgatgctcgatgccgaggcccagcagcgacgcgaggctgaagcgcggcttcttcagtcgcaaaaaatggaggccgtgggtcagttgacgggcggaatcgctcacgacttcaacaatctcctgatggtaatctccggaaacttggaaatcgctcgacgcgctctcggtcagcatggccaaacgggtctcaagagggccagccgcgcggtggaaagcgcctccgatggcgcgcaacgcgccgccaccctgacgagccgtctgttggcgttcgcccgcaagcagccgctggacgcaaaggtcgtcgatctgaacagcatcatcatggggatggccgagttcttccaacgcactttaggtgagacggtcaagctcaataccatcttcagtgtcggcctttggcgggtcgaaaccgatcccaatctactcgaggccgccgtgcttaacatcgtcgtcaacgcgagggacgccatgcctcatggcggaacgctgacgatcgagacaagcaatgccttcgtcgacaacgacattgcgcggtcgattgacgatttgcaggcgggtcactacgtcgtcatctcggtgactgacgacggggtgggtatggaggctgagacaatcgaacgcgcttttgagccgttcttttccacgaagcagaccgggcacggaacgggtctcggcctgagccaagtctacggcttttgcaagcaatccggaggtatagccaagatctacagtaagcgtggcgccggcacgactgtgaagctttacttgccacgatctctccacgaacgggaagatgaagcgagcgtgagcaacccgctccatccgcaaattcggggcatgggagaaaccatcctggtggtggaggacgatgagggtgtcagaaggtacgtggtggagacactaacggatctcaactatcggatcatcgaggcaaagagcgccgaagaggccgttccggtcttcgagcaaaattcccgcgagattgcgcttcttcttacggacatcgtcatgcccggaaggaacggccggcagctcagcgacgtcctctgcaagcagaagccgggactcaaggtcatcttcatgaccgggtactcccgtgatgctatcgttcacaacggccggcttgaccagggtgtcgagctgctgcaaaagcccttcacccaagcagctctcgcccaaaaggtgagacagcttctcggattttaa

SEQ ID NO: 5794 - DNA, 585 bp, BradyrhizobiumColbertium
atgatttttggcagaagcgacggtgtttggctgaatgagccggaaaaatgggcggcagagaatgatagtctgcgaatattcacggacaaagctaccgacttttggcgcgaaactcattacggttttattcgcgacaatgggcatttcctaggttttccgacggacgacgcattcaccgccgagctgcgtgttcagggcaacttccggacgctctacgatcaagcggggatcatggtgcgcatcgatgggcatcattgggtcaaagcaggggttgaactttcggatggccgcgccatgctcgcgagcgtgctgactctcgggcaatcagactgggcgactgctccgtatgaacatgaccccaacgacttttgggtccgcgcaaccgtcagcaacggagtcctccgtctgcaagtctcggccgacggcaagtcctggccgctcatgagactggcagcgttcccgaaggcaagctcttacctcgtggggccgatggcctgcacgccagaacgggctgggttagaagtcgtgttctcgaagcttcgtctgagtccgcccctcggaaaagacttgcacgacttgagctga

SEQ ID NO: 5795 - DNA, 183 bp, BradyrhizobiumColbertium
gtgatctgctcgaaggagtcggcgaatggaccgcgtgcccggcgcttcaaccagtggagcgccaaacaagtctgcgggtatgtcgaaacgctctggactttgatcgttgagtccacatcgtcagtgcccaccagcatgccagccgtgctgaacgaggctcaaattggaatcatcttgctgtga

SEQ ID NO: 5796 - DNA, 1218 bp, BradyrhizobiumColbertium
atgaactcgatgcaacaagcactcgcctgtttcggtattgcggccgcggtcgtcatggcaaatgacgatctcatggcacagcagccgccgctgaggatcggtatcctcgaggatatgtcgggcccgttttccgatctgggagggctaggcaccgtcactgccgtccggctcgccgttgaggacttcaaaggctccttgctcggccggcagatcgaggtcctggtcgctgaccaccaaaataagccggataccggggcttcgcttgcgcgcaagtggttcgatgtcgacgacgtgcaggccattttcggcgtcacagcgtcgaacgtagtcattccagttcagcagctggccaaagagcgtaagaaaacgttcgctttcgcgggagcgggagccgatctgaccgggcgctattgctctctttacagctcggggtggaatctcgacaccttcgcagcggcatctgtcaccgcacgttcgctgacacgtgctggacgaaaaacgtggtttactgtcgctgccgattacaccttcggccatcaacttgaacgagacctgaccaggtttgtcggcgaagcaggcggacgcatgatcggctccgttcgcacaccgctgaattcagcggattttgcatcgttcttgctgaccgcccaggcgtcccggtcagacgtcgtcgcgctggcgaacggcggacgggatcttgccaatctcatcaagcaagctgccgagtttggcttaggcaagcagcagaccatagctgctccgaccctgttcatcaccgacattcacgcgcttggtctctcaaacgttcaaggcctgattcacgcatccggtttctactgggacaaggatgagcgcagccgcgcattcgcccatcgcttcatgcgtcgctctgggggcgtgccgccgaccgaagtgcaggcgtcgatgtacagcgcggctctccactacttcaaggcagcgcaaatcgccggcagcctctccggccagtctgtagctgagcagatgcgcgttcttcccgtgcaagacgacgtaaacccaaatgcttacctgcgacgcgatggtcgcttaatgaagccgattcacgctttgcgagtcaaagatccagctgagtcaaggggcccctgggactatgcggtagtcgagagcaccacaagtccggaagacgctttccgatccgcagcagaagcggggtgtgttatttccgatacgcccaattag

SEQ ID NO: 5797 - DNA, 1503 bp, BradyrhizobiumColbertium
gtgacatatggcgacgccgcgatagctattgaccgattcgcaggcgcgctcatcggggagggcatcagcgccggcgaccgcatcgcctatctctcgcggaacgacctcgacatggcgctcatgttcttcggagccgcccgcgtcggcgtcgtgcccgtgcctctcaacttgcggctcgccccgcgggaatgggctgaagtgatgagcgatgccggcgtcaagcttctcttcgttcaggacagtttcgtgcccgccatcgaggagttaatcgctggggttccgtcaatccagaggtgcatcgtggccggcaagtcaagctgcgaaagctggaccactttgcatgactggctctcggcgcacccttctctcggtgccgatcacccaataccgcgatcggaggacgtgctctgccagatgtacaccagcgggacaacgggacggccgaagggcgtgatgatcacgcacgccaattacgatgccgctataggccagattatccgtgcgctcgagcgacgcccttcgattggcgcaacagcactggtggccatgcctttctaccacgccggaggcctatacatgctggcaatcgcgaccgcgcttggcttaatcgcgatcattcatccggaattcaatccgcgcacggtgtctgacagtctcgtcgaagagcggattgcgctggctctcttggtgcccgcgatgatcaacatgatgttccaagaggtacccgatctcccgcagcgcgattggagtgcgctgcagagtcttatgtatggtgcctcgcccatttcgataccattgttggagcgggcggttcgcacattcggctgcgacgtctaccagtgctatgggctgacggagacgaccgcgactctcaccgtgctcggcgcggcgtgccatcggaacgctctttcaggcgatgcggatgatatgcgtcggcttgcgtccgccggactcccactcccgggcactgatgtgcgtgttgtggatggcaatgatcgatcgctaaagccgggcttgatcggcgaggtggtagcgcgcggtcctcagatcatggccggatactggggccgaaatagcgagaccgagactgcattacgcaatggctggttccacacgggcgacgccggacggatcgacgaagccgggtatctctttctcgaagatcgcctaaaggacattattgtcaccggaggcgagaacgtatcccccagcgaaatcgagaagatcctgatcgagcacccggccgttgccgaggctgcggtcatcggcgtgcctgacgaccgctttggcgaggctccactggcgtgtctcgtgctcaacccgggcgtggcagaacctattccggacgaacttatcgcattctgccgaggacgaatcggcaatttcaagattccgcgccgctacgtgacgatggcggttctcccgcgaaatgcagccggcaaagttctcaagcgcgaattgcgcgcgccgttttggcgcgaacaagatcgggcgattgcctga

SEQ ID NO: 5798 - DNA, 1248 bp, BradyrhizobiumColbertium
atgcatgacgccaacacatcgttgcccgccggcacgtattcgcgcgcacacgaccatgccgagcgctaccagctgatcgggatgaccggatcgccctattccatcaagatgcgcgcgatcctgcgataccggcgtctgccgttcgactggatcgtccgtttcccccagttggaggccgaaccgccgccggtcaagccactcgtcgttcctatccttcgctttccggaagacggaagcttccatgtcgactcgacgcctctcgctcaggttctcgaaaggcgtcacccggccgcgcgctcgatcgtgccagatgatacggctttggcctttctggctgacctcatcgaagacatggccgatgagtgggttacaaagatcatgtttcacttcaggtggtattaccctgacgacgtgacgtattgccaacgttggatcgccagcgatatccgtcccgaagccggctctgcggaaagagaacgcatcggcacagcactggcgacgcgacaaatcgagcgcatgccgcttgtcggctgtacgccagagaacaagccggtgatcgaaggaagttatcagcgcctgcttggcatcctcaatcaatcgctcgaagctggcggtgcgcagtatctgttcgggtccaggccatcgcttgcggacttcgccctgtacggtcagctccaacaacttgcgacagatccggtgcccgcggcgctgatgcgcacgcatgcgcagtcactcgtcgactggttacgtcgtctcgatgacgcttcgggcgtcgacggaaagtggtggagtcgtgacgaggcactcacgtcgccaacgctgaagggcctcctatcgatcgccggcgacacgtatctgccgtttcttgccgcgaatgctcgagcgattgcggcgggtcagacctctttctcactggatatcgcaggtcagccctattcgcaaagcgtgttcaagtaccaggcgaagtgcctcgagcgcgtgcgtcagacctaccaggacctttcgttccgcgcgcgatacactagatcccctgctcgcgggcacgggctgtcttccgtatcttgcaaactgattgagccatcgcgcgacgaacacgtgggtcgcgcgataccagacttactgaggaggacgcatagcaatgcttttcttcgacagtctactgcatcatgcgcgctgccgaccgaaaggaattttcgctcgtcaaggtgtgcgtcaagtgacatatggcgacgccgcgatagctattga

SEQ ID NO: 5799 - DNA, 858 bp, BradyrhizobiumColbertium
atgagtctaagcggcaaggtgctgttcattacaggcgcgtcgcggggcattggtaaagcaatcgctttgcgtgcggccgccgatggcgcagcaattgcgattgccgcaaaaaccgcaactcatcatcccaagctggacggcacaatccactccgtcgcggaggagatcgaaagggttggcgggcgcgctctccccctacaagtcgacgtccgcaacgcggatcaggtgaaaatcgccgtcgacaagaccttcgagagtttcggcgggatcgatgtgttggtgtgcaacgcaagtgcaatcgatctcagaggcacactcgacacgagtctcaaacgcttcgatctcatgcacgcggtcaacgcgcgcggcaccttcctttgcggccaggcgtgcattccatatctgaagcaagccaaaaacccgcacatcttagctatctctcctccgttgcatttcgaagatcattggtgggccgatcatctcgcttggacctgggccaaatacgggatgagcctttgtgttcgcgcatgggcggaggaattcagatcggacggcatagccgccaatgcgttgtggccccgcaagaccatcgcgaccgccgcaaccgcaatgttgggcggagacgaaccatttcatgatcgatgccgtcggccagaaatcatggctgacgcggcgcacgcgattctgacgcgaggatcgacggcctgcacaggtcgcttcttccttgacgaggaggcgctcgaggaggctggcatctcgaacttcgcgcgctatgcagatcggcccgattcagaactctacacggacttgctggtggacgaatcgaacgccgtacgatggaccccggcccatgcatga

SEQ ID NO: 5800 - DNA, 636 bp, BradyrhizobiumColbertium
atggacaccgaagcgctcatcagactgctcgtcgccgacaagatcctggggttgaaacccgacacggcggtgcggctcgcgcttgccggcggcacgatgatcgcgggcatcacgttttttgtgggagtcggcttccgctctgacatcgccgatgcggcgcaatccgctcgatttctcgcgaaattcgccgtcactgtgccgactgtcattgcggccactatcgcgcttccgcggttggcgcaaccgtcagcatttgtcaaacgggccggtctggcgcttgtcatttcacccctggtactgcttttggctgttctggtggagttaaccacggttccttcatcgctttgggttgccaagatcatcggaagcaacgcatcgaattgtctgacgctcattccgatgctgtccgcaggacctttgatttgttttctggtcgcgatgcgagcgggcgccccgataaggcccggactggcaggtgctttggcaggtctcgcggcgagcggtattgcggccaccttttatgcaacgaattgcaccgacgacagcgcgctgttcgtggttacctggtatccattggcgacaactatcgtgattgccgcgggttacacagcggggcaaaaactactgagatggtga

SEQ ID NO: 5801 - DNA, 927 bp, BradyrhizobiumColbertium
gtgattgaagcgttgaggacaccagaagagcagttttcgaagttgccgtcctttgattacgtgccgcgctatctggatgacttgccgggttatgagggcctgcgagccgcctacattgatgagggtccatccgaggcggacactttcttctgtctccacggccagccaacctggagctatctttacaggaggatgatcccggtctttcttgaatcgggcgcccgcgtcgttgcgccggacttctttggttttggacgctccgacaaaccgatcgaccagggcgtttataccttcaaattccatcgcgattttctgctccgtttggtcgagcgtctcgatttgcaaaggatcacgctcgtttgccaggattggggtggtctgcttggtttgacgttgccggtcgacacatctttcgagccgcgtcttcgcaggctgctggtgatgaacaccaccatcgcgacgggcactccgccgagcgacgggtttcttgcctggcgtgcttactgcaaagcccatcctgatctgcagatcggcaagctgatgcagcgaggcacttcgcatctatccgacggggagatcgccgcatacgacgctccatatcctgacgcccgttacaaggccggcgtgcgcgcattccccgagatcgtcatgacaaatcccggcatgccgggcgtttccgaaagcgttgccgccgagaaatattggtcgacacgatggaatggccaaacattcatggcgatcggcgccacagatccggtcttgggtctcgaggtaatggaagcgctacggaccaaaatacgcgggtgtccgccgccgctgatcgtgcgaaacgccggacattttgtccaagaatggggcgagaacgttgcctctgctgctctcgcgtcctttgcgcaagatgcggcgagggtgtcgtcgaaaacctag

SEQ ID NO: 5802 - DNA, 228 bp, BradyrhizobiumColbertium
gtgagggcctataatgtcggctcgggcacaccgcgaaccgtgggcgacatggcttgggcgctgtccaaggccaagggggggcccgatcctcaagtcacttatggtttcaggttgggtgacgtccggcacatcacagcggattcctccaggctcagaaaagaaatgaattggaagccggaagtcacgttcgaggacggcatgatcgagtttgccaaagccagcacgtga

SEQ ID NO: 5803 - DNA, 483 bp, BradyrhizobiumColbertium
atgatcgcccttggacttgtcctcaacaccgtcggcatcggcttgttctgctggctgatcttgacgctggccgtgtacgctttgccgttttttgtcgccgtcagcgccggggtggcggcatttcatagcggcgccggcatcctcggtgcgccgctcgtcggcattgtcgccggcggcgtgacgctcgcgattggacagaccgcattcgcgatcgcgcggtttccgatcttgcgtgcagccatagcggccgccttcgccttcccagccgcgattgctggctatcatgtggtcttcgcgatgtcgcaactcgggatgccctcgctggcatggcgtgaggtcttcgcgtgcctcggcgcggtctttatcggtggtacggcgtggacacggttggctgtccttgcggagccccgtccattggagtcgggcagggtcgtgccaagcgcatctccggcgggtctttctgccgctacgcacgacggatag

SEQ ID NO: 5804 - DNA, 924 bp, BradyrhizobiumColbertium
atgaccgaccatgacgacatcgaaccgccgcacgccgcctctgcaaccgaccacgtcctcagcgaattgcagctcttcggctaccgtccatttgacgatgagccagatccgagaccgctacccgagggcaagatgatcgccggcgcagtcgccgatatcttcgacgccttggttgccaccttgagcgatacgcggctcgagccggaccttagcgatttgctctggtcgaccgtcaacctgttccatcgtgccgcggaccgaattgatcgccatctcgatgacaacgaacaggctcaacgcaagagccagcgcgagcagaatggttcggaagtacgatcggtcgaactcgagcgcctgacggccgaaggcatcacactgatcgagcgccgcaactgcctggagctgttccgcgatcaggccatcgagcactttgagctccacaccggttcaccctggcgcccccgctcgggttcgcttgtcaaccatcgcacgctcacggcggcaatgatcgactcccgggatttcatcgcagccaagcgccgcgcagagaccgaggtcttgttgccacctgggcccaagatcgcactcactggcggcctcgacttcaacgaccacaccttgatctgggatcgtctcgacaaggttcacgccaagcatccggacatggtcctgatccatggcggctcaccaaagggtgccgaactgatcgcctccaaatgggcgaccaaccggaaggttccacagatcgccttcaagccggactggaccaagcacgccaaggcggcgccattcaagcgcaacgacgccatgctcgaactcgtgccgatcggcgtcatgcatttcccgggcacgggaatccaggacaacctggccgacaaggcgaaacgactcggcattcccgtttggaaatttggcggcgcgtga

SEQ ID NO: 5805 - DNA, 1062 bp, BradyrhizobiumColbertium
atggcccgcgacgcctccgaactggcacactgcctcgcgcgcgaagccgaagcggtgtgccgttattatctctccaacggcaggcgccaggggcggtactggctggttggcgacgtgcacaatacgccgggccgctcgatgttcgtgcggctccaggactcaccgaagggacccgctggcaaatggacggatgccgcaaccggcgagcatggcgatctcctcgacatcgtcagggaaagccttggtcttcctgacttccgcgccgtcgccgaggaggcaagacgctttctcaagctaccccgggctaaaccggaaggtgcctcaaaaccggctcgccccatcaccgcggttggctcacaagaggccgcaagacggctgtttgcgatctcaggtccgattgagggtaccgtcgttgagacttatttgcaccgtcgcggaatagcccgcgtgtaccatggtggcagcctgcgcttccatccgcgctgctactaccggcctgacgagcatttgccgaccgagacctggccggcaatgatcgctgccgtcaccgacctcgatggcgggatcaccggcgtgcaccgcacctggctcgatccggacggctttgatcgcgttcggctcggcaaggcaccggtcgacacgccacgacgagccatgggcgacctgctcggtaacgcagttcgtttcggtgtggctgacgacgacgtgcttgtcgccggcgaaggcatcgagaccatgctatcgctacgctgtgtgcttccgacgttgccgatggccgctgcgctttcagccaatcacctctcggccatgctgctgtcgtcgagtttgcgccggctctatatcgcccgcgacgccgatgctgccggagacgcggtccgggcaatcctgacgcagcgcgcagcagccgccggcatcgaagccatcacgttgtcgccccggcttggtgatttcaacgaggatctctacatcttcggcctcgatgctctccgtacggctttgcggatgcaactcgtaccagaggacgtctcccgcttcctgctcttgtcgaccgctgtcgcatag

SEQ ID NO: 5806 - DNA, 2550 bp, BradyrhizobiumColbertium
gtgaggcagatcgtcgaatggttgggctccgattttgacggagtgatcgtcttcgacgagagccacgccatgcaaaatgcggttggtggcaagggcgaacgcggcgaccaggcggcctctcagcaggggcgtgcgggcctcaggctccagcacgccttgccgaatgcgcgggtggtctacgtctccgcgactggcgccaccacggtacacaacctcgcctatgcccagcgtctcggcctatggggcggcgaggattttccgttcgcgacccgggccgagttcgtcgaggcgatcgaggagggcggggttgcagcgatggaagtgctggcgcgcgacctcaaggcgcttggactctatgccgctcgctcgctgtcctatgagggtgtcgaatacgaactggtcgagcaccagctcacagcggagcaggtccgcatctatgatgcctatgccggtgcattcagcatcatccataacaacctcgaggcggcgatgcgggccgctaacatcacgggcgagaccggcacgctgaatggacaggcaaagtccgcggcccggtccgccttcgaaagcgccaaacagcgcttcttcggccatctcttgacctcgatgaagacgccatcgttgatccgctcgatcgagcgcgatctcgacgccggccacgctgccgtcattcagatcgtctcgacgggcgaggccctcatggagcgacggctcgccgagatcccgaccgaggagtggggtgacgtccaggttgacatcacccctcgcgaatatgtcctcgactatctcgcccattccttcccggttcagctctacgagcctttcactgactcggagggaaacctctgctcccggcccgtctatcgggacggccagccggtcgaaagccgggaggctgtcgtacgccgcgacagcctcatcgagaagctcgcgtcattgtcgccggtgcccggcgcgctcgaccagatcgttcagcgatttgggacggacatggtggccgaggtcacgggccgctcgcgccgcgtgatccgcaagggccagcgtctcatcgttgagaaccgtgcggcatcggcgaatctcgccgagaccacggcgttcatggacgacgtcaagcgcatcctcgtgttctccgacgcgggcggcacgggcaggagctaccatgccgagttgtcggcgctgaatcgcaggttgcgtgttcattacctgctcgaacccggctggaaggcggatgccgccatccagggcctcggccgcacgaaccggaccaatcaggcgcagccgccgctatttcggccggtcgcgacagacgtgaaggcggagaagcgcttcctctccacgatcgctcgccgcctcgacacattgggcgccatcacccggggtcagcgccagaccggagggcagggcctgttccggcccgaggacaacctcgaaagccagtatggccgtgatgcattgcgccagctctacatgctgctggcgcgcggcaaggtcgagggctgctcgcttgagagattcgaagatgcgaccggactgaagcttatggatgccaacgggctcaaagatgagcttccgccgatcacgaccttcctgaacaggctgctggcgctcactatccaactgcagaatattctgttcaccgccttcgagcagctactgaccgcccgtatcgaaggcgcgatcgcatcgggtacctacgacatcggactggaaaccctccgtgctgaaagctttgtcgtcactgatcggcgaacgatctatacacatccggtgacgggcgccgagacccggctcctcacgatcactcagcgccagcgcaatcatcctgtaagcctggatgatgccctcgaccgcctgtcggatcagcgtgctgtcccgctgatcaatgagcgctccggacgagccgccgtgcaggtcccagccccgagcttcatgctcgatgatggcgagatcgaacgacgcgtccggttgatccggccaatggagcagcacagcctccccctgaagatgatggcggaaagccattgggttgaagccgatcgcgaacgcttcgccgcggcctggcaggtagagcttgccgaggtggccgagttcaccgaaagcacgatccacatcgtggcgggcttgttgctgccgatctggaagcggctgccgaacgagtcgacgcgggtctatcggctgcagacggatgctggcgaacgcgtcatcggccgcaaggtctcggcagcctgggtcgcgaatgtccttgccgttgacgagcccaagctcgcgaccgacaaggcctttgccgcgctgatggaggggaggacggtccttgagctcgccgaaggcctccagctccgccgtgtccgggtcatggacgcatatcgcatcgaactttctggattcaacgacgcgatgcgcgaccggctgcgcgcgtacggcctgttcggggagatcatcacctggaagctacgcatgttcgtgccaactgacactgatggcatcgaagtcctggcgaaggtgctcgaccactacccaatcgagcgcatcgccgaacgggaggctgcgtga

SEQ ID NO: 5807 - DNA, 1572 bp, BradyrhizobiumColbertium
atgaccgaatctctcgccggcggcgccgtcgcgccgctctcgatccgtgccaccgcagttgtcgcctcgagtgtcatcagggctgcgcgacagcttttgaccgatctcgagcgcagccgccggatcgatgccgctgtcctgcgcggcgccatggaggctgccttcggcgcctccgatgcgaccggggtctggaactggaagacggcctacaacgcctgcgaggcggcgaccgtcctgttgctaaggcgatatggcgccgtcatgcgcaccaaggcgacgtcgccagccgcgatgctgccgatgctgatgaggatcgcgagcctccttccgactcagacacgccgatctgtggagagtgaatccctccagcagttctccactcctatcgggctggcgtttgtagccagccgagcggccgcgatcacgcctactgacgtcgttctcgaaccttcagctggcaccggccttctcgccatcctggccgaacttgacggcgcctccctggtccttaacgagttcgccgagagccgtgctggcattctcgcgcagctgtttcccggcgcctccacgacccagtttgacgccgctcacattaacgaccacctcgatgccggcatcgtgcctgatgtcgtgctgatgaacccgccgttctcggctgcggtccatgtcgatcgacagatgcgagaggcggcactgcgtcacatcggatccgccctggctcgacttcccgaaggcggacggctggttaccatcacaggcgcaaacgtcgcgcccgacaatcccgcatggacctgttccttcaagcggctgcaagaacaaggccgtgtcgtattctcggcggcaattgacggcgccgtctatgccaagcacggcaccaacgtcgacacccgtctgaccgttatcgatcgagtcccggctgacgacgtcgcctcgttcccagtatctcccggcattgcgcccgatctgccgactttgctcggctgggtccaacagcacgtgccgccgcgtcgtccaatggctggcacagcggctggcgtggtgccggcaattgccagccctgcaacgcctcgaacagtacgtgcctacgtcgctcagcgccagtcggctgcagccgtgccggcaatgcctcccgtggcgaccgaagtcgcctacgagccggtggattggacgcccacggatggcggcagcatcaccgattcgctttatgaggcttacacactgcagtcgatccgtattccaggcgcgcaaccgcatcccacaaagctcgtgcagtccgccgcgatggcttccgtcgcaccgccggagccgtcctaccggccgcacctgccggctaacgtcatatcggatggcatcctatccgatgcccaactcgagagcatcatctacgccggcgaggcgcattccgcgtttctcgcagcgcctggacagtcgatgcgacttttgacgtcgtggcggccgcgcgcgacgacgcggaaaatgccgttcgctttcgccggggctggttcctgggcgatggcactggcgcggggaagggccggcaggtcgccggcatcctgctcgacaactggctga

SEQ ID NO: 5808 - DNA, 2118 bp, BradyrhizobiumColbertium
atggcatgcgtcgtccagaagatcaaactcagtccctcccgcgatattcccttcaacaagctggtgctgagccagtccaacgtccggcgcgtagaggccggcgtctcgatcgaacaactggcagagagcatcgctcagcgcacgctgctacaaagcctgagcgttcgtgcggtcgttgacgccgacggccaggagaccggtatgttcgaggtgcccgccggcggacgccgttaccgcgcgctcgaactgctggtcaagcagaagcgtatggcgaagacgcaacctgtcccctgtgtcatccgggatggcggtatcgccgaggacgattccctcgccgaaaatgacgagcgggtcggactgcatccgctcgatcagttccgcgcgttcaagctgctacatgacggcggcatgagcgaagaggatatcgccgcgcggcacttcgtctcgccggcgatcgtcaagcagcgccttcgtctggcgtcagtctcgccgaagttgcacgacgtctatgctgacgatggtatgacactcgaacagttgatggcattctcggtcacgtccgaccaggcgcgtcaggagcaggtctgggacaacatcagcagatccggcaatgacgagccatatcagatccggaggatgctgacggagaacaccgtgcgcgcttccgaccgtcgcgcccagttcatcggactggatgcctacgagcaggccggcggcgccgtgatgcgggatctgttcgcgcacgacgatggcggatggttgcaggatgtgccgttgcttgatcgtctcgttaccgaaaaactcaaagtcgaggccgaaacgatcgccaaggagggctggaaatggatctcagtcgccgtggactttccctacggccatgctagcggcatgcgtgagctagagggcaaacctgtcgatctctcacctgaggagcaggccaccatcgacgccctcaacgccgagcaggcgaagcttgaatccgactaccaggatgccgacgaattgcccgaggaggtcgatcagcgtctcggcgaaatcgagcaggctttgatggcattcgaagaccggccggtgctctacgatccgacagagatcgcccgagctggtgtcttcatcagcatcgattccgagggacgcctttccgtggaccggggttacgtccggccagaggacgacgtgccggcaactgatgctgatatcgagcagagcgccgatccgtcgtcgaccggagggcaggaggcaggtgcttgcattcggcgagcggtgatcgcggttgcaggcagcgctgctgatgccgacgaagatgatgaggatgcggccaagcctttgccggatcggctcatcacagagctgacggcgcatcgtacgctggcgctgcgggacgcgctggcagaaagtcctgcgatcgcgttccaggcagtgttgcacaactttgtgctgactgccttttaccggttcgcatcatcaggaagctgccttgagatcgggcttcacacgccgacctttcccgcccaagcccctggcttaagggaaagcgcgtccgcgaaggccgtcgaggcgcggcatgagtcctggaaagcacggctgccgaagagcgagaaagatctgtgggacgcactcacagccctcgatggcggtgcgcaagcgtctctgttcgctcactgtgcgtcatttgcggtcaacgccctctatgagccggccaaccgctacaatcagggtcgcgtctccgctcacgccgtccgcacgcggctcgaccaggccgacgtgctggcccgcgcggtgggcctcgacatggtccaggctggctggagacccactgtcgacaattatctcggccgggtcaccaagcctcgcattttggaggcggtgcgggaggcaaggggcgagtcttccgcgcagctgatcgaccacctgaagaaggccgacatggccaaggaggccgagcgccttctcgatggttcgggctggttaccggagccgctgcgtctcgtcgaccccgccgcgtcgccagcggaagaggagggtgaagcgggtccgctgcccgatttcctcgccgacgaggaggaaggggagaacgccggcgacgatgatccgcaacagctcgatgcggctgagtga

SEQ ID NO: 5809 - DNA, 951 bp, BradyrhizobiumColbertium
atgtctggacataccgcccgagttcgtgccggcaacgaccgaacgagcctttacaccgaaatcactgacaagatcatagccgagctggaggccggccgttttccgtgggttcagccctgggggacggcgtcgatcaaggcgccgctcgcgatgccgcgcaacgcgtcgacgcagcgcggatattccgggattaacgtgctgatcctatggggtgccgttatcgagcacggcttttcgggacagagctggcttaccttccgccaggcactccggctcggcggccatgtcagaaagggcgagcggggaacgaccgtcgtctatgccgatcgcttcaccccagacgacgaacgtcggcgcgccacggaggccggcgaggagccgggtgccatcccgtttctcaagcgctttaccgtctttaacacggatcaatgcgatggcttgcccgaggatgtcgctgctttggtggtcccgccgccaccaggccagattgagccgcgagccgaggccttgatcgcggcgaccggcgcggatttccgcatcggcggtgcgcgcgcctactacaacacgacgggcgatttcgtacaggtgccgccgccggctgcctatttcgaaccgatcaactggcaccggaccgttttccatgagctcggtcattggaccggccaggcatcccgcctcaaccgcgaccacaccggttcgttcggctcaaaatcatacgcgcgcgaagagctggtcgccgaaatggcgggtgccttcgtttgtgcctcgctcggtatcgtgccgaccgtgcgccacgctgactacatcggttcctggctggaggtgctgcgcgaggataatcgcgccgtcgtccgtgcggcgagcgcggcatcgaaggccgccgatttcctgctcggctttctgccgcccgcgatcgattccgtggttgggggcagcgaggaagctgcatga

SEQ ID NO: 5810 - DNA, 927 bp, BradyrhizobiumColbertium
ttggagttcttcagtcgtttgccgcctgcgcttgtcgcgatggaggcgtgcggggcatcgcactattgggcgcgggagttgcaatcgctcgggcacgaggtggtgatgatcccgccgcaatatgtcaaaccgtatgtgcagcgcgggaaatccgacgctgcggacgccgaggcaatttgcgaggcggcaagccggccgaaactgcgcaaaaactttgtgcctatcaaaagccccgagcagcagggcgcacagatggtggcgcgcgtgcgcaaccagttcatcggtaggcggacccagctcgccaactcgatccgcggctatgccgcggaattcggctttacagcgcccaagggactttcgcggcttcaacaattgctgatcgacattcaggctgacgcgacagtcccggagttgacgaaggagttggtggacgctttggcaacagaactgacgcgcgtcgatgaccagatcgccaagctcgacaagaagctcatgcaactacaccggagtaacgagatgagccgacggctggcggctattccgggcgttggtccgatcggcgcgacgctgctgtcgatcaaggtcgtggatgcacgcgcgttcaagtcggcaagaaattttgccgcctggcttggcctgacaccaaagaatcactcgacggccggaaagaaccggcttggcgtgattacacgcgccggtgacggcatgttgcgaaccgttttggtggccggcgcgacggctgtgatcgcagatatgcgccgacgggaaagtcgctcctggccttggctgaaagacatcatcgcacgcaagccgccgaagctggtggccatagcgttggcaaacaagctggcgcggatcgcctggaaactgatggtcagcggcgagcggtaccgacctgcaagcaacgtcatgccgatgccgacatag

SEQ ID NO: 5811 - DNA, 183 bp, BradyrhizobiumColbertium
atggttgcagccaaccgtgaactgccggcttctggttatgcgctcgaagtggacggccgactcaaaaccgaatttgcaaccaaagacggcgcaagggcaggtggagaagaactaaagaaacgttttcccatgcttcagatcaggatctatgacgcgcagacgaattcgcgcgaggaaatttag

SEQ ID NO: 5812 - DNA, 165 bp, BradyrhizobiumColbertium
ttgtttcgcgtcgcgaacgccgcgctgaccaagttcaataactattttggcgatcaattctgcgatgggatcaccgcgatcaaccaagctgagcttgcgcaaggtgcgctcataagcattggtcaaaaccgctatttcatccgggcccagcggagaattttgtag

SEQ ID NO: 5813 - DNA, 1122 bp, BradyrhizobiumColbertium
atgaatgtacgttatcgggtcgaattgagccaagccgagcgcgacgaactgacggagatgctcggcagcggcaagaacgccgcccgcttaagcttgcgggcgcagattttactggcggccgatggaggctgccgcgacgaggagattgcccggaccgtgagtgtcagcctctccaccgtcggccggaccaggcgccgcttcgtggaaggcaatctggagcgggccctgagcgaggagccgcgtccgggcgctgagcgcaagctgaccggcaaggaggaagccctgctggtggcgaccgcatgcgccaagccgcccgctggctgcaaacgctggacgctgacgctgctggccgacacgatggtcaagctcaccgatcacaacagtctgtcgggcgagaccgtgcgtcgccggctggccgagaacgacctcaagccgtggcgcagggacatgtggtgcattccccatgtcgacggcgaatacgttgcccgcatggaggacgtgctcgacctctacgccgagacgcagaatcccgcccggccgctggtctgcttcgacgagacccccatccagctgatcggcgaggtgcgccagccggtcccggcccaaccgggacagcgcgagcgctacgattacgagtatcgccgcaacggcaccgccaatctcttcgtcaccttcgatccacatcggggctggcgcaacgtcaaggtcaccgaccgccgcgccgccgtggactacgcccactgcatgcgtgatctcgtcgacgtccattatcccgacgccgcctgcatccgtgtcgtgcaggacaatttgtcgatccacaagcctggggcgctgtatgaggccttcgcgcccgccgaggcccggcgcatcctgcgccgcctcgaattccacttcaccccgaagcacgccagttggctcaatatggtcgagtgcgagatcaccgtgctacagcgtcagtgtctcggccgccgcatcgacgatcccaaaaggctccgaaacgagatcgcagcatggcaaaagaggcggaataaaacccgagcccgcatcaaatggatgttcacaacagacaaagcccgcaccaaactcggccgcgcctatccagccaccgccaaagagtcataa

SEQ ID NO: 5814 - DNA, 282 bp, BradyrhizobiumColbertium
atgagtcaaaaatcaggcgcgcgcctcaccgagaagcagggttattacctggccttcatccatacctacgcccacatgttcggacgtccacccgctgaagccgacatccagcgccacttccgcgtcagcccgccttcggtccaccagatgatcgtcaccctcgaacgaaacggcttcatccgacgtcaacccggcgtccccagaagcatcgaaatcctcgtgccgccggaaaccctgccgatcctcgaatggctcggtatcaaaacgtcaaaatcactgtga

SEQ ID NO: 5815 - DNA, 207 bp, BradyrhizobiumColbertium
atgtcctcggtctcccagccgaacgaacacgacaacggtcttgaagccgccgtcgaccaggcgatcgccgtctgcgacggcgatccgcgtgcggctgttcgcgcgctaatcattgcgaacaatctcctggaatcggagatagcggagttgaggaacgccgtatcgcatgcctacacgcgcggacgctttcggacctacacaggatag

SEQ ID NO: 5816 - DNA, 297 bp, BradyrhizobiumColbertium
atgaaacatcagaacacgtggtctttcatcacggctgaccaagccgagcagatgggagccgacatggcgatccagttcatgctcatgacgctatttcagcttctgtcggaaatggcggatgacccgcgtggcttccgtacggatatacatagggaacttaccgatctcgtggcgagccaaaagctgccaccgatgcctcgagatactgagcgaaaggttcgggccgctgccggcaagattctcgacggcatcgtgatgcgatcatttgaacagaacggggtgaggaagtcatcgtga

SEQ ID NO: 5817 - DNA, 297 bp, BradyrhizobiumColbertium
atgccgtcgtcatcaaaggcgttgatggccgccactaaaaagcgggccgaagaactgcaggccaagggcaagaccgtcgatttcaatgaattgctcagaatggagccggacaacggcacgaccaacatccgcaacgtgaagagcaaacattggacccgctggctcggcgtcgaaaaccgctgcgtggtaccgttcaattcgttcagtgagttcaacaaggccgaaggcggcgatatctggttcgcgctcgatgagccccgtcccctcgcctgcttcgccggcatctggatcaactga

SEQ ID NO: 5818 - DNA, 465 bp, BradyrhizobiumColbertium
gtgcggaaggtcaaggaaggcgagaccacgaatgacctctacgcattcctcacgacggagccgaacgccgagatcggcgccgtctacccgaaggcgatgccggtgatcctgacgacgccggaagaggttgagacttggacgacggctccttcggacgaagcgctaaaagctgcagcggcctctacccgacgcgacgctgcggatcgtcgcccgcggtgtcaaggaagacccgcccgggtcggcggtatgacgggcaaaaccagcggccgctcgtcacggcaaggtcacctatgtcttggtcgcgttatacgcatgcgtcgccgggcgggcttcgccttaaggccgcaggctcgatcagcgcgccaatgccgcatcgcctcagcagaaaacggccccccgcaggagcatgagcatagcgacaccgaaggcggcacgcgggaccggatgcagcgacgagatcggtag

SEQ ID NO: 5819 - DNA, 255 bp, BradyrhizobiumColbertium
atggcgcgttggatggtgacggtcttggtcaccaaggacaaagatcaaatcggtcacgaaatgtacgccgtcgcgatcaacgatgcagcgcaagcgatagagaccgtgttgaaggcagccgctggagaggcggcggtggtcaatggtagaatcgacgagacatggatgagaagcgctcggctgaaagcggtcgggattctgaagatactggataataaggccgacccgcttaccagtcgcgtgaagcgacactag

SEQ ID NO: 5820 - DNA, 2613 bp, BradyrhizobiumColbertium
ttgaccgccaagcccaagctggacgctgaagaactcgaccagcttgaggaggcagtaaagagggacgcaaggatcgctgcgggaacgtcgccggtctggcctgccttgacaaagacgcatctcaaggccggcaacaagttcgctcccgtcaccgttctgggctcgatcggcccgcttcgcaacatcgaccgtctggcggcggggcaaccaccgatcaagtttgctatcaatggcatcacactcatctacggggccaacggttcgggcaagagtggctattgtcgcgtcgccaagaaaatctgccactgtctgcatgacgtgaccttgcgcggcaacgtgttcgagccggcctcagccgatccacgcgaagtcaccctgaccttccgtgtcgatggggaaaaggcccgtaccgtcgtttgggatgatcggaatgcgccgccgcccgaactgggccgcatatccgtcttcgacagtgatgcggccgggctttatgtcgacgctgagcgcaacatcgagtttttacccttcgaactcgcactgctgaccaatctcgctgaggcggtccgcaccctagacgggcgcttcagggccgaagaggcgcgattggtcaaagcccaccaggccccattgccgcagggatatgacaagcccacgaaaatctcgaccatgctggcaaggctgaaagctgacgaacagctaccagacgaggcttccatgcggtctttcgccgtgtgggaggagaaggacgaggctgatcttcaggcaatcaagctggagctggggagcgacccggcacttgttaagagggtcaaggaggcggccaagtcagcggtcgatacgtttgtcgccgatgcgaacgctatctttaaggccctcggcaacgatggcctagcggccctgaaagaggcgcggcagaaggctgctcagtcacgggacgccgcgaaagcagccgcttccgcccttgcagctgaatcagcggtcccgcagctgggcagcgatacttggcgtcagatgctgatgtatgcgcgcgattttgcggccgaagcgtttcccaccgttgagccgccccagctggctaatgccaatacgtgcgtgctctgtcatcagccgctcgatgcgcaggcacaagaacgcttggccgcttttgatgcgtatgttgaaggccgcgccaatgccgacgctgaggccgccaaaaaggattttggcgaaagggccaaagcgatcctcgacctcaaaatcgttggcggtcaggacatcaaggacaagctggttaatttcgtcgaagcatcgaaaccccgccaagcgctggtggatcggcttgaccagttttacaccgccagccaagagcgccacagtcttgcttcattagccattaaggccgtcgactacgcgagtcttggtggtctcccagatctagaccgcattgtgatcgacgatctggtggcagaagccactgtcctcgcgaaagagatcgacgacctgaaaccgacgccggatcaggccgccaaacgcattcagcgtcagcaaaagctcgatgaacttgaagcgcggaagaagttctccgccgatattgaaacgttcgtggcgcggcgcaactcgcttgagctgctggtcaagaccaaggcttgcacgacagcctgttcggtggccggcattacgtcgctcattacgcgtatgcggcgcaaggttttgaccacatccctgcaaaatagccttcaggacgagatcggcgccctcgacctcgggcatctgccgctaaaactgtctgaccggggagaggtgggcaagagcaaagtccagatcgggctggaggcgaagcagaaggtcggcaagaacagcgacattctgagcgaaggggaaaagcgcgcacttgctctggcaggctttcttgccgagctgaaagaggtcggcgtgaggcacggcatcgtcgttgatgatccggtatcgtcgcttgaccacgcccggatggaggcggttgcaaagcggctggtgaaagaggcaaaagcccgtaggcaagtgatcatcttcacgcacaacctgttctttcatcacgccgtattcgaagaagctaaggatatgaaggtccccctgcggcaagaatggattgccaagcatggtgacggacgcttcggcattatcgatgacggccagcaaccgtgggtttcgatgagcgttacaaagaggcttccgatcatcgatggtctgctcaaagcaaagaagccaacgtattcggaagccgacgaggccgagcgatcgtttgtgactagtatctacaccaagatgcgcgagacctgggagcacaccatcgaggaagttctattcgccggcgtggtcgggcgatttcgaccaaacgtggccaccatgcaattaagagcagcccatgtcgacaagtcggactatgagacggtgtacgctggaatgacgcggtgctccaagtactccggccatgatcaagccgcaggcgtccccgccgatctacccaagttcacggagatcgaggcggactttaacaagctcaactcatatgtggttgcggcgaatacccgccggaaaaaactcgaggacgaaggccgcaattctgaaaagagtccgatgccagctgacactctttga

SEQ ID NO: 5821 - DNA, 165 bp, BradyrhizobiumColbertium
atgaaacaacctgacttatccaagctgctccggggtcaatttaagctggtttcagtggaaaagctgatgcggatgctgacagcgttcgaccaggatgtcgaaataacggtaaagccgcacaggaagcgcggcgaggccggccggatcacgttcattccggcctaa

SEQ ID NO: 5822 - DNA, 147 bp, BradyrhizobiumColbertium
ttggtcatcgagcgtttcccgatccttagcgagctgttcgcgctgctggctcagctcctcggatttgcgcgcgacctcggcatccttgctggcaagctgttcctgaaaacgttggcgagtctccgcgaggaggggggccgccagtga

SEQ ID NO: 5823 - DNA, 1047 bp, BradyrhizobiumColbertium
ttggttgccgctgaggccaaaaaggcgcgcgaagctgccgcagccgaattgaaggcgaaggcagatgagacggccgagctccgccaagcgttggaggccaacaacctcaagcttgccgaagcgcagcaggcccaggccgagctgatgcgcaagcagcgggcgctcgatgaggaaaagcgtgaactcgatctaaccatcgaaaagcgcgtccaagcgtcggtcgaccagattcacgcaaaagcccggcaggaagccgatgaggccgcacggctgcgggttgcggagaaagaccagaccatagagtcgatgacgcggaccatcgaggagctgaagcgtaaggccgagcaaggatcgcagcagtcgcagggtgaggttctcgaacttgagcttgaggaacttctgaagagccgttttcccatggacgtcattgagcccgtcggcaagggtgaacttggtgccgatatgatccagcaggtcaatggccagcttggccagcctgctggcatcatcctgtgggagaccaagcgcaccaaagcctggagcgatgggtggctggccaagttgcgcgacgatcagcgccgctccggggccgatgtggcgctcatcgtttctcataccctgcccaaacacattgagcattttgacctggttgacggcatatgggtggctcacccgcgctgtgccttgccggttgccgtcgctctgcgccaagcgctggtcgacgtgagcagctctcgtctcgtccagcaagggcagcagacaaagatggagcaggtctaccattacctgaccggaaccaaattcaagcagcgggtggaagccgtagtcgagaaattcaacgacatgcgcgacgatctcgatagggaacgcaaattcatggggcgccagtgggccaagcgcgagacgcagatattggcggtcgtcgactccacggttggcatggtcggagaccttcaggccatcgccggcaaggccatgccggagattccgagcctagatgtgcagcttttggagcatgacgctgacaccgagagaaaagcgggatga

SEQ ID NO: 5824 - DNA, 1974 bp, BradyrhizobiumColbertium
atgagcgaactcgcaaagggaattgaggcattcgtcgcttacgcaaaaaccctgaagggtgacgagaagggagaagctcaggttttttgcgaccggctattccaggctttcggccataagggttacaaagaggccggtgccgaactcgaataccgagtgaaaaaggcttcaggcaaaggaacgaacttcgccgacctggtgtggaagccgcgacttcttatcgaaatgaagaagggcagcgaaaagctgcatcttcattaccaacaggctttcgactactggctgaacgcggttcccaatcgccctcgttacgtcgttctgtgcaacttcaaagagttctggatttacgatttcgacaagcagctcaacgagcccgtggatatcgtgcggctcgaagacctgccgaaccgctacacggcgctaaacttcctgttcgcggacaatccggaccctcttttcggcaacgaccgcgaagaggtttcgcgtattgctgcagcaaaggtcgctcagctgttccgatcgatggtcgcacgcggcgttccgcgagagcaggcgcagcgtttcgtgttgcaggcggtcgtcgcgatgtttgccgaagacatcgacatgatgccggccggaacgaccctgagaatggtgcaggattgccttgagcacgggcaaaactcatacgatgtttttggcggcctgttccagcagatgaacaacaagacagctgccaagggcggtcgctacaaaggcgttccctatttcaacggcggtctttttgccacggttgcgcccgtcgagctgaccaagaaagagctggagctgctcggcaagaaggatgaaggggccgcttggcagaactgggccaagataaatccagcgatcttcggcaccatcttccagcagagcatggataagggagaacggcacgcctatggcgcgcatttcactcacgaggccgacattcaacggatcgtcgggcctacgatcgtgcgcccctggcgggagcgtattgacgccgcaaagacaatgacggagctgttggagattagaaaagcgctcctcaacttccgtgtgctcgatccggcctgtggcagcggcaatttcctttatgtcgcctacagagagatggtacgcctcgaaatcagactcatggccaggctggacaaagagttcagctggaagaccattcagaagcaggcccaggccacgtcactcattagtcctcgtcaattttttggcgttgatcgggactctttcggcgtcgagcttacaaaagtcacgctgatgctcgcgaaaaagctcgccttgaacgaggccgccgatgttctggagcgcgaccagatcgaattgcccttggcggaagatgatgctcttcctctcgacaatctcgacggaaatatcctgtgccgtgacgcgctgctgtcagaatggcccgaggtcgatacgatcatcggcaatccgccgtaccagagcaagaacaaggcccagcaagaattcggacgcgcctatctcaacactattcgaggggcttttccggatatcgacggacgggccgactactgcgtctactggtttaggaaagcgcacgaccagcttaagccgggtcagagggcgggcctggtcggcacaaacacgattcgccagaattattcccgcatcagcggccttgaccatatcgtcaagcatgatggcacgatcaccgaagcggtctcgactatgccgtggtcaggcgacgcggtcgtccacgtatcgatcgtgaactgggtaaagggcgaggacgatggcaagaaacgcctatacatccagtcgggaaacgaccccgccgggggttgggactacaaagatttggaagagatcaatacctcgctctcgttttcgactgacgtgagccaagcggaacgcatcaaggcgaacgctgaaaaaggcggctgctaccagggtcagacacacggtcacaagggtttccttctagcagtctgctga

SEQ ID NO: 5825 - DNA, 1125 bp, BradyrhizobiumColbertium
atgcttttttccagagttgcgacccgaacggtgcttgcggtcggtttgattgcttcgtcatcgatcgccaaggctgcagatgaacaggctccggcgccagccaaggtgccggtcaaggcaaatccgattccggaggttccgtttttcatcgtgaatgacaacaggctgacctactcttatcagttcacggcgacagaccccggtgcttttagcactcagccaaatgggaccatcaacggcacgaccgcaaagcaggtctattcgttcacccatttcgatatttgggcttatggcacgaacttcttcaacgttgacatgttgaagtccggtcataacgatcctgcctcaccttgctcgcctactggtaccctgccgttcggcccgccaggagcgtgcgctggcgcgacagaattctacgccatagagcgcagcacattcggctggaatgagatattcgacacaaaggctttcaaaatagggccgctgcgaaatatttcatttgaggctggcctcgatctcggtacggcaaatagctattatgcacccacgacaaacaacgtcgtcgccggtctgcaattcgccttcgatcttccgtacaaaggctacttcaacgtggcgcccctggtcgtcgatggactagcaagccacaaatcattccttcagtgcggtctctatagtccgggcgttcccggcgtaacctgccttgcggacggaaacagggtgttcccgcccacctggaggatcgagaccaattactacatggatctgggcttccttccggaaagcatgaggtatttcgccattagtggccgtgcttccgcgacgggaccaaagggggatattaataccctccctgcgttgtccggcgtcggacgtttcagcaccgccagcaagatcgaattgaacagcgaaccgatccgcttgacgttcgatgccagcaaggcattttggggcccgaaatacagtcacttcgtcgacgtctgggtcgcctatcggtattggcacaataagtatggcctcgatagcaacgccactcccggaacttgcaccgtcgcggcaacgggcgtcagcaccaacagctgcacggaaaaatcagccagcgcgggcgtctcgatgaaattctag

SEQ ID NO: 5826 - DNA, 987 bp, BradyrhizobiumColbertium
atgttgctctattcccctcctaaggcagcaacctccatcccggtcgtcgatatcagcgaccggaccgatgcggggaagctcaagacagcggccgcaatccagcgcgcctgctgcgagacgggctttttctatgttgcggggcatggcgttccatcgcaactcgtcaggaatcagttcgatgcggcaaagtcgcttttcgacctgcctattgagcagaaaatggcgctgcacatgaagaaatctcccgcgagcgcgggttatgaaccggttggcggccaggttctcgatagccaggatgacaaagacgccaagggtccgccggatttgaaggagagcttctactccggcgcggagctgcctgaagccgacccgtggtatcagcggcgcgtgcgcgcctttggacataaccaatggccggatttgcctggatttcgcgagcagaatcttgcttaccgccgcgcggtttccgcgctcggtgacaggatcctggcactcatggcactttcattggatctcgacgagcgatggttcgaagcgttttataacgttccctccgctacgctgcgaatgatcaaatatcccccgcaggcccttggcgcgaactttaatcagattggcgcgggcgcgcataccgattggggcggtatcaccattctagctcaagacgatgtgggcggacttgaggtgcgcaacgccgacaatgaatggatcacggccccgccagcgcccgagacgttcatcatcaaccttggcgacctgatggcccgatggacgaacggcacatacaactcgaacatgcatagggtgaataacaacacgagccatcaagatcgatattcgatcccgttcttttattcccctaaccctgatgcagttatcgacgccattccaacctgcgtcacacccgacaacccccggcggtttgctacttgcaccgctgcagaacacataggggagatgttccgccgttcctactcggtggtctag

SEQ ID NO: 5827 - DNA, 1701 bp, BradyrhizobiumColbertium
atgtcgttggcagatcgccttaagcccatagatcctgtgatgcagccgggcaggcaagactctgtacgcgcgtcgcggttgcggcgacgcagaagaatgttgattttcgaacgtcttgcggccccggtccttggcgcagccctgatcatcggctgggagattgtcgcgcgctattccggcattagtgaattcgtgttgccgcggccttccgccatctttgcgcgcatgatcacgagttaccccttgctcctgacgcatgcaggggtcaccgcgatcgaagttattggaggcttcgcgctggcagccgtggtgggtgtcgggatcgcgctgttgatcttctactcgcgcatcctggaggttgccctctacccgattctgatcgctctccagaccatcccgaaaatcgctttggcgcccttgatcgtgctctactttggctatggctggggaccgaaggtcttcctttccttctttatttccttttttgcggtcatggtcgcaaccgtcgtgggtttcaaaagcctcgatcagggatacgccaaccttgcacggtcgatgggagcatcggagcggcagatttttctgaagataagattgccggctgcccttccggctatcttcggaagcctaaaggtagctttgacgctggctgttatcggtgccgttcttggtgaatacgtcgcgtcggaacgaggcttgggatacatccagctccaagcgaattccaatttcgatacaacgctcaactttgctgctgtggcttccatcgcccttctcggtgtcggtctctacatgctgcttcttgtcgctgagcgggtgctgatcacaaagcgggcactgaggccgatgactgccgagctgccccgacccacagccaaggacacaagtaccgatacgaccggggtatccgttcaactgcagaagttatccaagaatttcgaatcggcggcgggtgaagaactcagcgctctcggcgaaataaaccttcgcatcgagcccggggaatttatcgcgatcgttggccctagcggctgcggcaagagcacgctgctgtcgatgttggccggcatcgatcagccgtctacaggatctttaagggtcgatgatgatatcttgaccgggcctcatccgcgcgccggtgctgtctttcaggtcgactatctactgccttggagaacaatcctcgataatgtccttcttccaatcgagataaagggtctcgaccgccgcaaatacagtctgttcgcacaaaagttgctggcccaagtgggtttgaatggcttcggctccaaattgcctttcgagctctctggaggaatgcgccagcgcgcagctatctgtcgcgcaatcattcagaacccaggccttttcttgatggacgaacctttcggtgcgttggacgctctcacgcgcgagcagatgatatcggaccttcaggctctctggatgcgcttgaagaacaccgtggtgttcatcactcacggcatcgacgaggcgatcttcctggccgatcgcgtgattgtactttcacctcgtcccggtcgcatagatcttgaggtcaagatcgacctgccgaggccgcgcaagtgggcggacgctcatctgcatccgcaatttcaccaggcgatggtcgatatcagaaactgcttcgagaagcagggcgtccttcacgtcgagaaccccaaacaactatccgtctga

SEQ ID NO: 5828 - DNA, 1002 bp, BradyrhizobiumColbertium
atgatcccgtcgggtcgaaagatgaagatgctccagagattgatcgcaggtgcaacggcgttgctgatgtcctcggcagtcgcttattcgtcggagtctgtgaatgtaagatattcatggaaactgaaaggggaatatgccgccttctacgtggccaaggaggagggccttttccaggagcacgggctcgacgtgtcgcttggcgaaggcgccggtgcgtcggcggccttgggcggtcttcttcaggacaaagaggatgttgtggttctaccggcagcgttcgccctgactgcgatctccaagggaatgccgatcaagatcgttgcgctctaccacccgaaaaccccgctggggattttgtcgttccccgacaagccggtccgcaagccgtctgacttggagggaaagagcttcatcgtcgctccgggtgacaccgtcgccacctatctgccagccttttgcaagatcaacaatgtcgactgtgagaagatcagcaaggtctcggtcgggattgaagcccgcaacagccagttcctctcgcgaaacgttgatgtcattggaacctatctcaatgtcgacgctccgctgctcgagcaacaggccaagcaatccctcatcaccctgaatttggcagacaatggactgaccctcccgggcctctccattgtcacgagcgatgcaaagctcagccgagagtccgaaaagatctcagaattccttgcagccctgaaccggggcatcggcgtgatgaaggataacccgggggttgcgaccgcagaactcgtcaagaattgggcggcgccgccatccaacgacgttgtcgagaagcaagtgatcgaaacggcacatgccattcctcaggtggcaggaaagccgtttggctggattgatccagcattgctccaaaaggcgctcgacctgctcaaaggcgtaggggaaattcaggaaatcaaaccgctggatagctattacaccaatagtctcctggctcggtccaaatga

SEQ ID NO: 5829 - DNA, 954 bp, BradyrhizobiumColbertium
gtgggagctgcggctgcatccatcgaccaagcgcatggcgacgatcggcggcttcgtcgcgggcgggtcggcggcatcggatccatcacctatggcggtttgcgggatccgggtaacattctggcagcgcgcgttgtcaccgtcgaggaggagccgcgcgtgattgaactgcgcggcgacgcggcgcagaaggtcaatcgcgcctatggcaccaccggcatcatcacagcgctggaaatgccgctcgcgccggcatggaaatggatcgacgtcgtggtggccttcgacgatttcttggacgccgcagccttcggctacgaggccgctttggccgacggaatcgtgaaaaaggttctcgcaccgatcacctggccgttgccatcttatttcggggcgctgaagccgcattgccccgacgggaaaagcgtgctgctggcgatgatcgccgagccctctctcgagagtttcaggtcgcttcttggccgccgcggcacgatcacgctggagatgccaaccgatgacagcccgagccggatcccgctctacgaatattgctggaaccacaccacgctacaggttctgaagaccgatcgttccgtgacctacctgcaatgcctctacccgcatgagcgcgtcctggaaaaggtcgtcgagatgcgggagctgtttggggacgaggttttgcagcacctcgagttcattcgcttcggtggccgcatcacctgcagcagcctgccagtgatccgctacaccgatgcagatcgcctgaacgacatcatacggctgcatgaagagcgcggcgtcttcattgccaaccctcacgtcttcaccgtcgaggacggcagtcgttacaagcgcgccgatgcggatcagctcggcttcaagcgtgaggtcgatccgcacggactgctcaatcccgggaagatgcgaagctttgtgagtgagcggccctga

SEQ ID NO: 5830 - DNA, 123 bp, BradyrhizobiumColbertium
gtgcacgatctgccgccggaccgcgatgaggcaatcatcccgcctgagcagcgcgccaagatcgaggccgagctcgccgctgcgcgcgatcgtcaggccgttgccaccaaggacgccaaatag

SEQ ID NO: 5831 - DNA, 1221 bp, BradyrhizobiumColbertium
atggaagaattttaccgcattcgccgccttccgccttacgtgttcgagcaggtcaaccgggccaaggcggctgcgcgcaatgccggcgccgacatcatcgacctcggcatgggcaatccggacctaccggctccgccgcatgtgctcgagaaactgaaggagacgctcggcaagccgcgcaccgaccgctattcggcctcccgcggcatccccggcctgcgccgggcccaggccgtatactacggccgccgcttcggcgtgaagctgaaccccgacacccaggtggtggcgacgctcggctccaaggaaggtttcgccaacgtggcgcaggcgatcaccgcgcccggcgacgtcatcctctgtccgaacccgagctatccgattcacgccttcggtttcttgatggcgggcggggtgatccgctcggtgccgtcggagccgacgccgcaattcttcgaggcggcggagcgggcgatcatccattcgatccccaagccgctggcgctcgtcgtctgctatccctcgaacccgaccgcctatgtcgcaagcctcgacttctacaaggatctcgtcgcgttcgcgaagaagcacgagattctgatcctgtccgatctcgcttacgccgaggtctatttcgacgagagcaacccgccgccctccgtgcttcaggtgccgggcgcgatggactgcaccgtcgagttcacctcgatgtcgaagacctattcgatggccggctggcgcatgggctttgcggtcggcaatgagcgcgtgatcgcggcgctcgcccgcgtcaaatcatacctcgattacggcgcgttcacgccggtccaggtcgcggcaactgctgcgctgaacggcccggacgattgcatcaaggagatgcgcgacacctaccgcaagcgccgcgatgcgctggtggaatcgttcggccgcgccggctgggagatcccgccgccggaggcttcgatgttcgcgtgggtaccgctgccggaagcgttccgcagcgtcggcagcatgcagttcgcgaccctaatggtggagaaatccggcgttgcggtctcgcccggcgtcggcttcggcgagcatggtgaaggatatgtccgcatcgccttggtggaaaacgagcaacggatcaggcaggccgcacgcggcgtgcgccgcttccttgaaagcggcatcgaaacattgcacaacgtggttccgctcgccaaccggcgctaa

SEQ ID NO: 5832 - DNA, 1254 bp, BradyrhizobiumColbertium
ttgatcgaaacgcaagcgcgcgtgctcgcgggccgtagcggccgcggcatccgcgtggttgccgtcaccgcgcgctcgaaggcgaagaagcgtggcatcgacctgcgcggtttcgaatgggcaaaggacccgatcgcgctcgccacccatccggacgtcgattgcttcgtcgagctgatgggcggcgccggcgatcccgctctgtcggcggtcgacgccgcgctgagcgccggcaagtcggtcgtcaccgccaacaaggcgctgctcgcaaagcacggcgtcaagctcgccaaggtggctgaaaagcatggtggtgcgctgaatttcgaggcagcggtcggcgcagcaatccccgtcatcaagacgttacgcgaaggtcttgccggaaccggcatcgaccgcgtctacggcatcctcaacgggacgtgcaactacatcctgacccggatggagcaggaagggctgtccttcgccgaatgcctcaaggatgcgcagcggctcggctatgccgaggccgacccgtccttcgacgtcgacggccacgacaccgcgcagaagctcgccatcctcgccagcctcgccttcggcacgaaagttgctcaaagcgccgtgtatgtcgaaggcatctcatccatcgcgccggaggatctgcgtgcggcggccgatctcggctaccgcgtcaagctgctcggcgtcgccgtgcgcaccgccaagggcatcgagcagcgcgtgcatccgaccatggtaccgaaatcctcctcgatcgcgcaggtgatgggtgtcacaaacgcggtcacgatcgacggcgagggcattccgccgatcacgctggtcgggcccggcgccggcggtgcggcgaccgcatccgccgtcgttgccgacatcgccgacgttgcgcgcggcattcgcgccaatccgttcggccggccgatctcgcaactccacgacaccaagaaggcgccgatggagcggcacgagggcggctactacatccgcctgctcgcgcgcgacttccccggtacggcggccgcgattgcgacccggcttgcagagcagaagatttcgatcgagtcgatcgtgcagcgtcatcccaatggcggcgctgcgcctgcaaatggcaaggcggcacccgtgcccgtcatcctgatcacctatgccacacacgaggacgccgtgcgccgcgcactcgccgccgtgcagaaggacaaggtgatcagcggacggccgcaggtgatccggatcgagaagaactga

SEQ ID NO: 5833 - DNA, 1002 bp, BradyrhizobiumColbertium
atgtcgacccatatttcagtcccgccgcaagcgttgcttgagcggatcctcacgctggagatcgtgcgggtgacggagcgggcggcggtgtcgtcggcgcggctgcgcggccacggcaacgagaaggcggcagaccaggccgccgtcgatgccatgcgacgcgagctcaacaagctgccgatccagggcaccatcgtgatcggcgagggcgaacgcgacgaggcgccgatgctctatatcggcgagcaggtcggcctcaaggcggggcccgaggtcgatatcgcggtcgatcccctcgaaggcaccacgctctgtgccaagaacatgccgggctcgatcgctaccatggcaatggccgacggcggcacgctgctgcatgcgcccgacgtctacatgcagaagctcgcgatcggccccggctacgacaggggcgtggtcgatctcgatgcttcgccggccgacaacgtccgccgcctcgccaaggccaagggcgtcaagccggaaggaatcaccgtgctcgtgctcgaccgtccgcgccatgccgacatcatcgcgagcgtgcgctcgaccggcgcggccgtgcgcctgatcacggatggtgacgtcgccggcgtgatccactgcgccgaccctgataacactggtgtcgacatgtatctcggcaccggcggtgccccggaaggcgtgctcgccgccgtggcgctgcgctgcatcggcggccagatgcagtgccgtctcattctcgattccgaggagaagcgcgagcgcgccgccaagatgggcgtcaacgatcccaagatgatctacggcatcgaggacatggcgcgcggcgactgcctgttcgccgccaccggcgtcaccacgggctcgctgctctcgggcgtcaaattccgtaaggatggcgtgatcgagaccgagaccgtcgtgatgcgctccgtcaccggcaccgtgcgctacatcaaggccgagcaccgcgagctggccaagttccatttggattga

SEQ ID NO: 5834 - DNA, 720 bp, BradyrhizobiumColbertium
atgtccgatctctccgccgtcaaagccctcgtcttcgacgtgttcggcactgtcgtggactggcgcaccagcttgatcaccgacttcatgtggtgggcgaaaggccgcggcatcagcgccgactggaccgcgctcgtcgacggctggcgcggcatgtacatggcctcgatggacgacgttcgccagcatcccgagcgcggctatgtcatgctggatgatctgcatcgccgctcgctggacaagctcgtcgagaagttcgcgatcaaggggctgacggaagccgatctcgattatctcaccaagggctggcaccgcttgcacccgtggccggacagcgtcgccggcctgacccggctcaagacgaagttcgtgatctcgccgctgtcgaacggcaatgtcgcgctgctcaccaacatggcgaagtttgcggggctcccgtgggacctcatcctgtcggccgagttgttcgagcactacaagcccgatccggaaacctatctcggcgccgcgcggctgctctgtctcaagccggaagaggtgatgatggtggctgcccacaacggcgatctcgcggcggcgcagaagaacgggctgaagactgccttcgtggcacgaccgacggagtatggtccgcttcaaaagattgacttcgaggcgaccggcaattgggacatcgtcgcgaaggattttggcggcatcgccgacaggttggggtgctaa

SEQ ID NO: 5835 - DNA, 891 bp, BradyrhizobiumColbertium
atggcgcgggcgcccaagcttggtactcagacgccctactggcaccgcttcgtgctcggcgacgccgaggtgaccgtcgtatccgacgggccgctgcccctcggagacccctcggggaccttcaccggcgttccgaaggaagaggtcaagaagatgctctccgacaatttcctgtcgccggacaacgtcgtgctcgagcagaattcgccgatcgtcaacaccggcgacaagctcatcctgttcgacaccggcatgggcagctcgaagatgttcggcgccagcaccggccggcagcagaagagcatgacggaagccggtatcaagccgggcgacatcgacgccgtcgtctgctcgcatgcccatatcgaccatatcggcggcatcgtggacgaaggcggcaagccgctgtttccgaatgcccagatctacatcgcccagagcgatttcgacttctggaccgacgagggcaagctcggcagcgccgccaaggatttcgtcattcacgcccggaagaacctgctgccggttcgcgaccgcatcgtgttcttcaaggacggccaggaattcctgcccggcgtacaggcgatcgccgcccccggacacaccgtcggccacaccatcttcatggtctcctcggcggggaaatcgttcgcgttcctcggcgacctctcgcaccattcggtgctgctgctggagcggccgcggatggagttctcctatgactccgacccgaagcaggcggccgagtcgcgcgtcaagctcctgacgatgctcgcaacgaacaagatcccggtgatgtcctatcacttcgcctggccgggctatggccatgtcgccaaggtaggcgaaggcttccgctactatccggagccgatgaaaatgacgctttaa

SEQ ID NO: 5836 - DNA, 360 bp, BradyrhizobiumColbertium
gtgccagtagggcgtctgagtaccaagcttgggcgcccgcgccatcgcgctgctgccgagcatggcgctagcacaagacccgccccgagtgcgagcagggaccgacgagagacatcgattgtcatgcgtttcctccgctttatttttcgcaaccatttgcgcgttgcgaccggcctggagccggccgcgcgatgctgcgctggtttgaacaagctagcaagtggaattggttcggggttgatcgctgctctcaaagctggcacggaaattctggcgcatggcatacgcgccgtcgccgacgttcttgccgtcagaacgattccatgggtcggcgcaagacaagcaaggtttgtgtcgtga

SEQ ID NO: 5837 - DNA, 1077 bp, BradyrhizobiumColbertium
atgtctgctgcgctgggtctgaaaaccaagccgagtgctaccgaacccgcggacgatgattccgatgtctccgcgctgatcaatcgccttacggcagaggtcaaccagatcgcggtcgacaagaccaaatcgatccagcagatcaccaaccagatgaagatgctggcgctaaacgcgctgatcgagagctcgcgcgccggcgcccaaggtgcgggctttgcggtggttgcgcaggaggtgcgcggcgtcggacagcaggtcgagaccatcgcccgcgagctcgaaacccaattgacgaagcgcaccggcgatctcgtcgcctcgatcgagcgcatgagccagcgctcccgcggggaacgcatggtcgacctgtcgctgaacgccatcgagctgatcgaccgcaatctctatgaacgtacctgcgacgtgcgctggtgggcgaccgactctgccgtggtcgattgcgcggcctcgcccagcgctgccgccgtctcccatgcctcgcagcgcctcggcgtgatcctgggggcctacaccgtctatctcgacctctggctctgcgatctcgacggcaacgtcatcgccaatggtcgggccgatcgctttcgcgtcgtcggcgagaacgtcgctcacaccaagtggtttcgcgaggcgaagggtcttcgctccggtgacgattatgtcgccggcgacgtcgagaaccaaccgctgctcggcaatgcgcaggtcgcgacctattgcgccagcgtccgcgccggcggccaggccaatggcgcgccgatcggcgtgctcgccatccactttgactgggagccgcaagcccgcgccatcgtgcaaggcgtccgcgtcggcgacagcgacaaggcccgggtgctgctggtcgattcgaattttcgcgtgatcgcggcctccgatggtcagggcatcctcagcgagcgcatctcgctttcgctgaacggccagcgctccggcttctatcacgaccgcacgggtacgctggtggcattccatgcaacccccggctacgagacgtatcgcgggctcggctggtatggcgtgattgtctgcggagcatga

SEQ ID NO: 5838 - DNA, 1899 bp, BradyrhizobiumColbertium
gtgaccgtgcgtccgcgtgatcgcctggacccgagttccaacagcctgcctcccgtcatgacgccgcctgctaccgccttgcccgtcgaagcgccccaggctttcctgggcgtgtcgcgctcgctgaccgacaagctttggcgcgaccgtctggacgggcgcggggcggcccaggcgctcgccatcgtgcagcgacaccaattgccggagctgctggcgcgggtgctggccggacgcggggtcgatatcgacgccgtgcccgattttctcgatcccaccatccgcaagctgctgccggatccgttcacggtgacggaaatggaggccgccgccaagcggatcgccgatgctgcagcgaggaccgagaaggtcgccatcttcggcgactacgacgtcgatggcgcgacttctgctgcgctgctcgcctggcacctgcgtcattgcgggcttgatccgctgatccatattcccgaccgcattttcgagggctatggcccgaataccgaggcggtgcgagcgctcgccgcgaagggcgcgacgctgctggttaccgtcgattgcggcaccaccagcatggagccgcttgccgaagccaagcgcctcggcatgtccgtggtcgtgatcgaccaccaccaatgcggtctcgatctcccggaggtcgacgcgctggtcaatccgaaccgccccgacgatctctccggcttgggtcatctcgccgccgtcggcctcgtgctggtgacgctggtcgccgtcaatcgcgagctgcgccagcgtggcttctggagcaacgagatgcctgagcccgatttgctcggcatgttgcatcacgtcgcgctcggcaccgtggccgacgtggcgccgctgatcggcctcaaccgtgccttcgtggccaagggcctgatcgcgatgcgccggcgcgaccacgtcggtcataccgcgctgatggacgtggcacggctcaacggcccgccggaggcctggcacctcggcttcatgctgggaccgcgcgtcaatgccggcggccgcatcggccgcgccgacctcggcgtgcggctattgctcgagggcgacagcgtcgaggcggcgcggatcgccgccgagctcgaccggctcaacagtgagcgccgtgtcatcgagcaggccgcggaggcgcaggctgaagcggaggcgctggcctcgatcggactggaggataagctcgcggtgatcgtcacggcctcggaaggctggcatcccggggtggtcggcctcgtcgcctcccgcctgaaggagaaattcgcgcggcccgcttttgccattgcgctggagcccggcggcatcggaaccggctcgggccgctcgatcgccggcgtcgatctcggcaaggcggtgcggcaggcggtcgccgacggcatcctgctcaagggcggcggccatgcgatggccgccggcgtgacactgcggaaagagaagctgtccgaattccgcgcctatatggagcaggcgcttgcgcgcgacgtcgccgaggcgcgccacgtcaacgagctctatatcgacggcgcggtctccgcacgtgcggtgacgccggagcttgcgacgacgctcaaccgcgccggtcccttcggcagcggcaacccggagcctgtgctggcgctgccggcgcaccagctcgtgtttgccgacgaggtcgggcaggcccatctgcgccttcgcttcaagtcgggcgacggcgccatcgtcaacggcatcgcattccgttcggtcggccagaagctcggcaatgcgctgctcgccaaccgcggccagcagctgcatgtcgcgggatcattgtcggtcgatcgctaccagggtgccgagcgcgtgcaattccgcgtcgtcgacgtcgcgctaccggaccaggggccatccgtgattagatag

SEQ ID NO: 5839 - DNA, 810 bp, BradyrhizobiumColbertium
atggcagggcaggttgagggcaaggtcgcgctggtgacgggcggcgcgtccggaattggcgaggccgtcgtcgagctgttcgcgcgcgaaggcgccaccgtcattgcaaccgatatcgacgagctgaggggccccgaactcgccaggcgcgtcacccaagccggcggcaaggcgatcttcctggagcaggacgtcaccagcgaagagcgctggatggaggtggtcgccgaaattgcgaagcgctacggccggctcgacatcttggtctccaacgcgggtatcggcatcgccgtgccctcgatcgtcgacatgacgttatctgactggcgcaagcagaatgccatcaacctcgacggcgtgtttctctcggtgaagcattgcctgccgttgatgcgcaagaccggcggcggctcgatcatcatgatgtcctcgctggcgggcctgcgcggtgcgcccggcctttccgcctattcgctcaccaagggcggcgtgcggctgttcgccaaatcgatcgcgatggagtgtgcggcggtgggcgacggcatccgggtcaattcggttcaccccggcattatcgatacgcccatctggggaaagatcccgacgggagcgaccggcgcgggccagaacgccccgatcgatcccgaggagcgcgcccgtgtcgtgacgccgctcggccgtgccggtcaggccgcggagatcgcctcgggcgtgctgtatctggcctccgatgcctcgcgctacgtcaccggcagcgagctcgtcatcgatggcggcatgaatgccgggggcgtgccgcggcgcgcataa

SEQ ID NO: 5840 - DNA, 810 bp, BradyrhizobiumColbertium
gtgtccttcgccatggcgcacagccttcatgcttcctcacccgcgccagcgccaatccgctccaaccggccggaccttgcgaccgatgcgatccgcaccgcacgcgaggatcttgccgcctgcttccgcatggcggcgcggaacggcttcgaggaaggcatctgcaaccacttctcggccgtggtgcccggccatgacgatctgttcctcgtcaatccctacggctacgccttccgcgagctgacggcgtcgaagctcctgatctgtgatttccatggcaatgtgctcgacggcgacggcgtgcccgaggcgaccgccttctacatccatgccgagatgcacaagcgcctgccgcgcgcgaaagtcgccttccacacccacatgcctttcgcgacggcgctgtcgatgactgaaggcgaccccttgatctgggccggccagaccgcgctgaaattctatggccgcaccgcggtcgatcgcgactataacggcctcgcgctggacaaccgcgagggtgcgcgcattgcctctgccgtcggcgatgccgacatcgtcttcatgaagcatcatggcgtgatggtgctggcgccgaccatcgcggaagcctgggacgatctctattacctcgaacgcgccgccgaggtgcaggtgctggcgatgtcgaccggacgcaaggtgctgccggtcgatccggccgtggcggccgagacctacaggcagatgcgcgagggggatgccgaatccgcgcggctgcatctcgtcgcaatccgtaggcagctcgatgcggaagagccgcagtatcggcattga

SEQ ID NO: 5841 - DNA, 1230 bp, BradyrhizobiumColbertium
atgacacaaactgattcctgcgcccaatacacccgccgcaccctcctgaaatctgcactcggtgcgaccgccctgcttgcgtcggcggaccgcgctctcgcggcacccgcgggcttcgacgagtggcgcgagaccttccgcgtgcgcgcgacggccaaaggtatctccgccgcgacatggcagcgcgcgatgggacgtgtcgagcctgacatgagcgtgttcaggcagatgcgcaaccagcctgaattccgcgaggagatctggcaatatatcaaccgccgcgtgtccgactggcgcatcatcaacggcaagatcgcgctgaagaacaacgaggctttgttcgcgcgcatcgagcgcgatttcggcgtcgagcgcggcacgctgctggcgctgtggggcgtcgagtccgcctatggcgatcccctggtgcagcagaatcacatgaggccggtgtttccctcgctcgctgcgctcgcctggaacgagccgcgccgcaagacctattgggagaccgagctgatcaacgcgctgcgcatcgtcgagaagggttggagcacgccggaagaaatgcggggatcctgggccggcgccatgggacattcgcaatggatgccggaggtctggctcaatgtgggcatcgattacgacggcgacggcagggtatcgccgttcggcaagcccgacgacgcgctgggttcgacggcaaaatacctcgtcaaccgcggcaaatggcatcgcggcgagcattggggctacgaggtgcgcgcgcccggcaacctcagcggccgccgcacctatgcggcgtggcaggcagccggcgtgacccgcgccgacggccgttcgtttccgcagccgaacgcatccgcgcagatgtggacgccggttgcgggcgggccgaccttcctgctgggaccgaacttctattcggtgaagagctacaacccttccatgaactatgcgctggcgatctgccatctcggcgatcgttgcctgggcgcaccgcccttcatccagccgttccccggctccgagcgcgcgttgacgctggccgaagtacaggagatgcagacgcggctgaccaaggccggcttcgacaccggcggcaccgacgggcgcgtcggcaacgatacgatgaaggcggtcaaggatttccagcagcgcgccgggatcacgccggcggatggctatggcgggctgaaggtgctggccaagctgcggcaggggttgtag

SEQ ID NO: 5842 - DNA, 300 bp, BradyrhizobiumColbertium
gtgtcgcagtcctgcattccctccgaaggaaacgaggaggagaagatgaggaaagttctgtttgccgccgccatggctaccgcgatcgcggcgcctgcattcgctggtgaagtcggcgttcatgttggtccggtcggtgccggtgtcactgtgggccagtcgccggattaccgcgtccgcgagcgtgatcgcaccacggtcatcaaggaacgcgagccgtcaagccgcaccacggtgatcaagaaggaagatgaattcggcaatcgcagcaaaaccgtgattcatcacgacaacgactga

SEQ ID NO: 5843 - DNA, 252 bp, BradyrhizobiumColbertium
atgaagatacgcgcgcatgcggaaagccatgttgtcgagctcgacgacggatcgcaatggcagatctttcccggcgacctcgcggccacgctgagctggaagcccgagaccgatctgcacttggagcggagcgccgaccgtgtgagttcgcatgtgctggtgaacaccgccgaccaaagctgtgtacgggtcatcgcggccgatgagacctggcccgacggcgaggtcaagaatgcgctgaaagatgggtag

SEQ ID NO: 5844 - DNA, 516 bp, BradyrhizobiumColbertium
atgacgcgcaaggcgaaacacgtcgtgagaccgggacgaaaagcgctcgaagccggcaccgtgcatgttcctgctccgggcgaaggcaagcgcggcgagcagggttatctcggctacctcctgcgccaggcccatgccgcggtccggctgaagatggagcgcacccttgccgatctcggcgtaacgtcgccgcaattcgcggtattgacgatgttgaatgcctatccgggcctgtcaggcgccgacgtcgcccgcctcaccttcctgaccccccagaccgtgggcgtcatcatccgcaatctcgatcgcgacggagccattgcgatgacgcctcatccggtccacggccgcatccagcaatggacactgacgctgcgcggcgccacgctgttgaaggagtgccggcagcgtgtgctcgaactggaaaagcgtctcgccagggatttggataggaaagctgaagccgcaatccggcattggcttgccgcgattgcgactgacctacaggagggttag

SEQ ID NO: 5845 - DNA, 480 bp, BradyrhizobiumColbertium
atgtcacacgcccgcagcgaatacgaggatttcaagaagatcgctcccgatgcctatgatctggtgttggcgctcggccagctcgcggccaaggctgggctcgacaagcagctgctcgaactcgtcaagctgcgcgcctcgcagatcaacggctgcgctttctgcgtgcagcatcacattctcctgtccgaacggattggtgtgcctgcggacaagctcaacctggtggcggtctggcgcgaggcgccgatcttctcgtcgcgcgagcgtgccgcgctggcctgggcggaggcgctcacctgtctgcccgagggcgtcagcgaggaggtctacgccgaagcgtcccgcgagttctccgagaccgagctgatgtacctgacctcggccgtcgcatcgatcaatgtctggaaccgctttggcgccgcctatcgctggacgccggcgaagcgaccggccgtcgcggccgccgctgcctcctga

SEQ ID NO: 5846 - DNA, 504 bp, BradyrhizobiumColbertium
atgtcggccatcagcgtttcggccctgccatacccggcaccgtcacgttcgacggcgctcgccgtcgttgcaggactcgcctgcgcgcttgcgattggaaaagcgctgccggtgacgatcgacagtgtatcagacgcgctagccccgctctgtgccactgcggcggagagttcgccgctcgacaagatcgagccgatcggctcctacgcgctgccgaacgtccccggcaagcgcgtgaccatcgtgcgcgtgtcctatggtcccggcggattttcacggccgcatcgtcatgcgggctctgtcaccgcctacatcaccaagggcgagatccgctcgcagctcggtggcggcccagtcgagacgttcggggtcggccagtccttcttcgagccgcccggctcgacgcatctggtctcggccaatgccagcatgacggagccggcagagttgatcgcggtgttcgtcgcggatgagggcgcgcagctcacgactttcttggattag

SEQ ID NO: 5847 - DNA, 1053 bp, BradyrhizobiumColbertium
atgcctggctatgcaagattgtcgtcgcgcaccaccgccagttcgaacgaagaagggacaggattgatgagcgtcggactgatcggtcttctcgacgatatcgcggggattgccaaggtggcggcggcctcgctcgacgatgtggcgggccaggctgccaaagcgggcacaaaggctgccggcgtggtgatcgatgacgcggccgtcacgccgaactacgtcattggttttgcatcgaaacgcgagttgccgatcgtcggcaagatcgcgctcggatcgctgcgcaataaactgctgattctgctgcccgttgccctgttgctcggatacttcctgcctgcagcggtcacgccgctcctcatgctgggcggagcctttctctgctacgagggcgccgagaaggtgctcgaagcggtgctgccccatcatgcgcatcaccacgaagctcagctccagccgattgcgctgaatgcccgctcggtcgaagacgagaaggtcgcgagcgctatcaagacagacttcatcctgtcggcggagatcatggcgatcacgctggcggcgattccggcgggcagcatctggacccaggcgttggtgctggcgctggtcggtgtcttcatcaccgtcggggtctacggcgtggtggctctgatcgtgaaggcagacgatgccggcatggcgcttgcgcgctatgacggcgcctcagtcatcggcggcgcgatccgcatgctgggacgcgcgctggtccgcggcatgcctatcttcctggccgtgctgagcaccatcggcaccgccgccatgatctgggtcggcggcggcatcatcctgcacggcatcgagaaatacggcccgcccgcggtcggtcacaccgtccatgctgcaaccgaggcggccgcacaccttcttccctccgtcgccggcatcatcgattggtcggtcgaggcggccatctcgggcgtcgttggactgcttgtcggcgcgattgctattccggttgtcgaatacggcctctcgccggcatggaagctgttgaggcgatcggagccggcttga

SEQ ID NO: 5848 - DNA, 1599 bp, BradyrhizobiumColbertium
gtgggcagaaagagtctccgcttcgtctcgcttctgctggcgctgccgcttctcgttgccacccccctcgctgcggatgaattccgcagcccctcgctcacggccctgcgcgtcgactggcgcgcagcgctggaccaactccggatcgagatcaacagccgtccccagattgcgggcgagttcatcttcgcaccccgccgctcggtgccgcgctacgatccgcgcgcgatgccggcattggtgcagctgaatgcggtctcttcgcgcttcttcaccggcattgcccgaagtcccgtacctgtgctgctgccgttcgacgtcgccgcatacatcgaggcgcagcgcagcggcgcgccggtgacgctcgcgctgtcacgctaccaggccgacttcaatcccgtcgacatgttccatgccggtccggccggttacagcgcgaccttctcgttggagcccggcgccggtgagggcatgccgagccgggtgttcgcaaggcccgtggaggtacagatcaccggctcggcactcgtctacgacatcgccgatcccgccggcggcaagggcgagccggtcaagccgctcgcgacaacctatccggatctgcgcaggttcatccgggaaggttatgtgcgctacgctttcacccgcttcggcgccgcctatgtggtatcgatccaatgcctcgacagcgtcgccaagccgcggcggctcgcctgcaaggaggcctatccggtcgccgagcgcttcctgagggcgctgcgagtcgcaggcggccagcgcatgcggccgttgacggacattgcctccaacgtcatcgatcgccccgcggcgcgttcgccggatttcagctaccggccgagcggcgatatcatcccgaataccggctaccgtaagcaaggcggccatcccgacgcgatggcctatgcgcagatccgctttccgctcgagaaggcacccgctttcgtgcgctcgcaatcctacggcaagcgcgacaagagcggcgaaggtccgaccgcctatccctggcgcgacaatttctgcgaggcgcgcagtttcgaggtgtggcaatgcgccggcggatacggccatcagggcgaggacattcgcgccgccgactgcccgtcgcccggcgaaggccgcgagccctgcgaccccaagcagcgtgccgtcgtcgcggtgcgcgacgccatcgtgatccgcggcgtcagggaccaggccgcgacgctgcagatcaacagccgcaccgagcacatccgcttccgctatatgcacatgaacccgcaggcgatgaacgccgacggcctcgtcaacggccgcctcgtcagcgaaggcgaaaagatcggcgtggtctcgaactatctcgaccgtcccgccggaacctcgctgcacctgcatttcgacgtccaggtgttcacccgcgacggctggatctgggtcagtccctatgtcacgctggtctcggcctacgagcggctgatacgcgcccgcggccgcgagatcggcccagatatcgcagtcacgtcgcagccggtggctcacgctctgccggaagacgtgatcaagccgcaccggcgcgagggatcgagcggcgacaattga

SEQ ID NO: 5849 - DNA, 567 bp, BradyrhizobiumColbertium
ttgagagtcatcgccagttctattcgcaagggcaacgtgatcgagcaagacggcaagctttatgtcgtcgtgagcgccgagaacatccatcccggcaagggtaccccggttagccagatcgaaatgcgccgaatctcggacggggtaaagatctccgaacgctacaagaccaccgaccaggtcgaaaaggccacgatcgaggagcgcaactacacctacctctacgaggatggcgacggctaccacttcatgaaccccgagacctacgaccaggtccaggtctcgaaggacgtcgtcggtgatgccgccgcctaccttcaggagagcatgaccgtcaagctgtccatgcacgacaccaacccggttgcgatcgcgctgccgcagcgcgtgacgctggaagtggtagagaccgaacccgtgacaaagggccagaccgcctcctcctcctacaagcccgcggtgctctccaacggcgtgcgcaccaccgtcccgccgcacatcaccgtcggcacccgggtggtggtgatgaccgaagacggctcctacgccgagcgcgccaaggactga

SEQ ID NO: 5850 - DNA, 1053 bp, BradyrhizobiumColbertium
atggccggggacaagccgttgtcgccattctgggcgccctcgcggcaccttgaccggcgtccgttcctccaggccaggggagccgtgaccggggcgttgcggggctttttcgccgaacagggcttcacggaggtcgaaacctcggtcctacaggtctcccccggcaatgagacccatctgcacgcccccagcaccgagatcatgcggcccgacggcagccgtgcgagccgatacctgcggacctcgcccgaatttgcctgcaagaagctgctggcggcaggtgagacgcgaatcttcgagttcgcgcgggtgttccgggaccgcgagcgcggcgacctgcatctgcccgaattcaccatgctggaatggtatcgagcggacgcgccctatgatgccatcatggccgattgcatcgtcgtgatcgcccgtgcggcgcaggcgaccgggatcgggtccttctccttccgcggtcggaccgccgatccgttcgccgagcccgagcttctgaccgtcgcgggtgccttcgaacgtttcgctgggatcgatctgctgtcgacaatcccgggcggcgaggctaaccgtaccgcgctcgctgcggcggccggggccaaggtccgtgttgccgaggacgacagctggtccgacatcttcagcaaggtcctggtggagcatgtcgagccgcatctggggcaggggcgtttgaccatcctgtttgaatacccatctccagaggcggcgctggcgcaggcgaaggcggacgacccgagggtcgccgagcgtttcgaggtctatgcctgcggcgtcgagctcgccaacggctttggagagctgaccgatgccgacgagcagcgaaaacgtttcacggagtcgatgatcgagaaacagcgccgatacggcgaagcctatcccctcgacgaggactttctggctgcggttgccgcaatgccggaggcgagtggcgtcgcactcggcttcgaccggctggtcatgttggcgagcggcgcaacacgaattgatcaggtggtgtggacaccgcccgcggatgatagatga

SEQ ID NO: 5851 - DNA, 1095 bp, BradyrhizobiumColbertium
atgacgaaggcgaatcttgcacgcaccctgcgtgagcctgccgagctcatcgccgaggggttggcgcccgcggcagcgctaccggcgctcgaacgcgttgccgcgcgctatgccgtggcggtcacgcccgatctggccgagttgatcgacgcatcggatcccgacgatcccatcgcgcgacaattcgttccgaccgcggccgaactggacctgaagccgggcgagaacgccgatccgatcggtgaccatccgcattcgccggttcccgggatcgtgcaccgctatcccgaccgcgtgttgttcaagctcgttcacgtttgcgcggtctactgccgcttctgcttccgccgcgagatggtggggcccggcaaggagaatgcgctgtccgacagcgcctatcgcgcggcgatcgactacatccgggcacatgacgagatctgggaggtgattctgaccggcggcgatcccctgatgctgtcgccgcggcggatgagcgagatcatggccgatctggccgcgatccaacacgtcaagatcatccgtcttcacagccgcgtgccggtggccgaacccgcgcgcatcagcgacgagatggtcgctgcactgaaggtcgatggcgccaccacctggatcgcgctgcatgccaaccatgcgcgcgagctgactggagcggcgcgcgccgcttgcgcgcgtctggtcgacgccggcgttcccatggtgagtcagtccgtgcttttgcgcggcgtcaatgacaacatcgtcgctctgtcggatttgatgcgagctttcgtcgaatgcaggatcaagccctactatctgcatcacggcgatcttgcgccgggcaccgcgcatctgcgaacgacgttggcgcagggacaggacctgatgcggcaactgcgcgggcgcgtgtcaggactctgtcagccggactatgtcatcgacattcccggcggcgccggcaagtcgccggtaggacccagctacctattgacgacgcaaaataccgcactgcctgcggatgatgcgggagccgaaacgcgctatcgtatcgtggattattgtggcgacgttcatctttatccgccagagacttga

SEQ ID NO: 5852 - DNA, 255 bp, BradyrhizobiumColbertium
atgaaaaagatcatgctggcagcatcgcttgtgctcttgctgggtgacggcgcgatggcacagaccggtggctccaaggggccgacgtccggcagtgggatccctgcaacggtattgccggcgccggtcggtcaccgtcagccgcgcgcggccgatgtgccgagcgagaagaatctgagcaatccgaacacgcccgcgaacaaggaagacgcggagctcgatcgcaagatcaagagcatctgccgcggctgttga

SEQ ID NO: 5853 - DNA, 1086 bp, BradyrhizobiumColbertium
gtgctgagcacgacagacgatcttcgcatccgtgaactgaaagaactgagcacgccggaagaggtgatgcgggaggtcccgcggacactcaccgccacgcgcgtggtgatggccgcgcgcaacgccatccatgcgatcctgagcggccaggacgaccgcctcctggtcgtggtcggcccctgctcggtgcacgatcccaaggccgccctcgactatgccgagcgcctcgcgaagctgcgggaagatcttgccgaccagctcgagatcgtgatgcgcgtctatttcgagaagccgcgcaccaccgtcggctggaaggggctgatcaacgaccccgatctcgacggcagcttcgacatcaacaagggcttgcggctggcgcgcaacgtgctgtcggctgtgaacaatctcggcctgcccgccggcaccgaattcctcgacatgacgacgccgcaatacatcgccgacctcgtgtcctgggccgcgatcggcgcgcgcacgaccgagagccagatccatcgcgagctggcgtcgggcctgtcctgcccggtcggattcaagaacggtaccgatggcaacgtgcggatcgcggcggacgcggtgaagtcggcctcgcatccgcatcatttcatggcggtgacgaagctcggccgttcggcgatcgcctcgaccgcgggcaacgaggactgccacatcatcctgcgcggcgggagcaagccgaactacgacgcggcaagcgtggcggccgcctgcaacgatttgaccacgtccggcgtcgcgccgctggtgatggtcgatgcgagtcatgccaattcgagcaagaagccggagaatcagccggtggtgatggccgatatcgctgctcagatcaccggcggcgagagccgcatcatgggcgtgatgatcgagagcaacctcgtcgcgggccggcaggacgtcgtaccgggcaagccgctcacctacggccagagcatcaccgatggctgcatcgactggcccaccacggcaagcgcgctcgagcagctcgccgactccgtcgagatccgccacaacatccgacgcgctgggcggcacgagcggtcggcctag

SEQ ID NO: 5854 - DNA, 579 bp, BradyrhizobiumColbertium
atgacatcgcctgaagaattttcacggctgcaatccgctatgaaccaggcggtcaagacgcattggaaggctttcctgttcgagggaatcctgcttgtggttctcggcattgccgctttgatcctcccgccactcgcaagccttgcgaccacgatcttcctcggctggatgttcctgatcggcggtatcggcggactgatcgcgacctattgggcgcgcagcacgccagggttttggtggtcgctgatctccgccgcactcgccgtcctcaccgggatgctcctgctggcgcgaccgatgcaggccgtgctgacgctcaccatcgtgctcggcgcctacttccttgccgagggcgttgccaccatcatgtacgcgctggagcaccgccgggagctgagcggccgctggtcttggctcctgatctcggggcttgtcgacatcgcgatctcgttcatggtgatcacgggactgccgagctcggcggactgggcgatcggcgttctcgtcggtatcaacctgctgttcggcggcgcctcgctgatcggcatggccctcgcggcacgcaaggacagcacctga

SEQ ID NO: 5855 - DNA, 1041 bp, BradyrhizobiumColbertium
atgtatttgatcgaagcgctccccaccgtcgttggaactgccgccatcgccccggcgctcctgatgttatggctcgtcatcgccgctgaagagcgccccggcccgccggcccaggtctggactgccttcttgcttggtgcagccagcatttcgctcttgggcctcgcccgcgcccccttcgccaagatggtcgcggcccccgacgacccgtgggccgcgcttgcgatgcattcgatcttcggcgtcgcgttacctgaggaagccgtcaaggtgatcgccatcgtgctgatctcctcgaccaagcggcgaacctttgccaatccgatggacaccgtcgtctatggcgctgcggtcggcctcggcttcgccgcttacgagaacctcgcttacctggtccagcacgcggacatgtggcgctcgctggccgccctccgcagcgtgctgaccgtgccgttccacggcgctctcggcatcatcgcaggcgcctacctgacgatcgcgcgcgcgggcacggcgctgggcgcgaaccgccatcatcgcgattgggctcgtctttccagccggctgttgatcttcgctgcgccgctcgcgttgcattcggccttcgacttcccgttgctgacgctccagcgcatgcccgatctcgatccgaccctgcggatgtggctgggcgccgccagcctcctgatcggcttcggctcgatcgcattcgcgatccgcctggtccggcgcgtcgcgcgccaccatgcgccccggaccgatctcgcgcgcgagcggctcagccagctccggcggatgtgggcactgctgctcgccggcggcggcatcggcttcctcgggctcgccttcgtcctgacctcgatccatcactggctgaccaaccccgagcgcaacctgacgctggctctgatcccgatcggtttcgtctcgatcctgctcggcctggcacttctgatcgtcacaacggcgatctacattctcggccgcaaccgcatccgcaccagcgcggacggcttttcctcggcacccggcggcggctga

SEQ ID NO: 5856 - DNA, 273 bp, BradyrhizobiumColbertium
atggcagtcgacaagatcacggttgataagatcaaggttggcaagatcacctgggacagggtcggccgggtcaccgagcccggacgctacatatacacgttcggctggctcaccatcaccgccggtgacctcgaaatctggagacgatatccgcaggctgcattcacgctgctggcccagccttccgaatcgctcgaatccgttggtgaggaattccatctcggcgccttcgacgtcgcacccgacgccccgccgcccatcaccacccactga

SEQ ID NO: 5857 - DNA, 588 bp, BradyrhizobiumColbertium
gtggcggtgagcggcagctactcgctgcctcgctggtatgattgcgagggcaagctccgcagcttcgcttgccggaccaagcgcgtctcgcccttccggatgatcgtggacgtgccggtggtcggcaaggtcggcgagcgcgtgacctcctacttccaggatttcggcgaattccaaagcaccatcagcgcgacactgaagtcgggctttctgatggagctcgacatgacgcgggcgcggcgcgcctggatgtcggaaaagctgacgtggctcgagaagaaacagaaggacgacagcattcgagaattgcgacgtgacgcgcgtttcgttccgcaggtctcgcacaccgtcctgaccctcgcggacggcagcactcacccctgcttcatcatcgacgtctccacggccggcgtcgcggtctcctcggagcatgatccggcggtgggaaccccgctcgcggtcggcgcctgcgtcggacgggtgatccgcaaattcaaccacggctttgcggtcaagttcgccgagaagcagccgcgggacgacctcgtccgcctgatcgtccgcgcgcccatgctgaagtcggcctga

SEQ ID NO: 5858 - DNA, 666 bp, BradyrhizobiumColbertium
atggagcagcgccagaccatcccgaacgactcgtccggcgctgcctcgccgccgccgccctggatgcatcgtgctgccgcccacccgccggaccgccgggccaggatgctggagcacatggcgcgcgcccgatcgcttccgcagccccaggccgctgctttgcggccgacggccaagacgccgctcgcggcgggcctcgccattctcggagatgcctgcggctacgcaatcctgttcggcaccatcacgcttctgttccagtctcacgttcctctttacctcggcgcgtttcttttccttgccgacggcaagcgcatcgaaagcttgctcggagcgatcggcttgaggttcgagcctgatgcgatcgggcccgatatcgtcaagggctgcgccttctggttcgcctggatcgcactgctcgtctccttgcggggctctgcccccgcctggctcgcgccgtggatgccgccagccgagtcatgggcttcgatcgccgtcatcattctggcgctcgctgctttcgatgcagtcgcagcgctggcgatccggcgcgcaggtgcgcggttcggattggcaatccgccccgacagcctgatatggacgacgatcaagttcgccatcgtcgtggggctgctggccttgctggtgcttctcggcgcggtttga

SEQ ID NO: 5859 - DNA, 72 bp, BradyrhizobiumColbertium
gctcccttcgtctatcggttaggacgccaccctttcacggtggagagagcggttcgattccgctagggagcg

SEQ ID NO: 5860 - DNA, 255 bp, BradyrhizobiumColbertium
atgccaccgccgaaaaagcgcgcagcccgcaagctgttgtcgcagcacgcttggatcacgctcgacggcggcttcgccgcgcggcattgcctggtccaggacatttcggactccggggccaggatcacgctggacgaggacgcgagccagcttccgggcgtgatccggatggccttcgcacgcgacgcccgcacggggcggagctgccaggtggtctggcgccgcggcaagtcggccggcgtcaaattcatctga

SEQ ID NO: 5861 - DNA, 282 bp, BradyrhizobiumColbertium
atggcgcgcccgctccgttcgggctacaaggcggcaatgcgcatgccgctcctcgtcctgatctcgctcatggccacgtccgcagctgcggctgagagcctgcgcctgccgcctgccgagcgcccgcaagcaggcaaggccctgccgctgaagggcaccgccggaaaggccggggcgggctcctgcgcctcctacggcccgcgcttcgtcatggtcgagggcaccgggacctgcgtgaagatcggcggcgcgatcagcatcgacaccgccgtcaggcgctga

SEQ ID NO: 5862 - DNA, 168 bp, BradyrhizobiumColbertium
atgccggcggatctgctgcggctcgacctcatcgttcccgtcctgatgtattgcgcgctgctctggtggatcggccgcgggatgagctggacggcgcggctcgccaccgtcgcggtgacgctggtgctgatcgtcatcgtgctgctggtcgagcgcggctggcgctaa

SEQ ID NO: 5863 - DNA, 639 bp, BradyrhizobiumColbertium
atgcctgagaccaagctgacgatctggggccgcgccaattcggtcaacgtgcagaaggtgctgtggtgctgcaccgagcttggcctgcctttcgagcgcatcgatgccggcatgcaatatggcaagacccgcgaggccgactacctcgcgatgaaccccaatgcccggatcccgacgctggtcgagggcgacttcgtgctgtgggagtccaactcgatcatgcgctatctctgcctcgcgcatggccgcggcacgccgatctacccggaggcgcccaagcagcgcgccagcgtcgaccgctggctcgattggacgctgtcgacggtgcagccggtcgaccgcccggtgttctggggcatcgttcgcacggcgcccgccgagcgcgacatgatccaggtgcagcgcgatgccgatgcggccgccgaggtctgggccatcgccaaccgcctgctcaccacgcgcagcttcatcgacggcgatgcgttcacgctcgccgacatcgcgatcggctgctatgcgcggcgctggctcggggtcgaaggcatcacccggccggcgcagccgcatctcacccgctggctctccgagctcggcaaacggcccggatttgcgcaattcgtcgcaccgccgatgtcctga

SEQ ID NO: 5864 - DNA, 192 bp, BradyrhizobiumColbertium
atgcgcgatgcggcgcgcctctcatgcaaaaagctccgcacgtggcggagctttcattgcaaagttcaacctgacggtcagcggccgaagaacagccacaacagaatgatcaccgggatcggcacgccgatcatccacagcaacagccctctcgccatcgcatcctcctccaattgcatcactggagggtga

SEQ ID NO: 5865 - DNA, 453 bp, BradyrhizobiumColbertium
atgagatatctccacaccatgctgcgcgtgagcaatctcgatgtcgcgctgaagttctaccaggatgcgctggggttgaaggaggtgcggcggatcgagaacgacaaggggcggttcacacttgtcttcctgtgttcgtcggacgatctcgaggcgctgaagacgcagccgccgacgcgcggggcgccgctcgtcgagctcacctggaattgggacgaagaaaagtacggcgaggatcgcttcttcggccacctcgcctacgaggtcgacgacatctacgccacttgcgagaagctgatgaaggcaggcgtcaccatcaaccggccgccacgcgacggcaacatggccttcgtgcgctcgcccgacctgcactcgatcgagctcttgcagaagggagatccgaagccgccgcaggagccctgggcttcgatgccgaacaccggtcattggtag

SEQ ID NO: 5866 - DNA, 156 bp, BradyrhizobiumColbertium
ttgacgcaaagccgacttgccgaagtgatggctttgactccgcagaacatcgcgctgtgctggaaagcgctcgctaggggcgataccgccaccgccaccgcgcgaagcgtacgcgcggaagcgatgcgtcgaatggggcaatactactgcatgtga

SEQ ID NO: 5867 - DNA, 258 bp, BradyrhizobiumColbertium
atggaaatatccgacattcaggattttgcgatccaggcccgcctagcggcggtcctcggcgcagccgagttcgaccgcgtcttcgccggggttcgttttgccgaggtcgaggggccgctgttgtatgtctatgcgaaagacgaagccgccgctgccgcgatcgaggacgacttcgcgctgctcgtcgcggacattgccggccacatcttgaagcagaacattgacgtcgtggtcgtgctgccgaaggtgttgcagtag

SEQ ID NO: 5868 - DNA, 132 bp, BradyrhizobiumColbertium
atgcgaaaggcgctggcagaactaaatgaggacgaacgtcacgcgttgctttacgtggccgacctcggcaccgcggcatgtctgtccggcctgatcgtcagcatcatcaagctcgtcggcgacttgctttga

SEQ ID NO: 5869 - DNA, 153 bp, BradyrhizobiumColbertium
atgaccaaagtatcgctccagcaccaagccgaccgcgccgaagccctcgctgcccagacggcggatggcgaaatcagagaggctctgttgaaggctgcgcaggaatatcgggcccagctcgagagcgacgatgacaaggccgaccttgagtag

SEQ ID NO: 5870 - DNA, 153 bp, BradyrhizobiumColbertium
atgccatatttcgtttgcgcccgcgacggagcgggccagatcatcttgaagcgcgacaccaaggaggcagccgagaagaaggccgccgaactccgcgacatgggctatttcgaggtcgagatcgtcgcgaagggagtcgagaaggcggcgtga

SEQ ID NO: 5871 - DNA, 192 bp, BradyrhizobiumColbertium
atggccgacaacacccagaaggacccgaaagactgggtttccggagacgacccgatgacgggtgctcaggaatcctatctcaagacacttgccgagcaggcccatcaggacccgccagcggaagacctgtccaaggccgaggcctccgagctgatcgacaagatgcggcaaaaggccgggctggaggagtga

SEQ ID NO: 5872 - DNA, 234 bp, BradyrhizobiumColbertium
atgccggacctggactttctcaggcgggagatcgaacggatgcgcatccagatgggcagacagaggaaggagatcctccagctgcagcgcgcggggatcgggacggcctcggcgcaagcgctgctgtcgcggatggaggcgaaggtcgagagtctctgtgccgaacgcgacgcgctgaaggcggcacagccgcgccagaccaagggcagggtgctcggcgggagaacatggtga

SEQ ID NO: 5873 - DNA, 225 bp, BradyrhizobiumColbertium
gtgagcaggcgatggttcgacgacgagagagacctgtcgcccttcctgaccgcgctcgaggacgttcgtcgcagagcgacgcgggaagggtggtgctatgcccacgtccaggccatcatcgtggccatcgaccagtacgcggaagccgcgacgggcaatcgcgagtatttcctgaacaagccggtttcgatcggggagagccggaaagctgccgacattccttga

SEQ ID NO: 5874 - DNA, 1068 bp, BradyrhizobiumColbertium
ttgattgtctatccgctctatttggtggaactggcggagctccacccatgcacacgtcactcctcgcgggaccactgcgccgccgagtatcgttcatccgacttagcccctgggactgatgtttggtcatccggttcaggcaacattccgcaaccgggcgtcctgtccgcgtcggtcagctccggcgcggcgtgcgggccggcagggtgctggctgcgttcagcggatgcatccgccggaacgactgcagcctggtttctgagtgctctgcattgcttctgcctgaccgttcgaacgggagcgtcaaaggggccgatggactgtcgggcatcgccccttccaagcaccgcaggcgattgcgctgttgtcatcgttgtcgcgggtgcggacgcaacgttccaaatcaaggatgaggcgccggacagaggttggccgaagctcaggaggaacggacaagcaatgcccgggttggccacaagcaactggaggcacctcgacatggccagagatctttcccgggaccaagagagagaaggcacgcgcaagttgatgatgtggggatcggcggttgccgcgatcctgttcgtgggctccgggctttggcttgcggctccccagatgttcggcatgaccgattacgttgggcgcccaacgaccggagccgacagcagcgcgccggcgaccacggtcggcactggtgttccaacacagcgcgacgcgatcagcacggctgcaaaagaagatccggctgtaaacgaggattcgagcggcggtcgcgcccgccagatcaagcagagcagccagcccgcgaacctttccgagcagcaacgccagcaactccagtcggtgctctcgacggcgcaaggtcctgcggtggatcggccgaatttcgaaatgatggtcggcacgtcggtcccgcgacaaaccgagaccgcggatcttccggctgaggtgacgcaaatcctcaacgggttttggggcgatcaatatttgatagcggggaagtccctcgtgatcgtggatcatcactcgcgccgcgtcgcagccatcattgccgacgtacgatga

SEQ ID NO: 5875 - DNA, 213 bp, BradyrhizobiumColbertium
atgtcagacctggaacaagcgatccgcgagcgtgcctatcagatctggatggagagcggcggtcaggacggccacgccgagacgcattggctcgaagcgcagcgcgagattctttccgcgtctctcggttcggtcgcgcgggtctccacggtgagcaccgaaaaaccgaagacgaagtccgcagggccgcgaaggaagcgccgagccgcatga

SEQ ID NO: 5876 - DNA, 165 bp, BradyrhizobiumColbertium
atgcttcagggcctgctcagcgccatcgtggaaacgctcctcacttctgtgtggaacgccgtcgtcaggttcttgcgcctggagaacgccgtcgaactcaccactgcaatcgtcggtctttcctgcattgcaatcggactcgcagcattctttctcgatcattga

SEQ ID NO: 5877 - DNA, 207 bp, BradyrhizobiumColbertium
atggctgcccgaacctacaatcacgaacgctggtcggaagacgacgaccggctgctgcgatccatgtgtgaaaccggaaagagcctcacgctgatgatcgtgaaactcaagcgtcccattgcatcgatcaggtcgcgggcgatcgagctcgggatcaatctgcccggcacccgcatcggtctgcggcggaagccgcgaaccgcctag

SEQ ID NO: 5878 - DNA, 273 bp, BradyrhizobiumColbertium
atgaagaaaatcatgatcgccaccgccgccctcggtctgatgtgcggttccgcctttgcgcagaaccagaccggcccggccccgcagtccaacaacatgcagaagcccggcatgaacagcacggacaagggctcgatgaatcagggcacgaccggaatgagcaacgacgggatgagcaagggcggaatggtgaggccggacgcgtccggtcagggcggctcgggcccgggcagtgaccagggcggcaccaagacgcgcagcaacatgaagtaa

SEQ ID NO: 5879 - DNA, 303 bp, BradyrhizobiumColbertium
gtgctggattttgacgagctgcgtgaactcgcagccgatgttcgtatttttgtcgacgtcgccgaagacaaggccgaggcgctgagggccgtcatcgcggcttacgacgttgtgctggcgatcttccccaccgaagagggcatgggccttcacgtcatcaagggcggcgagatcctggatggcattgcaaaatcgcggacacatgcgatgtacagccatacggcgatcgcagttcccgacctcgcccatgccgaagccctcaagttcctgacgaggcccgtcgaacagcggattgcggcctga

SEQ ID NO: 5880 - DNA, 492 bp, BradyrhizobiumColbertium
atgaaggttgctatcgtcgtcgcaggtttgatcgtcatcgctgtcgtagcgttcgtcgcgatacagccaagcttcctgaagccggcatccctcgcactcgtcaagaagtccgacatcttcggcttctcgcccggaatgacgttcgaggagaccagcaagctcgtcagtcaacgccgttatctctgccgccggggccgcagctcgcccagcctcgaatgcgagatcaatggagccaaggtctccgtcgacagcgacgagtccgacgccaggcacccgatctggcgcgtcaatgcgacgttgagcaatccgggctcgcaggaagctgccgtgaagtcgatctccgaccagtacaacgcacaggccatcaagagccgggagggatggacatggatcgtcggccgcggcttcaagctgagctatgacggtctcgccttgaacctcgtggacgaggccgcggaggcacggcttcgcaaggacgaagcaaagcgatag

SEQ ID NO: 5881 - DNA, 153 bp, BradyrhizobiumColbertium
atggattcgcgcgagcaatgcctgctggagacgcggtcggaccgcgatggcgcgctgctgattcatgccagaagccatgaagcgatggggcttagagcccatcgaggccgaaaacgcaagcacgggttctgcgaggttcccgacttgttgtga

SEQ ID NO: 5882 - DNA, 297 bp, BradyrhizobiumColbertium
atggcgaagatgacgaagacccaattgatcgatgctattgccgagggcacgcagctttcgaagaacgatgtgaagtccgtgatcgagtacatggcgacggtcggctacaaggagctcaacgagtccggcgagttcgtcgttcccggcttcgtgaagatgtcggtcgtgaacaagccggcgaccgaggcccgcatgggcgtcaatcctttcaccaaggagccgatgcagtttgcggcgaagcccgccagcaaatcggtcaaggcctcgccgttgaaggtggcaaaggacgccgtctga

SEQ ID NO: 5883 - DNA, 138 bp, BradyrhizobiumColbertium
atgaccgtcgaaaagcagcgcgaagtgatcaggctctggaacgaactcaggaagctcgaggggccggccgcggaagaacttcgtatccagattctcgaatgtttctcggcgaaggacaagacgaagcgggcggcttga

SEQ ID NO: 5884 - DNA, 201 bp, BradyrhizobiumColbertium
atgacacctttttcagaaacgtccttttatcagggcgaccggcacacctaccgtcgcgtcgccatcgtcggcgcgctgttctgtcttgccttcgtggagatcagcttctcgctgcggccgccgcaggccgaggacacgcgcgtcgccgtgaaggccgaccggctgttgcgaacggcagggcaagtgccgcgcgcgaattaa

SEQ ID NO: 5885 - DNA, 126 bp, BradyrhizobiumColbertium
atgccggtgtggctcgaagtcctggtgaacctgtccggctatgcgggtttcgttgcgctggcgacctgcggcgccggctgcgccgacacgtccaccgacgatcggatgtgcagcaaggaacgttaa

SEQ ID NO: 5886 - DNA, 195 bp, BradyrhizobiumColbertium
ttggttcccaagtccgacgatcagcactacgaggaaatcgtgcgcagcttcggcgtcggcacactgcgcccgccgccgacaccgatgagtgatcgtgagctggcgcgggccattgccgagttcctgaaggagcagccgtcgagcaaatcggtcgcgacgctcggccggcgcctcgacccctcctctcccctttga

SEQ ID NO: 5887 - DNA, 288 bp, BradyrhizobiumColbertium
atgaagaagacactggcagttctggccaccatggccgccgttggcgtgacggcagtagccgcgccgtcaccggcagaagcgcgcggtcgtggcatcggcccgggcctcgcgttcggccttgccgccggcgcgatcaccgccggcgcggtcgcagcctcccggcctcatgggtactacggtccccgctacggctattacggcggcccgagctattattacggaccgggaccccacgcctattacggcggcgggccgtaccaccgccatcaccactggcgccattggtag

SEQ ID NO: 5888 - DNA, 165 bp, BradyrhizobiumColbertium
atgaccgaagatgaagaacggaaagagcgcgaacgcgaagagatcgctgcccgtgtcgccgccttccgtgccacgcaggaaaagttcaagcgcgagcgcgacgaatatttcgtgtcgacgctggagaacgcccgcaaggtcgagcggccctcgctttggccgtag

SEQ ID NO: 5889 - DNA, 762 bp, BradyrhizobiumColbertium
ttgatcgcattggatcttcagagcggcgtcgagcggctcggcgacatgattgccgagtcgaggatcatcgttccgttcaccggcgccggcatctcgaccgagtgcggcattcccgatttccgctcgccgggtggaatttggacgcgaaaccgtccgatcccgttcgacgagttcgtcgcgagcctcgaggcccgcaacgaatcctggcgccgccgtttcgcgatggaggaggtctttgccgcggcgaagcccggccgcggccaccgcgcgctggcttcgctctatcgcgcaggcaaggttcccgccgtcatcacccagaacatcgacaatctgcaccaagcctcgggcttcgccggcgagcacgtggttgaacttcacggcaataccacttatgcgcgctgcatcgggtgtgggcaggcctatccgctcgactgggtgaggcgtcgtttcgacgacgatggcgcggcgcccaactgcacggcctgcgacgagccggtgaagaccgccacgatctccttcggccagatgatgccggacgacgagatgcagcgcgcgaccgcattgtcgcaggcctgcgatctcttcatcgcgattggttcctcgctcgtggtgtggccggcggcgggctttccgatgatggccaagcgggccggcgcacgtctggtgatcatcaatcgcgagccgaccgagcaggacgatatcgccgacctcgtcatccgccacgacatcggcgagacgctcgggccctttgtcggcaattga

SEQ ID NO: 5890 - DNA, 174 bp, BradyrhizobiumColbertium
atgcagcccgccacatcggcggcgctcgaatcacgcgtctttaagagaatgttctcaattcgacgcgacgcgaatctttcgactcaaaagataacactctcggttgcgaggcatagacaaaaaagagattcgccggaacctatgaacagcttgcacagccgcgaatcaaactga

SEQ ID NO: 5891 - DNA, 594 bp, BradyrhizobiumColbertium
atgacgccgggcgagcacgggggggccggccgggatagtgggctcagtccgttcagcgggcttggtgagaccagcgccaatctcgtcgaggtccatggcgtcatcaaatggttcgacgcctccaaaggttacggcttcatcgttcccgacaatggctggccggacgttctcctgcacgttaccgtgctgaggcgcgacggttttcagacggcttatgaaggcgcccgcatcgtcgtcgaatgcatccagcgcgccaagggttaccaggccttccgcgtcgtctcgatggacgagtcgaccgcgatccacccggcgcagatgctgcccccgcgcacccatgtcacggtcaccccgaccagcgggctggagcgggcccaggtcaaatggttcaaccggctgcgcggcttcggcttcctcacctgcggcgagggcacgcccgacatcttcgtgcacatggagacgctgcgccgcttcggcatgacagagctcaggccgggccagtatgtgctggtccgcttcgggcccggctccaagggcatgatggcggccgagattcatcccgagaccggatcgccgggattgcagtcgcactga

SEQ ID NO: 5892 - DNA, 483 bp, BradyrhizobiumColbertium
atgaattctgatcgaaaggccatctggtccgctgcgaagggctggcttgccgccatcctcgtcatcatcggctgtgccgccgccgcgcctgccggcgccgccaccttccagccgctcgagatcgtcaccaagaacggcgtacaggtgttctcggtggaaatggcgacgaccgaggacgagaggcggactggcctgatgtaccgcaaggaattggccgacggcaaaggcatgctgttcgacttcaatcccgagcaggaaatctcgatgtggatgaagaacacgtacgtgtcgctcgacatgatcttcatccgcgccgacggccggatcctgcgcattgccgagaacaccgagccgctgtcgaccaagatcatctcgtcccgaggtcccgccagggccgtcctggaggtcgtggcgggaacggcgcaaaagtacggcatccgccccggcgaccgcgtcggccatcccctgttcggcagcaaatag

SEQ ID NO: 5893 - DNA, 74 bp, BradyrhizobiumColbertium
cggggtatagcgcagcctggtagcgcggcagttttgggtactgcaggtcgttggttcgaatccagctgccccga

SEQ ID NO: 5894 - DNA, 162 bp, BradyrhizobiumColbertium
gtgagccagatcgataggaccgagaaactatccaacgtcccggagaccggaagctcgctgttgccgctcctcggacttggcgtggccgtgatcgcaatgctgggctggatctgcaccctcgcctggggcgcctggcggcttgtcgactggctgctgttctga

SEQ ID NO: 5895 - DNA, 408 bp, BradyrhizobiumColbertium
atggagacctcgctgacgatggtcttggccgagccgccgccgcccgatcccgagcttccccccgccgcttgcgaggacgattccgacgaggtcgatgaggcgacctccgtcgacgaggccgcagacgttgaggatgccgcagacgacgacggcgtcgcggtcgaagcggacgtcgtcacggccgcggtggtggatacaatcgcgctgatcgacatggagacctcgctcgaaggagacctcgggcaaagtgctggttgcgcgcccgatccttgcttcacgcacacatcccgcaaagcaggcgcggcgctgcgaaaaaatcggcccggcagatctactagctcggacggagcaaccaaacgcagcgccgtgcgttgcaggtttttcccagcgatctcagggtccccgtga

SEQ ID NO: 5896 - DNA, 183 bp, BradyrhizobiumColbertium
atgactatcgacggcgtcaccaccaccaccatcacctattccgacggcaccacagaggtcgagacctccgcgagcacgcaaggcagtccgtccgggcagacctacaacgcgcaaggcgcgctcgggacaaatgcgcagaacgcgtccggcagcgcctccagcgccacgtcccagtcggcttga

SEQ ID NO: 5897 - DNA, 195 bp, BradyrhizobiumColbertium
atgcccttcgatcgcaacctgaagaccgttggttcgcggtcgagctggaccgagatctggcatctgtggacagtgatcgtgccgcgccgctccatcaatgggcagttcgtggtcgggaaggtctggcgccgccatgacggtcgcgactggatctacaagaagttcaccgagttcgacggcgaagaggctgcctga

SEQ ID NO: 5898 - DNA, 426 bp, BradyrhizobiumColbertium
atgcctactcatttccacgccgtggtttggatcgaccattcgcaggccaggatcttccatctcggcctgagcggctcggatgaagtcacgctgcatccgcaactggcgacacgccatcttcatcacaaggccaattcgatcggcagcggccatgctgcacccgacaaggcattctacactgacgtgaccaaggccctcgccgaggccggtgagatcctcatcatcggtccggcaagcgccaagacggagctcgccagccacattcgcgcgagcgcacccgatctggccaagcggatcgtggcggtggaagcggccgatcatccctccgacgccgagatcatcgcgtacgcgaagcgtcatttcaaactgccgctgccccgcgttcaggcaccgggatcggccgcaggcgagcggcacacccgctag

SEQ ID NO: 5899 - DNA, 123 bp, BradyrhizobiumColbertium
atgtgtctgggccttgtgcgagaggaggccgccggcgtcgatgcggcggcgcatgtcgcggcgacactaagccggccggcgccgcctctgttgacccatgtcaatcaggtccgtcccggctga

SEQ ID NO: 5900 - DNA, 1176 bp, BradyrhizobiumColbertium
atggccttcctgaacatcaccgccaccctccctgaaaagggccgtgacctcaggctcgacctgtttcgcggaatcgcgaactgggcgatctttctcgaccatatccccgacaacgtcgtgaactggatcacgacccgcaactacggcttttccgacgcggccgatctgttcgtcttcatctcgggttatacggcctccttcgtctatgcgcggatgatgctggagcgcggcttcatcgtcggcgccacgcggctgaccaagcgcgtctggcagctctatgtcgcccacatcatcctgttcgtgatctacatcgcctcgatcagctatctggcgctgcgcttcggcgattccgagatgatcaacgagttcaacgtcgccgggctcgtcgacaacgccaccgagacgttgcgccagggccttttcctgcgcttcaagccgctcaatctcgatgtgctgccgctgtacatcgtgctgatgggcctgtttccgccggtgctgtggctcatgctgcgcaagcccgacctgacgatgatcttgtcgatcgtgctgtggctgaccgcgcgccattacggcctcaacctcaccgcctatccggccggccagtggtacttcaacccctattgctggcaggtgctgttcgtgttcggcgcatggtgcgcgatgggcggcgcccggcgttcgatgacgctgatcaactcgccgatcacgctgtgggtctgcctcggctatctcctgttcgcgctggtcatgaccatggccgggcgcttccccaccttcggcgccatgttcccggaatggctgttctcggccttcaacccgaacgacaagaccaacctcgcgccgtatcgcttcctgcatttcgtggtgatcgtaatcctggtgatccgcttcgtgccgaaggaatggccgggactggagtggaggatcttcgaccccttgatcgtctgcggccagcagtcgctcgccgtgttctgcgtcggcgtgttcctgtccttcgtcggccatttcgagctgacgatgagctcgggctcgctgctcgcccagatcttcgtcagcgtcgccggcatcgcgatcatgacgacggtggcctactacatttcgtggtcgaagaagcaggataagccgctgaagccgccaccgtccaagccgggggcagctgcggcaaaggcggcctga

SEQ ID NO: 5901 - DNA, 153 bp, BradyrhizobiumColbertium
atgactataccgttggcgagggtgccgggagggcccggaatcaccgatcagttcccggtcggtgtctctatactatccccgaggtttccaccaactgccaccgtgacgcatcggaatcggacgaaaagaccaagaggcccggaccaaccatga

SEQ ID NO: 5902 - DNA, 306 bp, BradyrhizobiumColbertium
atgaccgcacgcattttcaagcccgccaagaacgcgatgcaatccggccggtccaagacccgggaatggcagctcgactacgagccggagcagccgcgttcggtcgagccgctgatgggatggacctcgtcggccgacatgaagcagcagatcacgctgcgcttccacagcaaggaagaggcgatcgcctattgcgagcgcaagggtatcgcctaccaggtgatcgagccgaaggaatcgatccgccgcccggtcgcctatgccgacaatttctcgttccgacgcggcgaaccctggacgcattga

SEQ ID NO: 5903 - DNA, 492 bp, BradyrhizobiumColbertium
atggccgggcgtgaccagctcgacggcatcgatctgaaaattttgtccgagctccagcaggacgggcgggttcgcaacaacgagctggcgctgcgcgttggcgtgtccgcgccgaactgcctgcggcggctgaaatcgctgttcagccggggcgtgatccgggcggtgcgcgccgtcatcgacgagcggctgcttggctatgaggtgacgtcgttcgtctcgatccagctcggcagccaagcccagccggtgctggaggcattcgagggctcgatcgccgcaatcccgcgcatccagcagtgctggcggatttcgggcgataccgattatctgctgaaatgcgtcgcgccgagtgtcgagagcatgcgccagcaactcctgcatttcgcggcgatgcccaacgtgaagaacgtccgcagcttccccgtgctgggcgtcgcaaaggatgtgcccctgccgctgcaggaggtctccgcggcgccggcaggatag

SEQ ID NO: 5904 - DNA, 300 bp, BradyrhizobiumColbertium
atgacatcgatttcgaacacgttcgtcgcatccgctgcaacgctgtttgcgtccgcgttgctcacgatgaccgcacccgcagcaacacaggcggaagaatactgcatcaccaacggcgcccaggccgctcatggctgcggctatccgacgatggaggcgtgccgggccgcaaccgctggcatcggcggcatctgctcgcagagcggcggcgccaagaccgcgaacgacgcgttcgccttgcagccgaaacagtcgcgatcgcgcaagcttcgaccgggcggacagaccaactcgaactag

SEQ ID NO: 5905 - DNA, 114 bp, BradyrhizobiumColbertium
ttggcgacgttgcggtctgcgacccatgtcggggccgccgatacagagcaattaagccagatcgcactggcttgcgcctcagcgatagcggccgcgaaattcgcgcgggcttga

SEQ ID NO: 5906 - DNA, 1416 bp, BradyrhizobiumColbertium
atgaagctgtttggttaccttccggagacactgttcaagcccctgtccgggccgaagaagcacgtctatgcccgcttgctgatgcggctatacgagcgggtctattccgctcgcatccttgagacgccgctccgggaggaggtcgtcaagcagatcgagatcggactttcggagttcggcatcgggtcgatgggcgatctttccgagggcgatccggacgaagatcagaccacgagccaggctcactatctggcctactaccgcttgcgcgacaccggctggctcaccgaagaaaccgagaaatggcgcacctacgtggatatgaaccccgacgcgttcatggtcatgggggcgatcaccgattttggcaacagccgcgtgcgtgtcgcgggcgcggtggtcgacgtcaagaacaacctcgaggccgcgtaccgcgaacccgagacgatggcccagggtctcgccaacgcgcacgacaccgcctcgcggttcgcccgcagcatgcgtcgtatcctcgccggcatgcgcgagatagaggaccggatcctaggcaatccgaacgcggcggccatcctccgtacgttcttccaagacttcgtcgatggcctgctcatcgcagactacaagcagctcaagacgtcaaacaatccgtatcgtcaccgccgcatgatcgcttccttggcgggggatatgctggcggacgccgagcgcctcggcaaaatcgcgcgcgcctacatggatcagggtgtcatggctgagggcgcaacgatggccacggccgaagaacgcgtcgtcgccgagctcgagaagatcaagagcgtgttcgaggatgtcgggccgttcatggacaagatcgaggacttccgcgaccggctcgaacgccgcatccgcaccaccgtccactacatggacgtcatgggagaaggctccgccgagcggatcgtccggctgatcgagcaactcgcgaagatcggtagcgaggatgtcgaggtccgcccgaggtcgccggatgtcggtctgccgatcacgtcgctggcgctgtacaccccgccgccaccgaaggcgccgcccgaacgcacgcgcttcaaggttccgaaacaggatccatatctgcgcgcgtacgtccaggccacgaccgagttcgaccggatggtgcgcatgtccgaccagaggctgcttgggttcgctcgccggcagatgcaggggcgcgatgccgtatcatccgtcgagatcgcgatcgagagcatcccggacctcttcgcctatcgggccctgccgaatctggctgcggttggccgctccgtgcggctgggcgaattcacgatcacgctcgaggaggggcgcaccgccaacgactggatcgacgtgaccgccttccggatcgagagaactgggaccacggcagatgctgcgtga

SEQ ID NO: 5907 - DNA, 201 bp, BradyrhizobiumColbertium
atggtcggtaagaagaagggagcgaaaaagggcaagcgaaccccgatcggggaccgcattcaattcctgactatgatgcatccgaacgtgatcgccgacatcaagcaggttgcgaatgaggagcacagggccgcttgggacatcttggagcaggcggcgagggagtttcttaagcgcaggaaggcgaagagaacgctctga

SEQ ID NO: 5908 - DNA, 129 bp, BradyrhizobiumColbertium
atggccggccgtttgtcggaaccggcaggtgccgttcgtctcgagcaggaatatttcggcgagatccaggacgtgaaggtcaccaaggacatgctggaccgcgccaggcacatcgtaaaccagaagtga

SEQ ID NO: 5909 - DNA, 249 bp, BradyrhizobiumColbertium
atggctgatgtgacctactatctcgctccaccgttcgttttctccgacgacggcctggccgccggcgaggcgacagagtgcctgagcgccaacgcggcggtgatgcgggccgaggcgctgtcccgaaagcccggtcacgccggtgccgtcgcgttctcgcggacgggcgacccctcgtccggagacttcagcgatgccacgctgatccggaacgtcggcgaggtgccggacgatctcagcaccttgtga

SEQ ID NO: 5910 - DNA, 528 bp, BradyrhizobiumColbertium
gtgacttcgtcctcccgcgaggagatcaccctcaatacgattgcgctgtgcaaactcgctcaagcgtacggcatccctgtggtgctctcgacggtggcggtcgacatgggcgtgaacgaaggcacgattccggagatccgcgcggctctgccgggagtgaaagaaatcgaccgaacgggcgtcaacgcgtgggaagacgaagacttccgcaaggcggtccaggacacggggcgacgcaaggtggtcatcggagcgctctggaccgaggtctgcctcgccttccccaccctggacatgctggccgaaggctacgaggtctacccggtcgccgacgcagtgggcggcatctcgccggccgcgcacgaacgcgcgttcgaccgaatgatccaggccggggcaaggccgatcaccgcgatctccttcggctgcgagatcatgcgcaactgggcccgggaagattccgacaagctgcgagaagtcatgcgatggtatttccctcagcatcgccgcctgcacaagccggcttaa

SEQ ID NO: 5911 - DNA, 1029 bp, BradyrhizobiumColbertium
atgtctgaattcctattcggccccaagatactcaacgcgatcaactcctccgtcacccgcgccaagtccggtccgatcgacctcgccgtggcatattgggggcgcggcatggcagatgagctgaacctcttcaaaacggcggcacctgtccgaatcctatgcgatctgaatagtggcttttgcgatccggaagagctcaagcgtcttctgggtcgcaaaaacacgatgatcaagacccggaacggactgcattccaaggtttacctcggtcagaagacggtggtcgtaggatcggccaacgcgtccagccgcgggttgaagaacctatccgacctcgaagccgccatttccgatgtggcgtccgtcgcggctgcccgagagtggttcgacggactctgggacgacgaggaatctctcgatgtcgacgaggagatcctcaaggcggccccgccgcctcaggcctctctgacgttcctgaaacttctgaccaaggcgcccgtgctgctcgcggacttaaatatccatttcctggcgttcatcgagccgtctctcaggcggtccaacagggagtacgacgatacttggacggcgataaaggcgctccgccctcccgtctattcgggagccgaaatccggcactacggcgacgaccatccgttctacatcgaccacggcaattcgtggaccttgccctcgggcgcgttcgtagtcagcttttggctctacgccgacaccgcgaagtcggccgaaattggcggggtatatcgtgtcaaaaagatcgacgatctgaacgggaagaggatcgtgttcggtcagcttgttcacgacacgaaccgcatcttcagcttctcgtttccgtcgaacgagcgcagaaccgtcgagaggctggtcgaccattgcgtcaggcagcgcagggaagcggagaaactcaacgagtccttgcaccacgcgatcgagatctcggccaacgagttggccttggtgatgccgagcgctcttgaggccggaaagcgcaaaaatggatcgtga

SEQ ID NO: 5912 - DNA, 594 bp, BradyrhizobiumColbertium
atgcggctcgcgaacagcggatcgtcgaggaacacccaggcttcgtcgaggacgagcaaagtcggccggccgtcgaaccgcctggccgcggcaccggcggagacgagtccggacgaaggcacctttctcgattacctgcgcctgcattcgttcgacgcgccgggcggcacgctgttgcgggccttcgcgcaggcgggtctcaggagggggatggatctggcaccggagctcagcggcttcgggtaccgcgtgagccgggaccgcggggagacgcctgaagaggcggaagcgcactttctggagaaccgcgcgcagatgctcggcgagcacggcgtcgacgagttcatccgagccgccgaattcctttttaagttcggccggcgcaagtcgatgaaccgcaagcgcagtagctacgggctgaagcacgacgccgagcgcgaaacgggtgactatgtcgcgaacggcatctcatcgccgccgcgctggcgcttggcttctccgccgagcggacccacgtcggttcgccgaacgcctacttcaacatctcgtcaggatgacctccgcgggtggcagcgccgacgccgcttaccatga

SEQ ID NO: 5913 - DNA, 972 bp, BradyrhizobiumColbertium
atgccgacattagaggacgccatcaagttttacgaagagaattacgacatgctgggtagctggatgctcagccccggcgagaagatcatgcttggcgacaaggaaaatcgcgtctgccgcttttgcggaaagacaacgccggaggtgcagttcaggaaggacgcccacgccgtctccgaaatgctgggcaataaaagcctcttcaccgcctatgaatgcgatacgtgcaacggcgatttcggcaagggcatcgaacaggacttgggaaactggtcgaagccgatgcggacgatggcgcgcatccgtggaaagtccggcgtgccgacgctcaagagaggcggagatacgggctggcgcatcgagtgcgacgatgcccgcaccttcaaaatcaaggattacgaaacggatccggtgacggctatcgacgaagagaagaaatcaatctctttcaagctcaagcgcgatccatacaccccggtcggcgtcatgaaggcgttcgtcaagatgggtctgactttgcttcccgccgaagagttgccgaattttcggcaggctttggcgtggatcaaggacaaggatcacagccgaaggttcgccaatgacctgccagtattttacgcctttcaacccggtccaatgccgaacgatttcattgcggcgatcgtgcttaggctgaaggacggcgttacgggactgccctacgcgttcttcgtactcggctacggcaacgaggtcttccagttcgtgctaccgacagaaaaggacaaaggtatcgacggaaagaggatggatctgatgacgttcccgacaccaggctcgccggacccgctccggtttccggtgaccgggcgggcggtgctcaacctaggaggtgccgaagttatcaaaggtgaaacctactccatcacaatggggttcgacgcgatcaactggacgaagccggacggtacgccgagcgcagcgccgtcgtga

SEQ ID NO: 5914 - DNA, 87 bp, BradyrhizobiumColbertium
ggagaggtggcagagtggttgaatgcaccgcactcgaaatgcggcataggtgcaagcctatcgggggttcgaatccctccctctccg

SEQ ID NO: 5915 - DNA, 1071 bp, BradyrhizobiumColbertium
gtggacgtcgacagtttcaacatcgagatcaaggacgaggacggcttcctcggcgaccgcgccagcaggggcgcgttccgcgagatcctcgagcgctggcgcaagccgttgcgcaagagcggcgaggatccgttcggcaaggagcagacggagaacatcagcaagaagacgctggacgacatcatggttggcgacgacgtcgaggcctccgccgtggtgcacagcgccatcgaggacttcgcgcaggagcttgcctacgtcacgcgccgcttcctcaagaccaaggcctgggccaagaccgagcgcatcgtggtcggcggcggtttccgcgattcccggctcggggagctcgcgatcgcgcgcaccgagatcatcctcaaatcggaggatttcaagatcgacctgcagccgatccgccatcaccccgacgaagccggcctcgtcggcgcgttgcatctggcgccgtcctggatcttcgaggcccatgacagcatcattgccgtcgacatcggcggcaccaacatccgctgcggcctcgtcgagaccggctggaagaaggccaaggacctgtcgaaggccaaggtcgtgacatccgagctgtggcgtcacgccgacgacgagccgacccgcgaaggcgcggtgaagcggctcaccaagatgctgaaggggctgatcaccgaggccgagaccgagggctacaagctcgcgcccttcatcggcatcgcctgtcccggcgtgatcaacgccgacggctccatcgagaagggcgcgcagaatctccccggcaattgggagagcagcaagttcaacctgccggcgagcctgatcgagggcatccccgccatcggcgagcacgacaccgcgatcctgatgcacaatgacggcgtggttcagggcctgtcggaggtgccgttcatgcaggacgtcgatcgctggggcgtgctcaccatcggcaccggtctcggcaacgcccgcttcaccaaccgccgcaaggagaacggcaaggacaaggaccgggattccgcggagaacggcaagaaaaagaccaaggacagcaagaaggacgactga

SEQ ID NO: 5916 - DNA, 273 bp, BradyrhizobiumColbertium
gtggtgggcgatgcccgtcgtcttgaccagctcgtctgttgccatgatagcccttgcccgcatgaagatttgcgggacaacggcgagggaacccgttggttgcgtccccggcggagattccgctccagccgctcgaacggcgcaaatccttctaatccgtggctttttcccggggttttccttgactcgcggcgaccagcggctataagtcccacagccggcgcggggcgtttctcgcgccgcttgcttttgcgtgggttttcaatgggctaa

SEQ ID NO: 5917 - DNA, 387 bp, BradyrhizobiumColbertium
atgttcgcagtcatcaaaaccggcggcaagcaataccgcgtcgtgccggatgatgtcctggaagtaggcaagatcgaaggcgaagtcggctcgatcgtgcagctgaatgaagttctggtggtcggcggcgacacgccggtgctgggcgttccgacggtcgaaggtgcctccgtcgcggtcgaggtgctcgaccacaagcgcggccccaaggtcatcgcgttcaagaagcgccgccgcaagaattcgcgccgcaagcgcggctaccgcgacgagatcaccgtgctgcgcgtcagcgagatcctgacggacggcgccaagcccaccaagggcccgcgtccgaagaaggaaaaggtggccaaggagccggcagcggaagccgccgagtag

SEQ ID NO: 5918 - DNA, 270 bp, BradyrhizobiumColbertium
atggctcacaaaaaagcaggcggttcatcgcgtaacggacgcgattccaagggcaagcgcctcggtatcaaggcgttcggcggggaggtcgtcactcccggcaacatcattgcgcgtcagcgcggcacgacctggcaccccggccttaatgtcggcatgggcacggaccacactttgttcgccaagatcgagggtcgtgttgcgttccaggccaaagccaacggccgcaccttcgtatcggtgctcccgatcgccgaggcggctgaatag

SEQ ID NO: 5919 - DNA, 594 bp, BradyrhizobiumColbertium
atgttgcaggatttctcgagcgtgaccttgcgtgaggcgagacctgatgtcgtcgccaccgagcggctgactttgcggcggcccactctcgccgacgtcaggaccatcgcccggctcgccaacgaccgccgcgtcgccgagaacacgcgccgcctgccgcatccctattcccaggacgacgccgccgacttcatccgcgccaccgccgagctcggcagcgagaccgtgttcctgatcgagcacgataacgggccggtcggcatggtcggcatcgactgctccacaccgggcaatgccgagctcggctactggctcggcgtcgagcattggggccggggctttgccaccgaggccgcgcgcggcgcgatcgacttcttcttcgaggagttcgaggacgagcatctctatgcgggcgcgcgcgtcaccaatccggcctcgcgcaaggtgctggagaagtgcggcttccagtggagcggcgtgcagctgcaccgcttcctggcgctgggctcctcgacgccggtcgactgcttccgcctgtcacgcggggtgtgggcgtcgctgaagagctggagcagcgcaagacgggtgaggtag

SEQ ID NO: 5920 - DNA, 915 bp, BradyrhizobiumColbertium
atgcccctgttcaagtcactctccgcctatgacgaccgttccgcgcggctggccggcatcgcactgatggtgctgtcgatcttcatgttctcgttcggcgacgccatgggcaagttcctggtcgggacctactcggtggggcagctcttgtttctacgtgcctgcgccgcgctgctcttgctgtcgccgctgatctggacgcagcgtcaccagttcctgcatctggagcggccgggcctgcagatggttcgcgtcgtgctgtcgacgctggaggttgccgccttcttccttgcgacggtttacctgccgctcgcggacgtcatcacctattatctcgccggtcccattttcgtcaccgcgatgtcggcgatcttcctgggggagaaggtgggctggcggcgctggaccgcgatcctgatcggtttctgcggcgtgctgatcgcgctgcggccgtcggcgcagaccgtcagcctgccggcgctgatcgcgctcggcggcagcctgtcgtttgcgaccctgatgctgatcacgcgcagcctgcgcaagacgcccgatatcgtgatggcgtcctcgcaattcgtcggcacgttttcgctgggcgcggtcctgtcggcgttcaactgggtgccgccgacgcctggcagcctcgtgttcttcgctgccgccgggctggtttcggtgacggcgctgttctgcgtcaaccgctcgctcaagctcgcgcccgccagcgtcgtcgtgccctaccaatattcgatgatcgtctgggccgtgatcttcggtttcgtcgtgttcggcgacgtcccgtcgatcgcgacactcgtcggcgcggccatcatcatcggcgccgggttctacatcttcttgcgggagcgggatctggggcgggagaccgcggacgtgaatccgccggcgtag

SEQ ID NO: 5921 - DNA, 495 bp, BradyrhizobiumColbertium
atggtgcagcgcatgaccgacttcgatcccacccagcatcgcatgatccccacgcagcgctggttcgaggatttcgtcctcggcgagcgtttcgtgctgccgagccgcacccagacgtcggcggtgttcgccgcattccagaccgcgagcggcgacacccatccggtgcactatgacgtcgaatattgccgcagccgcggcatgccgcatctgctcgcccacggcttccagaccttgatccacaccgcgcccggtgccggcctgtttccattcatggtcgaagactccctggtcggcttcctcgagcagtcgagccggttcctcaagcccgtctacgcggacgatacgatctatccggcgctcgaggtcaccgaactggtgcccggacgcacgaccggcgccgtgacgcttcgcagcaccgtgttcaaccagcgcaaggagctggtgctggaaggcatgcagaaattcctgatccggcggcggccggcgggttaa

SEQ ID NO: 5922 - DNA, 1041 bp, BradyrhizobiumColbertium
atgaaattcctcgacgaagcaaaggtctacatccgctccggtgacggcgggaacggctgcgtggcgttccgccgcgagaagttcatcgaattcggcggtccctccggcggcaatggcgggcgcggcggcaacgtcatcgtcgaggtcgccgacggcctcaacacgctgatcgactaccgctaccagcagcatttcaaggctcagaagggcgagaacggctcgggctcggaccgccacggcgccaacggcaagaacatcgtgctcaaggtgccggtcggcacgcagatcttcgacgaggaccgcgaaacgctgatccacgacttcaccaaggtcggcgagaagttcgtgctggccgagggcggcaatggcggcttcggcaacgcacatttcaagtcgtcgaccaaccgcgcgccgcgcaatgccaatcccggccaacccggcgaggagcgctggatctggttgcggctgaagctgatcgccgatgccggcctcgtcggcctgcccaatgccggcaagtcgaccttcctctccaaggtcagcgcggcgaagccgaagatcgccgactatcccttcaccacgctgcatccgcagctcggcgtcgtgaatgccgacggccgcgaattcgtgctggcggatattcccggcctgatcgaaggcgcgcatgaaggcgccggcctcggcgaccgcttcctcggccacgtcgaacgctgccgcgtgctgctgcatctcgtcgacgcgacgtgcgagcacgccggcaaggcctacaagaccgtgcgcaaggagctcgacgcctatggcgggcagctcaccgacaagatcgagatcgtcgcgctgaacaagatcgacgcggtcgaaccggaggagctgaagaagcagaaggagcgcctcaagcgcgccgccaaaaagacgccgctgctgctctccggcgtcaccggccagggcgtgaaggaagccttgcgcgcattggccgaggtgatcggcgaaagcccggtctccgccaaggccaagagcgcggcggaagcggagccgtggtcggcttag

SEQ ID NO: 5923 - DNA, 1635 bp, BradyrhizobiumColbertium
atggcgcgcgcgaagaacgttctctggatcatgtgcgaccagcttcgctatgattatctcggctgcaccggccacccgacgctgaagacgccgaacatcgacgccatggcccagcgtggcgtgctgttcaccaaggcttacgtccaatcgccgatctgcggcccatcgcgaatgtcgttctacaccgggcgctacatgcgctcgcacggctcgcactggaacggctggccgctgcgcgtgggtgagcccacgctgggcgatcacctcaagaagatcggcgtccgcaacgtgctggtcggcaagacccacatggcacccgacctcgaaggcatgaaggcgctcggcatcccaccggagtcgatcatcggcgtgcacgtcgccgaatgcggcttcgagccgtatgagcgtgacgacggcctgcatcccacgggacgaccgcgtccgaaatacgatgagtatctgcgcagccagggattcgaggccaccaatccctgggagcattgggccaattcaggagcggcggaagatggttcgctgcagaacggctggctgctggtgcatgccgacaaggccgcgcgcgtgccggacgagcactccgaaacgccctacatgacgcggcgcgcgatggacttcatcagcgaggccgaggccgacggccggccgtggtgcctgcatctgtcctacatcaagccgcactggccctacatcgcgccggagccctatgcgagcatgtattcgactggtgacgtgattccggcgatccgctccgagcgcgagcggcagaatccgcatccggtgttcggggcgtatatggacatgcgctattcccgcaacatggcgcgcgatgatgcccgcgagaaggtgatcccgacctatatgggactgatcacccagatcgacgaccagatgggcgtgctgatgaaattcctggaggcgcatggcctgctggaaaccaccatgatcgtgttcacctccgaccacggcgattatctcggcgatcactggatgggtgagaaggaccttttccacgagcagtcggcgaagattccgctgatcatcgtcgatccgtcgcaagaggctgacgccacgcgcggcacgcgcagcgatgcgctggtcgaggcgatcgatctcgcgccgaccttcgtcgattatttcggcggcaaggtgcccggccacatcctcgaaggacattcgctattgccgctgctgcgtggtccgaccccgagcgattggcgcaaggtcgcgttctcagaatacgactacgccatgcaggacgtgcggctgaagctgaaccagccgatcgagcgctgccgcctgttcatggtgttcgacggccgctggaaatacatccacgcctccggcttccgcccgatgctgtacgatctcgataccgatccgcaggaatatgtcgatcgcggcgacgacccggaatgcgccggcgtcatcgcgcggcttcaggccgaactgttcgactgggcgctgcatccgagcggccacatcacgacaccgcgcgagaagatcgcagcctatgcggacaaccagctgcaggtgaagggcggcatcttgatcggcatctgggacgacaaagagctcgccgcgatcaaggacggcatcgcacagcgcgcgaagatgtga

SEQ ID NO: 5924 - DNA, 966 bp, BradyrhizobiumColbertium
atggatcgccgcaaattcatggccggatgtcttggtctgccgctgctggcgcgggcgggtgacgcgcaggcgcaggcggggctgacgaagatcatcttcccgtttgcagcgggagccggcggcgacacgctgtgccggctgatcgcgcaggagatggcgccgttgctgcagcggaccgtcgtggtcgagaaccgcaccggcggcgacggcctgatcggcatcaaggccgtgaaaggggcgagccccgacggcagcatggtgctggtgacgaccgggccgaccatgtacctgctgccgatggtggagaagacaccgagcttcgatacggccaaggacttcatgccggtgtcgctgctggcgcggttcgaattcgccgtcgtgatcggcccgggcgtcgatgccccggatttcaagagcttcgtcgcctggctgaaggcacatccggacaagacctcgttcggggtgccgagcaacggcaccattccgcatttcatgggctccaagctcgagaaggatctgggcattcccctgactcgcgtgccctatcgcggtagcgcgcccattctcaacgatctcgtcggcggtcatatctcgttcggcatcacgacattggccgatgcgttgccgcagcatcgcgccaagggcgtgaagatcatcgcggtgtcgagcgcggagcgttcaccctttgcgcccgacgtgccgaccctgaggcagagcggcatcgatctcgttgccgacgcctggtacggcatgtggcttcccgccggcagcccgccggagttcgccggcaagatcggcgccgccgcaagcgccgcactcgccaagcccgaggtgaaggagaagctcacggcaatcggtctcatcccggtcggctcggcgccggagggattgaccaaggagctcgcagcgaacatcgcgctgtggcagccgatcgtgaaggcgaccggatacaagatcgagaattga

SEQ ID NO: 5925 - DNA, 1122 bp, BradyrhizobiumColbertium
atggccagccccgaactcagtcaattccgccgcatcgtcgtcaaggtcggctctgcgctgctggtggattccgacaggggtgaggtgcgggcatcctggctcgccgcgctcgccgacgatatggccaagctgcacaaggaagggcgcgacgtcctcgtggtctcctccggctcgatcgcgctcggccgtagccggctcaagctgccgcgtggcccgctgaagctggaggagagccaggccgcggccgcggtcggccagatcgcgctggcgcggatctggtcggaggtgctcggggcgcacggcatcggcgccggccagatcctggtgacgctgcaggacaccgaggagcgccgccgctatctcaacgcgcgttccaccatcggcaagctgctggaatggcgcgccatccccgtgatcaacgagaacgacaccgtcgcgaccaccgagattcgctacggcgacaatgaccgtctcgccgcgcgcgtggccaccatggcgagcgccgatctcctggtgctgctgtccgacatcgacggcctctacgacgcgccgccgaagaacaacccgaatgccaagctcattccggtggtcgaaagcatttcctcggagatcgaggcggtggccggagacgccgagtccgagctgtctcgcggcggcatgcggaccaaggtcgaggcggccaagatcgcgaccacaggcggcacgcatatgctgatcgcctccggcaagatcgagcatcccttgcaggcgatcgccgatggcggccgctgcacctggttcctgacgccggcgaatcccatcacctcgcgaaagcgctggatcgcgggctcgctggagccaaagggcacgctgacgatcgacgccggcgcggttgccgcgctgcgcgcgggggcgagcctgctgccggcgggcgtgatcaaggtcgagggccagtttgcccgcggcgatgccgtggtcgtgcgcggccccgacaccagcgagatcggccgcggcctgatcgcctacgacgccgacgacgccgagcggatcaaaggccgctcctccccggacgtcatggccatcctcggcatcagcgggcgatcggagatgatccaccgggatgacctggtggtgggcggataa

SEQ ID NO: 5926 - DNA, 1296 bp, BradyrhizobiumColbertium
atggccgctcccctcaaagccgtcgacggcaatgccgatcttcaggcgctgatgtccgatctcggaacccgtgcccgcgctgccgcgcgcgtgctggcgctggcgccgccggagcagaagaaccgggcgctggaagccatggagcgggccattcgcgccaatgcgaccgccattctcgccgccaatgccgaggacgtcgcggaggcccgcgcctccggcaatgccacctccgccttcatcgaccgcctgacgctgacgcctgcgcgggtcgagggcatggccgagggcatcggcatcgtgcgcggcatcgccgatcccatcggggtcgtcaccgagagatggcagcggccgaacggcatgagcatcgagcgcgtgcgcgtgccgctcggtgtcgtcggcgtgatcttcgagagccgtcccaacgtcgcggccgacgccggcgtgctgtgcctgaaggcgggcaatgccgtgatcctgcgcggcggctccgacagctttcgctcctgccgcgcgatccatgactgcctggtgcagggcctgcgcgaggccggcctgcccgaagctgcgatcacgctggtaccgacgcgcgatcgcgccgcggtcggcatgatgctgtccggcctcgatggcgccatcgacgtcatcgtgccgcgcggagggaaaagcctcgttgcgcgcgtcgagcaggaagcgcgggtgcctgtgttcgcgcatctcgagggcgtcaaccacgtttatgtcgacggcagcgccgacctcgcgatggcaaagtcgatcgtgctcaatgccaagatgcgtcgcaccggcgtctgcggcgcggccgagacgctgctggtcgatcgcgccgcggccggcaagaccttgaagccgctggtcgagatgctgctggatgccggctgcgaggtgcgcggcgacgaggccgtgcagaaggccgacgcgcgcgtgaagcctgccagcgaagaggattgggacaccgaatatctcgacgccatcatcgcggcgaaggtggtggacggcgtcgacggcgccatcgcgcacatccaaaatcacggctcccatcacaccgacgccatcgtgagccaggatgaggtcgccgcgaagaaattcctcagcgaggtcgattccgcgatcgtgctgcacaacgcttcgacgcagttcgccgatggcggcgagttcggtttcggtgccgagatcggcatcgccaccggccgtttccacgcccgcggtccggtcggcgccgagcagctgacgagcttcaagtatcgcgtccacggcaccgggcagacccggccgtag

SEQ ID NO: 5927 - DNA, 627 bp, BradyrhizobiumColbertium
gtgccgcgtttcgtggcgcaagcgatcccgccccacatgccgggcatgcgcatcggcctgctcggcggatcgttcaatccgccgcatcaggcccatcgcgccatcagccagttcgcgctcaagcgcctgcagctcgaccgtgtgtggtggctggtcacaccgggcaatccgctgaaggagaacggcacgcttcatgagctcggcgcgcgcatgcaagccgcgcgcgaggtcgcggacgatccccgcatcgcggtgagctgtctcgaatccgtcattcgcacgcgctacactatcgacacgatcaacaccctgcgccgccgcctcccggctctgcgctttgtctggatcatgggcgccgacaatctcgctcaattccaccgttggcaggactggcggcgcatcgctggccaggtgccgatcgcagtcatcgaccgccccccgcagagttttcgcgcgctcggctcgcccgccgcccaggcgctagcgcgctaccgcctacccgaaggcaaggcagcactgcttgcagaccggccggcgccggcctgggtgttcctgaccggattgaagctgaacctctcctcgacaggcctacggaacccggacgggagttggaaaggtacgaagtga

SEQ ID NO: 5928 - DNA, 135 bp, BradyrhizobiumColbertium
gtgagcgccggattcggcgttcgcgatacagtgaaaggaatggtccctgaccgcatctgtattgtccaagtcgacttccacgaagccagcttcgacgaagtctgttttacccaaggttgccaagccgacgcgtaa

SEQ ID NO: 5929 - DNA, 357 bp, BradyrhizobiumColbertium
ttgaaggcgcaacccgacgccgacaagacgctgagcctgatcctctcccgcctcgaggacatgaaggcggaagagacggtcaccatcgaccttcgcggcaaatcggcgtactccgactacatgatcgtcaccaccggccgggtgaaccggcacgtcggcgcgatcgcggaaaacgtcaccaagagcctcaaggaaaacggcatcaagaacatccatgtcgagggcttgcccaattgcgactgggtgctgatcgattccggcgacgtgatcgtgcacgtgttcagacccgaggtccgcgaattctacaatctcgagcgattgtacacgcagggcccaggggcggcgaaggcgatctag

SEQ ID NO: 5930 - DNA, 549 bp, BradyrhizobiumColbertium
gtgcgcgcgcccgatgcgcgcgaccttgaaaacacgacgctgaaagcgtcgcccctagaagacgtcatgcgtgttgctgtcattgcggtgggccggctgaagcagggccccgaacgggagcttgccgaccgctatttcgagcggttcgacgacgccggccgcaagctcggattccgcgagctcagcatccacgagatccccgaaagccgcgcgcgcgacaccgcgacacggatggccgaagaggccgcggcgatctcggcgcatattccggagaaatcgatcctggtggcgctggacgagcgcggccagaacctcgaatccaccgtattcgcacggcatctgtcgcgctggcgcgacgagggtgccggacatactatcttcatgatcggaggggcggacggactttcgcccgaattgcgccgtaaggccaagctcgcgatcgcgttcggctctgcgacctggccgcaccaaatggtccgcgtcatgcttctggaacagctttatcgggccgccaccattctggccggccacccctatcaccgcgcgtga

SEQ ID NO: 5931 - DNA, 1359 bp, BradyrhizobiumColbertium
gtgacacgcgccacgacgagcacctttgccgagacgatgcgagcgccgctcctcaacctgttgctgatcacaagccttgccggcgcaagcctggcgcaagctcagacggcggcgcccccgcagaccgcggcgatttcgcccgaagcgatcaagcagcgcgagcaggagctcgaggccgcgcgcgccaggcagaagagcgcggaagaagcgcaggccaagctcaaggcagagatcgccgcgctcggccaggaccgcagccagctcaatcagcagctgatcgagaccgccgccaatgttcgcgctgtggaaaccaagatcgatgaggccgaagcgcgattgggcgcgctgaatgcccgggagcaacagatgcgcgcctcgctcgattcgcgccgcgccgacatcgtcgaggtgctggcggccctgcagcgcgccggaaggcgcacgccgccggcgctgctggtgcgccccgaagatgcgctgcaatcgctgcgcacggcgatgctgctcggcgccgtcgtgccggaattgcgagggcgagccgagaagatcgcggccgagctcggggagctcgtcgccttgcgcaagaccattgccaccgagcgcgaccagctcgcctccgatcgcgacaaggtccgcaacgaccagacccggctcacggctctggtcgacgaacggcagcgccagcaggcggcacgcgaaaaggatctcgatgccgagaagtcgcgcgccatcatgctttcaaaacaggtcggtgatctccagggactgatcaccaggatggagcaggacctgcaaagcgccgccaaggccgctgagaaggcggctgaggccgccaggcaggccgaggcaaaagcggccgccagcgccaagtccggtccggccgctttcaaggaccgctcccgcaccaccccggcgatcgccttcgcctccgccaagggcctgctgccgcttccggttaacggtaacaagatcagggattttggcggttccgacggggtcggtggggtccagaagggaatttcgctggccaccaggcccggctcccaggtcacgacgccgtgtgacggctgggttgtctatgccgggcccttccgcagctatggacaactcttgatcctcaatgccggtggcgggtatcatgtcctgatcgctgggatggagcgcatttcggtcaacatcggacagtttgtgctcacgggggagccggtcgcgaccatggggtcgacttcgcaagtcgcctccattctcgccacgaacgcgagtcaacctgtgctgtatgtcgagttccgcaaggacggcactccaatcgatccaggcccatggtgggccacaaatgaaggcgagaaggttcgcggatga

SEQ ID NO: 5932 - DNA, 1362 bp, BradyrhizobiumColbertium
atgatgcgcaagacttcagtaatcctcctcagcgccgccaccggtgcagcgctgacgctgttcgtgacccagccccgcgcggtgttcatgggctccagcgcgcgagccgccactgccgacacttatcgccagctcaacctgttcggcgacgtcttcgagcgggtgcgctccgactatgtcgagaagcccgacgacaccaagctgatcgaatccgccatcagcggcatgctcaccggcctcgatccgcattcgagctacatggacgccaagagcttccgtgacatgcaggtgcagacccgcggtgagttcggcggcctcggcatcgaggtcacgatggaggatggcctgatcaaggtggtctcgcccatcgacgatacaccggcatcgcgcgccggcgtcatggccaacgacatcatcaccaacctcgacgacgaggcggtgcagggcctgaccctgaaccaggcggtcgagaagatgcgcggtccggtcaacacaaagatcaagctcaagatcatccgcaagggccaggacaatccgatcgacgtcacgctcgtgcgcgacaacatccgcgtccggtcggtgcgcgcgcgcgtcgagcaggacgatatcggctacatccgtatcaccaccttcaacgagcagaccaccgaaggcctgaagcgggagatcggcaacctcacgaaccagatcggcggcgacaagctcaagggcttcatcatcgacctgcgcaacaatccgggcggcctgctggaggaagcggtcaccgtttccgattccttcctggagaaaggtgagatcgtctcgacccgcggccgcaacgccgaggagacccagcgccgcaccgcgcatgcgggcgacctgaccaagggcaagccggtcatcgtgctggtcaacggcggctcggcctcggcgtcggaaatcgtcgccggcgcactgcaggaccacaagcgcgcgaccatcgtcggcacgcgctcgttcggcaagggctcggttcagaccatcatcccgctcggaagcggcaacggcgcgctgcggctgaccacggcgcgctactacacgccgtcgggcaagtcgatccaggccaagggcatcgtgcccgacatcgaagtgctgcaggacgtgccggacgagctgaagtcccgcaccgacaccaagggcgaggcttcgctgcgcggccatctcaagaacgacggcgacgagaagaccggttcgcagtcctacgtcccgccggatgccaaggacgacaaggcgctcaagctcgccggcgacctgctccacggcatcaagaacagcgcctcggcggcgcccgcgcccggcagcgacaacaaggcgacgaccgacaagcccaaagcggccaactaa

SEQ ID NO: 5933 - DNA, 1224 bp, BradyrhizobiumColbertium
atgactgaaacggccgatgatctgagcgccccgctcggacaggacaagccgcgccggaagcgccggctgcggctgccgttcacggccatgcagttgcttgccgtcctgctcggcctgttcctggttaccttcgccggcttcgccatcttcaacaaggatccgctcggcggcgagccgatgacccggatcgcgatcaagccgacggacaaggctgccgacgagaggcccgcagccgcaagccatgcttcggatgccaaacacgacggcaagcccaacaccaaggaggtgccgaagcaggccggcgagcaaaagaccatcaccatgatcgacggctcgaccggcgcccgccacgacgtggtgattggagccggcgagagcggcagcgacaagggtggtacggcttccgcaccgccgcccgtcatggccgggatcaacccgaagctgctggagaagtctcgctacggcatgatccccgtcgtggctgacgggctgaagccgttcaacgtctatgcagccgacgccgaccgcgccaaggctgccaccatgccggtggtcgcgatcgtgattggcggcctcggggtcggcgcggccaagaccaatgatgccatcatgaggctgccgcccgcggtgacgctggcgttcacgccttatggcgccgaccccggcaagctcgccgagcgcgcccgcgcgcagcgtcatgagatcttcctccagatcccgatggagccctacgacttccccgacaacgatccggggccgcagacgctgctgacctcgctcagcgccgaccagaacatggaccgcctgcactggcacctgagccggttgcagggctatgccggtctcgccaatttcatgggcgcccgcttcatcgcgaccgaaccggcaatgcagccgatcatgcgcgaggccgccaaacgcggcctcggcttcttcgacgacggctcctcgccccgcagcatcgcctcccaggccgcggcgaaccaggccatgccgttcggcaagggcgacattgcgattgacgtggtgccgaccccgaccgagatcgaccgcgctctgaacaagctcgaatcgaccgcgcgcgagcgcggcatcgccgtcggcacggcctccgccctgcccgtctcaatcgagcgcatcggcgcctggaccaagacactgagcgaccgaggtatccttttggtgccattgacaaccgcgatgctgaaatcaaaatccagctaa

SEQ ID NO: 5934 - DNA, 504 bp, BradyrhizobiumColbertium
atggcgcgttacgaggatctgccctaccggacctgcgtcggcgtgatgctgatcaatccaaagggactggtgttcatcggccgccgcgccggcggcatcgagcatgtcgacgacacccatgtctggcagatgccgcaaggcggcgtcgatcctggcgaggacacctgggaagccgccaagcgcgagctttatgaggagacgagcgtacgctcggtcgagcggctcggcgaggtccccgactggctcatctacgacatcccccgcacggtcgccggacgcgcctggaagggccgctatcgcggccagcgccagaaatggtacgcggtgcgcttcaccggcaaggacagcgagatcaacgtcgagcatcccggcggcggccacaaggccgaattcgtgagctggcgctgggagccgatgaaaaatctcccggaactgatcattccgttcaagcgtccggtctatgagcgcgtggtgaaggaattttctgcgctggcaggtcaatag

SEQ ID NO: 5935 - DNA, 501 bp, BradyrhizobiumColbertium
gtgaccaacgaaaagccctaccgccccaacgtgggcatcgcgctgttcaataccgagggccgcgtgctgatcggccatcgcttcaagggcgacgggccggaaatcatcctgccgggcctcgactggcagatgccgcaaggcggcgtcgacgagggcgagaatctgcgcgacgccgcgatgcgcgagctctgggaggagaccagcgtggtcagcgcggactacctcggcgagaccggctggctcacctacgagttcccgccttacgacggaccgcaaacgcaccggctggcgaagttccgcgggcagcgtcaaaagtggttcgcactgcgcttcaccggcaaggacgacgagatcgatccgctgacgccgcgcaacggccagccggcggaattcgacgactggcgctgggagcgcctggatcgcgtcgccgacatcgtggtgccgttccgccgcgaggtctatcaggcggtggcgcagcagtttgcagccttcgcaaactaa

SEQ ID NO: 5936 - DNA, 408 bp, BradyrhizobiumColbertium
atggccaccttccacttcgatctcgtctctccggaaaagctcgccttctcgggtgaggtcgatcaggtcgacatccccggcgtcgaaggtgatttcggcgtgctggcgggacatgcgccgctcgtggctgcgatccggcccggcattctcaccgtcaccaccggcggcaagcacgagaagatcatcgtgctcggcggcatcgccgaagtctccgagaacggcctgaccgtgcttgccgacgtcgcgacgtcgctcgccgagctcgaccgtgcgcagttcgcagagacgatcgcggagatggaagaaagcctcaaggagcacgaaggcgacgagctcgatcaggccatcgagcggctcgaccacttcaagagcatccagcaccagctcaacgcgacggctatgcactaa

SEQ ID NO: 5937 - DNA, 1434 bp, BradyrhizobiumColbertium
atggcagcccaggtcggtcgcgtcacccaggtcatcggcgccgtcgtcgacgtgcagttcgaaggccacctcccggccattctcaattcgctcgagaccaagaacggcggcaatcgcctggtgctcgaagtcgcccagcatctcggcgaatctaccgtgcgtacgatcgcgatggacaccaccgagggcctcgtccgcggccaggaagtgaccgacaccggcgctccgatccgcgttcccgtcggcgagggcacgctcggccgcatcatcaacgtcatcggcgagccgatcgacgaagccggtccggtcaagtcggaaggcctgcgcgccatccaccaggaagcgccgagctacaccgaccagtcgaccgaagccgaaattctcgtcaccggcatcaaggtggtcgaccttctcgcgccctatgccaagggcggcaagatcggcctgttcggcggcgccggcgtcggcaagactgtgctgattcaggagctgatcaacaacgtcgcgaaggcgcacggcggctactcggtgttcgccggcgtcggcgagcgtacccgcgagggcaacgacctctatcacgagttcatcgagtccaaggtcaacgccgatccgcacaacccggatccgaacgtgaagtcgaagtgcgcgctggtgttcggccagatgaacgagcccccgggggcccgcgcccgcgtcgcgctcaccggcctgaccatcgcggaagatttccgcgacaagggccaggacgtgctgttcttcgtcgacaacatcttccgcttcacccaggccggctcggaagtgtcggcgctgctgggccgtattccttcggcggtgggttatcagccgacgctcgcgaccgacatgggcgcgctgcaggagcgcatcaccaccacgcagaagggttcgatcacctcggtgcaggccatctacgtcccggccgacgacttgaccgacccggcgccggcgacctcgttcgcgcatcttgacgcgaccacgacgctgtcgcgctcgatcgccgaaaaaggcatctatccggcggtggacccgctcgactcgacctcgcgcatgctctccccgctggtcgtcggcgaggagcactacgcggtcgcccgtcaggtccagcaggtgctgcagcgctacaaggcgctgcaggacatcatcgccattctcggcatggacgagctttcggaagaggacaagctgaccgtggcccgcgcccgcaaggtcgagcgcttcatgtcgcagccgttccacgtcgccgaaatcttcacgggttcgccgggcaagttcgtcgacctcgccgacaccatcaagggcttcaagggcctggtggaaggcaagtacgaccacctgccggaagccgccttctacatggtcggcaccatcgaagaggcggtcgagaagggcaagaagctggccgctgaagcggcttaa

SEQ ID NO: 5938 - DNA, 855 bp, BradyrhizobiumColbertium
atgcgcgtccgcatcgcctccaccaaggcgacgcaaaagatcaccaaggccatgcagatggtcgcagcatcgaagctgcgccgtgcacagaccgctgcggaagcggcgcgtccctatgccgacaagatgagcgcggtgatctcaaacatcgccagcgccgctgtcggctcgcccggcgcgccagtgctgctggccggcaccggccgggaccaggtccacctgctgctggtctgcaccggcgagcgcggcctctccggagccttcaactcatcgatcgtgcgtctcgcccgcgagcgcgctctggcgctgatggcgcagggcaaggacgtgaagttcttctgcgtcggccgcaagggctacgagcagctgcgtcgccagttcgacaagcagatcgtcgagcacatggacctgcgcagcgtccgccagctcggcttcgtcaatgccgaggagatcgccaagaaggtgctggcccgtttcgaggccggcgagttcgacgtctgcacgctgttctattcgcgcttcaagtcggtgatcgcgcagattccgaccgcgcagcaggtgatcccgctggtggtcgaggagggcgctgccgccaaccccccgtcctacgaatacgagccggaagaggacgagatcctcacccgcctcttgccgcgcaacctcgcagtccagatcttccgtgcgctgctcgagaacaacgcctcgttctacggcgcgcagatgagcgcgatggataacgcgacgcgcaacgccggcgaaatgatccgcaagcagacgctggtctacaaccgcacgcgtcaggcgcagatcaccaaggaactgatcgaaatcatctcgggtgccgaagccgtctga

SEQ ID NO: 5939 - DNA, 1530 bp, BradyrhizobiumColbertium
atggacatccgcgccgcggaaatttccgcgatcctcaaggaccagatcaagaatttcggccaggaagctgaagtctccgaagtcggacaggtgctgtccgtcggcgacggtatcgcccgcgtctacggtctggacaacgtccaggccggtgaaatggtcgagttcgagaacggcacccgcggcatggcgctgaacctcgaaaccgacaacgtcggcgtcgttattttcggtgccgaccgcgagatcaaggaaggccagaccgtcaagcgcacccgcgccatcgtggacgcgccggtcggcaagggcctgctcggccgcgtcgtcgacgcgctcggcaacccgatcgacggcaagggtccgatccaggccgagaagcgcatgcgcgtcgacgtcaaggcgcccggcatcatcccgcgcaagtcggtgaacgagccgatggccaccggcctcaaggcgatcgatgccctgatcccgatcggccgcggccagcgcgagttgatcatcggcgaccgccagaccggcaagaccgcgatcgcgctcgacaccatcctgaaccagaagccgctcaacgcgcagcccgacgagaacatcaagctgtactgcgtctatgtcgcggtcggccagaagcgttcgaccgtcgcccagttcgtgaaggtgctggaagagcagggtgcgctcgaatactcgatcgtcgtcgccgccaccgcctcggatccggcgccgatgcagtacatcgcgcccttcaccggctgcaccatgggcgagtatttccgcgacaacggcatgcacgcggtcatcatctatgacgatctctccaagcaggccgtcgcataccgccagatgtcgctgctgctgcgccgcccgccgggccgcgaagcctatcccggcgacgtgttctatctgcactcccgcctgctagagcgcgcggcgaagctgaacaaggacatgggctcgggctcgctgacggcgctgccggtcatcgaaacccaggccaacgacgtgtcggcctacattccgaccaacgtcatctcgatcaccgacggccagatcttcctggaaaccgacttgttcttccagggtatccgtcccgcggtgaacgtcggtctgtcggtgtcgcgcgtcggctcctcggcgcagaccaaggccaccaagaaggtcgccggcaagattaagggcgaactcgcacaatatcgcgaaatggcggcgttcgcgcagttcggttccgacctcgacgcctcgacccagcgcctgctcaatcgcggtgctcgcctcaccgagctcctgaagcagccgcagttctcgccgctgaagatggaagagcaggtctgcgtgatctgggccggcaccaacggctatctcgatccgctcccgatcaacaaggtgcgcgcgttcgaagacggcctgctctcgctgctgcgcggcaagcatgtcgacatcctcaacgcgatccgcgacacccgcgatcttaccgacgaaaccgccgccaagctgaagtcggtggtcgaaggttttgcgaagagcttcgcgtaa

SEQ ID NO: 5940 - DNA, 531 bp, BradyrhizobiumColbertium
gtgtccggccgttatgcaacggccttgttcgaattggcgcgcgaccagaaagtggtcgacgaggtcaaggccgatctcgacaaattcggtgccttgctgaacgagagtgctgatctcaagcgcctcgtccgcagcccggttttcgcggccgacacccagtccagggccctgtcggccgttctggccaaggcaggtatcgccggcatctccgccaacttcctcaaggtgctgaccgccaatcgccgtctgttcgcggtggccgacatcatccgcgactaccgcgcgctcgtcgccaagttcaaaggcgagacgacggccgacgtcaccgtggcggaagcgctctctgacaagaatctcgatgccctcaaggttgccctgaagtcggtgaccggcaaggacgtcgcgctgaacgtgaaagtcgatccctcgatcatcggtggcctcgtcgtcaagctgggcagccgcatggtggatggttcgcttcgcaccaaactcaattcgatcaagcacgcgatgaaagaggcaggctga

SEQ ID NO: 5941 - DNA, 492 bp, BradyrhizobiumColbertium
atgctgtctttgaagacgctgggctctgtgacccggccgcgtacggctattgctttcgttgccgcaactctcctcgtcggtggaactgccaccgaagcttccgccaaatctcggcgtcaccatcaccgccaccacgcccagacccataccaatgcgacctccgactggcgcaacgccaatgcgtcgatgacgccgacctccggcaccggccgcagcttctccggcgtggcttcctattatggaaacgaatccggcagccggaccgcgtcgggccagcgcttcaaccagaacgccatgacggcggcacaccgttcgctgccgttcggcaccaagctgcgtgtcacccatggcagccagagcgtcatcgtgaccatcaatgatcgtggcccgttcattcgcggccgcgtgctcgacctctccacgggcgccgcccgtgccatcggcctcaccagccgcggcgtgggccgcgtcacggcggaagtcatctcctga

SEQ ID NO: 5942 - DNA, 2163 bp, BradyrhizobiumColbertium
atggtcgacgtgctggtgccggtcgcgctcgaccagacctattcctacaaggtgccgcgcgggatggatctgaaggcgggcgacctcgtcggcgtaccgctcgggccgcgcgaggtgctggcggtggtctggggcgaaaacgccaatcccgatccacgcctgcacaaccgcctcaaggaggtcagcgagaagctcgatatcccgccgctcaagcccgagctgcgctccgtggtcgactgggttgccaattacacgctgagcccgcgcggcatggtgctgcgcatgtgcctgcgcatgggcgagaacctcggccctgagcgggcgcgcgccggcgtacgcctcactggcgatcccccgaagcggctgacgccggcacggcagcgcgtgatcgcgctgctgtcggaccggctgctgcacgcaaagtccgaggcggcgagggaggcgggcgtgtccgctggcgtcatcgacggcctcgtcgatgaaggcacgctcacggtcgagccgatgccgccgcctccgccgcctccggcgcccgatccggaattcggccggccggatttcacgccgctccagcgcactgccgtcgacacgatgcgcgcgctcgcggccaacggcacgttccacgtcgcgctgctcgatggcgtgaccgggtcgggcaagaccgaggtctacttcgaagccgtggccgaggtgatccgtcgcggcaagcaagcgctgatccttatgccggagatcgccctcaccggccagttcctcgatcgcttcgcgcagcgtttcggcgtgcgcccgatcgaatggcattcggagctgacgccgcgcacccgcgcgcgcaattgggcggcgatctccggcgggactgcgccggtcgtggtcggcgcgcgctcggcactgttcctgccctatgccgatctcgggctcatcgtcgtcgacgaggagcacgaccaggcctacaagcaggacgagggcgtgcattaccacgctcgcgatatggcggtggtgcgcgggcatatcgccaggattccggtcgtgctggcgtcagcgacgccatcggtcgagtccgaggtcaacgcgcgcaagaaccgctatcagcgcatcgcgctgccctcgcgcttcggcggccagcacatgccgcatatcgaggccatcgatctgcgccgcgagccgcccgcgcgcggccgcttcatctcgccgcggctcgccggggagatgagagttgcgatcgagcgccgcgagcaggcgctgctcttcctgaatcgccgcggctatgcgccgctgacgctgtgccgtgcctgcggccatcgcttcgcctgtaccatctgcgacgcctggctggtcgatcatcgctttcgccagcgcttggtctgtcaccactgcggcttctcgatgccgcgcccgcatatctgcccgaactgctcggccgaggaatcgctggttgcggtcgggcccggcgtcgagcgcctgcaggaggaggcggcagcgctgttcccggaagcgcgcaccatggtgctgtcgagcgatctcatcacctcgatcgagacgatgcgctcggagctcaccgagatcgcggagggccgcgtcgacatcatcatcggcacccagctcgtggcaaagggtcacaatttcccgcggcttaatctggtcggcgtcgtcgatgcggatctcggtctcagcaacggcgatccccgcgcggcggagcggacctggcaattgcttaaccaggtgattggccgcgccggacgcgagcaggggcgcggcgtcggctatctccagacccatcagcccgatcatcccgtgatgaaggcgctggtcgcctgcgaccgcgaggccttctacgacagcgagatcgagctgcgcgagaagacgctctatccgccgttcggccggctcgcgagcctcatcatctcggccggcgaccgcccgagcgcggaaggctttggccgcaagctcgtgacgctcgccccgcgcgacgagcgcgtcgtggtgctcggtccggcagaggccccgctcgcggtgatcaagggccgctatcgcttccgcatcctgttgaagtcggcgcgcgggttcgatttgtccgactacctgcggacctggctggcggtctgcccgaagccgacgggcaatctgaagctcgaagtggacgtcgatccgcagagcttcttgtaa

SEQ ID NO: 5943 - DNA, 966 bp, BradyrhizobiumColbertium
atgagcaaagcggccgccccacagatcgagctcgccagcgccgatccctcgatcgcgcaggagatggcgcgctggctctcgcatctcggcgccgagcggcggctgtcgccgaagacgctggaggcctatggccgcgacctgcggcagtgcctggattttctcagcaatcattggggcgagcgcgtcaccctcgagcgcttcgcgaggctggaagccaccgacgtgcgtgccttcatggcgatgcgcagggccgacgacattgccggccgctcgctgatgcgcgcgctggcgggcctgcgctcgttcggacgtttcctggagcgcgaaggcaagggcaaggtcggcgcgttgtctgcgatccgcgcgccaaaagtcgcaaagagcctgccaaagccgctgccgatggcctcggccaaacgtcttgccgatgccgacgagcgcgccggcgaggaacgcgagacctggatcctggcgcgcgatgctgcggtgatggcgctgctgtacggctcgggcctgcgcatctccgaagcgctcggcctgaagcgccgcgaggtgccgcgccccggcgaaggcgacgtgctggtcgtcaccgggaaaggcaacaagacccgcatggtgccggtgctgcagaacgtgctcgcactggtgcaggagtacgtttcgatgtgcccttacccgctgccggcggaaggcccgatcttcgtcggcgcgcgtggcggccccttgagcccgcgcatcatccagcttgcgatggagcggctgcgcggcgcgctcggcctgcccgacagcgccacgccgcacgcactccggcactccttcgccacacatctgctctcgcgcggcggcgaccttcgcgccatccaggaactgctcggccattcctcgctctccaccacgcagatctacaccggcatcgattccgagcggctgctcgaagtctatgcgagcgcacatccgcggcgctga

SEQ ID NO: 5944 - DNA, 591 bp, BradyrhizobiumColbertium
atgggcgcacacgaaagcatggagcacgccgagcacgccgaacatgcgtccggctcgaacaagaagatcgcgctcctgatcgccgtgctggcgctgtttctggcgatctcggagacgctcggcaaaggcgcccagaccgaatcgatcagcaagaacgtcgaagccgccaacctgtgggcgttcttccaggccaagagcatccgccgcaccgtgatgctgactgctgccgagcagggcaggctgacgctggcgggcacggccgacgatgccatgaaggcgacggtgcagaaacagatcgatgactggaccaagaccgcgcagcgctaccgctccgagcccgagaccggcgaaggcaccgagcagctcgccgcgaaggccaagcacgccgagcacgcgcgcgacgaggcgacagccaaataccaccatttcgagctggcatcggcagccttccagatcggaatcgtgctggcgtcggcgaccatcatcaccggcatgctggcgctggcctatgtcagcggggtgctgacgatcgccggcctgatcatgaccgcgctcggcctgtggtggccgcatctgttgcacttgcactag

SEQ ID NO: 5945 - DNA, 531 bp, BradyrhizobiumColbertium
atgctgcgccgcctgcttcaaccggtctgggttctgcttgcgatcatcttcctgatcgaagcttggctgtgggaccatctcgagccgatcgtcgcccgggtcgtcgcagcgatcccgctggcgcgcttcaagcaatggctgacggagcgcgtcaatgcattgtcgccagccatgacgctgatcgtgttcgcggtccccgtcgttccgctgtttccgctcaagctggtcggcctctggctgcttgcccacgaatactggaccagcgcgttcttcatgatcgtgttcgcaaagctggtcggtgtcggcgtcaccgccttcgtgttcgacgtgacccgcgccaagcttctggagatgcactggttcgagcgaatctacgttctggtgctgaaggtgcgtgccaaggctgccgagctggttgacccgatcaagcggcgcatccgcgagctgatcgccggcaacggcgaggggtggtcctatcgcacgctgcgcatggtccagcgtttccgcaggagcgtgcaccaggcgcggtga

SEQ ID NO: 5946 - DNA, 1401 bp, BradyrhizobiumColbertium
atggctacctacgatctcgtcgtcatcggcaccggaccgggcggttatgtttgcgcggtgcgtgcagctcagctcggcatgaaagtcgccgtggtcgaaaagaatgcaaccctgggcggcacctgcctcaatgtcggctgcatgccgtcaaaggcgctgctgcacgcatccgagatgttcgaggaagccggccattccttcgccaagatgggcgtgagcgtttccgcgccgaagctcgatctgccggcgatgatgaacttcaagcagcagggcatcgacggcaacgtcaagggcgtcgagttcctgatgaagaagaacaagatcgacgtgctcaagggcaccggcaagatcttgggcaccggcaaggtggaagtctccgccgacggcaagtcgcagacgatcgaaacgaagaacatcgtcattgccaccggctcggacatcgcgcgcctccaggggatcgatatcgacgagaagcgcatcgtgtcctcgaccggcgcgctctcgctggacaaggtccccggcaagctgctgatcatcggcgccggcgtgatcggtctcgagctcggctcggtctggcatcgcctgggcgccgaggtcgtcgtggtcgaattcctcgaccgcatcctgcccggcatggacggcgagatcgccaagcagttccagcgcatcctggaaaagcagggctttgcgttcaagctcggcgccaaggtcaccgcggtcgacacctccggcaagacgctgaaggcgacggtcgagcccgccgccggcggcaccgcagagacgctcgaagccgacgtcgtgctcgtctgcatcggccgtgtgccctacaccgagggtctcggcctgaaggaagccggcgtcgcgctcgatgcgcgcggccgcgtgcagatcgacgcgcatttcgccaccagcgtgaagggcatctatgccatcggcgacgtcgtcgcaggcccgatgctggcgcacaaggccgaggacgagggcgttgcggtggcggagatcatcgcagggcaggccggtcacgtgaactacgacgtcattcccggcgtcgtgtacacgacgccggaagtgtcctccgtcggcaagaccgaagaagagctgaagcaggcaggcgtggcctatacggtcggcaagtttccgttcaccgccaacggccgctccaaggtcaaccagaccactgacggctttgtgaagatcctcgcagatgcgaagaccgatcgcgtgctcggcgtgcacattatcggtcgcgaagccggcgaaatgatccatgaagcctgtgttctcatggagtttggcggcagtgcggaagatctcgcacgcacctgtcatgcgcacccgacccgctcggaagccgtcaaggaagccgcgcttgcagtcggcaagcgggccatccatatgtaa

SEQ ID NO: 5947 - DNA, 750 bp, BradyrhizobiumColbertium
gtgacggataaagtcgttgtcatcaccggcggcagccgcggcatcgggcgggcgaccgcgattgcggcggccgcgcgcggctaccgcgtcgtggtcggctacgccagcaacaagcaggccgccgacgaggtggtcgcgcagatcgcggccagcaacggcaaggccatcgcggtgaaatgcgatgtcgccgaggaaagcgatatcctcaacctgttcaaggaagccgacaagttcggcacgctcggggcgctcgtcaacaatggcggcatcgtcggcaagagcggcgtgcgggtcgacgagatgtcggccgagcgcatccagcgcgtgatggcggtcaacgtcaccggctctatcctctgcgcgcgcgaggccatcaagcggatgtcgaccaggcacggcggcaagggcggcgtcatcgtcaacctctcgtctgtcgcagcccgcctcggcgcccccaacacctatgtcgattacgccgcatccaagggcgcggtggattccttcaccgtcggcctcggtcatgaggtcgcgaacgaaggcattcgcgtcgccgcgatccgtcccggcctgatcgacaccgagatccacgccgccggcggcgagcccgaccgcgcccatcgcctggcccacatggtgccgatgaagcgcgtcggcaccgccgacgagatcgccaatgccatcgtctggctgatctcggacgaggcctcctacgtcacctcggccattctcgatgtgtccggcggacgctga

SEQ ID NO: 5948 - DNA, 1245 bp, BradyrhizobiumColbertium
atgactgaaattcgtgtgccgacgctcggcgaatccgtcaccgaggccaccatcggccgctggttcaagaaggccggcgatcctgtcgccgtcgacgagcccctggtggagctcgagaccgacaaggtcaccatcgaagtccccgcgccctccgcgggcacgctgagcgagatcatcgctgccgatggcgcgaccgttgcggtcggtgcactgctcggccagatcaccgagggtgccggtgcagccaagcccgccgccgcgcctgccaagcctgccgccgcgccggcgcccgccgctgcagcaccggctgctgccgccgctgcgccgaaggcgccgcccgccgatgcgccgctcgccccgtccgtgcgcaagctctcggccgagaccggcatcgacgcttcgacagttcccggctccggcaaggacggccgcgtcaccaagggcgacatgctggccgcgatcgagcgcgccgcctctgcgccgaccccggtcaaccagcccgccgccgccgtgcaggtccgcgcgccgtcgccggccgatgacgccgcccgcgaagagcgcgtcaagatgacccgcctgcgccagaccatcgcgcgccgcctcaaggacgtgcagaacaccgcggccatgctcacgaccttcaacgaggtcgacatgaccaacgtcatggcgctgcgcgcgcactacaaggacgcgttcgagaagaagcacggcgccaagctcggcttcatgggcttcttcaccaaggccgtcgtgcaggcgctcaaggacattccggccgtcaacgccgagatcgacggcaccgacctgatctacaagaactattaccacatcggcgtcgccgtcggcaccgacaagggcctcgtggtccctgtcgtgcgcgattgcgaccacaagtcgatctccgacatcgagaagagcatcgccgatttcggccgccgcgcccgtgacggccagctcaagatcgacgagatgcagggcggcaccttcaccctcaccaatggcggcatctacggctcgctgatgtccaccccgatcctgaacgcgccgcaatccggcatcctcggcatgcacaagatccaggagcggccgatggtcgtcggcggcaagatcgaggtgcgcccgatgatgtatctggcgctgtcctacgatcaccgcgtcatcgacggcaaggaagccgtcaccttcctggtccgcgtcaaggagagcctggaagatccggcgcggctggtgctcgatctctga

SEQ ID NO: 5949 - DNA, 2970 bp, BradyrhizobiumColbertium
atgtctcgccaggacgcgaacgcagcctttgccttgtcatcctttttgcagggcacaaacgccacctacattgacgaaatctacgcccgctacgagaagaacccgtcttcggtcgatcccgagtggcaggagttcttcaagagcctgaacgacgcgcccgccgacatcagcaagaacgcggaaggtccgtcctgggagcgcgacaactggcccctgacgccgcaggatgatctgacctccgccctcgacggcaattgggccgaggtcgagaaggcggtcggtgccaagatcgccgccagggcgcaggcgaagggaagcgagaagggcgccgacttctcctctgccgacctgctccaggccacgcgcgactccgtccgcgccctgatgctgatccgctcctaccgcatgcgcggccacttccatgccaagctcgatccgctcggcatcgaagccccacgcaaccgcgaagagctcgatccgcgcacctacggcttcaccgaggccgatttcgaccgcaagatcttcctcgatcacgtgctcggtctcgaatacggcacgctgcgcgagatcaccgcgatctgcgagcgcacctactgccagacgctcggcgtcgagttcatgcatatcagcaacgccgcgcaaaaggcctggatccaggagcgcatcgagggaccggacaaggagatctcgttcacccgcgaagggcgccgcgcgatcctgcagaagttggtcgaagccgagggcttcgaaaagttctgcgacaccaagttcaccggcaccaagcgcttcggcctcgacggcggcgaagccctgatccccgcgctggagcagattatcaagcgcggcggcaatctcggcgtgaaggagatcgtgctgggcatgccgcatcgcggccgcctcaacgtgctgacgcaggtgatgggtaaggcgcaccgcgccctgttccacgagttcaagggcggctcggccaatccagacgcggtcgaaggctcgggcgacgtcaaatatcacctcggcgcctcctcggaccgggagttcgacggcaaccgcatccatctgtcgctgaccgccaacccctcgcatctcgagatcgtcgatcccgtggtgctcggcaaggtgcgtgcgaagcaggaccagcacggcgatcctccggacatgcgcatctccgtgatgccgctgctgatgcacggcgacgccgcgttcgcaggccagggcgtggtcgccgaatgcttcggcctgtccgacctgaagggctaccgcaccggcggctcggtgcacttcatcgtcaacaaccagatcggcttcaccacctatccgcgttactcgcgctcctcgccctatccgtcggatgtggcgaagatgatcgacgcgccgatcttccacgtcaacggcgacgacccggaggccgtcgtgttcgcggccaaggtcgcgaccgaattccgacagaagttccacaagccagtcgtcatcgacatgtggtgctatcgccgctacggccacaacgagggcgacgagcccgcgttcacccaaccggtgatgtacaagcgcatcgcggcccatccctcgaccctcacgctctactccaagcgcctgatcgccgaaggcgtcgtcaccgagggcgaggtcgacaagctgaaggccgactggcgcgcccggctcgatgccgagttcgaggccggcacctcctacaagcccaacaaggccgactggctcgacggcaagtgggcgggcttcaagatcgccgaccaggaagaggatgcgcgccgcggggtcaccggcgtcgacctgccgatcctgaaagacatcggccgcaagatcaccaaggtgccggacggcttccgcgtccaccgcaccattcagcgcttcctcgataaccgcgccaaggcgatcgagagcggcaacggcatcgactgggcgaccggcgaggcactggcgttctgctcgctgctcaacgaaaaccaccacgtccgcctgtccggacaggattcggaacgcggcacgttctcgcagcgccattcggtcttgatcgatcaggaggacgagagccgctacacgcccttcaaccatctcggcaacgagcagggccattacgaggtcatcaactcgctgctgtcggaagaagccgtgcttggcttcgaatacggctattcgctcgccgagccgaacacgctgacgctgtgggaagcccagttcggcgacttcgccaacggcgcgcaggttgtgttcgaccagttcatctcctcgggcgagcgcaaatggctgcgcatgtccggcctcgtctgcctcctgccgcacggctacgagggccagggaccggagcactcctcggcgcgcctcgagcgcttcctgcagatgtgcgcggaagacaacatccaggtggtctacccgaccacgccggccaactacttccatgtgctgcgccggcagctgcaccgcgagatccgcaagccgctgatcatgatgacgccgaagtcgctgctgcgtcacaagcgggcggtgtcgcgtctcgaggagctggcgaagggcacgaccttccaccgcatcctctatgatgacgcccagatgctgccgaacgaggcgatcaagctcgtccccgacgagaagatccgccgcatcgtgctgtgctccggcaaggtctattacgacctctacgaggagcgcgagaagcgtggcatcgacgacatctatctaatgcgcatcgagcagctttaccccgtgccgctgaaggcgctggtggccgagctgtcgcgcttcaagaaggccgaagtggtgtggtgccaggaggagccccgcaacatgggcgcctggcacttcatcgagccttatctggaatgggtgctcaaccaggtgaacggtgcgagccggcgtccgcgttatgtcggccgcgccgcctccgccgcgaccgcaacgggcctgatgtccaagcatcaggcgcagttgaaggcgttcctggacgaagcactgagctga

SEQ ID NO: 5950 - DNA, 885 bp, BradyrhizobiumColbertium
atgtccatcctgatcgacaagaacaccaaggtcatctgccagggcttcaccggcaagaacggcaccttccactccgaggccgcgattgcctacggcaccaagatggtcggcggcacctcgccggggaagggcggctcgacgcatctgggcctgccggtgttcgacaccgtgcgcgaggcgcgtgagaagaccggcgccgacgcgtcggtgatctacgtgccgccgccgggcgcggcggatgcgatctgcgaagccatcgatgccgagatcccgctgatcgtctgcatcaccgagggcatccccgtgctcgacatggtgcgggtgaagcgctcgctgctcggctccaagtcccgcctgatcgggccgaattgcccgggcgtcatgaccgccggcgagtgcaagatcggcatcatgccggccaacatcttcaagaccggctcggtcggcatcgtctcccgctccggcaccctgacctatgaagccgtgttccagacctcgcaggaaggtctcggccagaccaccgcggtcggcatcggcggcgacccggtcaagggcacggaattcatcgacgtgctggaaatgctgcttgccgatcccaagaccgaatcgatcatcatgatcggcgaaatcggcggctccgccgaggaggacgccgcccagttcctcaaggacgaggccaagcgcgggcgcaagaagccgatggtcggcttcattgccggtgtgaccgcccctcccggccgccgcatgggccatgccggcgcgatcatctcgggcggcaagggtgatgccggctccaagaccgaggcgatgaaatcggcagggattacagtgtccccgtcgcccgcgcggctcggccacacgcttgccgaaaagttgaaaggctaa

SEQ ID NO: 5951 - DNA, 492 bp, BradyrhizobiumColbertium
gtggctcttgctgccgcagtatcagcggcgagggcgggcgccgatgaaaatgaggtcctgttcaacgccgtcaacgatctctgcgtcaatggttcggagaccgtggacggcctcgccaagcgcgcgctgaagatgccttacgacgctttcaattatgattccgacaacgacggaaagtatgcgcgccagatcgggctgcgaaagctcggcagcggcggcaccattctcatcgtgtcggcgtcttcaaggcgagcgccggtgacggaatgccgcttcgtgtcctatgccgacgacatggcgagcttggcgacccgcctccgagccgccttcgatctgccgcaaccgactgcgcagtcctttgacgtctccgtcatcacccgtggcgaaaagtcgatttcgggacgaccgatgaaattcgttcttcaatatggcctgcaggacaacaagcgctccggggccttcacactcaccgtcagccgaggaagtaactga

SEQ ID NO: 5952 - DNA, 480 bp, BradyrhizobiumColbertium
atggcccaggaccatctcgccgcatcatctccgctccccgaacacgcgcgcctggccgcgtttgccggcgaatgggatggcgaagagacggtcttcccgtcgcgctggacggagggcgggccggccacctcccgcgtcgttgcgcgcatggacctcaatggattctatctgatccaggacagcgtccagatgcgcgacggcaagcaggccttcgccacccacggcatcttcacctacgaccgcgacgaccggacctacaaactgttctggtacgattcgctcggctacacgccgccctcgcccgcctcgggcgggtgggtcggcaagaccctgacgctggtgcgcggctcgctccgcggcaatgcgcgccatgtctacgaaatcatcgacgacaattcctactcgatgaagatccagttctcgccggacgcggaaggttgggccgacgtgctcacgggcgtctatcgacgggcccactga

SEQ ID NO: 5953 - DNA, 1197 bp, BradyrhizobiumColbertium
atgaatatccatgaatatcaggccaaagcgctgctgaacgagttcggcgtgccgatctcaaagggtgtgccggtgctcaaggctgcggacgccgaggctgccgccaaggcgctgccgggcccggtctgggtggtgaagagccagatccatgccggcggccgcggcaagggcaagttcaaggaagccagcgcaggggacaagggcggcgtccgcatcgccaagtccgccgcggaagttgccgagttcgccaagcagatgctgggggcgacgctggtgaccgtgcagaccggtcccgccggcaagcaggtcaatcgcctctacatcgaggacggctcggacatcgacaaggagttctatctctcgatcctggtcgatcgcgaaacctcgcgcgtctctttcgtcgtctcgaccgaaggcggcgtcaacatcgaggaggtcgcgcacaacacccccgagaagatcgtgaccttctcggtcgatcccgcgaccggcatcatgggccatcacggccgcacggtcgcgaaggcgctgaacctctccggcgatctcgccaagcaggccgagaagctcaccgcccagctgtacgccgccttcattgccaaggacatggcgatgctggagatcaacccgctggtcgtcaccaagcagggccagctccgtgtgctcgacgccaaggtgtcgttcgacgacaattcgctgttccgtcatcccgaggtgctcgcgctgcgcgacgagaccgaggaagacgccaaggaaatcgaggcgtcgaaatacgacctcaactacgtcacgctcgacggcaacatcggctgcatggtcaacggcgccggtctcgccatggcgacgatggacatcatcaagctctacggaatggcgccggcgaacttcctcgacgtcggcggcagcgccagcaaggagaaggtcgcggccgcgttcaagatcatcaccgccgatcccaacgtgaagggcatcctggtcaacatcttcggcggcatcatgaagtgcgacgtgatcgccgagggcgtcaccgccgccgtccgcgaggtcggcctcagcgtgcctttggtggttcgcctcgaaggcaccaatgtcgagctcggcaagaagatcatcagcgagtccggactgaacgtggtgccggccgacaatctcgacgacgccgcgcagaaaatcgtgaaggccgtcaagggaggctaa

SEQ ID NO: 5954 - DNA, 969 bp, BradyrhizobiumColbertium
atggcgcgcgacaagattgctttgattggctccggtcagatcggcggaacgctggctcacctcatcggcctgaaggaactgggcgacgtggtgatgttcgacatcgccgagggcgtgccacagggcaaggcgctcgacatcgcgcagtcctcgccggtcgacggttttgacgcgcactataccggcgcgaactcttacgaggcgctggacaacgccaaggtgtgcatcgtcaccgccggcgtgccgcgcaagccgggcatgagccgcgacgacctcctctccatcaacctcaaggtcatggagcaggtcggtgccggcatcaggaagtacgcgcccgacgccttcgtcatctgcatcaccaacccgctcgacgccatggtctgggcgctgcagaaggcttcaggcctgccgcacaagaaggtcgtcggcatggccggcgtgctcgactccgcgcgcttccgctacttcctggccgacgagttcaacgtctcggtcgaggacgtcaccgctttcgtgctcggcggccatggcgacacgatggtgccgctggtgaagtactccaccgtcgccggcatcccgctgcccgacctcgtcaagatgggctggacctcgcaggcgcgtctcgacgagatcgtcgatcgtacccgcaatggcggcgccgagatcgtcaacctgctcaagaccggctccgccttctatgcgccggccgcgtccgcgatcgccatggcggagagctatctgaaggacaagaagcgcgtgctgccctgcgccgcctacctcaacggcgagtacagcgtgaaggacatgtatgtcggcgtaccggtcgtgatcggggccaagggcgtcgagcgggtggtcgagatcgagctcgccggcaaggaccgcgaggccttcgacaagtcggtcggcgcggtgcagggtctggtggacgcctgcaagaagattgcccccgatcttctcggcaagtaa

SEQ ID NO: 5955 - DNA, 1188 bp, BradyrhizobiumColbertium
atgctctcgaccccgagttccccattccgcgaggcctaccaggccgagatcgcgtccggcgcgatcgagcccgatgccgcgcaggccgaggtcgccgaagcctatgcggcgctcgaccagcggcttgccacctacaagccgcagcgcaagcagggcctgctcgcccgcctgttcggcggcaatgacaaggacgaggcgccgcgcgggctctacatccatggcgaggtcggccgcggcaagaccatgctgatggacttgttctttcagcactcctcggtcgagcacaagcgtcgggcgcatttccacgagttcatggcggaagcgcatgagcgcatctacgactatcgccagagcatcgcgcgcggcgagatcgccgacggcgacgtcatcgcgctgaccgcgaacgcgatcttcgaggagagctggctgctctgctttgacgaattccacgtcaccgacatcgccgacgcgatgatcctgggacgcctgttcgcgaaattgttcgagctcggcaccgtcgtggtcgcgacttccaacgtcgcgcccgacgatctctacaaaggcggcctgaaccgctcgctgttcctgcccttcatcaagcagatcaccgatcacatggacgtcgcgcggctcgatgcacgcaccgacttccgtcttgagaagctgcagggcgtgccgatgtggctgacgccggcggatagtgacgcggacgccgcgctcgaccgcgcctggaagcggatgtcgggcggcgccaaatgcaggccgcgcgacatctccatcaagggccgcatcctgcacgtgccgtgctcggcccatggcgtggcgcggttctcgttcgccgacctctgcgagaagccgctcggcgcctccgactacctcaggctggcgcacgactatcacaccatcctggtcgaccatattccagtgatggacctctcccagcgcaacgccgccaagcgcttcattacgctgatcgatgcgctctatgacaacgccgtgaagctgatggcctcggccgacgccaacccgatctcgctctacctcgcgaccgagggcaacgaggccaacgaattcaagcggaccgcctcgcgcctgatcgaaatgagttcggaatcctatctggcgctggctcatggccgcaaggattccaccgcgagcggctcgaccaagggcctggtcgagacttaa

SEQ ID NO: 5956 - DNA, 537 bp, BradyrhizobiumColbertium
atgccgcgtttgttcacgggtctggaaattccggccgagatcggccagtcgctttccaacttgaggggcggccttcccggcgcccgctggattgatcccgagaattatcacgtcaccctgcgtttcatcggcgacatcgacggcgcttccgccaacgagatcgcctccttgctgtttcgcgtcgaccgcaagccgttcgaggtgaaggtgcagggcctgaccagcttcggcggccgcaagccgcgcgcggtggtcgccaccatcgcgccgagcaagccgctgatggaattgcaggccgagctcgaacgcatgatgcagcggatcggccttgatccggaaggacgcaagttcatcccgcatgtcacgctggcccgcctgcatgatgcgtccgaccgcgacgtcgccgactatctctcgctgcgcggctacttcccgagcaaggcgttcatggcggaacgtttcgtgctgttctcgtcgcgcgcatcgaccggcggcggaccgtatgtggtcgaggacgcctacgagctgtgcgcctag

SEQ ID NO: 5957 - DNA, 651 bp, BradyrhizobiumColbertium
ttgttcatgcacatagccgtgttgatgctcgctttgatgacgatggcgatagcggcgccggcgcaggcgcagccgccggccaagccgatcaggctggtggttctcggggattccctcagcgccggtttcggccttgcggcgcaggaggcgttcccccaaaagctcaaaaaagccttgcagaccaagggcatagagatcgatatgatcaacgccggggtgtccggcgacaccacctccggcggccgcgaccggctcgactggtcggtgccggagggaaccgatggcgtcatcgtcgagctcggcgccaacgacgcgttgcgtggtatcgatcccgacctgacgcgcgccgcgctcaccgacatcatccagcggctcaaggcgcgcaagatcgcggtgatgctgtgcggcatgctggcgccaccgaattacggcgccgattatgccgcgcgcttcaattcgatttatccggagctggcgaagaaattcgacgtgccgctctatccgttcttcctcgaaggcgttgccgccgatgccacgctcaaccaggccgacggcattcatcccacggcggccggcatcgacatcatcgtcggcaggatcatgcccgcggtggaggcattcattggcacgatcgctgagcagcggcgttga

SEQ ID NO: 5958 - DNA, 723 bp, BradyrhizobiumColbertium
atggacacacgcatcgaaacctcttcgctcgccgctaccgacgcggacaccatcgccatctccaacgtcaatctttcattgggtacgggcgcggcacgcgttcacatcctcaaggatatcagcctgcgggtgggccgcagcgaggcgatcggcctgatcggcccgtcaggctcgggcaaatccacgctgctgatggtcatggcgggggtggagcgtcctgatagcggagaggtggtggtatcaggcacggctttcaatgccctcgacgaggatgcgctggcccgctttcgcggccgccaggtcggcatcgtcttccagtccttccacctgatcccgaccatgacggcgctggagaacgtggccgtgccgctcgagcttgccggcaatcccgatgccgcgaagcgtgcggcagaggagctgcaatcggtcgggctcggcgaccgcctgcatcattatccgacgcaattgtccggcggcgagcagcagcgcgtcgcgctcgcgcgcgcgctggcgcccgatccggcgatcctcgtcgccgacgagccgaccggcaatctcgacgaggccaccggaaagcagatcgtcgatctgcttttcagcaagcacgccgagcgcggcatgaccctggtgctggtgacgcacgattcctcgctggcgcatcgctgcgaccgcgtcatccgcctgcgctccgggcgcatcgacacgcagtctgcgccggcatga

SEQ ID NO: 5959 - DNA, 2571 bp, BradyrhizobiumColbertium
atgagcacggttgccgaacctttcgcgaagcccaatggcgtcgcgctgtcgctgcgttacgcgatgcgcgaattgcgcgggggcttgcgcggcttctacgtcttcatcgcctgcatcgcgctcggcgtgatggcgatcgccggcgtcggctccgtgtcggcgagcctctccgagggccttgcgcgggaaggccgcaccctgctcggcggcgacgtctccttcgtgctgttccagcgggaggccaagccggaagagatcgcgttcctgcgctcgcgcggcacgctgtcgacggcggcgaccttgcgcggcatggcgcgctcggctgacggcaagctggcgctggtcgagatgaaggccgtcgacgacgcctatccgatgcttggacagctcacgctggcaccgccactgccgatgtccgatctgctcgcggagcgtgacggcgcattcggcgccgctgccgatccggcactgctgacccggctgtcgctgaaggccggcgatcgggtcaccatcggcgcggcaaccttccagatccgctctaccgtcgaagccgagccggacaagctcgccggcggcatcggcttcgggccgcgctttctgatcagcgaggcgggcctgcgcgccaccggcctgatccagcccggcagcctggtgcgctgggtctaccgggtcaagctgccggatgccgcgaacagcgagcgcgccaccgaggccttcatcgcggacgcgcgcaacgccgcgccgcaggccggctgggagatccgcagccgctccaatgcctcgccacagctcgaacgcaacatcaaccgcttcacgcagttcctgaccctggtcggcctggccgcgctgctggtcggcggggtcggcgttgccaatgccgtgaagagccatatcgatcgccggctcgaggtgatcgctgcgctcaaggccgtcggcgcgaccggtcgcgacgtgttcggcatctacctggcgcaggtcattctgctcgcgggcatcggctcggtcatcggcctcgcgctcggtgccgccatgcctttcgcgatcgtcggcctgttcggcaagctcctgccgctgccggtggtgccggccatgcatgtcgatgagctcgcgctgtccttcgtctacggcctcctcaccgcgctcgccttcggcctgtggccgctcgggcgtgtgcacgacgtgccggtggccgcgctgttccgtgacacgatcagctcggaatggcaccggccccgcctgggctatctcgtgttcatggcactcgtgatcgcgctgctcattgcggtcgtgatcggcctctccttcgacaagcgcatcgccgcggtgttcgtcgcctcctcggtcctcgtgttcgccctgctccgcggcattgccgccctgctgatggcgatcgcgcggcggctgccgcggtcgcggctgccgatgctgcggctggcgattgccaacatccaccggccgggcgcgctgacgccgtcggtcgtgctgtcgctgggcctaggcctcgccgtgctcgtcaccatcacccagatcgacggcaatctgcgccggcaattcctcgcagctctgcccgaccaggcgccgtccttcttcttcatcgacatcccgagcgcgcaggccgagcagttcgacggttatctgcgccggattgcccccggcgcgaaggtggaggacgtgccgatgctgcgcgggcgcatcgtcgccgcgcgcggcgttcgcgccgaggagctcaagccgacaacggattccgaatgggtgctgcagagcgaccgcggcctgacctacaccggcgagctgccgaaaggttccaaagtggtcgaaggcgaatggtggagcgccgattattccggcccgccgctggtctcgatggagaagaagatcgccgacgggcttggcctcaagctcggcgacgagatcgtggtcaacgtgctcggccgcgacattcccgccaaaatcggcaatctgcgcaccatcgactggcagggcctcggcatcaacttcgttctcgtcttctcgccaaacgcattcaagggcgcaccgcatacgcatatcgcgacgctgacggaggccggcggcaatgccgtgggcgacggcaggatcatcaaggaggtcgcggacgcctatccgatggtcaccagcgtgcgggtgcgcgaggtgatggagacggtcggctcagtggtcaccaacctggcgctggcgatccgcggcgccagtgccgtcaccctgatctcggccatccttgtcctgggcggggcgctcgcagccggccatcgtcaccgggtttacgatgcggtgatcctgaaaaccctgggcgcgacgcggctgcggctgctcggcgcctatgcgctcgaatacctcctgatcggcctggcaaccgccgtgttcggcgtgatcgccggcagcatcgcggcctggatcatcgtgacgcgcctgatgacgctgagcttcgtctggcaggccagcagcgcggccggcgtggtggcagcggcactcgtcgttaccgtcgggctggggctcgccggcacgctgctggcgttgaacaaaaagccggccacggtgttgcggaatttgtga

SEQ ID NO: 5960 - DNA, 132 bp, BradyrhizobiumColbertium
gtgacaaaatgtagcgggtcgccgtgcgggagcggaatcgcacgattcctgcgattaaccacgtccgctcgtcaggattgcgggcgagggcgacattcagccgcgcgtggacggttgcatcgaatgtgttag

SEQ ID NO: 5961 - DNA, 792 bp, BradyrhizobiumColbertium
atgtcggacctagaccgtaactacgcttctcctttcggcagggccgccgggcgtgttgacgccgcgacggtcgatgccggcctgcgcgcctacatgctgcgcatctacaactacatgagcatcggcctggccatcaccggtctcgccgcgctcggtgtctacatggctgccgtgaccgacgttgcgaccccggacgcggtccgcgtcggcaagctgttcctgacgccgttcggctacgcgatgttcgtcagccccctgaagtggctgttcatgctcgcgccgctcgcgatggtgttcgtgatatcggcaggcatcaaccgtctggcaccctcgaccgcccagatcctgttctgggtgttctcggcgctgatgggcatctcgctctcgtcgatcttcctggtgttcacgcacacctcgatcgtgcgggtgttcttcatcaccgcggccaccttcggtgcgctgagcctctacggctacaccaccaagcgtgacctcaccgggatgggctcgttcctgttcatgggcctgatcggtgtcgttctcgccagcctggtgaacctgttcctggccagctcgatgctgcagttcatcgtgtcggtggtcggcgtgctggtgttctcgggcctcaccgcctgggatacccagcggctgaagaacgactacatctacggctatgcctcggccggcggtgacatcgcagagcgtgcggccatcaccggcgcactgtcgctgtacctgaacttcatcaacctgttcacgctgctgctgcagctcctcggccagcgcgagtag

SEQ ID NO: 5962 - DNA, 759 bp, BradyrhizobiumColbertium
gtgagcggtgctgaccggccgccggtcgcgctggtcaccggcggcgggggcgatatcgggcgcgccattgcgttgaggctggcgcggatgagcgctgcggtcgcgatcgtcgaccgcgacgaagcggctgcacgctccacggcgcaactggtcgaggagggtggggcaagggcgctcgccatccgcgcggatgtctcgcgcgcgcaggatacgatcgccttcgtcgaggcgacggaagcacgcctggggccgatcggcatcttcgccaacaatgcgggcatcgagggcgtcgtcgcgcctctccacgaataccccgacgagacgttcgatcgattgctgcaggtgaacgtcaggggcgtgtttctcggcctcaagcacgtgatcgcaaggatgatgcagcgtgggacgggcgcaatcatcaacacggcatcgacctccgcgatccgcgggcgtgcagggctcgccggctatgtcgcctccaagcacgcggtgatcgggctgacacgcaccgcggcgctcgatgtggccgggacgaggatcagggtcaacgccgttctgcccggaccggtcgagtcgcgcatgatccgggaactggagggccaggcgcatgacagcgccattgcgttgcgtcgaaacgttgcgacagcgcatgggcggccgcaggatgtcgcgaacgtcgttgcctttctcgcctccgacgaggcggcgcatgtgaatggtgccgcctgggtcgtggacggcgggatgacgctggcctag

SEQ ID NO: 5963 - DNA, 1242 bp, BradyrhizobiumColbertium
atggcaggacgatttcgggtgagccgccgccggctgctggctggcgccggcggactggcgctgggcatggcagggctcggtgcgcgggcgcaggagacgaagccgctccgcatcggcgtgctgaccgacatgtccagcctctatgccgatgtcaccggcccgggctcgctgctggcagcgaaaatggcggtcgaggatttccaggcctcgggtccaaggatgacccggccgatcgagatcatcagcggcgaccacatgaacaaggccgatctcggcgccaacatcgcgcgcgaatggatcgaccggcagagcgtcgatgtcatcgtcgatgcgccgaactcggccgtcgccctcgcggtgcgcaacgtcgtgcagcagaacaacaagacgctgctggtgtcgggcgcctcatcgtcggacctcaccggcaagtcctgctcgcccaatctcgtgcactggacctacgacacctacgcgctgtcgtcgggtgtcgcgcgcgccgtcgtcgagagcggcggcaagagctggttcctgctcaccgccgattacgccttcggccatgccatggaaggcgacatcaggaacgtcgtgcagaaatccagcggcaaggttctcggcgccgttcgcacgccgatcaacacgcaggacttctcctccttcctgttgcaggcccagtcgtcgaaggcggagatcatcgcgttgatcaatgccggcggcgacaccatcaattcgatcaagcaggcggtcgaattcggcattccgcaaggcggccagcgcgtggtcgctacggtgctgtatctcagcgacgtgcattcgctcggcttgaagatcgcgcagggcctgcagttcaccgagtccttctactgggacctgaatgacgacacgcgcgcatggaccaggcgctttgcgccgcgcaacaacggccgctatccgaccgcattgcatgcgggcgcctatgccacgacgctgcactacctcaaggccgtcgatgcgctcggcgcctccggcgacggcaaggccgtggtcgagcagatgaagaagctgccgaccgatgatcccctgttcggcaagggcagcgtgcgcgccgacggtcgcaagctgcacaacatgtatttgttcgaggtgaagacgcccggcgattccaaatatccctgggactattacaagctggtcaagaccattgcgccgtccgaggcctggcggccgctggcggatggcggctgcgagttcctgaagtcgtga

SEQ ID NO: 5964 - DNA, 804 bp, BradyrhizobiumColbertium
atgacggtggccacagatcccgacgatccgcgcgcacgcatgttcggggactatcggctcaagccgaacagcggggtcaatccgccctattcgccggcctatccggtcgagtggggctgcacgttgcggaccgtcgagatcatgacccgcgtggcgccgggtaaggtcgcgaccctgctcgccgacacgccgttcgagatcgcaagcgatcgcgtcgccttccgcttcatgcgttcgcctggccactccctcgccgtacacgccggcgagatgttcgatctgatgatctcggttcccgtgcgctacaagggactgttcaccgagacgcacatcttcatgtattgcagcgatcccatggggatctgcgccgggcgcgaagtgttcggctacaccaagaaggatgcgcactacgcgttcgacgagcatccggacggctcgatcaccggatgggtccggcgccgcggaattccgctcgccgatttcgccttcacgccggatccgtccgcgcccgtggtccgggtcgtcgatggcgacgaactgccggcgggtgagatccacgtgcgccgcttgccgcaccccgagcggctcggcacggcctatgccgacatcgcctaccgccgcacgccgttgaaatattccaggccgctgccgggccgcgcctcgatgacgctgcacgcctgcgcgtacgatccgatcgccgaactcgagccggagatcctcggcgcgcatttcatggtgtcggacgtctatggcggcggattcgaggtcgaggaccggcggctcatcgagcggctcactccctga

SEQ ID NO: 5965 - DNA, 150 bp, BradyrhizobiumColbertium
ttgttccgcaggcggcatcggcaaacgattcggcattttggggtcgcgccggacgttaaggattttcgtaggcaagcgccaatcgattcccattgggcgggaacccggcgcgaagacgctcacttgactccgggttcgtttcatatatga

SEQ ID NO: 5966 - DNA, 1623 bp, BradyrhizobiumColbertium
atgccgcctgcggaacaactgctcaacgcgcccgaattcaccgtctccgagctctcccagtccttgaagcggacggtggaggacgccttcggccatgtccgggtccgcggcgagatttccggctttcgcggcgcccattcctccggccattgctatttcgcgctcaaggacgagagcgccaagatcgaggcggtgatctggaagggcgtgcacggccgcatgcgcttcaagccccaggaagggctcgaggtcatcgccaccggcaagctcacgacctatccgggctcctcgaaataccagatcgtgatcgaggcgctggagccggccggcatcggcgcgctgatggcgctgatggaggagcgcaagaagaagctcgccgccgaaggcctgttcgacgaggcgcgcaagcagcttctgccctggctccccgaggtgatcggcgtcgtgacctcgccgaccggcgccgtgatccgcgacatcctgcatcggcttgaggaccgcttcccccgccgcgtgctggtatggccggtcaaggtgcagggcgaaggctcggccgagcaggtcgcggcggcgatccgcggcttcaacgcgctgccggagggcggcaggattccgcgccccgacgtgctgatcgtcgcgcgcggcggcggctcgctggaggatctctggtcgttcaacgaggagatcgtggtgcgcgccgcggccgagagcatgatcccgctgatctcggcggtcgggcacgagaccgacatcacgctgatcgatttcgtcgccgacaagcgcgcgccgacgccgacggcagcggccgagatggccgttcccgtgcgcagcgaattgctcatcgaggtcgccgacctcggccgccgcacccgcgcctattggcagcgcgcccaggagagccgccgcagcgagctgcgcgccgccgcgcgcgcgctgcccgcggcctccgatctgctcgccattcccaggcagcggctggattcggcgggcgcgtccctgccccgctgcctcaaggccaacacgcatgcgcatttccgccggttcacggccgccggcgccaagctgaccttgcgggtgctgcacggccagatcgcgcaagccgatcaccgcctcaccgtgtgcggcgaacggctcggcctctcggcgcgctcgctgctgcggcagcggcgcgatcgctttgccgggctggaggtacgcctgcgcgcctcgaagctgtccaacgcgcaggcgcagcgcaacgcgatcgcccgccagcgcgagcgcacgcatcgcctcgccgagcgcgcggggcgtgcgcttgcgacgctcctgcaccggctcgacactcgggtcgagaacagcggcaagctgctttccgcgctgtcctatcgcagcgtgctcgcgcgcggctttgcactggtgcgcgacgaggccggccaccccgtgcatgccgcggactcgatcggtccgggggcacgcgtcgagatcgagttcgcggacggccgcgtcggcgcgacggcggatgcggatcgcccgcctcccgccgcaaagcgcgcgccggcgcaaccgaagccggctgcgcaggaaaccaagcccgcaccgaagcggttggccaagccggtggatcagggcagcctgttctga

SEQ ID NO: 5967 - DNA, 150 bp, BradyrhizobiumColbertium
atgcgcaaccgcatcgctctcttcgcttccgcactgatcgccttcaccgtcgcggtcttcctgttcgaagcccaggccaaagctccgcaccgcgcgccgggacattgcggtttctggaccacgatcgatgcaggattgtcctgccgctga

SEQ ID NO: 5968 - DNA, 888 bp, BradyrhizobiumColbertium
atgacgatcgccatccggcaactccataagcatttcgtcggcgaggtgtccggcctcgacctgcgcaagccgctgacggcggacgaagcgcgcgacatcgaagccgcgatggacaagtatgcggtgctggtcttccatgaccaggacatcaccgacgagcagcagatggcctttgcgctcaatttcggccagcgcgaggacgcgcgcggcggcacggtgaccaaggcgaaggactaccgcctccaatcaggcctgaacgacgtctccaatctgggcaaggacggcaagccgctggcaaaggacagccgcacccatctgttcaatctcggcaattgcctctggcattccgacagctcgttccgcccgatcccggcgaaattctcgctgctgtcggcgcgcgtggtgaacccgaagggcggcaacaccgagttcgccgacatgcgcgcggcctatgacgcgctcgacgacgagaccaagacggagatcgaggacctcgtctgcgagcactcgctgatgtactcgcgggggtcgctcggcttcaccgagtacaccgacgaagagaaggagatgttcaagcccgtgctgcaacgcctggtgcggacccatccggtccaccgccgcaagtcgctgtatctgtcatcgcatgccggcaaggtcgtcggcatgagcgtgcccgagggacgattgctgctgcgcgacctgaacgaacacgcgacgcagcctgagttcgtctacgtgcacaaatggaagctgcatgacctcgtgatgtgggacaaccgccagaccatgcaccgcgtccgccgctacgaccagtcccagccacgcgacatgcgccgcgcaacggtggcggggaccgagccgacggtgcagcagcaggcggcggagtag

SEQ ID NO: 5969 - DNA, 645 bp, BradyrhizobiumColbertium
atggctcccacaggaaagaggacgggcgaaagcacccgcagtgcgggcctcgcgctttccggctcggccggctatctcgatggccggctgctgatcgcgatgcccgtgatgggtgactcccgcttcgagcgctcggtcatctatctctgcgcgcattccgccgagggagcgatggggatcatcgtgaaccatcccgccggcagcatcgatttccccgagctcctgcagcagctcggcatcgtcaagaagggcgacagcatcaagctgccggaaaatgccgaaagcatgaaggtgctgcgcggcggcccggtcgataccggccgcggctttgtgctgcattccagtgacttctacatcgagaacgcgacgctgcgcatcgatgacggcgtctgcctcaccgcgacggtcgacatcctgcgcgcgatcgccaacggctccggtcccaagcacgccatcctcgcgctcggctatgccggctgggcgccgggccagctcgagaccgagatccagagcaacggctggctgcattgcgatgcggatgccgacctgatcttcggcgacgacgtcgacgataaatacacgcgcgccttgcagaagatcggcatcgatcccgggatgctctccaacgaggccggccacgcgtag

SEQ ID NO: 5970 - DNA, 840 bp, BradyrhizobiumColbertium
atgtccagcatagttcccctgcgtgcggcgattgtcgcgacgccaatcttgcttgcgtcgtcactggctttcgccgcccatgccgacgacgcctcgccgtggcagcgcgacggacattccgcggtgcggcttttagcgggatcgcgcagcggggcggtgctgctcggcggtatcgccttccagctccagcccggctggaagacctactggcgcatgccgggcgattccggcgttccgccgcgcttcgacttctcgaagtccgagaatgtcgaggcggtgacggtcatgtggccggcgccgctgaagttcgacgacggcgcgggcggccattcgatcggctatcgcgaccagatcgtgctgcccttgcgcatcgtcgccaaggcggccgacaagcccgtgacgctgcgcgccgagatcagttacgcggtgtgcgagaagctctgcattccggtcgaggccagcgccgagctcggcttcaacagcgtcgcctcgaccgaggatgcgaacttgcgtgccgcgctcgacaccgtgccgaagcccgccaatatcggcgaccccaatccgctcaccatccgcgacgtcaagcgtgacggacccaggaacgtggtggttgacgtggtgacgccggaccgccggaacgtcaatctgttcgtggaaggcccgacgcccgattgggcgctaccgattccggcgcccgtgcagcacagcccgcctggggtgacgcgctttgctttcgagctcgacgggctgccgcccggcgccaagccggacggggccgcgttgaagttcacgctggtcgggccggacaaggcatacgagttcaatacgaacttggagtga

SEQ ID NO: 5971 - DNA, 1407 bp, BradyrhizobiumColbertium
atgccgcagcacgcgggatgcctttgggggctgttcgacttggccgtgatggatgcacaacctgcaacgaccggacaggccgggctgatcgggcggctgcgggccaagctgacgggcggatcgaacgaggcgtcgctgacgcggcggctggccggcaccatcttcatcatccgcgtcatcagcgccggccttgcctatgtctcgcaggtgctgctggcgcgctggatgggcacgtccgattacggcatctatgtctatgtctggacctgggtgctgctgctcggcagcatgatggatttcggcatctctgcgtccgcgccaaagatcattccggagtatcgcgccagcggtgagcacgcgctgctgcgcggcttcctctccggcagccgctggctgacccttgccgcttccatgctggtgtcgctggccctcgccggcatcgtcaagctgctctcggcctggatggatcctgccgaggcgctgccgctctacatcggctgcatgacactgccggccttcgtcgtcgccaacacccaggacggcattgcgcgctcgcacgactggatgcagctcggcctgatgccgcaattcatcatccgtcaggcattgatcatcggcatcacgggctccgccttcctgctcggctatcacctcggcgcggtcgccgcgatggctgcaagcgccgcggcggtgtggatcgcgatgaccgggcagatggtggtgctgaaccgcaagctcgccgatcacatcgagccgggaccgaaggcctatgacgtcggcggctggctcgccgtctcattgcccatcctgctggtcgagagcttctacctgctcctgtcctacacagacgtgctggtgctgcagcagttccgtccctccgaggaggtcggcgtctatttcgccgtggtgaagacgctggcgctggtctccttcatccactacgcgatgtcggcgacgacggcgcatcgcttcgccgaataccacgcgagcggcgacaaggcgcggctgtcggcttacgtcgcgcacgccatcaattggacgttctggccgtcgctggcggcgaccatcgtgctgctggggctcggcaagccgctgctctggctgttcggtccgcagttcacggtcggctacgacatcatgttcgtcgccgcaatcggcctcgtggtgcgctctgcgatcggcccggtcgagcggctgctcaacatgctgggccagcagaagatctgcgcgctggcctacgcgctggccttcctcatgaacctggtgctctgcatcgcgctggtaccgcactacggcggccacggcgccgcggccgcaacctcgatctcactcaccttcgagacggtgctgttgttctggatcgtgcggcagcgcctcggcctgcatgtgctggcgtttggaaaatag

SEQ ID NO: 5972 - DNA, 825 bp, BradyrhizobiumColbertium
atgttcgatccactctacgtcgcctctggtttcggtgtcggtctgctcgtcggcatgacgggcgtaggcggcggctcgttgatgacgccgctcctgatcctgttgttcggcgttcatccctccaccgcggtcggaaccgacctgctctatgccgccgccaccaagactgccggcagcgtggtgcatggctggtcgcgcagcgtgcactggccggccgtgctgcgactcgcctgcggaagcattccggcgagcgcgctgacgctgctggtgctgtggaagctcgatctcaagagcgatgccgagcgcagcatggtcaatctggtgctgtgcttcgcgctgctgctgaccgcgacttcgctgatcttccgcaagtcgctcatggagcgctatcgtcgtcggctcgagcaggtcgacgcgcgcgccaccgcgattgcgaccgtcgccaccggcattgtgctgggcgtgctggtgtcgatctcttcggtcggtgccggcgcggtcggcgtcacggtgctgctgctgctttacccgcgcctgccgatggcgaccatcgtcggctccgatattgcacacgccgtgccgctgacgctggtcgccggcatcggacattgggcgctcggcgacgtcgactgggcgctgatgggcgtgctgcttttgggctcgctgcccggcatcgttatcggcagctacagcgcaacgcgcgtgcctgaaaccttgctgcgactgacacttgcctgcgtgctgttcgcggtcacaggcaagatcgtgtttgcggaactgaatttgtcgacggtcttcgtgacggcgctggcctggacgcattag

SEQ ID NO: 5973 - DNA, 789 bp, BradyrhizobiumColbertium
atgggtagtctgtcaggcaagaacgccgtcgtgaccggatcgaccagcggcatcgggctcgcctatgcgcgtgcgttcgccggcgccggtgccaacgtcgtcatcaacggcttcggcgcgccggaagatatcgagaaggagcgcgccaagatcgagtccgaattcggcgtgaaggcgatctactcgcccgccgacatgaccaagcccgccgagatcgccggcatgatcgcgctcggcgagaagacgttcggctcggtcgatatcctcgtcaacaatgccggcatccagttcgtctcgccgatcgaggagttccctctggaaaagtgggaccagatcatcgcgatcaacctgtcctcggcctttcacggcatccgtgccgccgtccccggcatgaagaagaggggctggggccgcatcatcaacacggcctccgcgcattcgctggtcgcttcgcccttcaagtcggcctacgtctcggccaagcacggcatcgccggactcaccaagaccgtggcgctggaagttgccacgcacaagatcacctgcaactgcatcagccccggctacgtctggacgccgctggtcgagaagcagattcccgacaccatgaaggcgcgcaacctgacacgcgagcaggtcatcaacgacgtgctgctcgatgcgcagccgacgaaggagttcgtcacctccgagcaggtcgccgcgctggcgctgttcctctgcagcgacgatgctgcgcagatcaccggctccaatctctccatcgacggcggctggacggcggcgtag

SEQ ID NO: 5974 - DNA, 1176 bp, BradyrhizobiumColbertium
atgaccgatcatagtccggaaatcgcaacaatccccacgaatgcgcaacgcgtcctggtcctccagggcggcggtgcgctcggctcctaccaggccggcgcccttcaggcgctgtgcggctacggcttcgagcccgaatgggtcgcgggcatctccatcggtgcggtcaacgccgccatcatcgccggcaatgagggccagacgcgcgtcaagcggctcaaggaattctgggagatggtgtcggcgccggtgccgtggaagcctctcggcaagagcgatcaaagccgcgagcttttcaattcgaccagtgcagcgctgatcgcgaccttcggcgtgcccgggttcttcacgccgcgcattccgccggcgccgctgtggccgccggggcaccccgaagcacaaagctattacgacacctcgccgctcaagaagacgctggaaggtctggtcgatttcgaccgcatcaacgatctgaagacgcgactatcggtgggagcggtcggcgtcacctcgggcaatttcagatatttcgacaatttcgagttcaagaagctcggcaagatcatcggtcccgagcacatcatggcctcgggagcgctgccgccgggctttccttcggtgatcatcgacggtgagcattattgggatggcggcatcgcctccaacaccccgctcgactacgtgctcgataccgagctcgagcgcgacatgctgatcttccaggtcgatttgttttccgcccgcggcgatctgccgacctcgctgctggaggccgccgagcgcgagaaggacatccgctattcgagccgcacgcggatgaacaccgacaagaacaagcagttgcataacgcccgcagggccgtgcgcgacctcatcagcaaattgccggatgacctgaagaacgatccttcggtcgaattcctggcgaaagtgtcgcgcgaaagcaccgtcacggtggtgcacctgatctaccgcagcaagaactacgaatcctcgtccaaggattacgacttctcgcatgtcgccatggtcgagcattgggaagccggcgtgcgcgacgtgcatctgtcgatgcgccacaaggactggctcgagcggccgcagtccggcgagaccatggtgacctacgatctcacgggggacgtcaccgcgcccccggcaaaaaggagcgaatag

SEQ ID NO: 5975 - DNA, 504 bp, BradyrhizobiumColbertium
atgcgcgctgcggccgcaattctcatcactttgctgctcgccggttgtgccggcaatgagacaccggtccagcagccgtccatgtacaccgacatggcggtcccgggctccaagctcgatgtgcaagcggcagcggtgatgatctcgcaataccgccagaacaacgggctcggcacggtcgtgatcgaccccgatctgacgcggctcgccgaatcgcagtccaatgcgatggcggcggccaacaagatggaccacgatgtccgcgcgccgctggccaggcgcctggccgccggcggctatcccgcgaccgtggccgtcgagaacatctccgcaggctatcatacgctggcggaggcgttttccggctggcgcgattcgcctccgcaccgcgccaacatgctcaagaacggtgtcacaaaattgggcatcgcggcgagctatgctcccggcaccaaatacaaggtgttctggaccatgatcctggcctcgacggagccgcgataa

SEQ ID NO: 5976 - DNA, 1035 bp, BradyrhizobiumColbertium
gtgaccattgaagtcagaaatctcgtcaagactttcggcagcttcaaagcgcttgacggcatcgatctcaaggtcgacagcggcgagctggtggcgctgcttggtccgtccggctccggaaagaccacgttgctgcggatcgtcgccggcctcgactggcccgattcaggcgaggtcttcatcaatggcgaggacgcactggcccagggcgcgcgcgagcggcacgtcggcttcgtgttccagcactacgcgctgttccgccacatgacggtgttcgagaacgtcgccttcggtctgcgcgtgcagccgcgcgcggtccgcaaggacgaggccgcgatccggacccgggtcaaggagctgctcgatctcgtgcagctcgactggctcgccgaccgctatccgagccagctttccggtggccagcgccagcgcatcgcgctcgcccgcgcgctcgcgatcgagccgcgcatcctgctgctcgacgagccgttcggcgcgctcgatgccaaggtgcggaaagagctccgcgaatggctgcgctccctgcatcacgaaatccacgtgacctcgatcttcgtcacccatgatcaggaggaggcgctcgaagtcgccaaccgtgtcgtcgtgatggacaagggcaggatcgagcagatcggctcgcccggcgatgtctatgaatatccggcgaccgccttcgtccacggcttcatcggcgagtccatcgagctgccggtccaggtcgagggcggtgctgtcaggctcggtggccggccgcttcggctcgcagccgaagggcttgcgcctggcgcgtcgaagctgttcgtccggcgacacgacatgctgatcggcccgcccggcagcggcgcgttcgagggcgctgttcggcatgtccgcaatttcggccccgtacagcgcgccgaggtcgcgctgtcgggcggcgagaccatcgagatcgacgccccccgcgacaaggagctgcgcgtcggcgacatgatcggcttggagccccgccgctaccggatatttgcgggctga

SEQ ID NO: 5977 - DNA, 156 bp, BradyrhizobiumColbertium
atgccgctgctggtcgagatcctctacaacgagtatcagttcgccgccgcctttgcgatcgcctcgctgctggcgatgctggcgccgatcacgctgatcgcgaaggccgttctcgaacgccatctggacgaaggacaggacgcaagtgaccattga

SEQ ID NO: 5978 - DNA, 204 bp, BradyrhizobiumColbertium
gtgatcgatggatggcaggccgatgtgctgacgcttacgctggcctgtgggatcgacgccatcgcgcgcaagggtctcaccacgaccgattggcagaagcgcctgcgcagaattcgtcgccctatccgtggcactgcgtcgatcgatcctcgccgagcccccgtcaccatcgtcgacgaggttgtcgacagaaaagcagcctga

SEQ ID NO: 5979 - DNA, 726 bp, BradyrhizobiumColbertium
gtgaatgcggtcgcgcctcaggtttcagcagtctcttcgttgccctcggcggacgagctcgatcgcgccttgcgcgatgcctcgccagcggagatcgttgcggcggcgctgaagacggtcgggcgcgacaagctcgcgctggtgtcgtccttcggcacggaatcggcgacgctcctcaaggtcatggcagacgtcgatgctgcgattccggtgatctttctcgacaccggctggttgtttgaggagacgctggcttatcgcgatacgctgatcgccacgctgggcctcaaggatgtccgctcggtcaagccggccgaggaggtgctgtcgctcgacgatcccgaccgcgatctctggttctccgatcccgacgcctgttgccgcattcgcaaggtcgagccgctggcgcgcgcgctgcagccgttctcggcctggatcaacggccgcaagcgtttccagggcaatgcgcgcgccgagattccggtcgtcgaggacgatggcgtgcgcttgaagttcaatcccttcgccaatgtttcgcgccaggagatcgaggcgatcttcgtccgcgccaggctgccgaggcatcctctggttgcttcaggattcctgtcggttgggtgcatgccttgcaccagcagaacgaccgagggtgaggatgcgcgcgctggtcgctggcgcggccgagccaagacagaatgcggcattcacacgatgaaggcttcgtag

SEQ ID NO: 5980 - DNA, 516 bp, BradyrhizobiumColbertium
atgccactcgttagcggcggaaagatcacgggcgacggcttcgtcaagctcgccgtcgacaccccgctgcccgagggcggcgacatcctggtgccggccgagcggtttctcgctgaggccgacgcgctgctcgagcgttcgggcaaggttggcgtgatctggccgaacaatcgtgacatcgctgagctggtgccgtatctcggcaaggtcgccgccgtcgcgctggtgtttccgacgttccgggacgggcgcgcctacagccaggcgaggctgctccgcgagcgctacaattaccgcggcgagttgcgcgccaccggccaggtgctgcgcgaccagttcgtgttcatgctgcgcgccgggttcgatgccttcgaggtgaagaagcaggctgatgccgaggccttcatgcagacggccaagcgctattcggtgttctaccagccgaccggcgacggccgcatcacggcgctgcaccggcgcatgcagctgcgtcattctgaaggtgtcggcacgtga

SEQ ID NO: 5981 - DNA, 1656 bp, BradyrhizobiumColbertium
atgtatgcttacgacgaaatcgaccgcacgctcgtcaacgagcgcgtctcggagttccgcgaccaggtgaagcggcgcctctccggcgaactcaccgaggacgagttcaagatcctgcggcttcagaacggcgtgtatctgcagctgcacgcctacatgttccgcgtcgcgatcccctacggcacgctggcgaccaaccagctgcgggcgctcgcccacgtcgcgcgcaaatacgaccgcggctacggccatttcaccacgcggcaaaacatccagttcaactggatcaagctcgccgagctgccggacgcgctcgaagaccttgccaaggtcggcatccatgcgatgcagacctccggcaacaacatgcgcaacgtcacctcggaccagtgggccggcgtcgcgcccggcgagatcgaggatccccgcatctggtcggagctgatccgccagcacaccacgctgcatccggaattctcgttcctgccgcgcaagttcaagattgcgatcaccgcctcggatcacgaccgcgccgcgatcaagatccacgacatcggcctgcgcctgatcaggaacgagaagggggagaccggcttcgaggtactggtcggcggcggtctcggccgcacgcccttcatcgccaagaccatcaagcacttcgtgcacggacgcgacatcctcagctacatcgaggcgatcttgcgcgtctacaatcagtacggccgccgcgacaacatctacaaggcgcgcatcaagatccttgtgcacgagctcggcatcgagaagttctcgcgcgaggtcgaggaggagtggcagcagatccgcaactcctcgctccagatcgacgacgaggtgatcgaggacatccgctcgcgcttcacctatcccgcctacgagaagctgccgcacatgcccgacgagctgcgccaggccgcggccgatccggatttcgaggcgtggcgcaagaactcggtcgcaccgcacaaggtgcagggctattccatcgtcacgatctcgctgaagccgaccggcggccctccgggcgatgccaccgccaagcagatggacgcgctcgccgatctcgccgaccaatattccttcggcgagattcgcgtcggccacgagcagaacctggcgctgccgcatgtggccaagcgcgatctgccggcgctgtggaaggcgctcgacaagctcgggctcgcgacgccgaacgtcaatctgatcaccgacatcatcgcctgcccggggctcgattattgctcgctggcgaatgcccgctcgatcccgatcgcgcaggagctgacgcggcgcttcgccaatcacgagctcgccaacctcatcggccggctccacatcaacatctccggctgcatcaatgcctgcggccatcaccatgtcggccacatcggcattctcggcgtcgagaagaacggcgaggaagtctaccagatcacgatcggcggccgcgccgacgagaacgccacgctcgggaccctgatcggccccggcgtcaagttcgacgaagtcgccgatgtcgtcgaagacgtcgtggaagcctatctggcgctgcgtgagcggccggaggagctgttcatggatacggtcaagcgcctcggcgtcgaacccttcaaggagcgtgtctatgccactcgttag

SEQ ID NO: 5982 - DNA, 318 bp, BradyrhizobiumColbertium
atgacctctccgctcgaacaaaagaagatccgcatcgccggcccctccgtcgtgaccgccaaccgcacctgggacggcatcgtcgtgtaccgcaccgccgctagggcctggtccgcggagctctcggaagccgcgatcgtgcgcaactccgaggaggccaaggcgttgcttgcggaggccgtggccgatgacgtcggtgccatcggtccctatatcgcgccggttcagatcggtgccgacggcaggatcgttcccggcaatctgcgcgaacagattcgccgcaccggcgtcaccatcggacagccggcccaggtttaa

SEQ ID NO: 5983 - DNA, 1425 bp, BradyrhizobiumColbertium
atgcggttcttgccggtatttctcgatctcaaggccggtccggtggtcctcatcggtgcgggcgagcttttgcgcgccaagctgcgcgtgctcgctgctgccggcgcacgcatccgcgtgcacgcgatcgacggtaaccatgaccttggcctcaacccggaagatgcggcgcgcgtcgagatcgcggcgggcgatccgctcacggccgatctctcaggtgtcatcgccatcgtttgcgctggtgcgggtgatgtcggggtggcgatgtcggtccgcgccaaggctgccggcctgcccgtcaacgtcatggacgatctcgaacattccagcttcattttcccggcgatcgtcgatcgcggggatgtcgtggtcgcggtcggcaccggcggaacctcgccggtggtggcgcgtcgcgtgcgggagaagatcgaggcgctgctgccggcccgcatcggcgagcttgcggagttcatcggcggcttccgcaagtccatcaacgaacgtatcgccgaatttccgctgcgtcgccgcttctgggagcgcgtgatcgacggtccgatcggcgccgccgtgctcgccggtcgcaggagcgaagcggacgcatcgctcaaggcgattgccgacccttccgaattcgcgcgtgccgacaagccggaaggctcggtcgcgctggtcggtgcggggccaggcgatcccgatctgctcaccatcaaggcgctgcgcgcgttgcaggatgcggacgtcgttttccatgacgaactggtctcgcccgagattctcgatcgcatccgccgcgacaccacgcgcgtcgcggtcggccgccgcgtcggcaagcccggcatcggccaggacgctatcaacaagcgcatgatcgaggcggcgcaatccggtcagcgcgtggtgcggctgaagggcggcgatcccttcgtgttcggccgcggcggcgaagaggttgaagcgctgcgtgccgccggcgtcgcttattcgatcatccccggcatcacggcgggcctcggcggcgccgccgatttcgaggtgccgctgacgtaccgccatgaagcgacgcgcatcactttcctcaccgcacacaaggcgcgcgatgcggaagccgtcgactggtcgacgttgaccgacaccaagatgaccgtcgtggtctacatgggcatgaccgcggcgccggccgtgcgcgcgggcctgttcgcggccggccgctcgccggagacgccggtcggcgtgttcgcccgcgtcacgcggcccgatgcgcaaggcgcgatcggcacgctgcgggatctgcccgaactggtgcggcggacccagggcggtcccgccatcctcatcatcggcgacgtggtccggcacgccggctcgcttcgccgccaatctccaagacaaatcatctccgacctcctggatgcagccgaatga

SEQ ID NO: 5984 - DNA, 897 bp, BradyrhizobiumColbertium
atgcatcttctcaaggacgattccgccgctgatcgagtgagcaagccggcgccggccgaccccgcgcgcgcgcaagaattctccgccgatgtcgctccgagcatggaccatctcgaccagctcgaggcgcagagcatctacatcttccgcgaggcttttgcccggctgaagaagatcgccttgttgtggtcgctcgggaaagattccaacgtgatgatctggctggcgcggaaagccttcttcggcaagatgccgttcccggctcttcacgtcgataccggcaagaagtttccggagatgtatcgcttccgcgatcattacggcaaagaatgggatctcgatttgcgcgtcgagccctgcccgccgatcgatgccgtcgacccgacgctgccgccggccgcgcgttccgccgcgcgcaagaccgagggcctcaagatggcgctcgccaaatacggcttcgacggcctgatcgccggcatccgccgcgacgaggaggcgacgcgcgccaaggagcgcgtgttctcgccgcgcggcctcgaaggcaattgggatgtgcgcgaccagccgccggagttctgggatcatttcaacgcctcgccgccgcagggcgcgcatctgcgcatccatccgatcctgcattggaccgaggccgacatctgggcctacaccaagcgcgagaacatcccgatcattccgttgtacctcgccaggaacggcaagcgctatcgctcgctgggtgaccaggacattaccaatccggtcgcctcaaacgcttcgaacatcgacgagatcctgatcgagctcgaacagaccaaggtaccggagcgctcggggcgcgcgctcgatcacgagaccgaggacgctttcgagcgcctgcgcgtcgccggctatctctga

SEQ ID NO: 5985 - DNA, 1917 bp, BradyrhizobiumColbertium
atgaacatgatcgtcaccacggctccgccgagcactccgaacggcaccacccgtccccaggtgcgcatcgtcatcgtcggccatgtcgatcacggcaagtcgacgctggtcggccggctcctgcacgagaccggcagcctgcccgagggcaagctggacatgttgaaagccgtcagcgcgcggcgcggcatgccgttcgaatggtcgttcctgctcgatgcgctgcagaccgagcgcgaccagggcatcaccatcgacaccacgcagatccgtttccgcaccaattcgcgcgacatcgtgctgatcgacgcgcccggccatgccgagttcctgcgcaacatgatcaccggcgcctcccaggccgacggcgcggtgctgatcatcgatgcgctcgagggtgtgcgcgaccagaccaggcggcatggctatctcctgcatctgctcggcgtgaagcaggttgcggtcgtcgtcaacaaaatggatcgcgtcgatttctccgtcaaccgcttcaacgcgatcagcgacgagatctccgcgcatctcaatggcctcggcgtgacaccgacggcggtgatcccgatttcggcgcgcgacggcgacggcgtcgcggagcgcaccgatcggatcggctggtacaagggaccaagcgtggtcgaagcgcttgaccggctcgagcccgcacgggcgctggaggcactgccgctacggctgccggtgcaggcaatttacaaattcgacgaccgccgcatcgtcgcgggccgcatcgagtccggcaacctgatcgccggcgacgagatcgtgatcatgcccgccggcaagatcgccaggatcaagtcggtcgagagctggccggtaacgtcggtcgccagccgtcagggcgcgggccgctcggtcggcatcacgctcgatcgcgaattgttcatcgagcgcggcgacatcgtcgcgcatgcaggcagcgcaccgcgcgaaacgcggcggctgcgcgcgcggatcttctggctgcacgacaagccgctcgccaggggcgaccagctgctggtgcgctgcgggccgaaggaaagccgcgccaccgtggttgccatcgagaaggcgatcgatcccggcgagctctcgagctccgagaacagggtgatcggccgcaaccatgtcggcgagatcgacatctccctgtccagtccgatcgcgaccgacccctacaccgagaacccgcgcaccggccgcctcgtgatcgaggtgtccggacgcatcgccggcggcggcctggtgctgtcggtcgatgccggccaacgcgccgtgcctgttgacatcgtgccggtggaatcggcgctgcggcccgacgagcgctcggcgcgctatcgccacaacggcgccgtggtctggctcaccggcctgcccgcctccggcaagtcgacgctggcaaaagcgctggagcggcggctgttcagccatggcggctcgccgatcctgctggacggcgacacgctgcgcgcgggcctcaacagcgatctcggcttctccgccgctgatcgcagcgagaacatccgccgcctcgccgaggtcgcgacgcaccttgcccgcaacggccatatcgccatcgtcgccgcggtctcgccggcccgcgaggatcgcgcagcggcacgccggatcgccgacaccgcgttccgcgagatccacgtcgcgacgccggccgaggtgtgcgaggagcgcgaccccaagggccactacaagaaggcccgtgcaggtgcattggcttcgttcaccgggatcggcaacgactacgagaagcctgacgcggccgaactcgtgatcgacacgtcgaagaggacggtcgccgaggcgaccgacgaggtcgagcacatgctgaagacgaccggcgtgctgttcgacgaggtcgtggacctcgctgcgaatatttga

SEQ ID NO: 5986 - DNA, 123 bp, BradyrhizobiumColbertium
ttggctgcttttgacccgacagcagcaaaatgcgctccagggagcggctttcgggggcctattagccccaaaaaaggggcggtgagaagacccccgcgcggttgtaaaaatgtcaaggaatag

SEQ ID NO: 5987 - DNA, 2166 bp, BradyrhizobiumColbertium
atgaaacgcgtcgacgcccacggattgaagatcgctcccgtcctgtttgatttcatcgccaaggaagcggccccgaaaacggggatcgcgccggatgcgttctgggccgggctcgccggcatcatcaaggaactggggccgaagaaccgcgaactgctcgcattccgcgaaacacttcaggccaagatcgacgactggcaccgggccaacaagggcaaggcgttcgacctcgacgcctataccgccttcctgaaggagatcggctatctggtcccggagccggcgacccagaacgtcgagactgccaatgtcgacgaggagatcggcaagatctgcggcccgcagctggtcgtgccactgacgaatgcgcgctacgcgctgaacgcggcgaatgcgcgctggggctcgctctatgacgccttctacggcaccgatgccatcccgcatgatgcttccgagagcggcaagggctacaacaaggcgcgcggcgacaaggtgatcgccaaggccaaggcgttcctcgataacgccgtgccgctcgcaaccggcagccacaccgacgtcaccgcctacagcgtcgtcgcgggccagcttgcggtaaagctgaagagcggcaacgccaccgcgctgaagaacgccgcgcagttcgccggcttccagggcgatgccgccgcgccgagtgcagtgctgctcgtcaacaacggcctgcatatcgaggtcaagatcgaccgcagcagcgcgatcggcaaggacgatccggccggcgtcgccgacgtgatcatggaggctgcagtctcgaccatcctcgacatggaagattcggtcgctgccgtcgacgccgaggacaaggtgctggtctaccgcaacacgctcggcctgatgaacggcacgttgtcggccgatttcgagaagggcggcaagacgctgacgcgctcgctcaatgccgaccgcagctacaagacgcctgacggcaagggcgagctcaagctgcacggccgcagcctgctcctgatgcgcaattgcggtcaccacatgttcaccgacgcggtgctggacgagaagggcgaggaggtccccgagggcctgctcgatgccgccgtgtcgggcctgcttgccattcacgacctcaagggtctctccaaggtcaagaacagccgcacgggctcggcgtatatcgtgaagccgaagatgcacgggccggacgaggtatcgctcacctgcgagatcttcgaccgcgtcgagaagatgctgggcttgcccgagaacacgctcaaggtcggcatcatggacgaggagcggcgtaccacagtcaacctcaaggcctgcatccagcgcgcctccaagcggatcatgttcatcaataccggcttcctcgatcgtaccggcgacgagatccacacctcgatggaagcgggccccatgatccgcaagaacgagatgaaggcgcaggcctggatcaaggcctatgaggactggaacgtcgacatgggcctggcctgtggcctgcccggccacgcccagatcggcaagggcatgtgggccgcgcccgacaagatggcggatatgctggcgcaaaagctcgcccatccgcaggccggcgccaccacggcctgggtgccctcgccgaccgccgcgacgctgcacgcgctgcactaccaccaggtcaacgtcatcgcgcgccagcaggaactcgccaagggcgggacgcgcgcaaagctctcggacatcctcaccattccggtgtcgaagtcgaactgggcgccagatgacgtgaagcaggagattgacaacaattgccagggcatcctcggatacgtcgtccgctggatcgaccagggcgtcggctgctccaaggtgcccgacatccacgacgtcggcctgatggaagaccgcgcgacgttgcgcatctccagccagcatctcgccaactggctgcaccagggcgtgatcaccgaggcgcaggtgatggaatcgctcaagcgcatggccatcgtcgtcgacaagcagaatgcgggcgacccgatctacaagccgatggcgccaagcttcgacggcgtcgccttcaaggccgcctgcgacctcatcttcaagggccgcgagcagccgaacggttacaccgaatacatcctgaccgcgcgccgccgcgaggccaagtcgctgggctga

SEQ ID NO: 5988 - DNA, 201 bp, BradyrhizobiumColbertium
atggactggaatcgcatcgaaggaaactggaagcagttcaagggctcggccaaggagaagtggggcaagctcaccgacgacgaccttcaactgatcgagggtcgccgcgagcagctcgagggccggctgcaggaacgttatggcaaggccaaggaccaggttcggcaggacgtcgacgactggctcaaagggctgcactga

SEQ ID NO: 5989 - DNA, 156 bp, BradyrhizobiumColbertium
atgctggtcggcgtactcgtcacctttctcgtcgtcattctcgtgctttatctcatcaacatgctgccgatggatggccgcgccaagcagatcgcgcgcgtgatcgtcatcatcatcggcatcgtgtcgctgctgaaatatctcgcggtgttctag

SEQ ID NO: 5990 - DNA, 651 bp, BradyrhizobiumColbertium
atgagcagacgcctggttggcaaaacggctggcggtgcggcgatcctggtcgctatttcggccggtcttgcgtcggcgccttcagcgcaggcgcaggattttttctcgggattgttcggcggcttccggatgcggccgccaccggagatccggatgccgttcccgcatgacgatgtgccgcgctatgaggcgccgcgccagcgcgcctcttacggcggcggcatggcctattgtgtgcgcggctgtgacggccggtatttcccggcgcaaggaagcgatgccgaaagcaaggcgcaatcctgcaagagcttctgcccggcctccgaaacctcgctggtctacggcggcaatatcgacgacgccacgaccgaaaagggaaaatcctattccgatttgcccaacgcctatcgctatcgcaacgagatcgtcgcaggctgcacctgcaacggcaaggatccggtcgggctcgcatcggtcaaggtcgaggacgatccgaccttgcgtaaaggcgacatcgtcgcgggggccaatggtctcgtagtcgccagccgcaatgccaacgaccggcggggcgtcgcgatgaacttctcgccgctgccggattctgtgcgcgccagattccgccaggtcccggtggtggcgaaggaatag

SEQ ID NO: 5991 - DNA, 834 bp, BradyrhizobiumColbertium
gtggagtttgttcggcagcgcatcaccctgatgcacacaccaacggggcagcacatgacaacgttgttagcagtccgcagcagcttctcgccgcgcgccgtcgccgcattctgtttcgcgtccgctctgctcgcagtgcccttggacggcgcaagcgcgcaaacgttcggctatgcgccgatgcagctccatgagcggatgcagctgcaggatgagggttacaccgagggagttgccaacgaggcgccgcgggccgccgacgaggacgcccagttgcccgaccggctgcgcaagcagatcgtcagcttcgaccggagcgagccggccggcaccatcgtcatcgataccaacaacacctatctctactacgtgctcggcaacggccgcgcgatccgctacggcgtcggcgtgggccgcgaaggcttcacctggtcgggcgtgcagagcgtcagccgcaaggccgagtggccggactggcatccgcctgccgcaatgatcgcgcgccagccctatctgccgcgcttcgtcgcaggcggccccggcaatccgctgggcgcgcgcgcgatgtatctcggctcgagccagtaccgcatccacggcaccaacgatccctccacgatcggcaagttcgtctcgtccggctgcatccgcatgacaaacgaggacgtcatcgacctgttcagccgggtcaacgttggtgccaaggtcgtggtgttgccgaagagcgcgccgctgatggccagaggcgcagatcctgcgcgaaagcgcccggccgtgagcgcgctgccctcgggtcggcaggcgttgaacatcacgacgtcggccgtgaactga

SEQ ID NO: 5992 - DNA, 1113 bp, BradyrhizobiumColbertium
gtgcgcgtccttcccagtgaacgtctgatttccggcagcagcgaaagcgatccgcttccccacagccctgccgagctgccgcccgtgatccgccgcacggagttcgtcgccttcgcactcgcaggccttttgctgattgccatcgtcaccgtgctctacgtcgggcgggccttcttcctgcccgtggtgatggccttcgtcatcggcacgatgctatcgccggcggcgggctttctcgagcggtacagggtcccccgcagcgtcggcgcggtcctgatcgtcatcgccgtaaccgcggtggtcgccttcatggtggcgctgatcgcctcgccgatgatggagtggagcacgcgcctgccggagctcggtgcccagctgaaggacaagctgcacgtgttcgaccggccgctcgcgctgtggcgggagatgcaggccatgctcggcggctcggaaggattgccgagcttccacatacccaagatcgactgggtgcagccgacgatcgaattcctgtcaccgacctttaccgagttcctgctgttcttcgtcaccctgatccttttcatcgcaagctggcgcgacctgcggcgggccatgatcatgactttcagcgatcatgacgcacggcttcgtacgctccggattctgaacgagatcgaggtccatctgggaaattatttgctgaccgtcaccctgatcaatgtcggagtcggcgtcggcacaggcatcatctgcgcactcgcaggaatgcccaacccggccgggctcggcgcgctggccgcaacgctcaacttcatcccgatcatcgggccggttgcgatgttcgcgctgctggtcgtggtggggctgatcgcctttcccaccatcagtggcggcttgatcgcggcactcgccttcggcggtctcaccttcctggagggacacttcgtcacgccgatgatcattgggcggcggctggcgctgaatgcgctcgccgtgctgctcgcgctggcgttctggacgtggttgtggggccccatgggcgcattcctgtcgtcgccgctcctgatcgttgccctcatcctgaaggagcatctgttgccgacggatgcgccgcaactgccacagggctaa

SEQ ID NO: 5993 - DNA, 372 bp, BradyrhizobiumColbertium
atgccgacgacagatgccgaagcccggatgagagactggaccgacaaagccaccagagaacgcctcgagaaggatgtagcagccgtgaaaagcgatatcgccgccctcaccgaccagatcaccgatgtgctcaactcctttgccaattccacgagcaagcaggctcgccgcggctatcgccaggcgcgcgagaacgtggattccgcgatggacgacatgtccgagcgcggcagcgcgatgatggaggccgcgcacgacgcctacggctccatcgaggagacgctggaagaggcgatcacgcagcgcccgcttgcgactgtcggactggcgctgggtatcgggttcctgatcggcgccgcctggcgccggtaa

SEQ ID NO: 5994 - DNA, 456 bp, BradyrhizobiumColbertium
atgcttcagcgcattatcgaggggatcagtgcatcgactggcacgactgttcggctgacctcccttgccgcagccgcagccttcgcgctcctggtgaccacgagcttcctttgcgctgccgcattcatctcggtcctgcagacatacggtccagtgcaggcctgtcttgctggcgcgggcatcttcttcctgctgaccctggcggcggcgggctcgtattggggctacaagcgcgagctgcagaagcgcgctgagatcgctgccgagcgcgccgcgaagtcggccgcgcagagcatgctcgcagatccgatgctcctcgccaccgggcttcagatcgttcgcgccatcgggatgaagcggctattgccgatcctggcaatcggcggcgtcgccctcggtatcctcgcgagccgtgccggcgtgtccgacgaggtatccgccgaaccggctgaatag

SEQ ID NO: 5995 - DNA, 1143 bp, BradyrhizobiumColbertium
atgaaaccgtccgtcaaggcgaacctcgccgcattccagcacgactcacgactgtacctgacgctcggcatcgccaattggtcggtgttcgtcgaccacattccgaacaacgtcgtcaacctgctgacgctgcgcaacttcggcttcagcggtgcggccgatctgttcgtgttcgtggtgggctatggggtcgccatcatccatggcagaatggcgctggagcgcggctatctggtcgcggcgacgcggatctttcgacgcgtctggcggctctatgccgcctatgttgtgctgttcgtgatctatatcgacaccatcgcctacgtcgcctcgcaatccatggcgccggagatcatccaccattacaacatctcgggaatcctcgagcacccgctacgcatcctgatccgcggtctcgtgctccaggaagaaccgttgaacctcgacctgctgcagctgatgatcccgctgatggccttctttccgcttgcgctctggggcctgttgcgacggccgaacctgacgcttgcggcatcggttgcgctgtatcttgccgcgcgctggttcgactggaattttcgggtctctccggaccaggaatggaccttcaatccgctctgctggcagatgctgatggtgctgggcggctggtttgccgtcaccggcgcgcccgggcggacgctgcgcgatcttccctggcttcggatgctcgccggcagctatctcgtcttcgccatggcggtcgccctgttgcgccattcgccggaatcgtccgcctatctgccggaccttctgctcgataccatcgcaccgaccgacaaggagaacctcgcgccttaccgcgtgcttcacttcctcgcgctcgccttcgtcgcgacccgtctcgttccggccgatcaccccggcctgcgattgaagccgcttcaggcagtcattcgatgcggcgaggaatggctcgcggtgttctgcgtcggcgtgttcctgtcctttgccggtcatctcatcctgatcaccggcccaaatctcgtgctgatgcagatcgcggtgagcatcatcggtttcgccgccatgaccgccgtcgcctactacgtggcctggtcgaagcggcaggacctgcctgccgccctgcggcagcaggcctag

SEQ ID NO: 5996 - DNA, 549 bp, BradyrhizobiumColbertium
atggagaccagcaacgccattctcgagagcgcctatgcgttgatggcttccaccggccttgccgccaccaccatcgacgcggtcgcccgccattccagtgtctccaagatgacgatctacaagtggtggccgtcccgcgaggcgctcttgatcgacgcctttcttcaccacgccgcccagatgctgccgctgccgccggcgagctccggcagccccgcggcccgtgcgcgccgccatgccgcggcctacgccgaagcgcttcagggcgagttcggcaaggtccagctcgccgtcgtctccgaatgcatctccaagaccggctcggcggggctgttctacgcgcgttatctgcagttccgtcgcgacgcgctcgtcgagatgatcgccgagggccagaaggatggcagcattctggcgggggggcttcctgaggatctctacgacgcgatctacggcggcctgttctatcgctatatcttcggcattgcgccggttaccgcggcttacgcgcgcaacctcgtcgatctcgtgttgcggcctaaggattag

SEQ ID NO: 5997 - DNA, 1662 bp, BradyrhizobiumColbertium
gtggtcaggctgggtttcatcatcggcttcatcgctctgctcggggtcttgctctccgggcttgcggcctatcgcgtccacgaccaggagctggcgctggatcggatcgcgctcgcgcgtgcgatcgacgttcacgcgagcctcgtccaggaccggctgaccgagcgggagctgctcgcgcgtgtcgcctcaggcctgttccgcgcgccatccgtgatcaagtcgaacatgctggagccgctgcgctcggccatctacgccttcaagactgatttcgtggtggcggggtggatcgcccggctgaagccggacgaattgacggcggcgcaagccgccattgccggcgccggtttcccgaatcccgagattcgcggatatgacgacaagccgatcaatcctgccgacgtcacccggccgatcgacgtgttgttggatctcgagccgcgcagcgacgagaccaaggcgctgccgggccgcagctacgatcaggatccggttcgaggcgccatgctgacgcgtgcccgggtcgagaagcggtcgatcgcctcagaccccattccgctgcttcgtggcaacgggccgatcggaatcatcgtggcggcgcctgtcgttcccgagggagcaaccgagccggcaggattcgtcacgttctcctacgagcttgccacgctgatgctgaccaatgacgacatgtcgttgttctcggtcgcgctcagggatccgcgcaaggaaggtggcgagctcgtcgccaatgatcagggcgtggtctccacacgcatggcggcagcggacgggcgcgcgccgtcggcgacgcgcaccgtcagcttcggcggccgtgactggcagctctcctattatgcgaacgtgaattcggtgcgccgcgccgagcagaccgcgatcatcgtggcggccatcggctttgccatcacggcaatggtgtgcggcctctttggctatgtggcatacaacaatctgcgactcagccgggagatccaggtcagaatcggcttcgagcgccggctgaccgcggtcatcgacgagctcaaccaccgcgtcaagaacatcctggcggtgatccagtcgatcgtgacgcgcactttgcgtcacggctcggacatcgacatcgcgcgcgagctgctgatcgggcgcatccacgccatgtccaacgtggtctctttgctcagcgagagccagtggcagggcgtcaagctgaagggcctgttcgaggcacgcgccatcccgcatgccgaccggattgccgtcaacggtcccgatatcgcggtcagcgcacgcgcggcgcagagcctctcgctgctgttcttcgagcttgcctcgcattccgacgagggcctgtcgctggtcgggaagcatccgcacatcaccgccaactggacggtgaccggagaggagggcaaggaggtcttccatttccgctgggaggagttcaacaccagcgaggcgacgcgccggccggattccgatttcggcctgatcctgctcgaccgcgtcgcgcccgaggcgctggggggcaccgccaagcgcttcttcaccgacgtctcctacgtctacgaattgaccgcgccgatggagacggtcgtcgacatgaccgagcgcgaccgtacggacaagatctcggcgccggtccggcccgcgcgcagctaa

SEQ ID NO: 5998 - DNA, 624 bp, BradyrhizobiumColbertium
atgtcgaaatctcacggcccgctgcgtgtcggcgtcggtggcccggtcggatcgggcaagaccgcgctgatggacctgctctgcaagaccatgcgcgagcgctacgacattgcggcgatcaccaatgacatctacaccaaatgggacgcggagttcctggtgcgttcgggctctctgacgccggatcgcatcgccggcgtcgagaccggcggctgtccacacaccgcgatccgcgaggatgcctcgatgaacctcgccgcggttgccgacatgcgcgccaagtttcccggacttgatctcgtgctgatcgaatccggcggcgacaatctcgctgctactttttcccccgaactggccgatatcaccatttacgtcatcgacgtcgccgccggcgacaagatcccgtccaagggcggccccggcatcacccggtccgacctgctggtcatcaataagaccgacctcgcgccccatgttggcgcctctctggagaagatggagacggacgccaggcgcatgcgcggcgagcgtcccttcgtcatgaccaacctgaagaagagcgtggggctcgaccgcatcgtcgccttcatcgaggccaaaggcggcctgcagcggccgggctga

SEQ ID NO: 5999 - DNA, 729 bp, BradyrhizobiumColbertium
atgctcatgaccacaaatgagccggttggcgccggcggcctcgctgaggaggaggcggcggcgctctaccggctgatgacatggctatcgccggcgtttccggtcggtggtttctcctattccagcggcctcgaatgggcggtcgaggcgggcgatatcaccgacacagcggcactggcggattggctagacgtgatgcttggcgacggctcgggcttctgcgacgcgacgtttctggtccgggcttatcgggccgcggaagcaggcaacacgaccgctttgaacgagatcgccgagctcgccgccgccttcgtgccgtcgcgcgagcggcagctggagacgacctcgcagggccgtgccttcatcgacatcgcccgcgccgcatgggatgccgacggactggacgccatgattgcagcatgcagcacgccactggtctaccccgtcgcggtcggtgtggtcgccgcaatgcacggcgtgccgctggggtcgacgctgcacgctttcctccatgcgctggtctcgaattggatttctgcggccagccggctcattccgctcggccagaccgacagccagcgcgtgctggtcaagctggaagccgccgtcgccgcgacggccaatcgtgcgctgaacgcggcattggacgatatcggcagcgcgactttccgcgccgatctcgccagcctgcggcacgagacgcaatatacgcggctgtttcggtcgtga

SEQ ID NO: 6000 - DNA, 633 bp, BradyrhizobiumColbertium
atgatccgggccacgcaggtcaaggggcagcaccgcttcacggaagctcccgtggatacggtggtgctcgatttcgacgaccggcatcgccgccgcatggcgatgacgggcacgcgagggctcgaattcctgctcgatctggagcatgccgtcgcgctacgcggcggggatgcgctggtgctggaggacggccgcctggtcgaggtggtcgcggcgcccgagccgctgctcgagatccgcggccgcgatccgcaccacctcattcgcgtcggctggcatctcggcaaccgccatctgccgacccagatcatggcgaaggccctgcgcatccgccgcgatcacgtgatcgaggagatggtgaaggggctcggcgcgcgcgtgatcgagatcgaggcgccgttcgatccagaaggcggggcgtatgcggatgctggccacgcgcacgggcacgacgaccatgcgcatcacggtcacgaccatcatgaccatggtcacgatcatcacggccatggccaccgtcaccatgatcatgccgcgcatggccatggccacgagcaccaccatcaccacgatgagcattgcgaccatcccgaccatcaccacggccacacgcatgctcatgaccacaaatga

SEQ ID NO: 6001 - DNA, 300 bp, BradyrhizobiumColbertium
gtgatctacgtcgttgccaccttgaccatcaagcccgagacgcgcgccgaattcatcgcagccgccactgcctgcatcaaggagacccggaaggagcccggcaatatcgcctatgacatgcatgagagcgtcacagaccccagcaagatggtcttcgtggagcagtgggagaacgccgaagcgctggtgccgcatcgggccatggagcacatgaagacgttcggccgcgtcgcggtgaaatgcttcacggcgccgccgaaaatcgaggtgatcacgcccgagaaggtcgagacaaggtaa

SEQ ID NO: 6002 - DNA, 1716 bp, BradyrhizobiumColbertium
atgtccgtcagaataaaacgttccgtctatgccgacatgttcggccccaccacaggggacaaggtgcggttggccgacaccgatctcatcatcgaggtcgagaaggatttcacgacttacggtgaggaggtgaagttcggcggcggcaaggtgatccgtgacggcatggggcagtcgcaggtcaccaacaggcagggtgcggccgacaccgtcatcaccaatgcgctgatcgtcgatcactggggcatcgtgaaggccgatgtcgccatcaaggacggcatgatctctgcgatcggcaaggctggcaatccggacatccagcccggcgtcaccatcatcatcggtcccggcaccgacgtgatcgccggcgagggaaaaatcctcaccgccggtggcttcgacagccacatccatttcatctgcccgcagcagatcgagcacgcgctgatgtcaggcgtcacttcgatgctgggcggcggcaccggcccctcgcacggcaccttcgccaccacctgcacgccgggcccgtggcacatcgcgcggatgatccagtcgttcgacgcctttccggtcaacctcggcatttccggcaagggcaacgcctcgcggcccgccgcgctggtcgagatgatcaaggccggtgcctgcgcgctgaagctgcacgaggactggggcacgacgccggcggccatcgacaattgcctctcggtcgcggacgatcacgacatccaggtgatgatccacaccgacacgctgaacgagtccggcttcgtcgaggatacgatcaaggccttcaagggccgcaccattcatgccttccacacggaaggtgccggcggcggccatgcccctgacatcatcaaggtcgcgggcctgaagaacgtgctgccgtcctcgaccaatcccacgcgcccgtttacccgcaacaccatcgacgagcatctggacatgctgatggtgtgccaccatctcgatccctcgatcgcggaagacctggcatttgccgaaagccgtatccgtaaggagaccatcgcggccgaggacattctgcacgatctcggcgcgctctcgatgatgtcctcggactcgcaggccatgggccgcctcggcgaggtcattatccggacgtggcagaccgcggacaagatgaagaagcagcggggatccttgccgcaggacaagggcaaggacaacgacaatttccgcgtcaagcgctacatcgccaaatacacgatcaaccccgcgatcgcgcacggcgtgtcgaagctgatcgggtcggtggagaagggcaagctcgccgacctcgtgctatggtcgccggccttcttcggcgtcaagccggactgcatcgtcaagggcggcagcatcgttgcagcgcccatgggcgatcccaacgcctcgatcccgacgccgcagccggtgcactatcagccgatgttcggggccttcggcagggcgcgtacggcgtcgtccgtggtgttcacttccaaggctgcggtcaccggcggccttgcgcgcaagctcggcatcgagaagaagctctacgccgtccagaatgtccgcggcaggatctcgaaaaagagcatgatccacaacgatgccacgcccaatatcgaggtcgatcccgagacctatgaggtccgcgccgatggcgaactgctcacctgcgcccccgccgaggtgctgccgatgtcgcagcgatatttcatgtactga

SEQ ID NO: 6003 - DNA, 540 bp, BradyrhizobiumColbertium
atgctctcgccaatccgcctcatctccgaagccgctgaactcgctgcgcgccgccataacggcatggcgcgcaaggggcgcggtaatgagccctacatcaatcatctcgccgaggtcgcgaacctgctcgcgaccgcgaccgatggcgccgacgccgagctggtcgctgccggctggctgcatgacaccatcgaggacaccgacaccacgcgcgaagagcttgcgcgaagattttccgagcgtgtcgcctcactcgtcgccgaatgcaccgatgacatgagtctgccgaaggcgatgcgaaggcagaagcagattgaggacgcgccccacaaatcgccgggcgccaagctgatcaagatcgccgacaagatcagcaatacaggggcgcgcattcaaaccgacccgacttccgaggagcgcgacgatctcgccgattacatcgactgggcgacgcaggtcgttgcaggctgccgcggctccaatgcatggctcgacgagaaattcgatgatgccgtgaaagcagcgaaggccgtgctttga

SEQ ID NO: 6004 - DNA, 306 bp, BradyrhizobiumColbertium
atgattcccggcgaactcttcatccaggacggcgagatcgagctcaatgccggccgcaagaccgtgacgctgacggtcgccaacacaggtgaccgccccattcaggtcggctcgcactaccatttcttcgagaccaacccggcgctgaagttcgatcgcaagaaggcccgcggcatgcgcctcgacatcgccgccggcaccgccgtccgcttcgagcccggccagacccgcgacgtgcagctcgtcgcggtggcggggaagaagacgatctacggcttccgcggcgatgtgatggggaagctgtga

SEQ ID NO: 6005 - DNA, 303 bp, BradyrhizobiumColbertium
atgaacctgtctccccgcgaaaaggacaagcttctgatctcgatggtcgcgatcgtggcgcgccgccggctggatcgcggcgtcaagctcaaccatcccgaggcgattgccatcatctccgacttcatcctggaaggcgcgcgcgacggccgcaccgtcgctgagctgatgcagtccggcgcgcaggttttgacccgcgatcaggtcatgccgggcattcccgagatgatccacgacatccaggtcgaggcgacctttcctgatggcaccaagctcgtcaccgtgcacgagccgatcaggtag

SEQ ID NO: 6006 - DNA, 810 bp, BradyrhizobiumColbertium
atgccaggacttttcgaggcgaaccgcgcccgtggcgcggttcggctcgacgtgcacgcacgtgaccgcgtgacccggcgcggcaccttgcacgaatccggctctttacgcgtgcgctttccctcgccggaagacgaggggctgtcgggcgtgttcgtcaacacggccggcggggttgccggtggggactgtttcgatatcgacatcgcggcgggcggaggtacgcggctcactctgacgaccgcagctgccgaaaagatctatcgagcccccggggaggcggcgcagctcaatatcgccttgcgagccgccgcgggcgcgcatctggcctggttgccgcaggagacgatcctgttcgaccgcgcgcgggtgcatcgccgcttcgacattgcgctcgacgaggcggcctcgctcctgctctgcgagatcgtcgtgttcggccgcaccgccatgggcgagcggatgcagcagggcgagttcgtcgaccgctggcggctgcgccgcggcggcaggctggtgttcgccgagacggtcaggcttgacggcgacatcggcgccaagctcgcgcggtccgcggtcgccaatagcggcacggcgatcggcaccgctctgatcgtgcccggtgacgagaccctggtcgagcgcattcgcgaggcctcggaatcgttcggcggggaagtcgggatctcggcctggaatggctttgcaatggcgcggttctgtgcccaagatgcggcgcgcttacgcgccgacatgatggcggtgctggcgcgaaccggcgcggtcctgccgcggctgtggttgaactga

SEQ ID NO: 6007 - DNA, 696 bp, BradyrhizobiumColbertium
atgcttgaagtgaaagacatcaatctgttctacggtgctgcccaggcgctgcgcggcgtgtcgatctcggcggagcccggcaaggtgacctgcgtcctcggccgcaacggcgtcggcaagacctcgcttctgcgcgccatggtcgggcaatatccgatctcctcgggcgcgatcgtgctcgatggcagcgacatcaccggcctgaagccctatgaacgtgcgcgcaggggcatcggattcgtgccgcagggccgcgagatatttccgctgctgacggtcgaggagaacctcaagaccggcttcggtccgctcaagcgcgaggacaagcacatcccggacgacgtgttctcgctgtttccggtgctgcaatccatgctcggccggcgcggcggcgatctctccggcggccagcagcagcagctcgcgatcggccgcgcgctggtgatgcggccgaagctgctgttgctcgacgaaccgaccgagggcattcagccctcgatcatcaaggacatcggccgcgccatctcctacttgcgcaatctcggcaacatcgccatcgtgctggtcgaacaatatctcgactttgcctgcgagctcggcgacagctttgcggtgatggatcgcggcgctgtgaagttcacctgcgaccgcgccaacctcgacgcgagcgagatcagccgccagatggcgctgtag

SEQ ID NO: 6008 - DNA, 762 bp, BradyrhizobiumColbertium
atgaacgtcatggatacccgcacgacgtccgcaatgctctatctggatggcgtgcacgtctcgttcgacggcttccacgccatcaacaacctgtcgctgacgctcgagccgggcgagatgcgggccatcatcgggccgaacggcgccggcaagaccacgatgatggacatcatcaccggcaagaccaagcccgacgaaggcaccgtgctgttcgacggcgtcacggatctcacgcggctcgacgagacgcgcatcgccgagctcggcatcggccgcaaattccagaagccgacggtgttcgagagccagaccgtgcacgacaacctcctgctcgcgctcaatgtcgatcactccgtccgcggcacgctgttctggcgcggcagcaaggccgagaccgagcgcatcgacaaggtgctggagacgatccgtctcaccgaagcgcgcaaccgcctcgctggcagcctcagccatggccagaagcaatggctcgagatcggcatgctgctggcaaaggaaccgaagctgctgctggtcgacgagcccgttgcagggatgaccgacatcgagacgcatctcaccgccgagctgctgaaggagatcaacaagacccacaccgtgatggtggtcgagcacgacatgaccttcgtgcgcgagctcggcgtcaaggtcacctgcctgcacgaaggcaccgtgctggcggaaggcaccatcgaccaggtatcgtccaacgagcgggtcatcgaagtctatctgggaaggtag

SEQ ID NO: 6009 - DNA, 1158 bp, BradyrhizobiumColbertium
atgctgacgcgatcgctggaccgcggcgcgacgatcttccttgcgatcgtcgcagcctgcggcatcctcatcccgctctccaacctgctgctgcccgcgggctcgttcctgcaggtgccgacctatctcgtcgcgctctggggcaagtatgtctgctacgcgatcctggcgctctcgatcgacctgatctggggctattgcggaatcctctcgctcggccacggcgctttcttcgcgctgggcggttacgccatgggcatgtacctgatgcggcagatcggcacccgcggggtctatggcaatccgatcctgcccgacttcatggtgttcctgaattggcaggagctgccctggtactggtacggcttcgacatgttctggttcgccgcgctgatggtgctggtcgtgccgggcctgcttgccttctgcttcggctggctcgcgttccgttcccgggttaccggcgtgtatctgtcgatcatcacgcaggcgatgacctatgcgctgctgctcgctttcttccgcaacgacttcggcttcggcggcaacaacggcctgaccgacttcaaggatatcctcggcttcaacgtgcaggcggagggcacccgtgccgcgctgttcgcgctgagctgcctggcgctgatcataggcttcctgatctgccgcgccatcgtctcatccaagctgggcaaggtgctgatcgcggtgcgtgatgcggaatcgcgcacgcgcttccttggctaccgcgtcgaatcctacaagctgttcgtgttcacggtgtcggcctgcatggcgggcgttgccggcgcgctctacgtgccgcaggtcggcatcatcaatccatccgagttcgcgccgggcaattcgatcgaggcggtgatctgggtggccgtcggcggtcgcggcacgctggtcggtgcggcgctcggtgccgtggtcgtcaactatgccaagacgttcttcacctctggcgtactggcgccgtactggctgttcatgctgggcgcgctgttcatcctggtgacgctgctgctgcccaggggcatcgtcggcaccttcaatgcgtggcgggactcggcgcgggaaaagcgcaccgcagcagctgccgcgagcgccgcggctgaagacggcatggtccaaccgaagatggcggagtaa

SEQ ID NO: 6010 - DNA, 1596 bp, BradyrhizobiumColbertium
ttgtccgcgcgtctctattcgctcgcgctcacgctattcctgatcgcgttcgcgctgccggccctcgccggcccgttcgaggatgcggtcgccaagttcgccaatgacgatttttccgacacggaagaggcgatcggtgtgatcgcgggcagtggcaacaagctcgcgttccccatcatcagcgcgctccaggacggccgcctcatggccgatcccgacagcaagaaggtctacgtcaccggcgccgacggcaagtcgatcgacgccgcgagcggcgaggccgttgccagcgttcccgacagtgcgagcgcggttcgcctcaacaaccggctgcgccgcagcgtcgacgccgcgatcggcagcctgacgcttcagtcaccggacctggggacgcgcctgcaggccgcgcagtccgtcttcaagtcgcatgaagagaccgcgctcgaggcggtcgatgccgcgcttgccaaggaaaccaacagatccgtcaaggccgccctcggcgaggcgcgcgccgcgatcctgctgttcaagcccgacgcgtccgaggtcgagaagctcgaggcggtcgcgacccttaaggcgcgcggcgaccaggacgcgctggcgcttctcaccggcatgggcgaccagccagccttggtgaccaaggccgccgcaagcgcgatcgcctcgatccagaactcgctcgcagtctggtccatggtgcagaacgcctggtacggcctttcgctcggttcggtgctgctgctcgccgcgatcggcctcgccatcaccttcggcgtgatgggcgtcatcaacatggcgcatggcgaaatggtgatgatcggggcctataccaccttcgtagtgcaggaggtgatccgcagtagctatcccggcctgttcgactattcgcttctgatcgccgtgccgctcgcgttcctcgtcgccggcgccatcggcgtcctgatcgagcgcagcatcatccgcttcctctatggccgtccgctggagacactgctcgcgacctggggcctgtcgctggtgctgcagcaggccgtgcgcacgatgttcggcccgaccaaccgcgaggtggggaatccctcctggatgagcggcgctttcgagctcggacagattaccatcacctataaccggctctggatccttctcttcacgctcgcggtgttcgcgatcctgctcgcgatgctgcgctacacggctctcggcctcgaaatgcgcgcggtgacgcagaaccggcgcatggccgcctcgatgggcatcgccacatcgcgcgtcgacgccttgaccttcgggctcggctcgggcattgccggtatcgccggggtggcgctgtcgcagatcgacaatgtcagccccaatctcggccagagctacatcatcgacagcttcatggtcgtggtgttcggcggggtcggcaatctctgggggactctggtcggcgccttcacgctcggcatcgccaacaagttcctggagccggtcgccggtgcggtgctcggcaagatcgcgatcctggttctcatcatcctgttcattcaaaagcgcccgcgcggactcttcgcgctcaagggccgtgcggtggaagcatga

SEQ ID NO: 6011 - DNA, 1329 bp, BradyrhizobiumColbertium
atgtttaacaaatccactcacgatatagcggcctcatttagccgccgcggcgtgctcgccgcgaccgccggactggtgcttggtctggcttcattgactggcgcgaaagccgcggacgacaccatcaaggtgggcgtgctccactccctgtccggcacaatggcaatcagcgaaaccacgctgaaggacaccatcctcttcctgatcgacgagcagaacaagaagggcggcgtgctcggcaagaagctggaagccgtcgtcgtcgaccccgcttcgaactggccgctgttcgccgagaaggcgcgcgagctgatcaccaaggacaaggtttcggtcgtgttcggctgctggacctcggtgtcacgcaagtcggtgctcccggtcttcaaggagctgaacagcatcctgttctatcccgtgcagtacgagggcgaggagagcgagcgcaacgtattctacacgggggcggcccccaaccagcaggcgatccccgccgtcgactatctgatgaaggaagagaaggtgaagcgctgggtgctcgcgggcaccgactacgtctatccgcgcaccaccaacaagatcctggaagcctatctgaagtccaagggtgtcgcccaggaagacatcatgatcaactacacgccgttcggtcactccgactggcagacgatcgtggccgacatcaagaagttcgggtcggccggcaagaagaccgcggtggtctcgaccatcaacggcgacgccaacgttcccttctacaaggagctcggcaaccagggcatcaaggcaaaggacatcccggtcgtcgcgttctcggtgggtgaggaagaactcgccggcatcgacaccaagcccctggtcggccacctcgctgcctggaactacttccagtcgatcaagaccaaggacggatcgaacgagaagttcatcaaggactggcaggcctacaccaagaacccgaagcgcgtgaccaacgatcccatggaagcccacgtgatcggcttcaacatgtgggtgaaggcggtcgagaaggtgaagtcgaccgatccggacaaggtgatcgacgcgcttcccggcaccgaggcgccgaacctcaccggcggcgtgtcgaagatgctgccgaaccaccacattaccaagcccgtgttcatcggcgagatcaaaggcaacggccagttcgacgtggtctggaagaccccgggcctcgttccgggcgatgcctggtcgaaggagctcgacggctccaaggatctgatcggcgactgggtcggcaagaagtgcggcaacttcaacaccaagaccaacaagtgcctcggttcgggttcctga

SEQ ID NO: 6012 - DNA, 1305 bp, BradyrhizobiumColbertium
gtgctgtcgccgactcgcgagctgtccggccagatcctcgacagcttcaacgcctatggccgccacatccggctgtcctcgacgcttgccatcggcggcgtaccgatgggccgccaagtccgcgcgctgatgcagggcgtcgacgtcctggttgccacgccggggcgcctgctcgacctcgtgcagagcaatgggctaaagcttggaagcgtcgagttcctcgtgctcgacgaagccgaccgcatgctcgacatgggcttcatcaacgacatccgcaaaatcgtcgctaagctgccgatcaagcgccagacgctgttcttctcggccaccatgccgaaagacatcgccgagctcgccgatgccatgcttcgtgatcccgcccgtgtcgcagtgaccccggtgtcctcgaccgccgagcggatcaaccagcgcatcctccaggtcgatttcacggccaagccgtccttcctcgccaagctgctgaaggacgagcccgtcaaccgggcgctggtcttcacccgcaccaagcacggcgccgacaaggtcgtaaagacgctcgagaaagcggggatccccgccaacgccattcacggaaacaagtcgcagaaccatcgcgagcgcacgctcgcccagttccgcacgggcgagatccgcaccctggtcgccaccgacattgccgcccgcggcatcgacgtcgacggcatcagccatgtcatcaatttcgacctgcccaacgtgccggaaacctacgtccaccgcatcgggcgcaccgcgcgcgccggggccgaaggcaccgcgatctcgctggtcgcaggcggcgaggagctcagctatctccgcgacatcgagcggctgatccgcgtggcgctgccgcgggaggaccaccgcaccgacgccggccgccgcgatgccggccccgccccgtcacagcaacggcaaggacggccgggcggccgcccgggccagcgtccgcagggcgcacgccacggtgacgggcggcgttccgacgaaaggcatgccgatggccgccaccatggtgccggcaagcagggcgacggaaggcccggcgagggacggcacggcgaggcaaggcacgttgacggacggcccggcaccggcccgaatgcttcgaaggggtctcgccgccgccgctccggtggtaagatgcattcatcgcctgtcgaccgtccggaacaacgttccgcgcatagcgccgggacgcctgatgggatacaaggcgttgcctttttgcgccgcgagagtcggccaagcagccaaccgaaccgcaaaccctattcgcactag

SEQ ID NO: 6013 - DNA, 288 bp, BradyrhizobiumColbertium
atggctaaggaagagctgatccagttcgaaggactggtcaccgaaatcctccccgatgcccgctaccgcgtgcagctcgacgccggacacgagatcgttgcctataccgccggcaagatgaagaagaaccgcatcaagacgctggcaggagaccgcgtgacggtggagatgtcgccctatgacctcgagaagggtcggctgattttccgtcacaaggacgagcgtcccagcacggcgggcgggccaccccgtcccgggcagcgcggcggccagttccgccgtcgctaa

SEQ ID NO: 6014 - DNA, 213 bp, BradyrhizobiumColbertium
atgagcatgggaaccgtgaagtggtttaacgcaaccaagggcttcggattcatccagcccgacgacggcggccaggacgtgttcgttcacatcagcgccgtggagcgcgccggccttggctcgctgcgcgaaggccagaagatctcctatgagatcgtggctgaccgccgctccggcaaatcggcggcggacaacctgcgcgccgccggctga

SEQ ID NO: 6015 - DNA, 633 bp, BradyrhizobiumColbertium
atggatctgagcggaccgatgcagacgattgcgaatatctggaggaatgcacgttgctccatgggcgagttcgttgccgacaagcgcgcactcgcggcgaccgaattcgcagtcatcgtaccgctgatgctggtcatgttcttcggcaccgtcgaattttcgtccgccgtagcgatcgaccgcaaggtcacgttgattgcacggactctgtcggacctgacgtctcagtcgacgaagctctacgacgccgacatgcagaacactttcaccgcgagcatctcggtcgtcatgccttacgacgcttcgctcgtgaagggcacgatctcgcagatctacatcgatgccaatagtatcgcgacggtccagtggagcagggccggcaccatcgcgagcggcgcgacgcaagctacgctggcgacctcggctcggaatgccggcgacaaggtcacctcgatgatccccccgacgctattgattccgtcgagctatctcatcctcagcgaggcgagctacacctacaccccgaccgtcggatacgtgttgaagtcgagtatcaccctcagcgatctttcctacacgcggccgcgccaggtcagctgcgtgccctacaacgacataccgtcgacgtgttga

SEQ ID NO: 6016 - DNA, 582 bp, BradyrhizobiumColbertium
atgccatcgcatgcacctaccaggttcacgctccggaaagcgctggcccggtttcgcggcaaccgccgcggctccgcggccgtagagtttgcgttggtggcgccgatgttcttcgggctgttgttcgccattatcgagacggcgctcgtgttcttctcgggccaggtgctcgagacgatcgcgcaggactccgcgcgggcgattctgaccggccaggcgcaggcacagggcggctcggtggcggcgtgtcagaccgcgcccaacgcggttacggcatgcgatcagaccacgttcaaggcctttgtctgcagcaagatcccggcgttgttcgattgcagcaagctctacgtcgacgtggtgagcacaagttccttcgggacgctcaacctgaccagctacggcaattcctgcaatttcaacccgaccggcatgcagtacaatgccggaggctccggccaggtggtcgtggtgcgcctgttctatcagtggccgctcgtcgtcaccggcctcggctacaacatcgggtgcagcaacaagcggctgctggtggcgaccgctgcgttcaagaacgaacccttctga

SEQ ID NO: 6017 - DNA, 489 bp, BradyrhizobiumColbertium
atgctgcgccgtcatgcgcgcgtctgtcttctggttgccgctgcggcgctggcttggccggccgccggccttgccgagcccaccgtcgacaccatcgccgtcaatgtcgatcaggccaagctggtacggctgcccggcaaggtggcgaccatcgtggtcggcaatcccctgatcgccgacgtcacgctccagccgggcggcatgatcgtcgtgaccggaaagggttatggggccaccaatttcatcgcacttgatcggggcggtgagattctggtcgaccgccagatccaggtcgaaggtccgagcgaccggctcgtcaccgtctatcgcggggtcgagcgcgaatcctacagctgcgcaccgctttgccagcgtcgcgtgaccctcggcgacagcgacacctacttcaacaacaccatgagccaggccggttcgctgagcagcagtgccagcgctggcggtgccggcgcggccgccaaacccaactag

SEQ ID NO: 6018 - DNA, 813 bp, BradyrhizobiumColbertium
atgcaagtcgccctgatgctcggcgagaccatcgtgaaggtaatccccgtcaccatggtgctcgcggcggtcttcaccgtgctggagcatttctgggcgtgcaatcccggcgcgccatggtggcgcaaacgggagatcatcaccgacatctgctactggttcttcgttccggtgttcgcccgcaccatgcggatcgggcttctgatcgtcggcgccggcgtcatcttcaacatccatgaccccgacgaactcatcgccttctacgacaatggccatggcccgctggcacagttgcctctatgggtgcagggcctgctgttcctggtcctgtccgacttcatgctgtactggctgcatcgggtctttcacgacggcggcttttggaagtatcacgccattcatcattcctcggaggaaatcgggtggatctccgcggcccgcttccatccggtcaatctcttgctcgggacgatcagtgtcgacgtcgtgctgctgatggccggtatctccccgaacgtcatgatctgggtcggcccgttcaccacgttccattcggctttcgtgcacgccaacctgaactggaccttcggaccgctcaagtatgtgctggcgacgccggtgttccaccgctggcaccatacttcgcttgaagagggcggcgacaccaacttcgccgggactttcccgatctgggacgtgctgttcggcacgttccgcatgccggaggggaagctgccgcaggattacggcaaggacgaagcgaccatgccgaaggagatcggcggccagctcgcctatccgttccgccattag

SEQ ID NO: 6019 - DNA, 165 bp, BradyrhizobiumColbertium
atgaagaacttgattgcgcgtttcgcgaaggatgaatccggcgccaccgccatcgaatacggcctgatcgccgccggcatcgcgctggccatcatcaccgtcgtcaacagtctcggcaccacgctgaacagcaagttcacctcgatcagcacgtcgctgaagtaa

SEQ ID NO: 6020 - DNA, 147 bp, BradyrhizobiumColbertium
gtggcgttgcacaagttcagaaccgatgccgcggtcgcggcgaacgagccgagggcggcgcaggccggctcgccggcttattggatctgcctcgcgctgctgcttgcgacggtcgcgctcgccgcgcgcattgccatcttctggtag

SEQ ID NO: 6021 - DNA, 525 bp, BradyrhizobiumColbertium
atgatcctcgaccttgcgcgccttctgctcttcccggcccttatggcgttcgccgccgcgagcgatctcttcacgatgacgatctcgaaccgggtgtcgctattgctggtggcaggcttcttcgtgctcgccttcgccggtggcatggcaccttacgaaatgctcagtcatgtcggcgcgggcgcggttctcctggtcgtagccttcacctgcttcgcgatgggctgggtcggcggcggcgatgccaaggtcgcggcctccgtcgcgctctggttcggctttgcacatctgacgaacttcctgctctacgcgtcgctgttcggcggagcgctgacgctgctcctgctccagttcaggcaatggccgctgccctacgggctggcgggtcaggcctggctcgcgcggctgcacgccaaggaaagcggcattccctacggcatcgcgctcgcgctgagcgcgttgatggtctatcccgagaccgaatgggtgaaggcgatcgacctcgctcacctcgcactgcgctga

SEQ ID NO: 6022 - DNA, 798 bp, BradyrhizobiumColbertium
atgaatagggcacgcatagtcgtcctgaccgtcgccatcagcgccggcggtgtcgccgcgtacctggcgagcggcaccgacaattctgcgccgcctccgcttccggccgcacagctgccgacagtggacgtcctcgtggccaagaacgacatcggcctcggtcagaccgtgaagccggaagacgtgcaatggcagacctggcccgccgcgactgccagcgccacgttcatccgccgcaacgagcgtcccgagggggtcacccaagtggccggctcgatcgcgcgcgcgccgttcatccagggtgaaccgatccgcgaccagaagctggtcaaggccgagaactccggcttcatggccgccatcctgccctccggcatgcgggcgatctcgaccgagatctcgccggagacgggcgcaggcggcttcatcctgcccaacgatcgcgtcgacgtcattctcacgcgacggttgaagaacccggaccagagcagcggcgcgcccgacgtcgtgacctccgagatcatcctggccaacatccgcgtcctggcaatcgaccaggcgcccaaggaaaaggatggccagaacgcggtgatcggcaagaccgtcaccctcgagctcactccgtcgcagaccgcaacgctctccgcggcgcggcagagcggcacgctgtcgctggcgctgcgcagcatcgtcgacgtcaagatgagcgagatcacgctcgatgactccgcgcagaagcaagagggcgtctcgatcattcgctacggcattccaagtcaggcggctaaggcacgatga

SEQ ID NO: 6023 - DNA, 1218 bp, BradyrhizobiumColbertium
gtggtgcgttcggcgcaacgcgcctatatcatcggcgccgcggtcggccagaccaacatcgtattcttcgattccgccggtcagcagattgcggcctatgacatcgcggtcaagcgcgatctcaacggcgcacgggccgcgctgaagcagatcctgcccaattcagacattcagatcgatggtctcggcgacggcatcatcctgagcggcacggctgccaacccgatggaagcgcagcaggcgaacgagctcgccgcccgcctggccggcggcgtcgacaaggtggtgaactccatcgtggtgcgcggccgcgaccagatcatgctcaaggtgacggtcgccgaggtccagcgcaacatcgtcaagcagctcggcatcgacctctccgccaacctcaactacggcacctccgtggtgagcttcaccaattcgaacccgttcacggcctatggccgcaacctggtggacggcaacaatctgacgacgaagttcggcgcgacgccgtcggtgcaggccaccctgcgagccatggagaccgcgggcgtgatccgcacgctggccgaaccgaacctgaccgcgatatcaggcgaatcggcgaccttcattgccggcggtgaatttccggtccccgcaggctattcgtgcgatcccgtcacccacgtctgtacgacccagatcagcttcaagaagttcggcatctcgctgaacttcacgcccgtggtgctgagcgagggcaaaatcagcatgcgggtgatgaccgaggtctcggaactgtcgaacgaaaatgcaatcacgctgtcccaggccgtgacctcgacgtcggtgaactcgctgacggtgccctcgatcaggacgcgccgcgcggagacctcgctggaaattccctccgggggcgccatggcgatggccggcctgatccagcagcagaccaagcaggccgtcagcggattgcccgggctgatgcagctcccgatcctcggcacgctgtttcgcagccgcgacttcgtcaacaacgcgaccgagctggtcgtgatcgtgacgccttacgtcgtgcgcgcggtggcgccgaaggacctgtcgcggcccgatgacggcttcgccccgcctgcggatccgcaggcccagctgatcggcaacatcaaccggctctatggcgtgcccggacggaccgagccggccaagaactaccgcggcacctacggcttcatcaccgactga

SEQ ID NO: 6024 - DNA, 735 bp, BradyrhizobiumColbertium
atgaacacaagacgaccccagcttcgcaagcgcgccatccgcctcagtggcgcgctcgtcggcatggctctcgtgctcggcggctgccggcacgacgaggtcgttacggcctccattcctgacgattacaagcaacgtcatccgatcgcgatcgaggagcagaaccgctcgatcgtggtcttcgtgggccatgcccgcggcggtttgaccgccgcccagcgcgccgacgtgatgggcgtggcctcgacgtggttgcgcgagggcaccggcgccattcatatcgacgtgccgtcccatacgcccaatgcgcgtccggtcgcggacacgatgcgcgagatccaggcgatcctggcggcggcgggcgttccaccgcgcggcgtcagcgttcgcccctatcagccggaagacaagcgcttcctgccgccgatccggctcacctattccaagatcgccgcggtcgccggcccttgcggcctgtggccggaggacatcggcccctcgatgaagaacaagcgctggttcgagaacaaggactactacaattacggctgcgcctatcagcgcaacctcgcggccatggtcgacaatccgtcggacctcgagcagccgcggcccgaaactccatcgtacacgccgcggcgcatcaccggtttcgagaagtatcgcaggggaacgacgacggcgaccacctatcctgaggccgacagggccaaactcagcgacaccggcagatga

SEQ ID NO: 6025 - DNA, 1269 bp, BradyrhizobiumColbertium
atgatcagctacgcgcgtcagacacacgaagagcagcctgcagcagctccgccgccggtcgaggagcatatcgcgcctgcgccgcgcgtatcggtccaggccttctgcgagaccgtggagactgcggccgcggtacagtcggccggcgaggatcgccgcctcggcaaggctcacctgaagatccagataggcggcatggcggccgcgatcgaagcttatcgctcggcccccacgccgaacgtgatcgttctcgagagcgacggccgcagcgatctcctgagcgggctcgaccagctcgccaccgtgtgcgacgccggcacccgggtggtcgtgattggccgcatcaacgacgtcatgctgtaccgcgagctggttcgccgtggtgtcagcgactacgtgctcgcgccggtcggcgcgatcgacgtcgtgcgctcgatctgcaacctgttctccgcgcctgaggccaaggcggtcggtcgcatcatcgcggtggtcggcgccaagggcggcgtcggggcttccaccatctctcacaacgtggcctgggcgatcgcgcgcgacctcgccatggatgccgtcgtcgccgatctcgacctcgccttcggcaccgccgggctggactacaaccaggatccgccgcagggcattgccgacgcggtgttctctcccgaccgcgtcgataccgctttcatcgaccgcctgctgtcgaaatgcaccgatcacctcagcctgctggcggcccctgcgacgctcgaccgggtctacgatttcggcaccgatgctttcgacgccgtgttcgacacactgcgctccaccatgccctgcatcgtgctcgacgttcctcatcaatggtcgggctggaccaagcgcgccctgatcggagcggacgacattctgatcgtggccgcacctgacctcgccaatctgcgcaacaccaagaacctgttcgacttgttgaaggccgcacgtcccaacgaccgcccgccgctgtactgcctgaaccaggtcggcgtgccgaagcggccggaaatcgcggctgcggagttcgccaaggcgatcgaaagtcagccgatcgtctcgatcccgttcgagccgcagatcttcggctcggcggccaacaacggccagatgatcgcggagatctccgccaatcataagtcgatcgagatgttcctgcagatcgcccagcgcctcaccggccgcagcgagaccaagaagcagaagtcgtccctgctttcacctctgattgacaagttgcggggaaaataa

SEQ ID NO: 6026 - DNA, 1470 bp, BradyrhizobiumColbertium
gtgttcggtaagcgtagcggaacagacatcgattttcgggcgcccaagcccggcgccgtgtcgcccgagccctcccaggctccggcgccgacggtgccgcgcgccccgccgccgccggccgtcgcctcgccaccgcttgctcctgccaaggccccgccgcctccggccatggagagccggcgttcggacaattactacgaggtcaaggcgaccatcttcggcgcactgatcgaagccatcgatctcgcccagctcgcgaagctcgattcggaatccgcgcgcgaggaaatccgcgacatcgtcaatgagatcatcgcgatcaagaacatcgtgatgtcgatcgctgagcaggaggagctgctcgacgacatctgcaatgacgtcctcggctacggcccgctcgaaccgctgttgtcacgcgatgatatcgccgacatcatggtcaacggcgccaacaccgtctacatcgaggtcggcggcaagatccagcgcaccggcatccgcttccgcgacaaccagcagcttctcaacatctgccagcggatcgtcagccaggtcggccggcgcgtcgacgaatcctcgccgatctgcgacgcacgtctcgccgacggctcccgcgtcaatgccatcgtgccgccgctgtcgatcgacggccccacactcaccatccgcaagttcaagaaggacaagctgacgctggatcagctcgtcaagttcggcgcgatcacgcccgagggcgccgagatcctccagatcatcggccgcgtccggtgcaacgtgctgatctccggcggtaccggctccggcaagaccacgctgctcaactgcctcacgaattacatcgagcacgacgagcgcgtcatcacctgcgaggacgctgccgagctccagctgcagcagccccacgtcgtgcggctggaaacccgcccacccaatatcgagggcgagggccaggtcaccatgcgcgaattggtgcgcaactgcctgcgtatgcgccctgaacggatcatcgtcggcgaggtccgcggccccgaggccttcgacctgctccaggccatgaacaccggccatgacggctcgatgggcacgctgcacgccaacaacccgcgcgaagcgctgtcccgctgcgaatccatgatcacgatgggcggcttctctctgccctcgcgaacgattcgcgagatgatctgcgcctcgatcgacgtcatcatccaggccgcacgcctgcgcgacggttcccgccgcatcacccacatcaccgaggtgatgggcatggaaggcgacaccatcatcacccaggacatcttcctctacgacatggtcggcgaggacgccaacggcaagatcatcggccggcaccgctcgaccggcatcggccgccccaagttctgggaacgcgcccggtactacggcgaagagaagcgccttgccgccgcgctcgatgcggcggaagtcgctccgaagacttaa

SEQ ID NO: 6027 - DNA, 978 bp, BradyrhizobiumColbertium
atgaacatgcaggtactcgctctcgccttccttgccaccgcggcggtcggcggcatcgcctgggtcttcctctatccgctgctgtcgggagaacggaaggcggagagccggcgcgcctcggtcgcgcgcgccgaggcgcccgcggcccgtcaggccgagaagacccagcgttcgcgccgcgagcaggtcgagacgacgctcaaggacctggaggcgagacgcgcgcaagagaagagcgtgccgctcagcgtgcgcctgtcgcaggccggactcgactggacgccgcagaagttctggatcgtgtccgccgtcgtggccggggtgttctttgcaggcgctctgttcgccggcggcggcctgatcggcgccgccggcctcgcttttgccggcggtttcggcctgccgcgctgggcactcggcttcctgaaaaaccgtcgcgaagccaagttcctggctgcgctgccggacgcggtcgacgtgatcgtccgcggcatcaaggcgggcctgcccctgttcgaatcgatcaaggtcgtggccgccgacgcgcccgagccgctgcgcagcgagttcctgacgatcatcgagacgcaggcgatcggcatgccgctgggcgaggcctgcgcacggctctacgaacgcatgccgctgccggaggccaatttcttcggcatcgtggtgtcgatccagcagaagtcgggcggcaacctctccgaagcgctcggcaacctctccaaggtgctgcgcgaccgcaagaagatgaaggagaagatccaggcgatgtcgatggaggccaaggcttccgccggcatcatcggctcgctgcctccgatcgtgatgttcctcgtctacctcacgacaccgcaatacatctcgcttctttggacccatcccaccggacagctgatgctggtcggctgcgtcatctggatgtcgatcggcatcatggtgatgaagaagatgatcaacttcgatttctga

SEQ ID NO: 6028 - DNA, 975 bp, BradyrhizobiumColbertium
atggtcgaattcctcgtctcaaaactgcacgacgtccgcttcatgacgatgctgctcgcggccatcgccgccagcgccaccgtgtacacgctggtgatgccgttgttcgccggcgagggcctctccaagcgcatgaaagcggtcgcgagcgagcgtgagcgcatccggcagcgcgagcgtgagcgtctccacaagagcgaaaaggtctcgctgcggcagacgccgaagcaactcgtctccaaggtggtggaagacttcaacctgaccaagtggctggcgcaggaagctgctcgggacaagctcatcatggccggctaccgcggccaggcaccctatatcaccttcctgttcgcccgcatggtcgccccgatcgtgctcctgatcggctcggtcctctacgtcttcttgatcgcgcgcttggaacagccgatgccgatcaagatcggcatctgcgtcggcgcggcctatctcggcctccaggccccgatgctgttcctcaagaatgcgatttccaaacgccagctctcgatcaagcgggcttttcccgacgcgctcgacctgctcctgatctgcatcgaatccggcatgtccgtcgagatggcgttccggaaggttgcgaccgagatcgtgggccagtcgatcgcactgtcggaggagttcactctgaccacggccgagctctcctatttgcaggatcgcaaggtcgcctatgagaacctggcacggcgcaccgggctcgaaggcgtcaaatcggtgtgtctcgcgcttcagcaggcggaacgttacggcaccccgctcggtcaatccttgcgcgtcatggcacaggagaaccgcgacatgcgcatgaacgaggcggagaaaaaggccgccgccttgccgccaaagctgacagtgccgatgatcctgttcttcctgccggtgctattcgtggtcattctcggaccgaccggcatcaagatctcggagatgcaatga

SEQ ID NO: 6029 - DNA, 741 bp, BradyrhizobiumColbertium
atgtcgaagctctccgaagcgacaggctccgtcggcccccgggccgaggcggcttccgccgatcgtgcgccggccgatccagcgcgcgccgtcgaagcctatggcgagcgctaccgggccaatcccaaggatgccgacgccgcgctcgcctatggacaggccctgcgcgccaacggtcagcgtgcacaggccgccgctgtgctcgagcaggcgaccatcgccaatcccggcaacaaggcgctgctggcccagtacgggcgcgcgctcgccgacaacggcaatttcaagcaggccttcgacgtcctgtcgaaagcgcattcgcctgacaatccggactggcgcctgctttcggtacagggcaccgcgctggatcagatgggccgtcatgaggaggcgcgatcctattacgcgagcgcgctgaagatcgcaccgggtgatcccggcgtgctctccaatctcggcctgtcctacatgttatcgagagagctgccgaaggccgaagagtcgctccggcaggcctacgcctcgccgcgtgcgagtgcccgggtgcggcagaacctcgccttggtgatcggcctccagggccgcttcgcggaagcggagagcatcgtgaaggcggacctgccaccggacgaggcggcggccaatgtcgcctatctcaaggacatgctcaggcgcggcgactccccgcgcggtgcaccgaagcggacgccgatcgcttcgctgagccaacccgattga

SEQ ID NO: 6030 - DNA, 1503 bp, BradyrhizobiumColbertium
atggatagatcgttcgttattgcgcatatctccgacctgcatctggacgggtcgggccggcagcttgcgagcatcgagacactcacggccgcgattcgcgagaagatggcgggtgtcgccgatgtccccgaccgtatcctgctgatcacgggggatctggtggacgagccgacgccgcgtgcgctcgacgaggcgctggccgtcattgcgtccttcaggcagaccgggctgttcaccgacatccaggccgttgccggcgatcacgatgtcaagcgcccgagccaacgcgcaggccgtcacgacgcctacgattacctgcatttgccgcgggtcgcgaagaacgtctactaccggcaggccggcctcgacctggtgttgctcgattccaatcgcgcgagtctgatgacgctcgcgagcggcaaggtcgacgaaggcacatacaggacaacggtcgcagactccgcccggctgagcgccgagcttgcgggcagcgtcggttctgcagggcatgccgattatgccgagccggcggaaaaccttgtgcgtgtgctggccctgcaccatcatcccctgccgcaggcgaccggcgaaggaaagcgctttctcggcgcgcctgacgagccgctgatgtacctcgccgcacccgccacgttcctcgaggccgccacatcgctcaatgtggatctggtcctgcacggtcatcgccatgtcgagggattgacccgctattccatacccgatccgcgcgcgacggggagcgagagcgatgaggcgttctggcgcacgatctacgtgctttgctgtccatcctcgaccggtcaagccggcgacgatgccggcttcaacctcatccatttcggccccgcggtccgtgccgggggcacggagcaccgcttctcgatcacccgctattcaaggttacgcaacgatgccgccttcaggccactcgactcgaacctgccggacggcgtcatcgggttgccggctgggcgggactttacccgtgatcccgccgtccagtcgacgatcgacgttgcctcatccgtttcgttgaagcgggatcagatcgcggcgatcacccgccggttgttcatgcgtcgaagcttctatgatgaagccgagccggactggccggctgcgctctatacctatgtcgtctcgtctcaagcctgggcgggcctcgaaggcaaggtcgcgagatccaggtcgaaatccgtcattgacacgctcgccgcggtgagaacgcttctcagccgattgatcgagcagtccgccgacgtgctcggtatcgatcgcgctcagctcgatgaactccatgggaggggcttgatcaaccgcgatgactttctccgcgagctgccgaggctgtcttgtgagggcaccgacgttcggcggcgggcgcggcagaggcagcgattgcttcgggatctcgaccaacaggtgagggcgctcggcctcgatctggacctcggcggtgaggtgccgccaagttcgccaccgtaa

SEQ ID NO: 6031 - DNA, 336 bp, BradyrhizobiumColbertium
atgcaaacggacgagacttcgcagagtttcgctgccgctgcaatcagctttgccgtcaagctgccaggttccggggcgcggccgcaccactatcgaatccttgcgctccttgccggccgctggtcctccacttccatgaccgctccgttcatgcgcggtctgatacgccagacaagcgccttgacgaaatccacaaccggcctgccccggaaaagtcggtcgcgcgaggcacaaccgctgcagatcgcacgaatctcgcgcgagctggcgctggaagagcacggcctcaggcctttactagcgtatcggttgtggcattatccgcgaacattttag

SEQ ID NO: 6032 - DNA, 1413 bp, BradyrhizobiumColbertium
ttgcataacccgctcgatctgacgactccggacccgccaatgccttctgtcttcgagacatcgtccaccgccaccccgatcaccttcgtcaccagatcgagctgggatcgcgtcgccgaaacgctgccgccggtgcaacggcagttcgcgaccgtcagcagctttgccggaaagccaggcagttctctggcgctgcctgcgcccgacgggacgattgcgcaggtgctgttcggcctcgaggatgagggtgcaagatcgcgcgacctgttccggcccggcgcgctgcccggccttctgccgccgggcacctatcgcttcgccaatgcgccgcatgacacgcggctggcggcgctcgctttcacattgggatgctatcgcttcgcccgctaccgcaaggctgatcgccccgaggtccggctggtgccgcccgacgacgtcgacccggccgagatcgagcgcattgctgatgccacaatgctcgcgcgcgacctgatcaacacgccctccaacgacatgggcccggaggagcttgccgccgccgcgcaggcgctcgctaccgagttcggcgcaagcttcacctgcaccatgggcgaggaattgaggaccggcttcccgctgatccatgctgtcggcatggcctccagccgcgcgccgcggctgatcgacatcggctggggcgatcctgaacatcccaaggtgacgctggtcggcaagggcgtctgcttcgacaccggcgggctcgacctgaagccgtcgagcggcatgctgatcatgaagaaggacatgggcggggccgccaacgtgctcgcgctcgcgcgcatggtgatggatgcgaagctgaaggtgcggctgcgcgtgctgattccggcggtggagaacgcggtcggcggcaatgccttccgccccctcgacatcttcacctcgcgcaagggcattaccgtcgagatcggcaataccgacgccgaaggccggctcgtgcttgccgacgcgctggcgctcgccgacgaggagaaacccgacctgctgatcgacctgggcaccctgaccggcgcggcgcgcgtcgcgctggggccggatttaccaccctattacaccaatgatgagacgctggccgccgacgtcgcgcgctgcgcggtgaaggagaacgacccgctctggcgcatgccgctgtggccggcttacgattcctggctggactccaagacggcgaccatcaccaacgccccgtcgggcggcttcgccggctcgatcacctgcgcgctgttcctgcagcgcttcgtcgagcacgccaaaagttggctgcatgtcgacatctacggctggacgccatcggcgaagccggcgcggcccgagggcggcgagtgccaggccgcgcgggccatctacgcactcttgagcgagcgctatgcgtga

SEQ ID NO: 6033 - DNA, 855 bp, BradyrhizobiumColbertium
atgcgtgatccaggacgcgatccaaggctgacgccggcgcggggcgacatcgccgcgaaataccttgaaggcaaggtgcaggctgatcgcttcgtcaccggcgaggaattcgaggtggtcgacgcgatcgcatcgctgcgcgagcagccgtcctcaagcgcgatgctgatgacggaggctctgcgcggtgagcgcgtcacggtctacgaccgcaacggcgagggctgggcctggggtcagctcggtggcgatggctatgtcggctggctgccggatgcagcattgatgaagccggcggctgcaccgactcacaaggtaagtgcacttcgcacgtttgccttccccggcccctcgatcaagctgccgcctgcggacacgctcgtgctcggctcaaggctcacgatcgtgcgcgaggaaggggtcttctcggtgacgcgcgaaggaacgttcctgccgaggacgcatctcgcgccgctcgaccggcgcgagtctgatttcgtcgccgtcgccgagcgcttcgtcggcacgccgtacttgtggggcggcaagagcagcctcgggatcgactgctcgggcctcgtgcaggtgtcgctgtcatcggcaggcatcgggtgcccgcgcgacagcgacatgcagctggccggcctcgggcgcgggctggagccggatgagcgcggcagcctggtgcgcggcgacctgatcttctggaagggccatgtcgccatcgtccgcgacggcagcaccatggttcatgccaatgcctatcatatggcgacggtcatcgagccgatcgagcccgcgatcgcgcggatcaggcaggccggcagcgaggtcgtcgcgatcaaacggctctga

SEQ ID NO: 6034 - DNA, 1221 bp, BradyrhizobiumColbertium
ttgctaacgcaggtcggtatccccgagcccgagacgcggctgaagagctatccgcaccagctctccggcggccagcgccagcgcgtcatgatcgcgatggcgctcgccaacgagccggatctgctgattgcggacgaaccgaccacggcgctggacgtcaccgtgcaagcgcagatcctggcgctgctcgccgagatccgctcgcgtctcggcatgagcctgctcttcattacccatgatctcggcatcgtgcgccgcatcgccgataccgtctgcgtcatgaaggggggcgtgatcgtcgagcagggaccgctcgagcaggtcttcaaggctcccaaacatccctacacccgcgacctgctcgcggcggagccgaaacccgatccggcgccgccgcaaccgaacgcgccggtggtgatgtcggccaatgatctgaaagtctggtttccgatcaagcgcggcctgatgcgaaagaccgtcggccacatcaaggcggtcgacggcgtcagcgtcgccgtgcgcaagggtgagacgctcggcgtggtcggcgaatccggctcgggcaagacgacgctgggcctcgcgctcttgcggctgatctcctcggacggccgcatcgtctttctgggcaaggacatccagggcctgcgcttcaaggaaatgcggccgttccgacgcgacatgcagatcgtgttccaggatccgttcggctcgctcagcccgcgcatgtcggtcgccgacatcatcgccgaaggtctctccgtgcatcagccgcagctgtcgcgcgaggagcgcgaggtgcgcgtggtcaaagcgctcgaggacgtcgggctgcagccggacacccgctatcgctatccgcacgaattctccggcggccagcgtcagcgcatcagcatcgcgcgcgcgatcgtgctcgagcctgatttcgtcgtgctggacgagccgaccagcgcgctcgacatgctgttccaggcgcaaatggtcgacctgttgcgcgagctccagcgcaagcgcgagctcacctacatgttcatctcgcacgatttgcgcgtcgtcgcctcgctcgccagccatctcatcgtgatgcgcggcggcaaggtggtcgaggaaggccaggctgccgagctgttcaagaatccgaagacggattatacgcgtgcgctgttcgccgccgcgttccggctggagacggccgggaactgggcggcggcgacgtag

SEQ ID NO: 6035 - DNA, 1182 bp, BradyrhizobiumColbertium
atgacgctggccgccccaaggacgccgatcgaaaccacggcgaaatcgcctctgggcggttcggtgccgatcacgcgcaagccgttcgcgccttcgccgctcaacaggcgacggtggcagaacttcaaggccaaccggcgcggctactggtcgttctggattttcatcagcctgttcgtgatctcgctgttcgccgagctgatcgccaatgatcggcccttcctgatcaagttcgatggccggctctattggcccgccttcgtgacctattcggagacggccttcggcggtgacttcgaaaccgcggccgactatcgcgatccctatttgcagaagctcatcaaggacaagaacggcacaatcgtctggcccctgatccgctattcctacgatactcacaatctcgacttgccgacgccggcaccgtcgccgccgacctggatgttgacggagaagcagtgtcggccggtggtggagaagaaggggctgaagagctgccgcgacctcgaatacaactggctcggcaccgacgatcagggccgcgacgtggtcgcgcgattgatctatggcttccgcatctcggtgctgttcggactttgtctcaccatcgtctcgtccgtcatcggcatcgcggcgggggcggtgcaggggtatttcggcggccgggttgacctgatcttccagcgcttcatcgagatctggaccgcgatcccttcgctctatcttctcttgatcctgtcctcggtgctcgtgcccggcttcttcgtgctgctcggcatcctcctgctgttctcctgggtctcgctggtcggtctggtgcgggccgagttcctgcgcgggcgcaatttcgagtatattcaggccgcgcgggcgctcggcgtctcgaacccggtcatcatgttccgccacctgctgccgaacgcgatggtcgcgaccatgacgttcctgcccttcatcgtgtccagctcggtgatgacgctgacggcgctcgatttcctgggcttcggcctgccgccgggatcgccttcgctcggcgaattgctgtcgcaggccaagtccaatgtgcaggcaccctggcttggcttctccggcttcttctcggttgcgatcatgctgtcgctgttgatcttcatcggcgaggccgtgcgcgacgcctttgatccgcgcaagacgttcaggtag

SEQ ID NO: 6036 - DNA, 1110 bp, BradyrhizobiumColbertium
atgagcgcctatatcgcccgccgcatcctcctgatgatcccgacgctgctgggaatcctctttgtgtctttcgtcgttgtgcagttcgcgcccggaggcccggtcgagcgcgtcatcgcccagctctcgggggccgacaccgggggcacctcgcgcatttccggcggcagcgatttcgcgcagcgcgcgccggggcaggtcggcgccggaggcgatgccatcaactcgaaatatcgcggtgcgcagggccttgatcctgatttcatcaagaagctggaagcgcagttcggcttcgacaagccggcaccggaacgcttcgcgctgatggtctggaatttcgcccgtttcgatttcggcaagagctattttcgcgatgtcagcgtgatccagctcatcaaggagaagctgccggtctcgatctcgctcgggatctggctgacgctgatcccttatctgatctcgatcccgctcggcatccgcaaggcgatgaaggacggcacccgccttgacacctggacctcgaccgttctcgtgctgggctatgccattccgggctttctgtttgcgatccttctcatcatcctgttcgccggcggctcgttcttcaactggtttccgctgcgcgggctgacgtcagacgggtggtcggactttccctggtactggaagatcgtcgattacttctggcatctgacgctgccgctgatcgccatgggtctcggcgccttcaccaccatgacgttcctgaccaagaactcgttcctggacgagatccgcaagcaatacgtcatgaccgcgcgcgccaaggggtgcagcgagaaccgggtgctgtacggccatgtcttccgcaatgcgatgttgatcgtgatcgccggcttccccgggaccttcatccacgccttcttttccggctcgctcctgatcgagaccatcttctcgctggacgggctggggctgctcagcttcgagagcgtgctcaaccgcgactatcccgtggtgttcggtacgctttacatcttttcgctggtcggtctcgtgatcaacctgatctccgacctgacctatatgtggatcgacccccggatcgatttcgaggcgcgggaggtctga

SEQ ID NO: 6037 - DNA, 1902 bp, BradyrhizobiumColbertium
gtgaaggatgtttcccgcatgacgcagatgtcacgccgccatgtgctggccctgggcgttggcggcaccctcggggcgtccattggtgcgccgttgcgcagcgcgcgtgcatcggaaaccgcgaccgagacgcacggcatctcggcgttcggggatctcaaatatcccgccgatttccgccatttcgactacgtcaatccggcggcgcctaaaggcgggacgttctcgctgatcccctccgtgcgcgcctacaaccagtcctaccagactttcaattcgctgaacgccttcattctgaagggcgacggcgcgcaaggcatggacatgacgttttcgccgctgatgctgcgcgcaagcgacgagccggacgcgatgtacggtcttgccgccaagtccgtgcagatatcgccggataagctggtctatcgctatacgatgcggccggaggcgaaattccacgatggcacgaagctcactgcgcatgatgcggcgttttcgctgacgactttgaaggccaagggccaccctctgatcatcgtgcagatgcgtgacttcgtgagcgcggaagccatcgatgatgcgacgctcgtcgtcacctttgccaagggacgcgcccgcgacgttccactctatgttgccgggctgccgatcttttcgaaagcgtactatgcgtcccggccgttcgatgaatcgacgctggatattccgctcggctccggtccgtacaaggtcggcaggttcgaggtcaatcgctacatcgagttcgagcgcgtgaaggactggtgggccgccgatctgccgccttgccgcggaagctacaatttcgacgtcgtgcgctacgagttctatcgcgaccgcgatgtcgcctttgaaggcttcaccggcaagagctatctctatcgcgaggagttcacctcgcgcctctgggcgacacgctatgatttcccggccgtgaaggatggccgcgtcaagatggaggtcgtgcccgacgatacgccgtccggtgcgcaaggttggttcatcaatacaaggcgcgagaaattcaaggacccgcgcgtgcgcgaggccttgatcaacgctttcgatttcgagtggaccaacaagacgatcatgtacggcgcctatgcccgcacggtgtcgcctttccagaactcggacctcatggcgggcgatgcgccgccttcgccggaagagctgaagctgctcgagccgtttcgcggcaaggttccggacgacgtcttcacggcaccgttcacgccgccggtcacggacggatccgggcaggaccggagcctgctgcgcaaggcgcagcaattgctgaccgaggccggtgtggcgatcaaggacggcaaacggatactgccgaacggcgaggtgttcaggatcgagttcctgttggacgagccctccttccagccgcaccatgcaccctacatcaagaatctcgcgacgctcggcatcgaagccaatgtgcgcctcgtcgacgcggtacaataccgggcgcgtcaggatgatttcgatttcgacatgacgatccagcgcttcagcatgtcggcgacgccgggagacgccatgcgctcgttcttctcgtctcaggttgcgaataccaagggctcttacaatttggcgggcatcgccaatccggcgatcgacgccatgatcgagaagatcatggcggctgacagccgcgaggaactgaccgtcgcctgccgcgctttcgatcgcctgttccgcgccggccgctattgggtgccgcaatggtataacaagacgcaccggctggcttattgggatcagtttggtcatccgccgaagctgccgcgctatgccaacggcgtcggtgcgcccgatatctggtggcatgagcctgccaaggcggccaagctcgagcaggcgaaatag

SEQ ID NO: 6038 - DNA, 1902 bp, BradyrhizobiumColbertium
ttggccattacccgacgcgatctcctgctcaccggcactgctgccgcagcgcttcccgtccttggttccgtcgcgggcgttcccgccatcggcccagcgcacgcccaatctcccagtgagcttccctggcgccacgcgctgtcgctatttggcaaggtcaagtaccccgccgacttcaagcgcttcgactacgtcaatccggacgcccccaagggcggcatcgcgcgccagatcgcggttggcacgttcgataatttcaacatcgtggtctcgggtgtgaaggggcaggtcgccggtgccgttgccttcatctatgaatccctcatgacaccctcgcttgacgaggtctcgaccgaatacggcgcattggccgaagccgtcagccatccggacgacttctccttcgtcatctatcgcttgcggccgcaggccaagtggcacgacggcaaaccagttactgcagaggacgtgatcttctcgctcgaatccttcaagaagcatcatccgatgtactcggcctattacagccatgtggtgaaggccgagaaggtcggtgaacgggacgtcaagttcatcttcgatgcccctggcaaccgcgaactgccgcagatcgtcgggcagctcaccgtcttgccgaagcattggtgggaagggacggacgcacagggacgcaaacgcgacgtctccgccaccacgctggaagtgccgctcggttcaggtccctacagggtcaaggagttcgtcgcgggacgatcgatcgcactggagcgcgtcaaggattattggggccgcgaccttcctgcgaatgttggccgcaacaatttcgacgagctgcgctacgaatatttccgagacgccaccgtcgcgatcgaggcgttcaaggccgaccaggtcgattggcgcaccgagaacagcgcgaagaactgggcaaccgcctacgacttcccggccgtgacggataagcgggtgatcctcgaggaattcgtcaatcgcagctcgggcgtgatgcaggccttcgtgccgaacctgcgccgcgccaagttcagcgacccgcgcgtgcgccgtgcgctcaactacgcgttcgacttcgaggagatgaacaagcagatcttctacggccagtacaagcgcatcagcagctatttcgatggcatcgaagacctgatggcaaccgggctgccgcaagggaaggagctcgagatcctcgagacggtccgcgctcaggtcccgcccgaagtcttcaccacggcgtataccaatcccgtcggcggcagtccggaagcggtgcgcgagaatcttcgcgaggcgctgcgcctgttcaaagaggctggctacgaggtgcgggagcgcaagctggtcgacgtcaagaccggcacccagttttcgctggaactgctgaattcggatccgagcttcgagcggatcacgctgttctacaagccttcgctggagcgactcggcattgccgtgagcgtgcggacgatcgatccgacccaatacgagaacaggacgcgcgagtgggatttcgacatcgtcaccaattcatggggcgagtcgcagtcgccgggcaatgagcagcgcgagttctggtcgtccaagacggccgacatccccggctcgcgcaacattgccggtatcaagaatccggcgatcgacaagctgatcgagcgggtgatctatgccaccgatcgcgatgatctcgtcgccgcgaccaaggcgctcgatcgcgtgctgctgtggaatcactacgtcgtaccgcaatggacctataacaaggtgcgcaccgcgcgctgggatcgcttcggccgtccggcggaattgccacgatacggtcagtccggcttcccgttcatctggtggtacgacgcagacaaggcggcacggatcgtaaagaagtcgtga

SEQ ID NO: 6039 - DNA, 555 bp, BradyrhizobiumColbertium
atggactctttcgaactcaacaagattctcggtgccgtgttcggcacctgcctcgttctgctggtgacgagcttcaccgcccaggcgctgttctcgccgaagatgccggaaaaaccgggtttcgagatcgcagtgaagcaggaggccggtcccggcaaggaaggcggcgcagcggccgcgccgtccgagccgatcgagaagctgctccagaccgcctccgtcgagaagggcgcggccgccgccaagaagtgcggcgcctgccacaccttcgagaagggcggcccgaatcgggttggtccgaacctcttcggcgttgtcggcgagcccaagggccagggccatggtggcttcaacttctcggctgccatgaaggccaagggcggcaactggaccttcgacgacctcaacaagttcctcgccaatcccaagggcttcattcccggtaccgcgatgggctttgccggcattgccaaggattccgagcgcgccgatatcattgcctatctgaactcgatgtcggagcatcctcagccgttgcctacggcgtcgaagtag

SEQ ID NO: 6040 - DNA, 741 bp, BradyrhizobiumColbertium
atgatcgatccccgcatcctggtgttgatcccggcccgcatggccgctacccgcctgcccggcaagccgctcgccgatatcgcgggattaccgatgatcgtgcatgtgctgcgccgcgcagaggccgctgcaatcggccgggtcgcggtcgcaacggacaccgcggagatcgcctccgtggtcaccgcgcatggcggcgaggcggtgatgacccgcaccgaccacccctcaggctccgatcgcatccacgaggcgatgcagaagctcgatcccgaaggcaaagcggagatcgtggtcaatctccagggggatttcccaaccatcacggtcgacaatatccgcgaggtgttgccccccctgcaagactcggccgtggacatcgcgaccctggcctcgcagatccacaccgaggaggaggaccttgctccgagtgtggtgaaggccatcggaacctcggtcggcggcaggcggatgcgcgcactctattttacccgcgcgaccgcaccgacgggggacggaccgcgttaccaccatatcggcctctatgcctatcgccgtgctgcgcttgagcgctacgtctcacttccgccgtctcccctggagttgcaggagaagctcgagcagctccgcgcgctggaggccggaatgcgcatcgatttcaccatcgtcgataccgtcccccgcggggtcgatacgccggcggacctggaaaccgcccgcagcatcctttccaattcctga

SEQ ID NO: 6041 - DNA, 858 bp, BradyrhizobiumColbertium
atgagcaagatgaagatcgcattccagggcgaatccggagccaattcccacatcgccatcgtggaggcctatcccgaggccgagccgatgccctgcgccaccttcgaggacgcgctgtcggcgatctcgtcgggcgaggccgatctcggcatgatcccgatcgagaattcggtcgcaggccgcgttgcggacatccaccacctcctgccggcctccggcctctacatcatcggcgaatggtttttgccggtccggcatcagctgatggcggtaaagggcaccaagctcgaagacatcaggagcgtcgagagccatgtgcatgcgctcggccagtgccggcgcatcatccgcaagctcggtatcaagccgatcgtgcacgccgacaccgccggcagcgctcgtgacatctccgagcgcaaggacaagacggtggccgccatcgcctcgcgcctcgccgccaagatctacggtctcgacatcctcgccgaggacatcgaggacgaagcccacaacaccacgcgcttcgtggtgctggcgcgcgagccgaaatgggccacccaaggctccagcccgctggtcacgacgttcgtcttccgggtgcgcaatctgccggccgcgctctacaaggcgctcggcggtttcgccaccaacggcgtcaacatgaccaagctcgaaagctacatggtcgacggcaatttcttcgccacgcagttctacgccgacgtcgagggtcatcccgaggacaagggcctcgcttttgcgatcgaggagctgaaattcttctcgcgcgaattccgcatcgtcggcgtgtatccgggccatccgttccgcgcgacgttcagcgagacgcaggactga

SEQ ID NO: 6042 - DNA, 1017 bp, BradyrhizobiumColbertium
atgattccgctctcagtcctcgacctctcggtcgtcaccaccggcaccaagcccgctgcggcgctgcgcaacagcatcgatctggcgcgccatgtcgatgggctcggctatgtccgctactggctggccgagcatcacaacctcgcctcggtcgcgagccccgcgcccgatgtcatgatcgggcagatcgcggcggtgacgaagcacctgcgcgtcggctccggcggggtcatgctgcccaaccacgccccgcttgtggttgccgagcgcttcaagatgctggaggcgctgtttcccggccggatcgatctcggtctcggtcgcgccccgggcaccgatggcgccacggcttacgcgctgcgcagccggcttgatcgccgcgagggtgacgatttcctggagcggctgcacgagttgatcttgtgggagacccgcgaattcccggcgggccatccctacaacaccgtcgtcgcgatgcccgacgatacaaaactgccgccgatctggctgctcggctccagcgactattcctccgagctggccgcccaggtcggcatgggcttcgccttcgcccatcatttcgcgtcccacgacgcgatcgatgcgatggtgcattaccgcaatcgttttcagccctcagcctggcgtgcgactccgcatgccattcttgcggtcgccgtcattgcggcggataccgacgaggaggcagaaagactcgcctcttccttcgacctcaaccgccttcgtcgtgaccgcgggcagtatcttcccctgcccagcgtggaggaggcgatggcctatccatatacggattccgagcgcgcctcgatcctgcgcaaccgctcgcgcctcttcgtcggcagccctgcgacggtgcagaagaagctacagccgctgattttcgcaagcaagccggacgagctcatggtgatcacggccgtgtatgaccatgaggcgcggaagaagtcctactcgctgctcgcggaggcctttggggccgccaagagcgcggcttag

SEQ ID NO: 6043 - DNA, 912 bp, BradyrhizobiumColbertium
atgactgacgtgacgacgcctgtgacagccaacgggcacctgaagcggcctgcgatctccttcgaattctttccgcccaagaccgaggagatggagcgcaatctctgggagaccatcaaccggctggctccgctcgagccgaaattcgtctccgtgacctacggcgccggcggctccacccgcgagcgcacccattccaccatcgcccgcatcctcaaggagaccgcgctgctgccggccgcgcatctgacctgcgtcggcgccgcacgcggagagatcgacgagatcgtcgaccgctatcacgaggtcggcgtccgccacatcgtggccttgcgcggtgatcccgtcggcggcattggcacgccctattcaagccatcccgacggctaccagagctcggccgagctcgtcgccggaatcaagaagcggcatggcgacatcgaaatctccgtttccgcatatcccgagaagcatcccgaggcgcgcgacttcgacgccgacatcgacacgctgaaggccaaggtcgatgccggcgcgacccgtgccatcacgcaggtgttcttcgataacgacctctacttccgctatctcgaccgcgtccgcgcccgcggcatcgacatccccatcgtgccgggcatcatgcccatgcacaacttcaagcaggcacgcaatttcgtcacccgcgccggcaccaccgtgccggactggttcgccgcgaagttcgagggcctcgacgacgacgccgagacgcgcaagctggtggccgcgaccgtggcggccggccaggtgcagaagctcgccaagcacggcgtcgacaccttccatttctacaccatgaaccgcgccgatctcgtgttcgcgatcagccatttgctcggcattcgcgccaagagcgcccagaaggctgcgtaa

SEQ ID NO: 6044 - DNA, 3846 bp, BradyrhizobiumColbertium
atgaccgtaaccacttcgcccaagcgaaccgccctcctcgctgccgcccgcgagcgcattctcgtgctcgacggcgccatgggcacgatgatccagaacctccagcttgacgaagctgccttccgcggcgagcgcttcaagaacttccaccgcgatctccgcggcaacaacgacctgttgatcctgacccagccgcaggcgatcgaggacatccacgccgcctatctgcgtgccggcgccgacatcgtcgcgaccaacaccttctccacgacctcgatcgcgcaggccgattacgatctcaccgacatcgtctacgagatggcgcgcgaaggcgcccgcctcgccggcaatgccgcgcggcgcgtcgaggcggaagacggcaagccgcgcttcgtcgccggtgccatcgggcccaccaaccgcaccgcatcgatctcgcccgacgtttccaatcccggctatcgcgccgtcaccttcgacgacctacgcaaatcctatggcgagcagatccgcggcctgatcgacggcggcgtcgatctgctgctggtcgagaccatcttcgatacgctcaacgccaaggcggcgctctatgcgatcgccgagatcaccgaggagctcggcatcgacatgcctgtgatggtctccggcaccatcaccgacaagtccggccgcctgctctcgggccagatgccggaggcgttctggaattcggtgcggcacgccaagcccatcaccatcggcttcaactgcgcgctcggcgccgaggacctgcgtgcccatattgccgacatcggccgtgtcgccgacacgctggtgtgcgcctatccgaacgccggcctgcccaacgagttcggccagtatgacgagacgcccgaatatatggcgcgcctgatcgccgagttcgcctgcgacggcctcgtcaatatcgtcggcggctgctgcggcaccaccccggaccatatcgcggcgatcgcggctgcggtcgccccgcacaagccgcgcatggtgccggaaatcgagccacgcctgcggctctccggcctcgagcccttcgtgctgacggatgcgatccctttcgtcaatgtcggcgagcgcaccaacgtcaccggctcggcccgcttccgcaagctgatcacatcaggcgattacaccgccgcgctgcaggtcgcgcgcgaacaagtcgagaacggcgcgcagatcatcgacgtcaacatggacgaggggctgctcgactcggaagcggcgatggtgaccttcctcaacctcgtggccgccgagcccgacatcgcccgcgtccccgtcatggtcgattcctccaaattctccgtgatcgaggccggcctgaaatgcgtgcagggcaaaccggtcgtcaactcgatctcgatgaaggaaggcgaggagaagttcatccttgaggccaagatcgcccggcgccacggcgccgcggtcgtggtgatggcgttcgacgaggtcggccaggccgacacgttcgcgcgcaagaccgagatctgcaagcgcgcctacgacatcctggtgaacaaggtcggcttcccgcccgaggacatcatcttcgatcccaacatcttcgcgatcgcgaccggcatcgaggagcacaacaattacggcgtcgacttcatcgaggccacacgctggatccggcagaacctgccgggcgcgcatgtctccggcggcgtctcgaacctgtcgttctcgttccgcggcaacgagccggtgcgcgaggccatgcactcggtgttcctgtatcacgccatcaaggccggcatggacatgggcatcgtcaatgccgggcagatgatcgtctatgacgacatcgaccccgagctgcggcagacctgcgaggacgtcgtcctcaaccgcgatcccggcgcatccgagcgcctgctcgcgctcgcggagaaattccgcggcaagaagacggaaagcaaggaagcagatctcgcctggcgcgaatggccggtggagaagcggctgtcgcattcgctggtgcacggcatcaccgagttcatcgagcaggacaccgaggaagcccgcaagaagtcctcgcgcccgctcgacgtgatcgagggaccgctgatggccggcatgaacgtcgtcggcgatctcttcggcgacggcaagatgttcctgccgcaggtggtgaagtccgcccgtgtcatgaagcaggcggtcgcttacctcatgccgttcatggaggaggagaaggcgcgcaacctcgcgaacggcatcggcacggagggctcctcgtccgcgggcaagatcgtgctcgcgacggtcaagggcgacgtccacgacatcggcaagaacatcgtcggcatcgtgctccagtgcaacaatttcgaggtcatcgacctcggcgtgatggtgcccgcggcaaagatcgtcgagaccgtgaaggcagagaaggccgacatcgtcgggctgtcgggcctgatcacgccctcgctggacgagatggcgttcttcgccggcgagctgcagcgcgagggcctgaagctgccgctcctgatcggcggcgccaccaccagccgcgtgcataccgccgtcaagatcgacccgagctatcgcgccggaccggtcgtgcacgtcaacgacgccagccgcgccgtcggcgttgcctccgcgctgctctcgccggagaagcgcgaggcctatgccgccgaggtgcgcgccgaatacgccaagatctcggaagcgcatctgcgcgcgcaggccgacaagaagcgtctgaagctggccgacgcccgcgccaaccgggtgccggtcgacttcgccaagagcaagccggtgaagccgaccttcctcggcatcaggagcttcgacgagtacgatctcgccgagctcgtgccgtatatcgactggacgccgttcttccagacctgggagctcgcgggacgcttccccgccatcctcgatgacgccaaggtcggcgaggtcgcgcgctcgctctatgacgatgcgcgcaagatgctcgacaccatcgtcagggagaaatggttccgggcgcgtgcgacgatcggcttctggccggccaatgcgcaaggcgacgacatcgtgctctatgccgacgagagccggaccaggccgattgcgacgctgcacacgctgcgccagcagttggagaagcgcgagggccgcttcaacgccgcgctctccgacttcatcgcgcccgccggcattcccgactatatcggcggcttcgtcgtcacggccgggatcggcgaggatgccgtggccgaccgcttcagaagcgccaatgacgactattcctcgatcctgtgcaaggcgctcgccgaccgcctcgccgaggcgttcgccgaacgcatgcatgcccgcgtgcgccgcgagttctgggcctacgcgccggacgaggcgctctcgagcgaagagctgatcctggagaagtaccaaggcatccgccccgcgcccggctatcccgcgcagcctgatcacaccgagaaggcaacgctgttcgagctgctcgatgccgagaccacggccggcgtgaagctgaccgagagctttgcgatgtggccgggctcgtccgtctccgggctctatttcgccagccccgagagctattatttcggcgtcggcaagatcgagcgcgaccaggtcgaggactacgccgcgcgcaagggcatgagcattgcggaagccgagcgctggctggccccggtgctgaactacatcccctcgcaacaggacaaggccttcgcggcaacgcctgcgaatgacgagccgtcaaacgacctcgcctcgcatccgccgggctgcacctgcgcggtgcacctcgtctggcagaagaagcgcgccggggtgggatag

SEQ ID NO: 6045 - DNA, 630 bp, BradyrhizobiumColbertium
atgttcctgatcggccaatatgattcccccttcgtccgccgcgtcgcgatcgcgctgaagctttacggcatctccttcgagcacaggccgtggtcgaccttcggcgatgccgacaagatcgcgccctataacccgctgcgccgcgtgccgacgctggtgctcgacgacggcgaggcgctgatcgagagcacgatcatcctcgattatctcgacgagctcgttggtcccgaccaggcgatgctgccgcgcggcggcgccgatcgacgcagacacttgcgcatctgcgcgctcgcctccggcctcggcgacaaggcggtgagcctgctctacgagcgcgtgctgcggaaggagcagctcgcgctgtgggtcgagcggtgtcaggcgcagatcgcggatgtgctcgcggtgctggaagccgagcgcgcgggggtgacgacgccgtattggctgggcggccgcatcggccatgccgacgtcgcggtcgcctgcgtcgtccgcttcacccgcgaggcgcatccgcagctgttcgacgcggcacgttatcccgcgcttgcggcacatgccgaacgttgcgaggcattggccccgttccaggagatcgtgcagccgctggcgccgccgaagggatga

SEQ ID NO: 6046 - DNA, 303 bp, BradyrhizobiumColbertium
atgaaatttgccgttgccttgcgcgcgctcgccaacgaacgccgcctgcagatcctggaatggctgcgggatccgcggaagcattttcgcgagcaggccgatggcgacctggtcgaggacggcgtttgcggcttgctgattgccgaaaagctgggcgtcagcgccccgacggtgagcgagcatatgcgggtgctgacatcagccaagctggtgcgcgccaagcggatcaagcagtggacgatgtacaagcgcaacgagaccgccatcgcagccatcaagcgctcgatccaggacggcctttga

SEQ ID NO: 6047 - DNA, 984 bp, BradyrhizobiumColbertium
atgtcaacgtttccttgcggtatcctggacggcatcatgacagcgacaatggacatcacgcgggagcggattgcggcgaccgaagccctcatccgtccgcatatcaggcgcacgccgctgcttcgggccgatctctccgatttcggcctgccggccgcacccgtcactttcaagctcgagatgctgcagcattccggatcgttcaaggcgcgcggcgccttcgccaacctgctgctgcggcaggtgccgcaggccggtgtcgtcgccgcatccggcggcaatcacggcgcggctgtcgcctatgcggcgcagcgactcggcattcccgccacgatcttcgtgcccgacatcacctcgccggccaaggccgagcggatcaggacctacggcgcaaagctcgtgatcgcgggcagccgctacgccgatgcgctcgccgcgagcgaggcgcacgtcgcgcagaccggtgcgctggccgtccatgcctacgatcaggccgaaaccctgctcggccagggcagcgtcgggttggagctggagcaggacgcgccccgcatcgacacgctgctggtggcggtcggcggcggcgggctgatcggcggcattgcggcgtggtacgccggcaggacacgcatcgtcgcggtcgagccggagcaatcgccaaccctgcacgccgcgttcgaggccggcgcgccggtcgatgcgccggccggcggtctcgccgccgacagccttgcgccgcggcgcgtcggaggactgatgtttccgctcgcgcgcgcccatgtcgagcgcgtcgttctggtcagcgacgatgcgatccggcaggcccaggccgcgctgtggtcgcacttgcgcctcgtggccgaacccggcggcgcagccgccttcgccgcggtgctctccggccgctatcgtccctcacccaccgagcgcgtcgcggttctggtctgcggcgccaacaccaatgcggtgcatttcgatagttga

SEQ ID NO: 6048 - DNA, 594 bp, BradyrhizobiumColbertium
atgatcctccccgacggctattccgacgtccccgccggcaagatcgccgcaatcgtcactcatctggagatgaccgcgccccctccgcgccgcgacgatccccccggcacctggaccctgcgcaaggtcgataggcccgcgcttccctggtaccgcgacatcttccgccgcgtcggcgaggactggctgtggttctcgcgcgcccgcatgactgacgccgagctcgctgcgatcatccacgcgcctggaatcgaggtctacgccctcgtcctcgacggtcgcgacgaaggcctgctggagctggacttccgccagcccggccagtgcgagctgacctatttcggcgtcaccgcccccttgatcggcaccggcgccgcccgcttcctgatgaaccgcgcgctggagattgcgtggtcacgcgacgtccgccgcgtctgggtccacacctgcacgctcgaccatccttccgccgtcgcgttctatcagcgctccggcttccgcgcgttccgccgccagatcgagatcgccgacgacccgcgcctcgacggcaccgtgccgcgggacgcggcgcggcatgtgccgatcatcgagtga

SEQ ID NO: 6049 - DNA, 141 bp, BradyrhizobiumColbertium
atggagcgcagcgcaatccgggaccgctgtcgcgatgcgcgcgcaactgcctccgtcgtcattgcgaggagctcttgcgacgaagcaatccagactacctccgcggaaagaccctggagtgcttcgcttcgctcgcaatga

SEQ ID NO: 6050 - DNA, 1506 bp, BradyrhizobiumColbertium
atgtctttcgtcctcgccatcgaccagggcaccacctcctcgcgcgccatcgtgtttcgcggcgacatttccatcgcggcgaaggcgcaagccgagttcccgcagcatttccccgcttcgggctgggtcgagcacgagcccgaggacatctggacctcgaccgtgatggtctgccgggaggccatcgcgcaggccggcatcggcgcaaaggacatcgccgcgatcggcatcaccaatcagcgcgagaccaccgtggtgtgggaccgcgccaccggccaggccgtgcaccgcgccatcgtctggcaggaccgccgcaccgccgacatctgcgccaggctgaaagccgacggccgcgagcccgtgatctcgcagaagaccggcctgatcatcgatccctatttctccggaacgaaagtcgcatggatcctcgaccacgtgcccggcgcccgcgcgcgcgccgcgcgcggcgaattgatgttcggcaccgtcgattgctacctgctctggcgcctcaccggcggcaaggtgcacgccaccgacgccaccaatgcctcgcgcacgctgctgttcaacatccacaccggccagtgggacgacgagctgctggagatcatcggcgtgccgcgctcgatgctgcccgaggtgaaggattcctccgcgcgcttcggcgagagcacgcccgacctgttcggcggcccgatcgccatctccggcatcgccggcgaccagcaggccgccaccatcggccaggcctgcttccgcccgggcatgatgaagtccacctacggcaccggctgcttcgcgttgctcaacaccggcaccacgccggtcgtgtcgaagaacaagctgctcaccaccgtcgcctatcagctcgacggcaagcgcacctacgcgctggaaggctcgatcttcgtggcaggatcggcggtgcaatggctgcgcgacggcctcggcatcatcaagcacgccgccgagaccggacctctcgccgaccagtccgattccatgcagagcgtctatctcgtcccggccttcgtcggcatgggcgcgccctattggaatccgcgcgtgcgcggcgcgctgttcggcctcacccgcaacaccggccccgccgagctcgcccatgccgcgctggaaagcgtctgctaccagacctacgacctctgggccgcgatgcgcgcggactggccgagctcggaaaccgccagcgtcgtgctccgcgtcgacggcggcatgaccgcctccgactggaccatgcagcgcctcgccgatctgctcgatgcgccggtcgatcgccccgtcatccaggaaaccacggcgttgggcgccgcctatctcgccggcctcaatgccggcgtctatcccgagccgaccaggttcgccgacaactggcgcctcgagcaccgcttcaagccgaacatgagcaaggcgacgagggagcggaagctcgcgggctgggcgagggcggtgaaaggcgtgctggcgagcgacgagggggaggggtag

SEQ ID NO: 6051 - DNA, 1359 bp, BradyrhizobiumColbertium
atgacgtttacttcgtatcagttcggcgtcttcgtcgccgtcgtgttcggcgcctattacctgccgcctttgcgccgtttccaggtgcagctgctcgtggccgccagcgtgttcttctacggcttcggccaacccgaactcctgccgctgctgctcgtcgcggtgctcggaacgcatatctgcctggtgctcgcgttcgagaaccgaaccgtctggatgccggccggcatcgtcttcaatctcggcctgctggcgttcttcaagtacaagctcctgttcgtcgatgccggtgccgccgctctgaccggcgtcgcgccgctcgatttcctgctgcggctgccgctgccgatcggcatctcgttcttcgtgttccacaacatcagcctgctggtcgatctgacgcgcgagaagcgcaccgtgcccctgcgcgacgtcttcctctacatcatcttcttcccgcagctggtgtccggaccgatcacgcgcgcggcccagttcatgccgcagatcgtgcccaagcggatcaacgacgtcgccttcgtcgaggccgcgaaatggattctcgtcggctacttcttcaagctgtatgtggcgaacaatctcaacgagatgacgtcctacatggacttccctctctacgagacgctgcgcacgcaggaccgctggctgctcgtattcctctacagctaccagatttacgccgacttcttcggctactccgcgatcgcgctcggcctcggtctcttgttcggctaccgcctgcccgtgaacttcaacctgccctacatctcgacatcgttctcggagttctggacgcgctggcatatctccctgtcgacctggctcaggacctatctgtacattcccctcggcggcaaccggcatggcgtggggcgcacctatctcaacctgatgatcgtgatgacgctgggcgggctctggcatggcgcgagcctgagctacgcgctgtggggcatggcgcacgggctgctgctcgtgatcgagcggccgttcctgaagcttatcggcaaccaaagccctgcggtgcgcgtgatccggatgggaatcgtcttcttctgcgtcacgatgctctggatcttcttcaagctgccgaatttcgatcacgcgctcggctacctccaggggatgttcatcgcgaccgacgcccccaatccgccaaaactgttcaccaaccttgccctgctctacgccttgccggtgatcatccagcatatcggcatcggcgcgctcgtcgacggccggttgcggcgatgggagccatatctctatggtgcgctcgcggcgctcgcttacctcgaggcggggcccgacagcgcgttcatctacttccagttctga

SEQ ID NO: 6052 - DNA, 864 bp, BradyrhizobiumColbertium
atggtcaagtgtgcttgcgtcgcggcggcgctgctgctcgcctgcggcctcgccaccgcgcgcttcggctcggcgctgcaacagccggccgtcatcacccgcgacggcagcctcgtcaccctcaaccgctacgtgcgggagcccacgcctgacatcgtgctggtcggcagctcggtgacgtggcgtctcaaggaggagtatttctcgctgccccgcgtccgcaatctggcgctggccggaggctcgccggtgaccgggctcgagatcgtcgccgggcaggcaagcctgcccagggtcgtcctgatcgagacgaacatcctttcgcgcgaggccgaccgcgcgctgaccgaggcattctcaggcggcgcgcgcgcggacgcgctgctgctacgtccggtgcgaacggcggtcgcggcctatgaaacctggaatcacgccgcccgcgatgccgtccaggcccgcgccgggcacgatcgcctgctcagccagccacctgatacattcgacagcaagatctatctcgaccgcgcgcgggagcagatgaacgacggtgatccgaccgcgccggcacgcgcgaatgcggtccgcatccgacgagtcatcgacgatctgcaacggcgcggcagccaggtcttcctcatgcacgtccccttcgcaccggagatcgaggacacgcgcctggttcgaacgacacgggagatcgccagcgaagccttcccggatcgcgcgctttggctgcgggtcgagccgccgatgggcgaactgcgctgggccgacggcgtgcatctcgatgaacgatcggccttgatcgtcgtccgcgtcatggaaagtatactggccgcgcgagacggcacgcgccgttga

SEQ ID NO: 6053 - DNA, 774 bp, BradyrhizobiumColbertium
atgaaaaacaccccgttcgatctcaccggcaaggtcgccgtcgtcaccggctccagccgcggcatcggccgctcgtcggccgaactgctcgccaggctcggcgccaaggtcgtggtctcctcgcgcaaggcggatgcctgcaaggaggtcgccgacggcatcaatgcggccggcggcgacgccatcgtcatcccctgcaacatcgcgcgcaagaacgaggtcgaggcgttgatcgcgggcgcgaccaagcattacggcaagatcgacatcctcgtctgcaacgccgcggtgaacccgtattacggcccgctgctcgacatcacagacgaagccttcgacaagatcatgggctcgaacgtcaagagcaacatctggctctccgcgctggcgatcccgcaaatggccgagcgcggcaacggctcggtgatcatcatctcctcgatcggcggcttgcgcggctccaccgtgatcggcgcctacggcatctccaaggctgccgatttcgcgctgtgccgctcgctcgccggcgaatggggaccgaagggtgtccgcgtcaactgcatcgcccccggcctcgtcaagactgatttcgcccgcgcgctgtgggaggacgaagccaatttgaagcgccgcaccgccaccaccccgctccgccgcatcggcgaacccgacgagatcgccggggccgtcgcctatctcgcttccgacgcctcgagcttcatgaccggccagaccatcgtcatcgacggcggcgtgacgacggcggcggtctaa

SEQ ID NO: 6054 - DNA, 1143 bp, BradyrhizobiumColbertium
atggattttgatctgaacgaggagcagcggcttctcaaggaaagcatcgacggcctgctgaccgattcctacgatttcgagcagcgcaagaagtacatgaaggagaagggcggctggagcaaggccgtctggctcaagctcgccgagcagggcctgctcggcctgcccttcgcggaggccgatggcggcttcggcggcggcggtgtcgagaccatgatcgtgatggaggcgctcggcaaggccctggtgctggagccctatctcgccacggtcgtgatcggcggcggcttcctgcgccatgccggcagcgacgcgcagaaggcggcgcacgtgcccgggatcatcgacggcagcaagacgctcgccttcgcccagctcgagaagaactcgcgctacgacctgttcgacgtctcgacgacggcgaagaagaagggcgacggctgggtgatcgacggcgagaagttcgtcgtgctcaacggcgagagcgccgacacgctcgtcgtcaccgcgcgcaccaagggtgaccgccgcgacagaagcggcatcggcgtgttccttgtgcccggcaatgccaagggcgtcggcagaaagggctatcccacccaggacggtctgcacgctgccgacatcaccttcaccggcgtcgaggtcggtgcggacgccgttctcggcaatcccgaggactcgctcgcgctgatcgagcgcgtggtggatgaggcccgcatcgcgctgtgcgccgaagcggtcggcctgatggacgagtcgctgaagaccacggtcgagtacatcaagacccgcaagcagttcggcgttgcgatcggctcgttccagagcctccagcatcgcgcgtccgacatgttcgtcgccgccgagcaggcccgctcgatgtcgatgttcgcgaccatggcgggcgatttcgaggacgccaaggagcgcacgaacgccatcgccgcggccaaggtgcagatcggcaagtcggccaagttcgtcggccagcaatcgatccagctccacggcggcatcggcatgaccatggaggccagaatcggccactacttcaagcgcctcaccatgatcgagaacagcttcggcgacaccgactaccaccagcgccgcgtcgcggacgcgggcgggttgatctga

SEQ ID NO: 6055 - DNA, 1191 bp, BradyrhizobiumColbertium
atggatctcgcattcacgaaagaagagcaggcgtttcgcgaggaagtgcggcagttcttccgcgacaacgtgccgccggagacgcggcgcaagatggtcgagggccgtcatctgtcgaaggacgagatggtgacgtggtggcgcatcctcaacaagaagggctggggcgtcagccattggccgaaggaatatggcggcaccgggtggacggccgtgcagcactacatcttcaacgaggagctccaggcccatcccgcgccgcagccgctcgctttcggcgtcagcatggtcgggccggtcatctacaccttcggcaacgaggagcagaagaagaagtatctgccgcgcatcgccaatgtcgacgattggtggtgccagggcttctccgagcccggctccggctccgacctcgcttcgctcaagaccaaggccgagcgccgcggcgacaagtggatcatcaacggccagaagacctggaccacgctggcccagcacgccgacatgatcttctgcctctgccgcaccgacaacaacgccaagaagcagatgggcatctccttcatcgtgttctcgatgaagtccaagggcgtcaccgtgcgcccgatccagaccatcgacggcggccatgaggtcaacgaggtcttcttcgacgacgtcgaggtgcccatcgagaacctgatcggcgaagagaacaagggctgggactacgccaagttcctgctgggcaacgagcgcaccggcatcgcccgcgtcggcgtctccaaggagcgcatccgccgcatcaaggatctggcgtcgaaggtcgaggccggcggcaagccgatcatccaggatcctgccttccgcgagaagctcgcggcctgcgagatcgagctgaaggcgctcgagctgacccagctccgcgtcgtcgccgacgaaggcaagcacggcaagggcaagcccaatccggcctcctcggtgctgaagatcaagggctcggagatccagcagaccaccaccgagctgctgatggaagtgatcggcccgttcgccgcgccatacgacgtgcacggcgacgacggctcgaacgaagccatggactggaccgcccagatcgcgccgagctacttcaacaaccgcaaggtctcgatctacggcggctccaacgagatccagcgcaacatcatcgccaaggcggtgctggggctgtga

SEQ ID NO: 6056 - DNA, 1188 bp, BradyrhizobiumColbertium
ttgacagacgccgtcatcgtttccaccgcccgcaccccgatcggcaaggcctatcgcggcgcgctcaatgccaccgagggcgcgaccctgctcggccacgccatcggcgaagccgtcgcacgtgccaagatcgatccgaaggaggtcgaggacgtcgtgatgggcgcagcgctccagcagggcgcgaccggcggcaacatcgcccgcaaggcgctgctccgcgccggcctgcccgtcaccgtcgcgggcaccacgatcgaccggcaatgcgcctcgggcctgcaggcgatcgcgctcgccgcgcgctcggtgatcttcgacggcgtcgagatcgcggtcggcggcggcggcgagtcgatcagcctcgtgcagaacgacaagatgaacggcttccacgcccaggatccggcgctgctcaagatcaagggcgaggtctacatgcccatgatcgacaccgccgaggtcgtcgccaagcgctacggcatctcgcgcgaacgccaggacgaatattcgctggagagccagcgccgcacggccgctgcgcagcagggcggcaggttcaaggacgagatcgcgccgatcaccacgcagatggcggtcaccgacaaggccagcggcgccgtgtcgatgaaggagatcacgctgtcgcaggacgaaggtccgcgccccgagaccaccatcgaaggcctcgccggcctcaagcccgtgcgcggcgaaggcttcaccatcaccgccggcaatgccagccagctctccgacggcgccagcgccagcgtgatcatgagcgacaaggaagcctcgaagcgcggcctcaagccgctcggcatcttccgcggcttcgtctccgcgggctgcgagccggacgagatgggcatcggcccggtcttcgccgtgccgcgcctgctcaagcgccacggtctcaccgtggacgacatcggtctctgggaattgaacgaagccttcgcggtgcaggtgctgtattgccgcgacaagctcggcatcgacccggacaagatcaacgtcgacggcggcgcgatctcggtcggccacccctacggcatgtcgggcgcgcgcctcaccggccatgccctgatcgaaggccgccgccgcaaggccaagtacgcggtcgtcaccatgtgcgtcggcggcggcatgggcgcggcggggctgttcgaggtgctgcagtag

SEQ ID NO: 6057 - DNA, 1695 bp, BradyrhizobiumColbertium
gtgatgcagagaatgacccatcccggcgaacagttttaccccgagggcgtgcgttgggacgacgcaatcgtccagggcacgctccctgacctcttgtcgaaagctgccgccgagtacggcccgcgcaccgcgctggaattccgcgatcgtccgatcacctatgccgagcttgccgcgatggccgagcgcgcggctgcggcgttcctgcgcgccggttgcggcaagaactcttccgtcgcgctgttcctcggcaacacgccggaccatcccgtcaatttcttcggcgcgctcaaggccggcgcccgcgtcgcgcatctgtcgccgctcgacggcgagatcgcgctgacccacaaggtctccgattcaggctcgcgcctgctcgtcacctcgaacctccaggcgctgctgccgaccgcgctgaaattcctggagaaggggctgatcgatcgtctcgtcgtctgcgaggacgatcattggggcaggatcggcacgccgcaggcggcgatccccgatgatccccgcatcgtgaccttcaaggccttcgtcgagggcgccgccgcgccggcggaatggccgcaagtcacggcccacgacgtcgcgctgctgcaatataccggcggcaccaccggcctgcccaagggcgcgatgctgacccacggcaatctcacctccgccgtctcgatctacgacgtctggggcaagccatcgcgcgccgcgcgcggtgaggtcattgaacgcgtgatctgcgtgctgccgctgttccacatctacgcgctgaccgtcgtgctcctgtcctcgctcagccgcggccatctgatctcgctgcaccagcgcttcgacgtcgaagctgtcatgcgcgacattgaaatcaagcgcgccacgtattttcccggcgtgccgaccatgtggatcgcgatcgccgcgctgccggacctcgacaagcgcgacttctcttccctcgccacgatcggctccggcggcgcgccgctgccggtggagatcgcgagcttcttcgaacgcaaggtcggcaagaagctcaagagcggctggggcatgaccgagacctgctcgcccggcaccggccatccgcccacggggccggacaagcccggctcgatcggcctgatgctgccaggcatcgagctcgacgtcgtcgcactcgacaatccgacaaaggtgctgccgccaggcgaagtcggcgagatccgcatcaaggggccgaacgtcaccaggggctactggaacaagccggaaggatcggcggacgcgttcatcgacggccgcttcctcaccggcgacatcggctacatggatgaagacggctatttcttcctcgtcgaccgcaagaaggacatgatcatctccggcggcttcaacgtttatccgcagatgatcgagcaggcgatctacaccattcccggcgtgcacgaggtcatcgtgctcggcatccccgaccagtatcggggcgaggccgcaaaggccttcatcaagctgaggcccgacgcaaggccgttctcgctcgacgagctgcgcgcgcagctcaatggcaagctcggcaagcacgaactgccggcggcggtcgagttcgtcgacgatctgccgcgcacgccggtcggaaaattgtcgcggcacgaattgcgccagcagcagaaaccatcacaatccagcaaaaccgcatcaggagttcgttcttga

SEQ ID NO: 6058 - DNA, 2097 bp, BradyrhizobiumColbertium
gtgagcgaagtggttaagcttgagcgtcatgacgaagtcgggatcgtcacggtcgacagccctccggtcaacgcgctgagtgccgcagtgcgcggcggcatcctcgagtgcatcaaggctgccgtcgccgatcccgccatcaagggcatcgtcctgacctgcggcggccgcaccttcattgccggcgccgacatcactgaattcggcaagccgccgaagccgcccgccctcaacgacgtgctgtccgagatcgagaattcgccgaagccggtcgttgccgcgatccacggcactgccctcggcggcggtctggaggtcgcgctcgcctgtcatttccgcgtcgcggtgaaggaggccaagctcggtctgcccgaggtgaagctcggcctgctgccgggcgccgggggcacgcagcgcctgccccgtgcggtcggtcccgaactcgcggtcaagatgatcgtcggcggcgaccccatcggtgcggcggaagcgctgaagaacggcttgatcgaggagatcgtggaaggtccggcctccggcggcgaagccttcgtgcgcaagattctcgcggagaagcgtccgctgcggcgcctgcgcgacgacgattccaagctcgcggccgccaaggccgaccgctcgatcttcaccaatgccgtcgccgccatgaccaagaagtcgcgtggcctggaggcgccgttcgccgcagccgatgccgtcggctacgccattgacctaccttttgacgaaggcctgaagaaggagcgcgagggcttcctcaagctcgtcaccagcgaccagtccaaggcgcagcgctacgccttcttcgccgagcgcgaggccaacaagatcgcgggggtgcctgaaggcaccaagccgcgccccgtcaatcgcgtcgcgatccttggcgccggcaccatgggcggcggcattgcgatgtcctttgccaatgccggcattcccgtcaccctgatcgagacgggcgaggagcagctcaagcgcggcatgggcgtgatgcagaagaactgggaggcgaccgccgcgcgcggcggcattccggccgatgcacccgccaagcgcatggcgctgatcgacggcaaggtcggcattgagaatgtcggcgatgccgacctcgtgatcgaggcggtgttcgagaccatggcggtgaagaaggaagtgttcgccaagctcgaccagtacgccaagcaaggcgcggtgctcgcttccaacacctcgtatctcaacatcgacgagatcgcgaagtcgaccaagcgtccgcaggacgtgctcggcatgcacttcttctcgccggccaacgtcatgaagctgtgcgagatcgtgcgcgcggacaagaccgcgccggatgcgctcgtcacggcggtgacgatcgcacgcaagatcgccaaggtgccggccgttgtcggtgtctgcgacggcttcgtcggcaaccgcatgctcgcccagcgcggcaagcaggccgagaagctgctgtttgaaggcgcgctgccgcagcaggtcgacgccgtcgtcaccaagttcggcatgccgatgggcccgttcgcgatgggcgatctcgccggactcgacatcggctggcgctcgcgcaaggaccgcgggatcaagtcggagatcgcggacgcgctgtgcgaagccggccgtttcggccagaagaccggcaagggctactacaagtacgaagccggctctcgcgcgccgctgcccgaccccgaggtcgagaagctgatcgacgagacgctgctgcgcctcgggcgcaagaagcgcgtcgtcagcgacgaggagatcctcgagcgcatgatgtatccgatgatcaacgagggcgcgaagatcctcgaagagggcatcgccgcgcgcccgtccgacatcgacgtggtctggctctacggctatggctggccgatctaccgcggtggcccgatgttctgggcagacagcgtcggcctcaagcacatcgccgatcgcctgtcgttctacgccaaggagaccaacgaccccagcctcgagcctgcgccgctgctgaagaagctcgcggcggagggcaagaccttcgcctcgctggcggcgacatcgaaggcggcgtga

SEQ ID NO: 6059 - DNA, 867 bp, BradyrhizobiumColbertium
atgaagcgtacaggaaagaagactgcgaccgatcggaatttcgtcgtcgcgctttcccgcggactggatgtattgcgcgcgttccaccccaatgacggccttctcggtaatcaggagattgcggcccgcaccaatctgcccaagccaaccgtgtcgcggctgacctacacattgaccaagctcggttatctgacgccggttccccgcttcgagaagtaccagctcgcaccggccgcgatgtcgctgggttacgcggcgctggccaacctcggcgttcggcatttgtccgagccgtttcgcgaggaagttatgcgcgcgaccggcggcgccgtcgccgttggcggccgcgaccgtcacagcatgatctatttcgggcagagccgcggcagtgagacggtcggcgttcaacttgacgtcggctcgcgcgtgcccattgcaaccagcgcgatgggccgcgcctatttctgggcgctcgacgacgcggatcgcgccgaagtgtcgcgcatcctgcgcgaacattacggcagccgctggccgaagatgcgcgacggattggaacgttccggcgagactgtcgcgaagtacggtttcgcgatttcggtcggcgactggcacgacgacatcggcgccgccggggtcgcactcaggcttaatgacggaaccggcccttacgcattcaattgcggcgcgccggcattccgcttcacggaagagcgtttgatcaacgacattggaccgcgtctcgtagcgatggtaaggaacatcgaagcggcgctcgggggtttgatgccgcattcaaaaaaagacatcagcaaaaagctgaaatcaggagggaaagttgcgcgtgtggctgaggggatcagatag

SEQ ID NO: 6060 - DNA, 798 bp, BradyrhizobiumColbertium
atgacgcaggctcaactcgcgcagggggcatcgcccctgctcgccgttcgcgacgtcagcgtcgtgtttggcggcatcgtcgcgctcaacggcgtgtccttcgacatgcacaagggccagatcctcggcttgatcggccccaacggtgccggcaagacgacgctcttcaattgtctctcgcgactgtatcagccgtcgtccggcgacatcctgatggacggcgtgagcatcctgtcgcggccgccgcaccggatcgccgagatcggcatcggccgcacgttccagaacgtggcgctgtttccgaacctgtcggtgatggacaacgtccgcgtcggcgcgcatgcgaagacctccagtgacatcatcagcgactccttgaggcttgcctgggtccggcgcagcgagaccagcatcaacaggaaggtgcaggagatcctcgcctacctcggcctcgaggatgtcgcccacaccgtcgtgtccggcctgccgttcggcacgcagaagcgcgtcgagctggcgcgcgcgctggcagcggatccgaagatcctgctgctcgacgagccggccggcggcctcaaccacgaggaagtctacgtgctcggcgacctcatccgcaaaatccgcagcgagcgccatatgaccgtgctgctggtcgagcatcacatgggcctcgtgatgtcgatcgccgaccacgtcgtcgcgctgaatttcggcaagaagctcgcggaaggcactcccgcccaggtgcaggcggaccccgacgtcatcaaggcctatctcgggagcaaagatcaatga

SEQ ID NO: 6061 - DNA, 714 bp, BradyrhizobiumColbertium
atgacgccactgctcaacgtcaaggacctgcgcgcctattacggccaggtccaggcgctccacggcctgtcgttctcgctcaacgagggctcgctgacgacgctgctgggtgccaacggcgccggcaagaccaccacgctgcgcgcgatctgcaacatggtgcgttccacgggcggagtcgagttcgaaggcaagccgctgaacaaccgctccaccgagagcatcgtgcggttcggcatcgcccacgtgccgcagggccgtggcaccttcaccaacatgaccgtcgaggagaaccttcagctgggggcgatcacccgcaaggacagcgcaggcatcgtctccgacatcgagcgcatgtatgcgcatttcccggtcctgaagcagcgccacacccagcaggccggcacgctctccggcggcgagcagcagatgctcgcggtcgcccgcgccctgatgctgcggccgcggctgatgctgctcgacgagccgtccttcggcctcgcgccgctcgtcgtgcgcgacctgttcggcatcctcgggaagatcaaccgcgaggacaaggtgtcgatcctcgtggtcgagcagaacgcccagctcgcgctcgagctcgccgaccaggcctatgtgatcgagaccggacgcatcgtgatgtcgggcaacgccaaggacatcgcgaacaacgaagaaatccgcaaatcctatctgggttactga

SEQ ID NO: 6062 - DNA, 879 bp, BradyrhizobiumColbertium
atggagcttttcaccaaccaggtcctggccggcatcgccacgggcgcgatctatgcctgcatggccttggccgtcgtcatgatctatcaggccatcgaccatctcaacttcgcgcaaggagagatggcgatgttctcgaccttcatctcctggcagctgatgcagtggggcgtatcctattgggccgccttcctgatgacgctggcgttctccttcgtcgccggcatcgcgatcgagcgcatcctgttcaagccgctcgcgaaggcaccggtgctgaccaacgtcgcgggcttcatcgcgctgtttgcaatcatcaactcctcggccggcctgatctgggacttcacgatcaagcagtatccgaccccgttcggatccgcaccgtttctcggcagccagctgatctcgacgcaccaggccggcatgatcggcgtcaccgtggcgctgctgctcgcgctctatttcttcttccagtacacgcggatcggccttgcgatgcgcgctgccgcgtcggtgcctgaatcggcccgcctcgtcggcatcaacacgagctggatgatcgcgctcggctggggcatggcgactgcgatcggctcgatcgccggcatgctgatcgctcctgtggtgttcctcgagcccaacatgatgggcggcgtgctgatctacggcttcgccgccgcggtgctcggcggactgagcagcccgttcggcgccgtggtcggcggcttccttgtcggtgttttcgagaacctcgccggcacctacattcccggcgtcggcaacgagttgaaactcccgatcgcgctcgcgctgatcgtttccgtcctggtcgtcaaacccgctggcctgttcggccggcaaatcgtcaagcgagtttga

SEQ ID NO: 6063 - DNA, 1020 bp, BradyrhizobiumColbertium
atgagcgcagcagaagaagccattgccgagggccacgaggcggtcgaggcggttccgaagcgggccatgacgctgggcaccggcacctcgctcgtggtgcttgcggcgctgctggtcgtgccgatgttcgtcaagaacttcatcatcttccagatgacgatgctcctgatctacgggctcgccgtgctggcgttgaacatcctgaccggcggctccggccagttctcgctcgggcagagtgcgttctacgccgtcggcgcctacacctcggcggtgctgatggagcacgccaacatcaactacgccctgaccattccggtgtccgccgtgatctgcttcggattcggttacctgttcggcaagccggcgctgcggctgtcgggcatctatctcgcgctcgcgaccttcgcgctcgcgaccgcgatgccgcagttgctcaagctgaacttcctcgagcactggaccggcggcgtgcagggcctcgtcgtcaccaagccggacgcgccgttcggcctgccgatgtcgcaggacatgtggctgtactatttcaccctcgcggtgacggtcgcgatctacatcttctcggtgaacctgctgcgctcccgctccggccgcgccttcatggcgatccgcgacaacgagatcgcggcctcctcgatgggcgtcaacgtcgcgctctacaagacactggcgttcggcgtatccgccggcatcaccggcgtcgccggctcgctcggcgccatcgccgtgcaattcgtcgcgcccgacagctacaccatcacgctggcgatctcgctgttcctcggcatggtcgtcggcggggtcggctggctgcccggctcgttcgtcggcgcggccttcatcatcttcgtgcccaacatggcggagagcatctccaagggcctctccggcgcggtgttcggcgtgctgctgttcctcgtcatctatctcgtgccgcatggcgcaaggcaggttgcgatcttcggccagcagctcgttggcaaactcagaaagaactga

SEQ ID NO: 6064 - DNA, 222 bp, BradyrhizobiumColbertium
gtgaaggacggagaattgctcgccaccagcttcaagcccagcaagtccgacattgagcgtctgggtggtggccagtggttgccggtcgagaacgaggacaccgagccatttgaccctgccaagcactggcgtatgaagccactgccccttcgcctggactccgcgcgtggcatcgtggtgcgaacctatcctgtcattgctaagtgtcaggagcacgcatga

SEQ ID NO: 6065 - DNA, 741 bp, BradyrhizobiumColbertium
atggaagagctggtagctctggtcaaacccgatatcatcgccgcgcctgcgacgttgcaagccgtcgaggcccgaaaggcgacatcgactatacctattgtctgtggcgcgctcgcggacgcggttcatctaggattgattgccagcgaagctcgaccaggaggaaacgtaacgggcatcgagccctacatctcgggattgccgaccaagcaaattgaactcgcgctagaaattacgccgacggcagggtgcgttggactgctcaccaacatgaacgatccgaagggcccgcctcaggtcggggacttgaaagcagcttgccaagccaaaggcctcagcgtcgtcgaagcggatgctaacatgcccaacgatattccgggcgcgctcgctgcgcttgcgaacggcaaggccgatgtcatcgttgttctacagacgaatctgctccttgtccgtagcgagcaaatcggcgcgattgctctttcaatgcgacttccgaccgtcttcggatatcgcgagcatgtcattcatggcggtctggtcagctacggagtcgatttgcgctggtgttatcgtcgccttggctattttgtggacaaaatcctcaggggtgctcgacctggtgacctacctgtcgaatttccgaccgcattttggttggcagccaatctcaagacagcaaaggcgctcggcgtgatcgtccccgcgggcctcctcacccgagccgacgagctgattgagtaa

SEQ ID NO: 6066 - DNA, 276 bp, BradyrhizobiumColbertium
gtgctcgaagacgccgattgcttcctatcgaactgggatcgcgccgcttgcgatctcggctggaccgctctggatctgttcggtgttcatgccgtcgcaccggggtgccgatacgatctcatgggcctggcgatgttactgggcggcgggaccgcgtttgccctgaccgaggagacagcggccctccggcggccgtccggatcgacgctgacgtatcggcgcaagccgacatcaggcgccgtacttctgtgcggaggccagcatgcaatccgctga

SEQ ID NO: 6067 - DNA, 333 bp, BradyrhizobiumColbertium
atggagcaggtgaggacctttctcctcaaggacgggatgtcgcgcttcatcccagcgtgggaggacaacgcgcccaaggggatgcaggcgcgcgatgtcgccggcttcagggagcagatgggcgacggctgggacttctacgtcaccaccacggcatggaaggaaatctgcgccggtctcgatccgcgccgtgtcgcagcgacgctgaggcagaagggctacatcgagggcgaaggctcgcacatggcgaagtcagttcgcgtgcccgagtacgggaagatgcgcctctaccacatccggtcgaccttcctggaggatgcaaatgaagcatga

SEQ ID NO: 6068 - DNA, 1833 bp, BradyrhizobiumColbertium
atggccgttcgtaagcggaccccgatcgaccgccggtttgcaactgaggcgacgcagacggcggcggtggactcgatagcgccggctgacacgatcattttcgtcgatgcctggggcaaccccgatcagcggttcgattccggacagctcgccggcctgcctgtcgatctgcgtgacctcctggtcgaggcattccgcgcgcattgcgtcgctcagcaatcagcaacacgccagacgacacggagggcgctccgacgtttcacctgtttcgtcgttgacgacggcatgatcgagaccgcgagtgatctcgataccgcggcacttggccgctatgtactctggctgaagaagcaaggggcatcgcgagcgccacgcggggcccacgctatcgccttcgaccttctgcgtcccttgctcttctggtgtaggcgtaatcgacgcgggcgcatagcgcacgacctggagatcccctggaatgcgtttccggggcggagggcgagccaacagcctcggcgacgacttccctcgaatcaggtcaaggcgatcctgcgggcctgctacgaggagatcgacgaggcctgggcccggtttcagtacgggcaggaggttatccgacgccccgagctaccgcccaagaccttgcgcggccaggggctcgaccgatggatatggcgcatcggccggatcgacgacggcctcatgcccgacacgactgtcctcgaggcgcacgggatcaagtccagcacgctggtccagtactggggcggcgctcggaccatggcgcagtatttccatatcaccaccgacacgctggttcctttcttcttggccatcgccatccagaccgcggccaatcccgaaccgctgcgccacatccgtcgggattgccttgtgccgcatccgctcgacgaacaccgcgtcatcgtcgactggaacaagcccaaaacgggcgcgcggcttcagaaagcgcagcggcggtccttcgatcgccgtcggcggtatgccgcacccaacctgatcgagatgatgctggcgctgacagaaccgatcatcgccacagcaccgccaagcgagcaagatcgactcttcctgacgcgcagcatccataaggagcattcgcgccgatcgcttcgcagccgcaccggggtcatcgaacacaccgttctgaggcgtgccatcctcagattcatcgagcgcgccaaccaacgcatcgacgcgtggaacacggaccatccggaccaactgcgggagccgatcgcagactttgcgccggcgttatttcgtggaagcgtggcgactgagcactaccgcgcgtcgggcggagacgttctcgtcgctcaatcgatcctgaaccatgccagcgtcgcaacaacagagacctatctcaagagcgaggagacgacccgcctccagcgccagacgatcgcgcacctgcaagagcagatgatcaactgggtgctcggccccgagcgcgacacgcctccgccggccttcgggaagctgcgcgccaccgcccctttcgggcacgactgcctggctcctgtcgctcccggccgagacggcgtcgatcgcctctgcccgcagttcggcggctgcctcgcttgtccgggcctcgtcgtcccgatcgatgtcgggcatctggcgcgcatcctcgccgctgtcgatcggctcgaagaggctcgtaaacggctcgatccgaagcgctggagccttctctatgccccgtcgtggcgcattctcacccaggacatcctcccggatttccccgcgaacatgcacgagcccgcccgcaagctcgctaccggcatgccgctgctcccggagttggaatga

SEQ ID NO: 6069 - DNA, 195 bp, BradyrhizobiumColbertium
atgcttgtccgcctgcaaaagcaggcggcgacaacgcctgacctcaacccgctcaagatcgtgcaggtccttcttggtcatgcgtcgatccagtcgaccgcgatctatctgcgctgtgttgagcttcacgcggacacactcgctgagagcctcgcctatctgtatggcgaactggtgcctcatggccgttcgtaa

SEQ ID NO: 6070 - DNA, 249 bp, BradyrhizobiumColbertium
atgcccagtcatcgcatgcgcaaaccagtgcgcggcaatgcacgattcgtgatcctcgcgagcggtggttttctcggattgttccaggacgaagtcgcactgcccgtcgaacggtttcgcgcaagcggagaccgccttgtcgtcagcggcctgaccgaccaggacatcgacaatatgcaggactgggaagaccgccttcccaacagctccgtgctggacgatgctcaatcggttcgcatccggaaataa

SEQ ID NO: 6071 - DNA, 1560 bp, BradyrhizobiumColbertium
atgactagatgcattcggttgcggggcgccgccgcgtttgtcagcaattccctgctcgtcgcggtccttgctggctgcagcgacggcggcacggatttcgacatttcgcaacagattggacctgagcctctcctgccgaaaccgagccactcccttctgacgaacctgaaggtggccgaagtggtcggctggagtgaaggccagacgccggctgtcgcgggcgggctcaagatcacggcctatgccagcggcttggttcacccccgcacgatacataccctgccgaacggagacgttctcgtcgttcagtcacgcactccgccaggcaagccggtggcgcgccccaaagacctcatccgcggttggatcatgtcgtacgcgcagggaggtggcggcgaacagaagaagagcaatctcatcactctcttgcgtgatacgaaccgcgacggcgaagtcgacgagcgccgtgacctgctcacggacctaaattcacccttcggcgtggcgtggcacgacgatacgctctatgtggccgccgccgatgcgatcctggcctatccctatcggctcggcgataccaatatttccgcgcagccggaagtgctcacgccgttgcccggcggaccgatcaaccatcattggaccaaggatctcgcgctcagtccggacggccgctttctttacgtgtcggtcggctccaactccaatgtagcggaaagagggctggaggccgagaagggacgcgccgccatctggcaggtggaccggcagaccggcgcatccctggtctatgcgtctggcctgcgcaacccgaacggcctgacattccatccgcaaacccgcgagctctgggccgtggtaaacgagcgagacgaacttggtcccaatctggtccccgactacatgacctcggtcaagcaaggggcgttctacggctggccatggagctactacggcaaccatgtcgacgagcgcgtccacccgccacgtcctgacatggtcgaaagggcgatcgctcctgactacgcgctggggagccacgttgccgcgctgggaatgacattcacgctgaattcagcccttccgggagaatatcggagtggtgctttcgtcggtcagcacggcagctggaaccgcaactccttttccggttacaaggtggtctacgttccctttcagaacggcacgcccgccggcaaggcacgagacgtggtgaccggcttccttgacggcgatcaggcgcgcggtcggccagttggcctcgggatcgacggcaccggcgcgcttctcgttgcggacgacgccgggaacaaggtctggcgcgtagcagctgccgatggcagctccacaccggagccggtcggcactgatcagattacggtcggccttgccggaggtcgcgggcagagcgcgactgggcagcaagaggccacttcctctgccggctctcccagcgatgcgactccaccacaaccccgcagacgaacatcgctcccgccgtactgccacccggcgcgagctcgggaacgcctgagatgcagcgtcaatgatggatcatag

SEQ ID NO: 6072 - DNA, 399 bp, BradyrhizobiumColbertium
atgctcgcgcagtttccgaacgtctgtttcacgctgacgctactcaccgacatcgtatactggcgaacatcctatctcatgtggcaggagttctcgtcctggctcctcttggccggacttgtctccggcgtgcttgccttggttgcgggcctcatcgattttctgttcggttcggctgtgcgtgctccgaaacccgcatggccccatgccattggtggcgtggttgtcctcgcgttggccttcctcaacagccttgctcacgcccgagacggttggatcgctgttgtaccttggggcctcgtcctctccgttgcgacgatcatcgccatggtcatcagcaactggcttggccgtgcactcgtatttcactacggcgtaggagtgagacgacatgactag

SEQ ID NO: 6073 - DNA, 1044 bp, BradyrhizobiumColbertium
atgagctacgcccccgcctccgactggatttttctccgccgcgtactcatcacgctggcagtgaccacgatcgcctacatcgcttggaagcttgctgacctattcatcctcctcttcgctgccgttctcctgtcggttctgctcggaggacttgccgccgcggttgcaagatacagccggctcccatccggctgggcacttgccgtgagctgcgtgtcattggcagcccttgccggcattttgctcagcttattcggagcacagatcatcgggcagatatcaggggttttcgatcagcttcctggcgcaatcaatgttgcaggcgcgacgctgggcattgcagatgcattcaaacagcttcaggaaactctttccaacgaaggcagcgggcagctgctgtcccgagcggcccgcgtcggctatactgcgcttggcgtggtgagtgatcttttgctggtcacggtcgtagcagtgtatctcgcggctgacccgagcgtctatcgtcggggcgcgatcaagctattcccttccgagcagcatgaccgcatcgcagacgcgctggatatttccgcctcagcacttcgcctctggtttctcgggcagctcgcatccatgacgctggtcggcctgctatgcgggcttgccttttgggcgatcggattgccttcgcccgtcggtcttggagcaattgcgggtgcgacgaacttcattcccttgatcggcccgatcatcggagcgctgccggcagtcctgttcgcactaacgcaggaccttagcgtcgtattgtggacagtgagcgctgttctcgtcattcaacagctcgaaggcaacgttatcactccgatgattcagaagcgtgcagtggagttaccgcccgcgctcattttgcttggactctcggctttcggagcgctgggcggcatgctcggcgtcattcttgcaacgcctcttaccgtcgttgtcatggtcctcgtgcagaaattgtggatccgcgagaccctcggcgagaataccacgatacctggagagagacgctccaactaa

SEQ ID NO: 6074 - DNA, 879 bp, BradyrhizobiumColbertium
atgagcgatcccgcaaatgccctggtttcagtttggtcgctttgccttgcgtccggcaactcggtcgcttcagcgacgatctggtcggcgtggagcatcgcgcccgccgtgacggttccgctgattttgttcggtgccttctatgctgcgggtgtctttcggcgcgccgcagagccgcatgattcaggagcgttgtcctatgagataacggccgcggcaacggccatgttcctgctcgcgattgcggtggtgagcccgctctgccggctttccgccgcgctcgcttcggtccacatggttcagcacctcgtgctggtcgtcttggctccgcagctcattgtcattgcggctccggttcgaacggtcggagccggattgcgcggtaccacgcgcacgacctcaagcaatcgcaggcgagagcttcagtggaatcggccgttgctcgccgctggcgcttacggctttctgatctggttctggcacgctcccgcgacgtacgagcttgcgttgactagcgcgggctggcacctcctctatctcggatctctcgtgctggtcagtctctggttctggacctgcgtggttcgcgcgagatcgactggtgcggccgcgctcgctctgctcctgacgatggttcacaccggtttgctcggagcgttgctgacattcgctccgcggccgctttaccccatcatgagcggaggagcgatcgcgttcggactttcgccgatcgaagatcaacagctggccggcctcatcatgtgggtacccatgggtttgatctatctgctcagcgcgctcttggtcataagccgcggactctccgcgcagtcactagggcagtcgtctgcgacgacgggtaacgccgactggaagtaa

SEQ ID NO: 6075 - DNA, 264 bp, BradyrhizobiumColbertium
ttgggcgatgtattcggcactaacattctcacgctcggactcgtcttcctcgccgacctcgtctatgcaggtgagccggtcctgaaccaggccggccgcttcgaagcgatcgcggcaacgctcgggattatcctgacgggaatcttcttggttggtctgctcgagcgggccaacaagacattcctgcggatgggctatgacgctcttgtcgcactcctaacgtttgcggctggcgtcatgcttctctactttgtccaaaattaa

SEQ ID NO: 6076 - DNA, 318 bp, BradyrhizobiumColbertium
atggagcacgcagcacaggtcgtcgaccccttcatcttccggctgtcgatcttcgtcctcgccgtcttcgtcggctatttcgtggtgtggtcggtgacgccggcgctgcacacgccgctgatgagcgtgaccaacgcgatctcctcggtgatcgtcgtcggcgcgctgctcgcggtcggcgtcggcatggtttcgagcggctcgggctgggcgcgcggcttcggcttcgtcgcgctcatcttcgcctgcgtgaacatcttcggcggctttctcgtcacccagcggatgctggcgatgtacaagaagaagtcgaagtaa

SEQ ID NO: 6077 - DNA, 1128 bp, BradyrhizobiumColbertium
atgaagattgccgttgccaaggaaatcgatccgtcggagccgcgcgtcgccgcttcgcctgatacggtgaagaagttcaaagcgctgggcgcggaggttgccgtcgagccgggtgccggtgtcaagtcgggcctgccggattccgaattcaccgcggccggcgccaccgtcagcgccgacgcgttgaaggacgccgacatcatcatcaaggtgaagcgtcccgaagcgtccgagctttcgcagtacaagcgcggcgcgctcgtcatcgccatcatggatccctatggcaacgaggccgcgctgaaggcgatggcggatgccggcgtctccgctttcgcaatggaattgatgccgcgcatcacgcgtgcgcaggtgatggacgtgctgtcctcgcaggccaacctcgccggttatcgcgccgtgatcgagggtgccgaggccttcggccgcgccttccccatgatgatgacggcggccggcaccgtgcccgccgcgaaggtgttcgtgatgggcgtcggcgtcgccggactgcaggcgatcgcgaccgcacgccgtctcggcgccgtcgtcaccgcgaccgacgtgcggcccgcgacgaaggagcaagtggaatcgctcggcgcgaaattcctcgccgtcgaggacgaggaattcaagaacgcgcagacggccggcggctatgccaaggagatgtccaaggaataccaggccaagcaggccgcgctcaccgccgagcacatcaagaagcaggacatcgtcatcaccaccgcgctgatcccgggccggcccgccccgaagctggttaccgccgagatggtcaaatcgatgaagccgggctcggtgctggtcgatctcgccgtcgagcgcggcggcaatgtcgagggcgcgaaggcgggcgaggtcgtcgatctcgatggcatcaagatcgtcggctataccaacgttgccggccgcgtcgcggcctcggcctccagcctctacgcacgcaatctgttctccttcatcgagaccatggtcgacaagaaggagaaagcgctcgccgtcaactgggacgacgagctcgtcaaggccaccgcgctcacgaaagacggcgccgtcatccacccgaacttccagccgaaggtttaa

SEQ ID NO: 6078 - DNA, 153 bp, BradyrhizobiumColbertium
atggctgaccatagcgaagtggcctacaccaccgccgacggcaacgactacgttgcccacgagcagacctacgagggcttcatcaagctggtgaagtacggcacggtctcggtcgcgctcatcgtgatcctgatggcgatcttcctcacctga

SEQ ID NO: 6079 - DNA, 1968 bp, BradyrhizobiumColbertium
atgacttcgcgctccaagactgctcttgaaaagactgcactccgcaagcctgccacgaagaaatccgtcggcaagaagtctgtcaccaaggcatcgccctccaagcctttgctttccaagtcttcgctctccaagtcttcgctctccaagtcttcgcgctccaagtcttcgccggcaaaacctgcgagcaagaccggaaagcttccggagtggaacctggccgatctctattccgggatcgatgcgccggaagtggcgcgcgatctcgaaaagctggatgccgactgcgtcgcctttgagaccgactacaagggcaagctcgcctcaggcacagcaaacgaagatggcggaaaatggctcgccgaggccgtgcgacgctatgaggcgattgaggatctcgccggccgtctcggctcctatgccggcctcgtccatgccggcgacagcgtggaccccgcaatatcaaagttttacggcgacgtgtctgagcgcctgacggccgcgtcgacgcatcttctgttcttcgcgctcgagctcaaccgcgtcgatgacgatattttgaaccgcgcgatgcaggccgccgaactcgcatactaccgtccgtggatcgaggatctgcgcaaggagaagccgtatcagctcgacgacaagctcgagcagctcttcctggagaaggcgcagaccggctattccgccttcaaccggctgttcgaccagaccatctcgagcctccgcttcaaggtcggcaccaaggagctcgcgatcgagccgacgctcaatctgctgcaggaccgcgacggcgccaagcgcaagagcgcggccgaggcgctggccaagaccttcaaggccaacgagcgcaccttcgcgctgatcaccaacaccctggccaaggacaaggacatctccgaccgctggcgcggcttcaaggacgttgcggattcccgccatctgaacaaccgcgtcgagcgcgaggttgtcgatgcgctggtcgcatcggtgcgcgcggcctatccgaagctgtcgcatcgctattacgcgctgaaggcgaagtggttcggcaagaagcggctggcctattgggaccgcaatgcgccgctgccatttgcggcgaccgacgtcatcggctggccggatgcgcggaatatggtgctgacggcctatcgcggcttctcgccccaaatggccgacatcgccgagcgcttcttcaccgatcgctggatcgatgcgccggtgcgtccgggcaaggtgcccggcgcgttctcgcatccgaccacgccatcggcgcacccttacgtcctcatgaactatcagggcaagccgcgcgacgtgatgacgctcgcccacgagctcggtcacggcgtccatcaggtgctcgccgccaagaacggggctctgatggcacccacgccgttgacgcttgccgagaccgcgagcgtgttcggagagatgctcacgttcaagcgtctcctcgcacagaccaagagcgccaggcagcgtcaggcgctgctcgccggcaaggtcgaggacatgatcaacaccgtggtgcggcagatcgcgttctattcgttcgagcgcgcggtccataccgaacgcaagaatggcgagctcaccgcgacgcgcctgggcgagatctggctgtccgtgcagggcgagagcctggggccggcgatcgagatcaaggcgggctacgagaactactggatgtacatcccgcacttcatccattcgccgttctatgtctacgcctatgcgttcggcgattgcctggtgaactcgctttacgccgtctacgagaacgcggccgagggctttgccgagcgctacctcgacatgctcgcagcgggcggcaccaagcactattccgagctgctgcgcccgttcggattggacgccaaggatccgaaattctgggacggcgggctcagtgtcatctcgggaatgatcgatgatctggaggcgattggctga

SEQ ID NO: 6080 - DNA, 1497 bp, BradyrhizobiumColbertium
atggctgccagtattttgatcgccgacgacgacgctgtagcccgccggctgatcgagaacatggtgcagaaatgcggctatgagacggtcgtcgtggactccggcgatgccgcggtcgccaccctcaccgcccccgacgcgcccgccatcgacgccgtcatcctcgatctcgtgatgcccggcctcgacggcatgggcgtattggcgaagatccgtgaagcgggtctgagtatccccgtgatcgtgcagaccgcccatggcggaatcgacaacgtgatctcggcgatgcgcgcgggcgcggccgatttcgtcgtcaagccggtcggcgtggagcgcctccaggtgtcgttgcgcaacgcgctcaacacctccgcgctcaagggcgaattgcagcgcatccgtcacagccgcgaaggccggctgaccttctcggacatcattacgcgcgctgaggcaatgacccaggtgatgcgaactgcacagaaggcggcgaactccgccatccccgtgctgatcgagggcgagtccggtgtcggcaaggagatgttcgcgcgcgccatccatggcagcggcgagcgcaaggccaagccgttcgtcgcggtcaattgcggcgcaattcccgacaatctcgtcgagtccatcctgttcggccacgagaagggcgcgttcaccggcgccaccgagcggcacatgggcaagttcgtcgaggctcatggcggcacgctgttcctggacgaagtcagcgaactgccgctgaccgcgcaggtgaagctgctgcgcgcgcttcaggaaggtgccgttgaggcagtcggcggccgcaagccggtcaaagtcgatgtccgcatcatctcggcaaccaatcgcaagctgctggagcgggtgaaacagggacatttccgcgaagacctgttctaccgattgcacgtgttgccgctgacgatcccctcgctgcgcgcgcggcgtgaggacatcccgcatctgctcaggcatttcctggcgcgctttgccgccgaggagaaccgccccatcaccggcatcagtggcgaggcggtggcgcatctcacccagctcgactggccgggcaacatccgccagctcgagaacgcggtctaccgtgccgtggtgatgagtgacggcgaccagctcgacctcgacgattttcccctgcttgcctcgcagccgcacgccacagcggacattccgacggcaccgctgatgattgagccgattgctgcgccttccctcgtatcaggtagcgaaatacccatcgttcccctccccgcggcaggaactctccccatgctgaccgcgaccggcgacgtccgcccgctggaggacatggagaacgagatcatccgtttcgccatctcgcattaccgcgggcagatgtccgaagtcgcccgccgtctcaagatcggccggtccacgctctaccgcaaactcgatgaagcgggcgttcccgggcatggcggcaaaagcggcgaagagacgcattga

SEQ ID NO: 6081 - DNA, 2166 bp, BradyrhizobiumColbertium
gtgggctttgaccgtgtcttgatgacagtcgcggcgaccttcctcgcggtgtcggccagcgcggctctggcgcaggatcaggcgcgcagcagcgccgccgagctcgcgatcgaagctgcgatcccgcgccccgagccggccaacgtcccgcctccgactgcagccgacatcaagctcgacaccaccgcgacgcttcaggacgcgaccaaggagcccgcgaaaactgaggcggcgccctcgcccgaacccaaggcttcggacgttgccactacgcctgccaccgaagcgcctaagaacgatacagccaagacggaaccggcaaagaccgagccggccaaggccgacaccgcaacgacagcgcccgcgcctcctgctgctgcggccgctccggccgccgagccggtgaaggccgcgagcagcgttcccgctgccgaccagccggttgccgacaggctcaaggatatcatcggcgccaaaacctcgcggcacttcgaccgcaagaacgagcgcgctgcagtcgagaagttctacagcgcacgcgatttcgcgccggtctggacccagggcggtactctcaccgctgcggccaagggcgtggttgcgcggctcaaagacgcggcctccgacggcctcaatccctccgactatccggttccggatttcgccgccgccacgacaccggatacgctggctgatgccgagctcaagctcacctccagcatgttcgactatgcacgccatgcccagagcggccgcatgcattggtcgcaggcgagtggcgacattctctatcccgaacatccggtcgatcccaacgaggtgctcgccaaggtcacgacggcggcggacgcctccgcagcgctcgagagctacaacccgccgcacaagctctacaaggagctgaaggcgaagctggccgagctgcgcggccagggcaacggcccagtgatcgagatcgccgagggcccggcgctgaaatacaccccggccagcaagaagcggcatgagatcgtcgtggaagatccgcgcgtgccgcagctgcgcgccaagctcggcctggccgagaacgccggcgacacccgctatgacgcggcggttgccgaagccgtgcgcaaattccagagcggcgccgagatgaaggcgaccggcatcctcgacgacaagacggtcaaggcgctcaacacccccaagcgcgacaagcagatcgatgtggtgctggtgaacatggagcgctggcgctggctgccgcgcgacctcggcgcgcccgcgctgggcgacgcttatgtcatcctcaacattcccgacttcacgttgaaggtgatgcagcgcggccagcaggtgtggaccactcgcgtcgtcaccggcaagccgggcaagcatgcgaccccgctcctcaccgagacgatgaagtacatcacggtcaacccgacctggaacgtgccgccgtcgatcgtctataacgagtacctgccggcattgcagcaggacccgaccgtgcttcagcgcatgggtctgaggctcgagcaaaaccgcgacggctcggtgcacatctcgcagccacccggcgaggccaacgcgctcggccgcatacgcttcaacttcccgaacaagttcctggtctatcaacacgacacgccggacaagcatttgttcgccaaggaggagcgcgccttcagccatggctgcatgcgcgtgcagaatccggatcagtacgcctccgtcctgctcaacatcgtcatgccgaacgagaagtacacgccggagcgcatccgcagcatgtacggcaagagcgagatcgacctgaaattcccgacgccgattccggtgaacatcacctatcagaccgcattcgtcgatgacgcgggcaagctgcaattccgcaaggacatctatggccgcgacgccgccatgatcaacattctgaagaacagccgcggcaaggacatcgagaacgtcgtcgcgcactcgcagccgagctactcacggccggcgacgacgctgccggcgggggttgcggtggccaacaatggcggcggcttcaatggcagcggcttcggctcgtccgggccgaacttcttcgagcgcctgttcggggcaccaaccccggccgcgccgccggccccggtcggccgccggccgcagcagcagcgggtgttcacccgctga

SEQ ID NO: 6082 - DNA, 1572 bp, BradyrhizobiumColbertium
gtgctgtcgttgtcccatgcgggcgtgaaggccggatcccggatcggcctcgctgctgcattgctgcttgcggccgccggctcggttcatgacgccgccgccctgaacgagaccaagacgctctcgttccaccacacgcattccggcgaagacctcaccgtcaccttcaaacgcgacgggcgctacgacgaagcagcgctgaagcagctcaaccacttcctgcgcgactggcgcacccaggagcagacggtcatggaccgtcgcctgttcgacatcctctgggaagtctatcgcgacgtcgacggcaagcagccgatccagatcatttcctcctatcgctcccccgccaccaacgccatgctccgccgccgctcctcgggcgtggcgcgctccagccagcatatgctgggacatgcgatggacttctatatcccgggcgtgccgctggagcagatccgtttcgccggcctgcgcctccagcgtggcggcgtcgggttctatccgacctccggctcgcctttcgtgcatctggacaccggcagcgtccggcactggccgcggatgacccatgaccagctcgcccgcgtcttcccggacggaaagacggtgcatctgccgaccgatggcgtgccgctgaagaattatgagctggcgaaggccgagatcgagcggcgcggcagcggcgacgatgccggcagcaagccgaatttcttcgccgccctgttcaagagcaagccggctcccgccgcgagcagcgacgaggatgacgagggcgcgcccgccccagccgcgaagccggcggcaccgaccgtcgtcgcagccgccgccaagcctgccgagccggtgccgacgcctcgcgccaagccgcagatcgccgccgcactccagctcgcttcggccgatgcgcagatcgttgcgccgcccaagccgaagcccgcgcccgtggctgacaagcctgcaaccggcaagctggagacccctgccgacatcatcaatgcccgcggcttctgggatgatgtcccggctgcgccgcagcaggctacaccggcgcaggtggcggccctgaaggcgcgccaggcgcttgcggccgccaccgatccgcacccgaccgcgagcgtcaccaacgcaactctgcaggcgctggcttacgcgccggccgcctccccggtcgatcgcgccaacgtcgtcgcggcatccgcgccgatcccgcgcaccgcccgccccgcggcgtcccgcagcgtcgctcaggcaaccgagatcaacacggtcgtcggcaagagcatcgacggcagggtcgcgaccgccacccgcctctccgcggcgaagggcgagagcatctggctcaagatcgtcatgctctcgccgagtgccagccacgcgatgtcggtgacgctgatgggcgagctcgataccgcagcgctgcgcggcttcttcgtcaagcctcatgccgtgatcgcgatgggatttgccgacgaccccatgccgggcctgtcctgcgacagtttctcgggcagcgcgaccgcaaagctccagacgacgtcgttcgtcgtgcggaccgcgtcgctacgctga

SEQ ID NO: 6083 - DNA, 273 bp, BradyrhizobiumColbertium
atggccacctccgccgccgtccgcgacgacgagcccgcgacgaaatttgccaaggaccagctcaaatccatcatcgagcgtatcgagcggctggaggaagaaaagaaggcgatctccgacgacatccgcgacgtctatgccgagagcaagggcaacggctacgacgtcaaggcgctgcgcaccatcgtgcgcctgcgcaagcaggacccgaacgaacgcgccgaggccgagacgatcctcgagacctacatgcaggcgctgggcatgatctga

SEQ ID NO: 6084 - DNA, 306 bp, BradyrhizobiumColbertium
atgccaatcgacgacaaaaccagaacggagctcgaggccgccgctttccggcgcctggtcgatcatttgcaggcgcggaccgacgtccagaacatcgatctgatgaacctggcgggtttctgccgcaactgcctgtccaactggctcaaggacgccgccgacgcccagggcgtcgccctgagcaaggacgagagccgcgaggcagtctacggcatgccctacgagacctggaaatcgaaatatcagggcgcggccacgcctgagcagcttgaggcgatgaagaaggtccatccccacggccattga

SEQ ID NO: 6085 - DNA, 1230 bp, BradyrhizobiumColbertium
atggcaaccacggcacccagttcgagcctggtcgctcatgataatgacaactcccttcgcagttctcgtggcccgactgcggcggcgcaagaaccgcccggtatcaaggctacgccgtttgtttggcgcgaccccaagaccatgccgaggcgccaatttctgtatggccaccatctgatccgcaagttcggctcggcgaccttcgcggggggaggcatcggaaaatcatttctgaagatcacggaggcagtggcaatggctactggccgagctctgctcggcgtcaggccgaatgagcggtgtcgcgtttggtattggaatggcgaagatccgcttgaagaaatcaatcgccgcattgcagctgtttgcctctactacaacatcagagcggaagaactggaggggtggctgtttgttgacagtggccgtgatcaagaaatcatcattgccagccagacctcaacagaaggtactaaaatcgcggctcccgtggtcaggtcgctgatcgataccatccactacaataaaattgatgtgctgatggtcgaccccttcatttcgtgtcaccgcgttaccgagaacgacaacggcgccattgacatggtggcgaagaagtggaccgccatcgcggacgagaccaacgcagcgattgagcttgtccatcacgtcagaaagaccggtggggctgaggcgacggttgaagatgggcgaggcgctgtcgccctgttaggggcggttcgatccgcccaagtgctcaacaagatgacggcagaggaaggcaacagggctggtgttgaaaatccccggcaatacttcagcgttgagactggcaagctgaacctgtccccgcccccggatggcaaagactggtttcacatcacgccagtgcatctcggaaacggcgatggcgacctcgaccccggtgatagtgtcggtgtggtcgtcagttggaaatggccgaacccgttggacggcgtgaccggggcggattttgacgccgcagccgctgccattcgcgcagggaattggcgccacgatggccaagcgaaagaatgggtcggcatcccgatcgccagggctatgaagctcgatatcagccgcaaggcagacaaggccaaggttaatgggctggtgaagctctggattggagctggcgctttggaggtctacgaggagttggacgaaaaacgtatgaagagaaagtttgtgcgggtggcagacgcaacctga

SEQ ID NO: 6086 - DNA, 984 bp, BradyrhizobiumColbertium
atgaagctcggctattcgcctttgccgatcttgccgcctgatgccccaaaagccggtgcgggcaaggcccctgctctgtctggatggcagaaatactgcaacgaagcgccgagctccttttttatcgccgggcattctcgcgccccggcggtgggcgtcggcgtcgccaccggatttggcggcttagttgctgtcgatatcgacggctacgactcgatcattggtccgattctgtcgacgctgccgcctgccatcgtcgtcaagatcggtcggcgaggcctcacgtcgttttatcgttcgatcgtaccgatgaagtctcgctcctacaatgatgccagcggaatccgcctgctcgatttcctgagtagtggacgtcaaactgtgattcctccttcgattcatccggacacgggtcgttcctattactggtggtcggacgcgacgttagaggacaccgcgcttgaagcgcttcccgtgctcactcatgagcaccgcgccgcgatggaagacgtccttcgctcattcggctggaccgttctggaacgccgcaagtcatgcggcggggcagtcgagcagtccgttgcatctcccggcgactctgatgcggcgtccctcttccgcgcggtgaatgaagctgcgatggcgaaccttggcgcctgggtgccgcatctcgggttacagcgctgctatccggccggtggtggtttcaaggccgtcgccgagtggcggccgtccggcactggtcgggcgcttcatttgcgcaagccgaacctgtcgttcaaatcgggcggtatcgtagactttggcgatggctctaagggctacaccccgattgatgttgtcatggaagcgcgcctcgtgaccaacgccgaagctctggtttggctcgctccgcttgtcgacgtgccgcttgaaaatcccgaagaagctgcgctcgcggaccgcatcatcgccgcagctgcgaagaagaaggaatttatgtga

SEQ ID NO: 6087 - DNA, 204 bp, BradyrhizobiumColbertium
atgaccagtgaagactttctttttactgaggctgagttcgccgacttcgtcggcaaatcagtgtcgtgggcgcgacttctgcgacgccagcagcgcgcgcccggccacatcaaggtgggccgaacgccgatgtacccccgcgaggccatcgcagaatggatgcatgccaataccgtcaggtcgggtggaaagccctccgcataa

SEQ ID NO: 6088 - DNA, 207 bp, BradyrhizobiumColbertium
gtgactaagagacttattaagaccgcaccgctgctggaaaagctcggtggtatctcgcgctcgacgcttgatcgcacgatcaacgcccccgaccaaaattttcccaagccgatctatatgggccgcacccggtttttcgacgttgacgccattgacgcttggctggcgactcggtcgaataagcaccctgacaagcgcgcggcgtga

SEQ ID NO: 6089 - DNA, 462 bp, BradyrhizobiumColbertium
gtggcaccgcttccctcccctcaagagcttgaattgaccgaactcgccggcgtcttccatgcgacgcacaaccccgcagccgcgtggctcgcgttttatctggcaaagaagcacaatctgcccgtgcctgagatcgtggcaaatgagatcgagcgctttgccgcagaagtatcaaaaccgctggtcgcggcttggaacggtgatggtcgggcaaggatcaccaccaaggacatcaccacggcatggggttgcgggcggggcaccaagcttgcgcaggccttgcggctgagtcgtcgcgccgcatctatcgtcggcgagtattgggagaagataacgagcggagtcaggcccaccgacgcactctcggcactcatggatgaccacaacctaagtgacaaggccgtcgaggaactccttacggcggcgcgaaagaagcgcgacatggatactccgacgttttga

SEQ ID NO: 6090 - DNA, 1341 bp, BradyrhizobiumColbertium
atgaaaaagccgctgtccgcgaaggcaatcaccaatgccgaacccaaggcgacgcgctacgctctgccggacgtggggcatcccgggctgcgggttctgattcagccttcgggcgcgaagtcgttcgtctaccgtttcaagcgcgacaacgggcaagacgtgacccttacgctaggcccggcggcagggcccggcgcgcttacgcttgtgcaggcccgtgaggcggccggtgatgcacgccggcagcgtgcgcttggctcggacccagccgatcagaagcgcgctatgcgcaaggcggaagctgcacggatcgcggctgaggagaaggaagcccggcgcaaggatgacatcgtggagcgcgtcctggaccgctactaccgggacaaggtcaacgcgatgaagtccgccaaggaactcaaacggcttctgagtaaggaattgaccccatgggcgaagcgcagagtcgatgacatcgcacgcgctgacgccatcaaattaatcgacgcaatcaaggacagcggcaggcccgtgctggcgaatcggacgcgcgccgccgcccggacgttcttcggatggtgtatagataaggccctgatcgaggacaatccattcgagcgtacgaagcctgtggtggttgaagaggcgcgggagcgcgccctctcaaacgccgatctgcgcgcactgtctctcgcgctcgaccgaatggactggacatggcgagcgttctatcggctcttggtcctgacgggacagcgccgggatgaggttgcggacatggcttgggcagagctcaaggacctagacggaccctccccgctttgggtgctgcccgcccggcggacgaagaatggtcgggaacatgttattccgctttcgccagccgtcgttgagattctgcgcgccattccaaaggttcaggtcaaggcaatggtcaatggtgccgaacgatgggaggactccccgcttgttctgaccacgaccggaacaacaccgatctcaggattttccaaagccaaggtgcatctggacaaagccatgatggaagtcgcacgggaggaagcggagaagcgtggcggcgatcctgtcatgattgagccgtggcggattcacgacctgaggagaacgatggtgtcaggtatggcggccctcggcgttggtgtggctgtcgtcgaaaaagtagtgaaccacgtatcgggaacattcggcggcatcgtcggcgtttaccagcgccatgattatcttgccgagaaacgccacgccctcaacctgtgggccgatcacgtcgcgagcttgatcgttgaacgaccatccaatgtcgtttcgatcaaggccggagcgtaa

SEQ ID NO: 6091 - DNA, 243 bp, BradyrhizobiumColbertium
ttgctcaccaccctcgacgagacggagcacagcattgatgtacgcaagttcgtgctgagcctgctcgatcttggcttggtaggcagcaatcatgccgctgatctcggcgcgcttttgcttgaacatttgaatgatgagctgatcggccatgctgcattgaagccgaaatcagccggccgcgaccagccccgaacttggtgccgttgctccataattcgtaagcggcatgaggcacccacctag

SEQ ID NO: 6092 - DNA, 147 bp, BradyrhizobiumColbertium
atgatcctcaggaagctgggcacctatctcggccgcgtcatccgcgacattggccgcaagatcgaaggtgacggcgggctcgaagcggcgttcgcaaagctgctattgctggcgcggcgtgtgcgcgagcgcgcctgttccggctag

SEQ ID NO: 6093 - DNA, 249 bp, BradyrhizobiumColbertium
atgacgtaccggctcgcgtccctcatggacaagggcgtcgcgccgaatacggccgcggcggtgacgaagatattcgccaccgaaagcaattccaagtgcgccgatgccggcatccagatcatgggcggcgcgggactgatgatgagttcggaaatgcagatgtatttccgcgattccagggtcggaacgataggcggaggcaccagcgaaatcctccgcaacgtgatcgccaagtcaatgctctcatag

SEQ ID NO: 6094 - DNA, 876 bp, BradyrhizobiumColbertium
ttgattatcccatttgctgcgggtggcccgacagacgcgcttgggcgaacgttcgctaaggaactcggggaagtacttggacaaacagtcgtcgtcgagaacagaactggcgcgggcggaaacattggaacggacgccgtcgccaagtcccctccagacggctacacgatcggcttcggcacgaatggaccgctcgcaggcaatgtcacgctcttcaagtcgctgccttatgatccgaccacggcattcgccccaatcacccgcatcgcgttcgtatcgaacttaatcgcagtgcatcctgctctgggtgtgaaaacgttgagcgaactgattgagttgattcgaagagagcccaacaagcacaatttcgcgcacggaggctcaggcactacacagcatctcggcggagagctgttcaaatcgatggcgcagctgcagatgagcggtgtggcttatcgtggcgaagggcccgcgcttaatgacgttattgcgggtcatgtcccgatcatctttttgagtcttgcgaccggcatccccatcgtgcagtcgggtcacctcatcgcgctggcggtgacttcgaaggatcgcattccggctctcgctaacattccgacggtggctgaagctgccctgccagggtatgttgcaacagcttggtacgcgctgctcgcgcctgccggtactccacagcaaatagttgagaagctgaatgccgcttctcgcaaggccatggagtctcctgggacgaagaagcttctcgatcaagccggagcgattactgcccccaccacacccggcgagcttggcgagttcatcaagagtgaaatcagtcgttggaagccaatcattgagatgtctggcgccaaagtcgactga

SEQ ID NO: 6095 - DNA, 558 bp, BradyrhizobiumColbertium
atgtggcgcgaagacaccttctacagtctgctcaccagtcatgcgaccgagcggcctgatgccgtggcgctgcaggatgctcgccaaacgctgacgtggggtgagctcaagcgttggacggacggtgtcgcggcagatctgcgcgaatacgggctggtcggcagcgaccgcgtgatgatgtggttgtccaaccgcatcgaggcggtcgtcatgttcctcgcctgcgcgcgtgaagggatcgcctgcaacccctcggtccacaagacctacacatgcgccgaggtcggcgaccttctcaacacgctgtcggcgcgggcgcttctgactgaagacggttgggggaccgaccgtgcgaccgtcgactacggctggtttctatccggagatcttggcgtcatggacgccaaaggcaatctccgcatcgaggggcgcctcaaggacctgataatccggggcggccacaacatctatccgtcgcactggcttctttcttacttatcgcggccatgcggacagccaacgtgcgtggcacacgctttgctgactaccaaaaaataa

SEQ ID NO: 6096 - DNA, 159 bp, BradyrhizobiumColbertium
atggccgaggcccgcgagcggcgcatcacgacgctgaatctcgatcgcaagatctacatggtgctggtcactccggccgggtccagagagatgctcgttctcagcgaaacgccgggcgacgcacttctcagcttcatcggcagcgtcgatttctcctga

SEQ ID NO: 6097 - DNA, 1506 bp, BradyrhizobiumColbertium
atgcccctgaaagaatttactttcctcgacgtgtaccgccgcaatgcggaattttttcccgaccgcaccgcgttcgtttttgaaggccagcgcatcacccatcgtgaatatctgaaaagggtcgagcggctggcggcgggcctagcacgcgagggcgtaaaatccggtgaccgcgtcgccatcctttcgcaaaactcgctcgaaatgatcgatgtgatcggagcggtcgcacggctcggcgcgatcctgctgccggttaatttccggctcaacgccgaagaaatcggctacgtcctcgccgacggtgcgccggtgctggttgtggcgggggcagaataccaggagattatcgcggctctaaaaccgtcgctaccttcggtccggagctattttggcatcggcaagcacactgcgccgtttgcgccgctcgcaaatcttgcggcttcggacgcgtcgatgtctgacgtgaacttcagcgccgatgatggcttcgtaatcattcacaccgccgccgtcggcgggcggccgcgcggcgcgctgttgtcgcaagccaaccttctaacggcgcacagctcgctggtgcaggcctggagcctgaccgagcgcgacgtcaatcttggtgtgctgccgctgttccacgtcgccggccttggcctgatgctgacggtacagcaggctggcggcgccagcgtcatcgcttcgaaattcgacccgcaacaggcggtttgcgacattgccgccgagagggtgaccgtcatgtcggagttcgcgccgatgctggcgggcctgatggatcaggccaagggcgacgaattgaagacgttgcgtgctgtgaccggactggataccccggcgacgattgaacgcttcgagaaagcgtgcccccacgcggtattctgggcagccttcggacagtccgagacatcgggcctcgcaacgctgtcgccctaccgcaaccggccaggatcagctgggcgccccctgttctggcgcaccattacggtcgtcgacagcgccgacaaaccaaggcccaccggacaaaccggcgagatcgtggtgcgtggtcccaccgtttttaaaggctactggaataacgacgccgatactgcccacaccttccgtaatggctggcatcacaccggcgacatcggctatttcgatgccgatggctatctctggtatgccggccgtgctcccgagaaagagctgatcaagacgggtggggagaacgtctacccggcggaggtcgaaaacgcgattctccaacatccagatatcgccgacgtcgtggtcatcggcgtgcctgatccccagtggagcgaagccatcaaagcgatctgcgtgcgccgaactggcgcgaatgtcaccgccgacgagctcatcgacttcgtcgccggaaagatcgcacgctacaagaagccaaagcacattgttttcgtcgatcaactgccgaggaccgccaagggcgaaatcgatcgcgccgcagtcaaattcgacaactcttag

SEQ ID NO: 6098 - DNA, 765 bp, BradyrhizobiumColbertium
atgagactaggcagcgtcaactatgaaactaaagggaagatcgccatccttacgctggacgagccgggcaagcttaacgcactcagcacaggcatccgtgagggtattctggatggcctgaagaaagtggatgcagacgacaacgtccgcgtcgccatcatcaccggcaacggggacaaggcattttgcgcgggcgccgatattagcggcttcaactttgatccggacaaagtacgcaagtttatgatcgaggctttggcggtattagcggcaccggaaaattgccgcaaacccgtaatctccgccgtcaatggtattgcgttcggcggtggctttgaactcgcgatcgcttcagactttatcatcgcatcggatcgcgcacgcttcgcggtaccggagatcaagctcggactactgcccggttttgcgattgtacgcctgcacgatatggtcggccgcgccaaggccaaagaaatgagtatcctcggcgatccaatcagcgcggatgaggcattcagactaggcctcgtactacgtgtggttcctcacggcgatctgctcacggacgccctggcatttgccgaacgaattgcatcaaaaccaaagcttgcggtgcagatggccaaatcgttttacaaccgcggcctcggtggagatgagatacggcacgccatcgatggttttccgctcctattcatgcatcgagacgcacaggaaggtatcgctgcctttctcgaaaaacgtgagccaaaattcgagagttga

SEQ ID NO: 6099 - DNA, 783 bp, BradyrhizobiumColbertium
gtgtccgaaaaagagatcttgtacgacgtcaaggactacgtcgcgaccatcaccatcaatcggccaaagaccctcaacgcctttaccggcgataacatcgtagagatggagcggctgatcctcgaggcaaccgcagacaaaacagttggcgtcatcgtcctcaccggctccggcgagcgcgcgttctgcgtcggcggcgacgtcaactgggagaaggacgccggcggcaagagcgggctcgaaggactgaaattcaactttaaccgccacatcgtcgaatgcccgaaaccggtgatcgcgcgtgtcaacggttacgcgattggcggcggacaccacatcgcctatttctgcgatttcaccatcgccgcggagcatgcgatctttggccagaatggtccacgtgtcggctccccggccggaggctacatcgtctcgcacagcgccaatgtgcttggccacaagcgcgcgcgagagctctggatgctggcgcgacgctacaccgccaaacaagcgctcgactggggactggccaattccgtcgttccgatggccgaacttgacgtcgaggtgcggaagtattgcgacgaactcctggctttgagccccacttgcctgaagattctgaagcgctcattctactatcacatggcgccgatcatggagcgcgacatggatgacctcgtccgcgaggtcgcacccgcctattttacgacacaagaacagcaggaaggcgccaatgcattcctcgagaagcgcaagccggatttcagcgcgtttcgctaa

SEQ ID NO: 6100 - DNA, 795 bp, BradyrhizobiumColbertium
atggattttaatctgaagggcaaatcggtcgtcgtcactggcggcggctccaacatcggccgagccattgtgctcgggtttgcagccgagggcgccaacattacggttggcgatctcgaccaggcgcaggcggagaaagttgccgaacttgcgcggaagaacggcgctgccagcattcaggtaatcaagaccgacgtgaccgatttcgatcaggtaaacgccatgttcaaggccgctaccgataagcatggcacggtcgatgtgctcgtcaataacgtaggctgggatcagctgatgttctttacgcaaacaacgcccgagttctgggacaagattatcaagatcaactacgtcggcgtgcttaactgcaccaaatgtgcgctcgatatcatgattccgaagggtgccggcgctatcgtgtcgatcagttccgacgcaagccgctcgggcgagccgcgcgaggcggtctatggtggcgtcaaggccgccgttaattctttcatgaagaccattgccaaagagaacggccgctatggcatccgctgcaacgtcgtttgtcctggcgtcactgttcccgtggatacggaagaagtcggcgccaacagcatgtggacaaagccagactcaatgttcacggcggagcaattcgagaaagtcgccaaggcgctgccgctgcgcaagctgggtcgcccaaacgatattgccaatgccgtagtgttcctctcgtccgccgccgcaggtcatgtcaccggccaggtcctgtcggtgtcaggcggatacaccatgatcggctga

SEQ ID NO: 6101 - DNA, 1998 bp, BradyrhizobiumColbertium
gtgttcaagaaaatcctgattgccaatcgcggcgagatcgcctgccggatcgcgcgaacctgccatcggctcggggtcgcggttgccggcattcactccacagccgacgccgacgccttgcatgtgaagatgatcggcgaatccatagagattggaggcgccgccgcgtccgacagctacctgcggatcgatgcggtgattgccgcagcgaaagcgaccggcgcccaggccatccatcccggcttcggatttctggccgagaacgccacgttcgcccgcgccgtcgaggcggcaggtctggtttttatcgggccgacgccggacgtgatcgaacggctcggcgacaaggcctctgccaagaaagaggctgaggcggccgacgtgcctatcgtccccggcagcaagaagcccagtgaggatgctgccgagatcgcccggatcgtccaggaagtcgggcttccggtgatgctgaaggcagcggccggcggcggcggcaagggtatgcgtgccgtttccgatctcgatggccttgccaatgagatcgaatcggccatgcgtgaggcgaagaattcgttcggctatcccggactgatcgtcgaaaaactggtcgaacgcgggcgccatatcgaagtgcagatcgccggcgatggcaaaggcaacgtgcttcacctgctcgagcgtgaatgttccctgcagcgccgtcaccagaagctcatcgaggaagcccctgccgtcaatctcgccgcaacgcttcgcgacaaaatggccgccgacgcggtgcggctcggcaagcgcctgaactatcgcggggtcggcactgtcgaattcatcctgagcggagacacctactattttctggaagtaaacccgcgtctccaggtcgagcaccccgtgaccgagatggtcaccggcatcgatattgtcgaggtgatgctccgcatcgccgccggagaagggctgccgtttacacaaaatgcggtgacatgtagcgggcatgccgtcgaggtgcgcatttgtgcggaggatccggcagataattttctcccttgcacgggagacctcgcttacgtcaaatttcccgccgacggcgttcgcgtcgagacgggcgtcgaaagcgggtcggtagtcacgccgtattacgactcgatgctggcaaaactcattgcccacgccgaaacgcgcaatgaggcgctcgataaactcgagcgggctctcgacgcgacctcgattttcggaattacgaccaatcaaggatttctcaagcgcttgctcggcctgccagcgacgcgcagtgccaccttttacacacgcctgatcgacgagcaaatcgaccagttggtcgacaaggcaaagaatctggacgccggggcgttggcgctgggcgcctacttctggatgatccggcaacgacagcccctcgcaagggggccgtggcagtcgcgcgaaatgactggatggcacatggccgcgggtggcgacggattgtcaccgattccgatcctgcacctcgaaaccgcgggcgcaagcgcggagatccgattcgcaccgctcaaggccgacggctcgatgattgtcggcgtcaacgacgagaagctaccggtcagactcatcccgctcaaagacgactgcttcacggcgattgtcggcgcgcggcgtgagacggtgcgcatttatcaggaaaaccaaaccatctttgtccaccatcgccgcggcgtccacacgctgacggcaatcccctatcttacctacatcagcgctgtcgccgaaaccagcggcgagctgcgtgcgcctatgatgggcatgatcctgaaggtcaacgtcgcagtcggcgatacgatcaaggcgggcgatgtcgcagccgtactggaatcgatgaagatggagttgcggatcaattgcgaaaccgatggcgtggtcacggcagtcaattgccggccgggcgagaccgtcgagcgcaacgcggttgtcgtggtcgtggagccagagcagcaaccgtaa

SEQ ID NO: 6102 - DNA, 1608 bp, BradyrhizobiumColbertium
atggctctcatgaagtccgatgtgtccgctgcgagcgaagagtatcgccgtaaccgggacgcttacggcttgagaatcgccgatctgcatgagcgccgggcagctgcaatggtcggcggtccggaacgggcgcggctgctgcacaaggagcgcaagcaattactgcctcgcgaacggatcgctgcgctaattgatcccggctcgccgttcctcgaattttgccagttcgcgggcgaaggcatgtatgacggcgtgccgcccggcggcagcatcgtcaccggcgttggaatggtgtcgggccgcgcctgcatgctgatcgccaacgacgccacggtcaaaggcggcacctactacgggatcacctgcaagaagcacgtccgcgcacagaaattcgcctggcaacaccgcctcccctgcgtcaccatggtgcaatccggcggcgccaacctgccggaccagcccaacatttttcccgacgacggacagttcggatcgatcttttacaaccagatccggatgtcgagcgagggtatcgcgcagatcgcaatcgtccatgggccctcgaccgccggcggcgcttacatgccggcgctctgcgacgagaccgtcatcatccgcaatcagggcgccatgttcctgggcggaccacaactggtctatgccgcgaccaaggaagaagtcggcgtcgaagcgctcggcggcggtgaaatgcatagccgcgtcagcggcgtcaccgaccatctggcggaaagcgacagccacgcgatcgcgattacccgcgatatcgtcgccaatctcggtgacattcccatgcaacggtggaacgtggcgccaccgcgagagccgcgcttcgaccccaaggatatttatgggctgatcagcacggacccgcgtatccccaccaacaatcgagagattgttgcgcggttggtcgatggcagtgagtttcacgaattcaagccgctatatggcgagacgctgatcaccggctttggccgcataatgggcttcgagatcgggattctctgtaacaacggggtgctgttttccgaatgcgcgctgaaggcgactcacttcatcgacctctgctgcaagcgcaatatcccgctgctgttcatggccgacgtcaccggctttatggtcgggcgcgaggcggaagaaggcggcatcgccaagcacggcgcaaagatgatcaccgcaatggccagcgccaacgtgccgaaatacacgctgatcatcgggaattcctacggagccggctatctggcgatgtgcggccgtgccttcaaacctcatgcgatgatgatgtggccgcacgggcgctccgcgatcatggggccggatcaggccgccaacacgctcgcgatggtcaaggacgatatccacaagcgcgatggcacgagctggaccgacgaagagcgcgaggcttatcgcgctccggttcgcaagacttttgaggattttgcgaacgcctacaacttcgcgcgcaacacctggtgtgacatggtgatcgatccgctcgagacccgccacgtgatggccctcttgcttgatctcgccggccgtctgccacagcaggaaacagacttcggcgtgttcaggatgtga

SEQ ID NO: 6103 - DNA, 1164 bp, BradyrhizobiumColbertium
atggactttgatcttacgcacgagcagcggcaaatctacgaatacggcgatatggttgcgaagcaattcgatcgcaaatactggatggaatgcgccgacaagcacgtattcccccaagccctttacagcaaggttgcggaggatggcttcgtcggaacgatggtgcctgaggaatacggcggctcgggacaaggcatggtcgagatgcacctgttccttgagggcttgtcaaacaatggcattccactgctaaacctcgtcgtcggcgcggcaatgagcttgggattcatagccaaatacggcagcgaagcgcagaaattgcgctatctgcccgatgcgtgtggcggcaagacgcgcttttgcttcgcgatcaccgagcctgacgcgggaaccaacacgattcgtacttccacgatagcaaagaagcgtggcaatcgcttcgcgctgagcggtcagaagacatttatcaccgacgccgatggcgcggactacgcgctggtggtgacgcgaacgacagcgcataccgaggttcagaagaaaaccgatggcttcaccctgtttgtggtcgacctgaaagccaagggcgtgcagaagcaatacattccagtgagcattccggccccggaaacacaatggcagctgtttttcgacgaagtcgatcttgggccggaggacattgttggcgaagtcgacaagggattcggcattttgttcaaaagccttaatcccgaacgcattcttgtcggttcgatttcctgcggtctcggccgctatgccctgaaccgggcagtcgaatacgccaaggagcggcgggttttcaacaacgtgccgatcggatcttatcagggcttgcagcatcccctggccagcgcccgcaccgatgtcgaattggcatcgctgatgacactaaaagccgcctggatcttcgatcagggccgcgaagccggcgaattctccaacatggcaaaacttgccgcagccgacgccggcatcaaggcggtggacaccgcgctgcaatgcttcggcggcaacgggttcaccaaggagtacggcatcttcgatatctatccgctggtgcggctgttgaagaccgcgccgctcaatcgcgaaatgattctcaactacatcggcgagcacgtgatgggcttgcctcgcagttattag

SEQ ID NO: 6104 - DNA, 1608 bp, BradyrhizobiumColbertium
ttgaccgcgatgaaatccgctgtcgcgaccgggtcggacgagttcaagctcaatcgcgctcattatctggcgcggatcgccgatctccaaaggcgtcgggccgaggccaatcagggcggctccgccaaggctcgcgccttgcataaatcgcgcggccagctgctgccgcgcgaacgcatcgcggcgctgatcgatcccggttcgccgtttctcgagttcggccacctggcgggcgaggggatgtacgacggcgtgccgccgggcgcgacaattatcacgggcgtcggacaggtctgcgggcgcggttgcatgcttatcgccaacgatgccacagtgaagggcgggacgctgttcggcatgacaacgaagaagcatacccgcgcccagttgtttgcgtggcaacaccggctgccctgcatcaccttggtgcaatcaggtggcggcttcctgccggacatcgccaatatctttccggacgaagggcaggccggatcgatcatgtacaatcaggtaaagatgtcggccgagaatatcgcgcagatcgccgtcgttcacggcccttcgaccgcgggcggcgcttacattccggcgctgtgcgacgaggtggtgatcgtacgcgaccagggcgcgatgtttctcggcagcccgcaactggtatttgccgcgaccggcgagaccatcgagatcgaaccgctcggcggcgcggagatgcacagccggatcagcggcgtcaccgaccatatcgccgagaatgacagccacgcgctggcgatcgtgcgtaatatcgtcgccaacctgggagagccgccgcgattgcgctggacggtcgagcagggcgaaccgccttgccatgcggtcgaggaaatctatggaatcgtcagcgctaaccggcgcatcccaacggacaaccgggagatcctggcgcgcctcatcgacggcagccgctttcaagacttcaagcatcttcacggcgaaaccatgctatgcggatttgcccgcatccacggtttcgaggtcggcatcctggccaataacggcgtgctgttttcggaaagcgcggtcaagggggcgcacttcatcgaactttgctgcaagcgcgacattccgttgctgttcctggtcgatgtctccggctttatggtcgggtccgcagtcgagcgtcagggcattgccaagcatggagccaagttcatgaccgcgatggcctgcgccgatgtgccgaaatacactatcattaccggcggctcttatgccgcggcttatttcgcaatgctaggccgcgcgttcaaaccaaacgctaccctgatgtggccaagcgcccacgccgccttgatgggaccggagcaggcggcgacaacgctaacgatggtgcgcgacaatatccatcagcgcgaaggcagttcttggaccgacgaagaacgtgaagagttcaagcggccgatcctgagggacttcgaggcgttcgccgatccctataactacgcccgccatttgtggtgcgatatggtgatcgaacctgcggagacccgcgaggtgatggcgctgctgctcgacctcgccggccggacgcctgccaagccgacgagattcggggtgttccggatgtag

SEQ ID NO: 6105 - DNA, 420 bp, BradyrhizobiumColbertium
gtgatctcgtccgaagacgccatgaagaagccggtgccgacgcccgacgcggattccgccgccctctggcgcggcctgcacgacggcgtgctgctgctgcagcactgcgccgattgcggccacgtgcaatattaccagcaggcgatgtgccggcagtgcggcggcgaaaatcttgcccatcgaccggcaagcgggcgcggcaaggtacattccttcagcgtggtacagcgcgcaccgggacccgctttcaaaaccgatctgccctacgctgttttgttgatcgatctggaggagggcccgcggatgatcagcacctataccggcggcaagcccgaagaggtcacgttcgacatggacgtcatgctcgtctgcgaaaaaatcagcgaggaagtgacgctgccgcgcttccggcgggcttag

SEQ ID NO: 6106 - DNA, 1191 bp, BradyrhizobiumColbertium
atgctttccattcgtaaacaaacgctacgcggcaaggtcgcggtaatcggtatcggaatgtcgccggttggtaaggtgccgggaaagagcccgttatggctcgccgccgacgccgcgaagaaggcgctggccgatgccggcatcgggaaaaacgagatcgacggcgtgctgtcgagccatgccttcgcttctcccttccatcgcttcagcgttgcgttcagcgagtatttaggtattcagccgaccttttcgaacacgcttcaggtatccggcgcgacggcggcgacgatgttcaatattggcgccgctgccattcatggcggcctcgccgaggtcgtactcgtggtcggcggcgacagcctgctgaccggcctgacgccggatctggcgctgcgctcgatgacggaaagccgtgatcagcaatacgagatgccgttcggcattcctgtcgcgaatacctttgccatgacggcacaccggcatatgaaggatttcggcaccacaccggaacagttggcggaagtcgccgtggtccagcggcgtcatgctatgcgcacgcccggtgcgcagcagaccagcccgatcacggtggacgacgtgctaagctcagctatggtgacgacgccctaccacaagctcgattgctcgctgatatcggatggcggcgcggcattcattctgacatcggccgaacatgccaaggcgctcggcatcaaaagcccgatctacattctgggcggcggcgaatgctacacccacgaacatattttcctgatgccctcgctgaccgaaaccggcgcggtcgcgtcgagccgaaaggcttacgaaatggccggctatggccccaaggacatggacgtcgccggcgtctatgactgcttcaccggcaccgtcatcatgatgctggaagatctcggtttttgcccgaagggcgaaggcggccgtttcgtcgcggacggccatatgacctatggcggccagattccatcgaacacccatggcggattgttgtcgttcgcccattcgggaatgccgggatcgctgttccattttcatgaggtcatcgcgcagttgcgcggccaatgcggcgaacgccaggtgccgggcgcggaactcgggctggtgcacagcctcggcgcgggtttcgcaaccaatgccaccaccattctgggcacggagaacacgctgtga

SEQ ID NO: 6107 - DNA, 720 bp, BradyrhizobiumColbertium
atgaatgtcgaagaagccattttgacgcggcgctcggtcaggcgatttcttcccaagccggttccagaaccggtcgtgcgaaaaatcatcgaggtctcggcgcgtgcgccaagtggccacaacatccagccgtggaaggtctacgcgatcgcgggcgaggtgaaggatcggctctgcgcggacatcctgaaagctgccgaaactgaaccggacaagcatcggccggaatatgagtattatccgaccgaatggcacgagccctatatcgggcgtcggcgcgagctcggctacgacctttacgcaaagcttggcattgctcgcgacgacgttgccgcacgcacatcgcagatgaaccgcaactatctttttttcgacgccccggtcggacttttcgtgacgatggaccgccgcttgaacaccggcagctatatcgacatgggtatgttcttgcagaacatcctgctcgccgcgcgcggtcatggcctgcacacctgtggccaggccgcgttcacctggtaccacgacatcatccgcaagcatctttcgtttgacgacaccgaaatcctgatttgtggcgtggcgctgggttacgaggacacgactgcgcccgaaaacaagctcgtcaccaggcgggtgccagtcgatacctacgccaagttcttgggattttccggcggcagcacgggcgtcgcctcggcacgcacgacggccggaaactga

SEQ ID NO: 6108 - DNA, 1677 bp, BradyrhizobiumColbertium
atgaattcattcgaacagatgttagaatttaaaaccgatcgggaaaggctgcaagcttatacttttcaattgaggccgtcgtcgggggcggcgagagcaagattcggaggatttgccgtgacagacgggcacgaaaaagctctgacaacgagggcgggcgccagtcccacgattggcgagctgtttcgcgcgagagcgctgatccacaaatcttcggtcgcgatcgagtatcagggcagacagatcagctatgggcagctccttgaccgtgtacatcgggcaacctcgatgctggcgagccaagatcttcgacgaggcgaccgcgtagcattgctctcgcgtaacagaccggagtatctcgaagtggagctggcggccgccaatctcggggtcatcaccgcttgcctgaactggcgattgtcgcagcgggaactcgcctattgtatcgatctggtctcaccgaagctcttgattgttgaagaagaactggccggaaatctcgaactttctcccataggggaccgcaaggttatcaagatcggcccgcaatacgagcatatattgcaagaacaaaacggtcatgcgctgcccattgcggcggaatccgaagacggcctggttatcctttacaccagtgggaccaccggccaacccaaaggggccgtcatttcgcatcgggcgatgatcatgcgggcgctggtgttcagttccgagctgaacatttcgcatcacgatacctttgtggcctgggcgccgctgtttcacatggcatccccggaccacagtctcgcgacactgttgcgcgggggaacggtcgtcgtggtcgatggcttccagatcgagccgttattgtctgctttggagcgccatcggatcggctggtttgtcttgattccgggcatgattgaagcattcatcgccggcttcaaggagcaaaaaacgaccgtaaaaggcgttggcctttgcggcgcgatggccgacctggtccctccgcatgtcatcgccgaggtcactgacctgctgcgagctccctacgtcaacagttttggttcgaccgagactggcttgccgccggcaaccagatcgttgatcccggtaggcgaaatacctgccagcctggcgaagcaacaaagcgcgttctgcgacatcaagcttgtcgattctgccgacaaggaggttccgattggcgcaccgggagagttggctattcgcagcccaactttattctccggctattggaaagctgatgataccaacgtgcgcgattttcgcggcgggtggtttcacatgggcgacgtgtttcggcgcaatgatgacggctcgctcgatttcgtcgatcgcgccaagtacatgatcaagactggcggcgaaaacgtttatccagccgagatcgagcgcgttttgatgagtgatgcagggatcaccgaggccgcggttgtgcgtgtccccgatgtgaaatggggtgaagttcccgtggcattcgtgtcgcgccgcgacaccacggtcaccgaggcggacctgtttgctctgtgccggcgcgatcttgccggatacaaatgtccccggcagttccggttcatcgatttttcggaatttccgcggtccaccagcggcaaggttcagcgccacgagctcgaagccaggctggcgggcgaaaggcaacgggtaaacagctaa

SEQ ID NO: 6109 - DNA, 810 bp, BradyrhizobiumColbertium
atgtccaatcgttatgctgcttataccaaattgaagctcgactatccgtccaagcgggttctccggctcacattcgaccggcccgagacctacaattcggtcgacgccgagacccacactcagctcaccaatatctggcgtgacatcaacgacgatccagatgtcaacgcggtcatcgtgaccggagctggcaaagccttttcggcggggggcgatttcgagctgatcaagagtattctagacaacccggtcgcacggatgtcgacctggaaggaggccaaggatctcgtttataacgttatcaattgcaacaagccgatcatctcggcgatcaacggcgtcgccgtcggtgcaggtctcgtcgtcggaatcctggccgatatctcgatttgtggaaagtccgcgcgcatcgtcgatggtcatacgcggcttggcgtcgcggcgggcgatgtcgcttgcatcatctggccgttattgtgcggccttgcaaaagcaaaatattacctgctgacctgcaagccactgtccggcgaagaagctgagcggatcggtctggtgtcgctatgcgtcgaagacgcggacttgcagaggatagcgatcgagacggccgaggagctttctagcggcgcgcaaagcgcgatccgttggaccaagtacgctcttaacaactggctgcgcgtcaatggtccgctgttcgatacctcgaccgcgcttgagattttgggtttcaccggcgccgaggcgcgcgagggattggcgtcccatctcgaaaaacgcaagccggtgtttccgcaggattgcccgctctga

SEQ ID NO: 6110 - DNA, 1620 bp, BradyrhizobiumColbertium
atggggatggatccgatcttgtcagatcagcgcaagcaagcgatgcgggccgctggattctggagcgatcaaaccttgctcgagtttttttcgaggcatgccagaaacgatccagggcggctcgcggttgttggctacgaagctgcgtccaaccgacgtacggcgctgacatacggcgaactgcagcaagctgccgagcgaaccgcggctaatttgttgcggcttggtgtcaagcctggcgaagtggtgtcgtatcagttgccgaattggtggcaattcatggctcttcacctcgcactgctgcggatcggcgcggtcacaaatcccatcatgccgattttccgcgatcgcgaaatggaattcatgctgaccttggccgagacgcgcgtgctgatcgttccacagcgatttcgcgatttcgatcacgccgcaatggcggaccgcctcaaggccaaggtgcccacacttgagcacgtcgtcattatcggttcgggcgacaatcaagacttcgagaccgtgctgaattcgccgggaaagcgggttgaggcagcgaccgctgcctcggccgatgatgtcgtgcaattgctttatacgtcgggcacaacaggtgagcccaagggggtgatgcatacaggcaatacgttgctgaacagcgtgcgatattttgaggatcgcgtccgtctcacagccaacgatgtcgtgctgatggcctcgccgatggcccatcagaccggttttctcgtcggcctgctgctgccgctgtatctgggaggacgggtcattcttcaggatatctggaatccagccaaggcggtcgatattgtcgagacagagcgcgtgacgatgaccatggcatcgacgccgtttctggcggatttgactgcggaggcggagcggcggcctgaagcgctgcgttcactgcgcactttcgtatcggcaggcgccccaattccccgtgttttagtgcgccaggccacacagaatctttgtgcgcacatcgtctcgggatgggggatgacggaaaacgggctggtgacgaccaccaagctcgacgatccaccggaaaaagtcttcgagaccgacggttgcccaagccagggtatggaagtcaggatcgtcgatggcgggggcaaagtcctgcctcacgatgaagaagggcgcctacaagcgaggggccccggcacctttgtgggctacctcaagcggccgcatctctatgccgtcgatcaggatggctggtttgagaccggcgacctcgcccgcaaggacaaggacggctacattcgtatcacggggcgcaccaaggacatcgtcatccgcggcggcgagaacgttccggtgatcgagattgaacaactgatgtatcgccatccagccgtccgggaagtcgcaatcgtcggagtgccagatgaacgcttgggcgagcgggcctgtgcctgtgtcgtgctgcgcgagggagcattactgacgttagctgacgtgatggcgtatatggcggagaacgctgtagccaagaactactggccggagcgcattgaggtgctcgaagccttgccgaaaacgccgagcggcaaagtgcagaaattcaggcttcgcgagatcgtcagttcgatgaaataa

SEQ ID NO: 6111 - DNA, 1968 bp, BradyrhizobiumColbertium
atgaataatccaacgtcctatgcatggacacctccgccggagctaattgcaacaagcaatctgaccgctttcctgcgcgcaaccggatatgacgattacgatcacctcgcgtcgaaggctgaggccgatccggcatggctaatggaggaagtctttaagttctgcgatgttcgattctatcgcagttacgaccaaatgttggatctgtcgcgcgggcagccatgggcacgctggtgcgtcggcgggaccaccaacatcgtgctgaactgcattgacaagcatcgcagcacgcccgtatgggaccagacatttttggtctgggagggtgaagacaagcgcgaacagcgcgcgcttacctatcgtgaattggaccgcggcgtcggacggcttgcgcagggactgcgtgatctcggcgtcggtaagggcgatgtggtcgctctctatttgccgaacctgccggaaacctttatcgcgtttttcgctgtgctgaaattgggcgcgatcctgatgccgctgttctccggcttcggtccggctcccatgcaaacccggctcaaccatggcggcgccaaggccgtcatcaccgcgagcgggacctggcggcggggcgctgcggcaccgctcaaatccgtcctcgacgtcgcgctcgaatcctcaccgacagtgcagcacgtgatcgtcgtcgatcgtgaaggccttaagatcgaaaccccgatgcgaaagggccgcgatcactggtggcacgatatcgtcatcggcaaggacggcgctatcgcgaccgccgaaatgaatgcggaagatgccgcgattctgctgtacacctcgggaaccaccggcgaaccgaagggttgcgtttggacccatatcagcttcatcggttctatggtcacacgcgacatgatcatttgcgccgatttcaaatcatcggaccgttttttctttctcagtgacatgggctggatggtcggcgcgatgtgcgcatgtattcccagtttcgccggcgcgagccttctgatcgccgaaggcacgccggattttccggacaccggacgattctggcggctgatccaggatcatcgcgtcagctatctcggagtatcccccaccatagtccgtagtttgatgcgctatggaacgcaggacgtcgagcgccacgatctgtcgagcctgcgtatgaccgcgtcgggcggcgaggcatggaccaacgcgccgtggcaatggttcttcgagcatgtctgcaagagaaagcttccaatcatcaacatttccggcggcaccgaggttggaggttgcatcttcacggggacgccgaaccatccgatgaaccccggttcgttctcccgtccggcgctcggtgtcggcgcggacatcgtggacatgtccggcaagagcttgccgcccggcgaagtcggcgaactggtgctccgccaggcgtcgatcggattgaccaagagcttgtggaaggccgatgcgcgctatgtcgaaagctactggagcacgcttcccggcctttgggtgcatggcgattttgcgatgcgcggccatgatgggctttactatattctcgggcgctccgacgacaccatcaagatttcaggcaagcggaccgggccgtccgagctcgaaggcattttgatcgacaccggcaaggtctccgaggcggcggtgttcggtattccgcacccggtaaagggttcggcgatcgtttgtgcctgcgtgctcatgccaggtacgaacgtcgagagtgaaattgtcaacgagctctcatccgctatcgtgagcggcatgggagcatcgtaccggccggagaagataatttttgtagatgatctgcctcgaacccgcaacatgaagatcatgcgccgggtgctgcgagcagtgttcgaaagcaaggatcccggcgatctttccgcactcgccaatcccgaagcagttgacaggcttcgcgagaaacttggcgccgcataa

SEQ ID NO: 6112 - DNA, 123 bp, BradyrhizobiumColbertium
ttgcgaacgtctgcaaagccgatcgcggcggggattcccgctgcgcgcatggcggccgtcaacaatattgccttcggaacacaaaacgccgaaggcgttttgagaatctcgctggcgcgataa

SEQ ID NO: 6113 - DNA, 336 bp, BradyrhizobiumColbertium
atggggactgatctcttcatttatcacggctacgtcgcgctttggctcgataggaagatgttcaaagtgacgcccgcgttcaacatggagctatgtgaacgatttggagtccgacctcttatcttcgacggtacggccgacgcgttgtttcacgagttcgacacgagcgatcatcgccatatggaatatgtcaatgaccgaggttggttcgccgacgctccgataggcaagatgcttgaggactttcgcgttgcatatcccgcgctggtgacattgaatactggtggcgtcttaatagatgacgctgccttcggagcgcctcaatcaggggagtag

SEQ ID NO: 6114 - DNA, 1191 bp, BradyrhizobiumColbertium
atggattacgcgcttagcgagcagcagcaggcttttcaggaaaccgcgaagcgtttcgcgaaggacaagctgggcccccactatcagaggcgggcaagggaacaccgcatcgatcgtgccatgctgaaacaaatggggtcactcggcctgattggcgccgatctgccggaaaaatacggcggccttggcgagagcagcgtgacggcaggcattattgtcgagcagatcgcttatggagacttcaacgccagctacgtccaacttctggcgtcactgctcggcggaatgctcgcagagcacgcctcgcccgaaatcgctcaggagtggctaccgcaagtggcccggggtgagaagatcatcggcctcggcctgaccgagccgcggggcggttcggacgctgccaacctcattttgcgagctgaaaaatcgggaaatggctatcgcctcaacggtgaaaagacttccatgagtttttcagatcaatgcgacgcagcagtcatctttgcccgaaccgggaaggtcgaagacggcgcacgtggcgtcagcgcattctttgtcgatctggcgcagagcggaatcacgcggacgcattttgatgacatcggtaccaaacctgtcggacgcggctcggtgttcttcgacgacgtcttcattccggccgagtgcctgatggcagaggagaacaagggattctccaagatcatgtcaggcttcgactatagccgtgccttgatcggccttgagtgcatcggacctgcccaggcttcggtcgatgaagcatggcaatactcaaccgaaaggctcgccttcgagcggccgatcgcgcagtttcagggcgtgagctttccgctcgcggaagccgagacccagctcaccatgatgcggcagctttgctactatacgctttcgctcagagatcgcgggcttgcacataccgcggaagctgcgatgtgcaaatggtatgtgccgaaagtgacctgcgagatcatccaccagtgcctcctcactcacggccactacggttacaccaccgatctgccgtttcatcagcgttacctcgacgtgatgggcctgcaaatcggcgacggaaccgcacaaattcagaaacttgtcatcgcacgtgaaaaggtcggtcgtgtcgcggttcaatacgccaagcagccttccgaattgcggcagatctcaaaatga

SEQ ID NO: 6115 - DNA, 2067 bp, BradyrhizobiumColbertium
atgctgacgccgaccagccccggaacatcgctttaccctcatttgctatcttcgctaaaggtagggcggaccacgttgcgtaaccgcatgatcatggggtcgatgcacacccgtctcgatatggaggacaacggcgtgcacaagatggcggttttccttgccgagcgcgccaagggggagataggactcatcattaccggcggttatgcgcccaacagcgcgggtctgattgagcctggggggccgattttgaccgaacgtgcgcaagctcgcgaacttcgtcgcatcactgatgctgtccatcagcacggtggtaaagtctgcatgcaagtgttgcattcgggccgctattccaagcaaagggactgcgtcggtccttctgacatccccacccgcatcaatcggtttcccccgcgtgcaatgactggggcagagattgaacagacgatctcggattacgtgcgctgcgcgctgctcgcaaaggaggccgggttcgatggcattgagatcatgggatcggaaggttacctcattaatcagttcacggtggtgcgaaccaacaaccgtaccgatgagtggggcggatcggagcagaaccgccatcggctcgcggtggaactcgtcaaacgctcgcgaagcgccaccggcgacgacttcatcattgtctaccgaatctcggcgctggacctcgtcgaaggaggtgcaaccggcgaggagattgatcggcttgcccaacgggtcgaggccgcgggcgccgacattctcaacaccggtatcggctggcatgaagcgcgcgttcccacgatcgcttacgtcattccgcgcggcgcatggcgttttgcggcatcgcgtctgaagaaagcggtcaggattccggtagtggcatcaaatcgcattaatacgccggataccgcagaagagattctggcggcgggggatagcgatctaatatcgatggcccgcccgatgctggccgatccgcacttcgccaggaaggtgcgggagggcaacgccggcaaaatcaacatctgcattgcctgcaatcaggcctgcctcgacctgatcttttccgagcggaccgcgagttgcctggttaatccgcgtgcctgccgcgagactgagtttgaggacggcccggctcagacctcgcgcaggatcgcagtgattggcgcaggcgcgggcggtctcgcagctgccgcggaagccagccgacgcgggcacaaggtaaccctgtttgaggccgctgatcgcataggcgggcaactcaaccttgcccgagcagtcccgggcaaggtcgagttcgacgaaatgctgagttattacagcggccaaatcgccgatggcggcgtcgatctcaggctgaattctgctccatcggttagtgacctgaaagacgcgcggttcgatgctgtcgttgtcgcctgcggcgtccatccccgtgtgccggagattcccggcatcaaacatcccaaggtggtgttctacaacgatttgttgagtggcaaaagccacgcgggacggcgagtcgccatcatcggcgcgggaggcatcggtttcgatgtcgccgaatacctctgccattcgcagcctgatgaaccgccaaaatcacgggcaatggatattcgtgagtttcagcaggagtggaatgtcgatgccagccttacgaaagctggagggctatcgggcgatccgctggcaccaaagccaagttcgcgcgaaattaccatgctgcagcgcaagaagacgcggcctggcctcggtctcggcgtctcgactggttggatcctacgtagcagtcttgaaaagcgcggggtcaagattgtcggaggggttatctatcagcggatcgacgatcaaggtttgcatttcgtggccgagggtgagccaagtacgctcgcggtcgatacgatcgtagtttgcgccggccaagtatctaaccgcgatatgctcaccgaactgctcaagaccggaatcgagacgcatgtcatcggcggcgccaaggaggcttccgaactcgacgcgatgcgtgcggtcgaggagggcgtgcgggtcgcgcacgcgctttaa

SEQ ID NO: 6116 - DNA, 873 bp, BradyrhizobiumColbertium
atgagttcgcaaagcagccagccgagttacgggttctccgacgacgaactctccacgatcccgacagtgtaccgacctgatctgttcaccggccagaccatcatcgtcagcggcgcggggagcggactcgggaaggcgatcgcattcctgtttgcgaggcttggcgccaatctggcaatctgcgggcgcgacgccgagaagctcgcacacgtcgttccggatctagagagtctcggcgcccgcgtcttcagtagaagtctcaccatccgcgaccccgatcaagtcaacgaattcgtcaaagacgtctgggatcattttggtcgtgtcgatgtgatgatcaataatgccggtgggcagttcgcccagatggccatcgacttcaagccaaagggctggaacgcagtgatcgataccaacctgaacggatcgtggtggatgatgcaagcggcggctcgcgagtggatcgagcgcggcaagaccggcaatatcgtcaatatcgtggcattgatctggcgaggcctgccggggatggcgcacaccgccgcggcgcgggccggggtgatctacgcgtccaagaccgtcgcggtcgaatgggcgccgcacggcatccgggtgaattgtgttgcccctggcgtcaatgaaaccacggcattcgaccgctatgttccggaaggctccgcgacctacaaggaagcgaatcccatgaaacggcacggcgatgcatgggatatcgccgaggcctgcgtttatctcgccgcgccgtcagggaaattcatcacgggcgaaacgctttcggtagacggcgggcagcaaatgtggggcgatccgtggcctgccggacgtccgaaatattttcgcattggtcagacgtaa

SEQ ID NO: 6117 - DNA, 867 bp, BradyrhizobiumColbertium
atgggattggtgatgcacgagagtccttcaaaaacgcgcttcgcgccggaacttctcaagggccaggtcgcactcgtcaccggcggcggcacaggaatgggccgcgccacggccattgagatggcgcgctgcggggcccgcatcgccgttctcggccgccgcatcgatccgatagagagcaccgcaaaggtaatccgcgacgcgggtggcgaggcatttgccgtgtcggcggacattcgcgaacccgacttgatcgaacgcgcgatggagaagatcaaagccgagttcggcgggctcaatatcctcgtcaataatgccggcggacaattcgtcacgccagcccgcgaactcagcaacaagggctttgaaaccgtgatccgcaacaacctgatcggctcgtggcaggtaaccaaggctgccgcggaccatttcatgttggcgaatggcggatcgattgtgttcgtaaccgcctgtatccgcagcggccttggcggcttcgtgcataccgcggcagcgcgcggcggcgttaccgcgatgatgcgaacgctcgcctacgagtgggccgagttcggtattcgcctaaactgcgtcgcacccggaaccatcaagaccgaggcgcttggccgctatccgataccgccggacgactgggtcaggctcaaccgcaacgtgctggggcgcatgggcagcgtcgaggatatttctgcagcaatcatttttctgtcctcgccgctcggtcaattcgtcaccggcgaggactggtacatcgacggcggcgagacgctacatctggcccacgacgcccgcgatatgatcgacgccgttaaatttgccaaacgcgaacgcggcgatgcaggattgtcgtag

SEQ ID NO: 6118 - DNA, 786 bp, BradyrhizobiumColbertium
atgtcagacaatgaacctatacgttattcgctcgaggatggcattgccacgattaccatcgatcggcccgcgcgtaagaacgccctgtcggttgaggcgatgaacggtttgaccaatgcctgggagcgtgtcgaacgggattcccaggcgagggtggtgatcctgacctcggctgactgcggcgtattctccgccggtctggacctcaggcaggcagccgagatcagggcgcgtgacggcgtcgacatactgaccctgatgcgcgatccgatgcaaacggccatgcgaaccgtttcaaagccgatcatcgcggcgatgactgggtcgctgatggcgggcgggatgctgctggcgctgaagtgcgacctgaggatcggcttacgcggtacacgcgccgggattaccgaggtcaagatggggcggggatcgccgtgggcagtaccgctgctctggatgttgccgcaacccgtggtgatggaactcgtcttgaccggcgagaccctgccgatcgagcggctcgcggagtatggtttcgtcaattatctggaagaaacacccgacgctgttcgtgcgcgtgcattgcaacttgcgcgcaagattgtagaaggcgcaccattgtcggtgagggcggccaaggccagcgtgttggccgcgatggacctcggctgcgagaaggggctcgttgaggccaacaggcttcatgtcgaagcctacgcaagcctcgatgccattgaaggcccgagagcctttgcagagaagcgtaagccggtgtggcaaggtaaataa

SEQ ID NO: 6119 - DNA, 1173 bp, BradyrhizobiumColbertium
atgagcacgcaccacgtcggcaccccgaaacgctcggcttatttcagagaagagcatgaactgctgaaagcccagatacggcgattcgtcgaggaggagatcaagccgtatgcgctgcaatgggagcaggacggcatggtgccgcgcgacgtgctgcggcgcatgggtgagcttggctttctgggcatccgctattcagcagaatatggcggctcgaacatggatacgttggccaccgttgttttggccgaggaactgggacggtcgacgttctcgggagtggcgatcacggttctggttcataccgacatggcgtcggtgcatctctacaacgccggctcgcaggccttgaaggaccacttcatgccggatgtcattgcagggaagaagatcgtcgctgtcggcgtcaccgaacctggcgcgggctctgacgtgaaaggcattcgcaccaccgcgcgccgcgagggcgacggctatgtgctcaatggcaccaagatgttcatcaccaacggtgtacatgcggacctttattgcatcgccgccgtgagcagtccggatgcacgtccgtcccagcgcttgtcgatgttcctcgtggagaaaggtacgcccggtttccgggttggtcgcgatctcgacaagcagggctggaggtcatcagacacggcggagttgctgttcgaggattgccggatccccgcaacgaacctgctcggcgaggagggacgcggtttctacgggatcatgcaaaacttccagaacgagcggatcgtgctcggtgcaatggcgatgggtgaggcgctagctgcgatagagatcacgctggactgggtcacgcagcggcagaccttcggcgcgccgctgtggtcgagacaggctatccgtcatcggttggcgatgctggcggccaaggttgaggcagggcggcaacttgtttattgcgcggcatggctggtaacgcaggggatcgatgccaccaaggaagtatcgatggtcaaggcttattgcggcgagctcgtcaacgaggtgatgtacacgtgcctgcaatttcacggcggcatgggttacatgcgagagagtacgattgaacgaatgtcgcgagatgctcgcgttcaatcaattggcggcggcactactgaagtaatgctggaagaggtcgccaagcgtatgcgataa

SEQ ID NO: 6120 - DNA, 372 bp, BradyrhizobiumColbertium
gtgaacgaacttggcaaggggtcgcaccggaacaagatcagcgccgcgatcaaagctcatcttgtcaccctgctgcaagaaagcgactacacctccgccaacatgcgcgtctacggtcagttgccggagcgcatcaagaagcgccatcgtccactgcgccgcgcctatggcaaatattgggatgacatgctggcggatgcgcagcgtgccggcgaaatccgcccggagatactaatcgttccgctacgcaggtttattcttggtgccttgaattggacggtcgagtggttcgatgcgcgaaaaagcagctcggtacaggaattggcgagccggaccacgttgctgatcttcaacggcatcttgccgcgttag

SEQ ID NO: 6121 - DNA, 225 bp, BradyrhizobiumColbertium
gtgcgaccccttgccaagttcgttcacacttgcctttaccgcatcgaatatacgttgcaatccaagttcgaggatttcgtccaatatcgcggttttcgaatcgaagtggtagtagatgctgcctgccttcattcccgccttgtcagcgatctgtcgaagcgtagtggcggaatagccctgctgtcgaaaaagctgtgccgcgacccgaaggataaggtctcgtga

SEQ ID NO: 6122 - DNA, 1236 bp, BradyrhizobiumColbertium
atgagcgcaatcggctttcagcttcccgaagacgtggttgcggtgcgcgatggggtcatgcggtttgtcgaagccgaggttctcccgcgcctggagcgcaaccacgcgttgttcaatgatccgcgcctcacctatgctgccgacgggcgttatgcgccggaggtgcgcgcgctaatccgcgaggtgcgcatggcgtccgccgcggcaggttactacgcgatgtgtgcgccagccgcgattggcggcggcgggctcggacatcttgcctattacgtcgcctgggaggccgtctaccgacgaatcggcggccattcgatcctgacgccctgggtgatcgctcattgggcctttgggccgagcgcaatgctgacgcaagcgacaccggaggcgcaggcgcgctgtctcgacgcaatgatcacgggacgcacctcgatgtgtttcggactgtcggaaccaggagcgggctcggacgccagcatgataaagacccgcgcggtgggcgatggagacggctggcgcatcaccggacggaaactctggaccacgaactcgcccaccgcggaatggtgcatcgtgtttgccgtcaccgatccgggtaaggcgcagcgaaaagccggcgggatcagcggctttctggtgccgaccgacaccgaggggtttgaagttgaaagcgtggtgcggctcttcggtcatcccggcggtcatgaaggcgcgctggtgcttgagaacatcagggttgagccgtggcaactcgtcggcgcgctcgacgacggcttcaagctcgcgctctatggcgtttcgctcgggcggatctacaattcggcacgtgcggttggtcagggccgctgggcgatcgagaaggcgctcggctatgtaaagcagcgtgaggcgttcggcgccaagatcgccgagtatcagggcgtctcgttcccgctcgcgcgcgccgccactgaacttcacgccgcgcatctgatgggactcaacgccgcgatgctgctcgatagtggcgagcgggccgtgaaggagttgtcgatggcgaaagcctacgccgtacaggtgggctatcgagccgtcgatcaagcgatacaggcccacggcgccatgggccttaccaacgaggtcggcctcgtccatgccttgcaggatttgcgaatcatcaacattgccgacggcaccaacgagatcctggcacgcaccatcgcgcagcggctgctggccggcgatatcgagttgtag

SEQ ID NO: 6123 - DNA, 2604 bp, BradyrhizobiumColbertium
atgatcaggggtacctgcgacgagccgacatatccgggacggctgcgtgccgtccgcatttccgcgcgtctggggacaatcgccaggcgctgtatcgcgcggccccgatttacgttttcaggccaaccggagacccggacactgatcttgcgcgcaacgcagggttatggaaaatcggtcgttctggcgcagaactggttggccttcagggctgctggaaacaacgcagcctgggtgtctttgcgcgacggatacgaaacggaaggcgcgctggcggaggccatctacggccaactgctcgacgcagcgtcccgcgaaggccgagcggtcccggcggatctggccgagttagtggccacgctatgggaagaattcggcgctgagcgaccggccaatgtaatctgcatcgacgacatcgaacacgcacccgccctgctgcacgcactggaaaccttcgtgctggaaaccccgccgaatgtccgattcgctatcgccggggatacccggcgcggttttgcccggctggggctggaaagcggagtgcgggaggtccatgcccgcgatctggccttcaccttggacgatgccgaaacgtttttgcgggcgcacccggtcgccaacgtaacagcacagcagatgatcgccgagacgcagggctggcccgcgctctgccacatcatgtgccggaccgaattgccggtccggcccgcggtaaactggcccgaaacggtgaccttcctccatgaggagatcgagagacgcctgtcgcgtcggcagcttgagttcgttgaaaacgcagcgatgatcgacccgatttcggcggaaagctacaattacgcctacaagtccaccaacgccgacgcgctgatcagggagatcgacctcgatcacctgctgtttcgccccgccgaaaatgactcaacgctgttctcgctgcacccggttctccgcgattaccttcagcatcggtttctggtgcgcagtgctgagcgaaaatcctatgtcctgaaacgtgcggccttctggcactggcggaggcgcgagttccagaaggcggtaaaccttgcgctgcgggcgggcgaccaccgctgggcgctggggctgagtgaggacatcatgctcgatctcgccctgcgccaaggcgagatcgaggcgttgcgcgaatggctgggccggttcccaacccgcgagttgcgcaagcatccgatcatctgcctcagctacgcttggacgatgtatttcagccaacaggccgacaaggccgaaaggctgctgggctatctgcccgccccgcgcgcgtcgtccggtgcgcatcctgaccgcggctggctgcaactggtccgcgcgatcggtgctgcgacccatgacgaactggagttgagcgagcggctgtgcaacgattggatcagtaactttggcgacgataatgccgtcggcaagggtgcggcactcacctgtctggccttcatgctagcgagtgaataccggtttgacgaactgaagcaggcgctagtcatggcccattcagtcaacagcgccgcgcaccaacactatgcctttggctggctttatgcggccgagattcaggcagccctcgccaggggcgacatgcgcacggcgctgcaacttatcgataccgcccgcaatgacagcgacgttcaggtgacgcgcacatccttctcgtcaaagctgctgatcgccctggaacttgacgtgctgttcgaactggggcggctggatatcgccgagcactctgtcgccgggttgcttgactttgtcgccaactacggcgttaccgacgtgttctacggggtcagccgcgtcatcgcgacctggcatcgggccaatggcaatctcaggggcgccgcggcattgctggaacgggcacgcgcccttgcgggggaaagggcactgccgcgactgggaatgctgatcgagttggaacttgccgaattggccctgttaagcggcgcgcgggatatcgactacctgctgccgcgtgactctagtgaggtcctgaccgggccccatgcaagacccctgcgtgcccaaatatcgctgttgcgcgcgatggaagccatccccaaggggcagcacagcctcgccctccgcaacgccgaggcggctgccaagatcgcgcggtcgatcggtgctggtcgattggaagtgcgcgcgctgatgtgcgaagctggggcccacgccgccgccggggcgctgacgcccgcgcgacgaaaggcggtcaatgccttcgaactcatcaagcagttgggatgctaccggaccgggctagacacgcgggatctgttgctcgccttggccccggtatccgccgatgcctttgtcacgttcgatttcgacgggatcgccaagccaaggccaaggactgagcggccctcgttccccctcgagcttaccacgctgtccgtccggcagatcagcgtcctgcggcttgcccgcgatggactttcgaacaagcggatcgctgaccaactcctggtcagcgaagacacggtgaaatggcatatgcgcaggattttcgctgacctgaaagcacgcaaccgcgtgcaggccatcagcgaggccgagcgtcgcaatctgatctga

SEQ ID NO: 6124 - DNA, 1203 bp, BradyrhizobiumColbertium
atgatcaatacgccagatcagtctgtttcaatcttaggctacatcgaccgtaagcgctatctttggatgctgtccaccctgtggccggcgacgccaatgatcgggctctggctggtagcgcagaccggatggagcatctggtacgccttggtcctgatcgtctggtacgcgatggtgccgcttctggacgccatgttcggcgaggatttcaacaacccgccggaagaggccgtcgagatgcttgagaaggaccgatactaccgcgtcctgacctatctgaccgtgccgatccattacgcagccctgattgtagcggcctggtgggtcagtacccatgcgatgtcttggctcgaaatcataaccttggcgctctcgctaggaatcgtgaacggcctcgcgctgaacactgggcatgagcttgggcacaagaaggagacttttgaccgctggctggccaagctggtgcttgcggttgcgggttacggccatttcttcatcgagcacaacaagggccatcaccgcgacgttgccaccccgatggatcccgcgacctcacgtatgggcgaaagcatctacaaattctccacccgcgagatacccggtgccttccgccgcgcatgggcccttgaagaagaacgtctgtcgcgccggggcaagagcgtttggagcatagagaacgaaattctgcagccgatgctgattaccttcgcgctctatgcgggtctgcttgccttcttcggccccctgatgctggtcttccttccgatccaaatggcgttcgggtggtggcagctgactagcgccaactacattgagcattatggcctgctgcgtgaaaaactgcccaatggccgctacgagcaccagaaaccgcaccactcgtggaactcgaaccacatcgtgtcgaacctgatcttgttccatttgcagcgccactcggatcaccacgcgcatccgacgcggtcctaccaatcgctgcgcgacttcaaggatctgccgacgctgccctcgggctatccgggcatgttcttcatcgcgttgatcccaagttggttcaggtcggccatggactcgcgcgtggtagattgggcccatggcgatctgagcaagatccagatcgaggatggcaagcacgcgctttacgaacgcaagtttggtacggtcggcaccgacgcaaagcccggcttggttgctgccgagtaa

SEQ ID NO: 6125 - DNA, 549 bp, BradyrhizobiumColbertium
atggccaagtaccagtgtcctggttgtaaatacacctatgacgaaacgctgggccatccgcatgaaggatttcccgcaggcactgcttgggccaacgtgcccgacgaatgggcttgccccgattgcgcagtgcgcgacaaggtcgacttcgaattgatcggcgaagcgccggccgctacgacgccggccactcaggccgtcgagtttgccgggacggcacgtagcgcggtcccggtcaccgacacggccgttatcgaaaagcccgccagcccgatgtcgaaaccggcggcgcggatggccgccgtaccgcaggccgcggaggctttgcccccccaattgttcagcctgcaaagcgagcccggctttgccgaaaacaagccctttgtgaaatgggtctgcatcacctgcgggcatatctacgacgaggcactcggcgacccttccgggggcatcgctgcaggaacccggttcgaagagattcccgaggattggtgttgcccggagtgcggcgccaccaagaaagattacgcgctttgccaggaaacctag

SEQ ID NO: 6126 - DNA, 1500 bp, BradyrhizobiumColbertium
gtgttggcaaagggtatcgggccgatcaggcccgccatggaggtcattgtgaatattcacgccgatccgaacgacattccattggtggataccagatctaccgttgcggatgtttttgcgaagcaacgggaggcgggctgggcgcgtcgctcggatttcgaccgcaaggcacgcatcgcggcgctgaaccggctgagggaagtcctgcagcggcgcgagacggacatcatcgcggctctttatgcggatttccgtaagcccgagagcgaggtgaggctgaccgaaatcctgccggtgctgcaggagatcgcgcacaccaaacgccacttgaagggctggatgcgatcgcgccgggcagcggccacgctgggtgttttcggcaccagggccaggatccgacccgagccgaaagggatctgtctgattattgcgccgtggaattatccgttgaatctagccttcgggccgctggtctcggcattggcggccggcaacagcgcgatcatcaagccgtcggaactgacgcctgctacctccaccctgattgcggatatagtggccgaaacgttttcgcccgatctggtggcggtggtcgagggcgatgcagcggtcgcgcaggagttgctggcactaccgttcgaccacatcttcttcaccggcagcccgcaggtgggcaagctggtgatggaagcggcggcgaaatcactggcctcggttaccttggaactgggaggcaagtcgcccaccatcgttggccccactgccaacctgaaaaaggccgcgcgtaatattgtctggggcaagtttgccaacaacggccagacctgcattgcgcccgaccacgtgttcgtgcatcgcgacattgcgcaagagttcaacgagacggtgatggcggaaatcggtcgcgtctatggcaagacgcccgaggtgcagaagatgacgcccgactattgccgtatcgtgaatgaccggcatttcaaccgggtcgccggcctgatcgaggatgcccgtgccaaaagcgcgcggatactgctgggcgggcagacggatgcggtgcagaaattcgtggcgcccacgctgatcagccagatcacccccgagatggcgatttcgcgcgaggaactgttcggcccgatcctgccgatcatcgaatatgacgatatcgacaaggtgattgatcagattaacgccaatccgaaaccgctggcgctttatgtcttcgacaatagccgggcttttgccgaggacatcatcacgcgcaccagttccggcgcggtggggatcaaccttaccgtcgtgcatttcctgcatcccaatttgccctttggcggggtgaacaactcgggcatcggtgcggcccacggagtctttggctttcgggcattttcgcatgagaaggccgtcctgcaggaccgctactcgatcgtccacatgctgttcccgccctatacaggttttgtgaagcggctcatcaggcttgtcgtcaaggtgctggggtaa

SEQ ID NO: 6127 - DNA, 1632 bp, BradyrhizobiumColbertium
atggaacaacgatctgaaagtcacggaacgtacgactacatcatcgtgggagccggctcggcaggctgcgtgcttgcaaataggctgtccgcagatcccgcgaagcgcatcctcttgctggaggcgggaccgcgagacaagagcgcgctgatccatacgccgatcggcatcgcgctgctggccaacagcaagaaactgaattgggccttcaataccgaaccccagcagcatctgaacgcccgccccctgttttggccgcgcggcaagacgctgggcgggtccagctcgatcaacgcgatggtctatatgcgcggccacaaggcggattacgacggttgggaagtcgcctctggcacctcggtctggggctgggaccgtgtccgcgccctgttcaagcgactggaaaacaatcaacgattcggtaattcagaataccacgggacgggtggtgaactgtttgtcagcgaattgcagacggtcaacccgctcagccgatccttcgtcaaggcggggcgcgaactgcagatccagcataatgatgatttcaacggcgagcgtcaggaaggggtcggcctttatcaggttacccagaaccgcgggcggcgctggagttcggcaaaggcgtttctggaaagcgcgctggaccggccgaatctggaggtcatcaccgatgcgcgggtgacccgcgtggtgatggacgggcggcgcgcgatcggcgtgtcctacaggcggaacaaccaaaacaagcaggcgcggctgaaccctgcgggtgaggttctgctgtctggcggcgcggtgaattcgccgcagatattgatgctctcgggcgtcggcgcagcggaggagctgaaggaacacggcattccggtgctgcatgacctgcccgccgtgggcaagaacctgcaggaccatctggacatcacgctgatgaacgcggccagttcgcgtcaaccgatcggagtggcactcagcttcccgccgcgcgcggtggcggggctgttttcctatatcttccgccgcaaggggtttctgaccagcaacgtcgcggaatcgggcggcttcgttaaaagcacgcccgagcgcgaccggccgaacctgcaattccacttcctcccgacctatctgaacgaccatggacgcaagatcacctacggttatggctttaccctgcacatctgcgacctgctgccgaaaagccggggcaggatcggtctgaaaagccccgatcccctggatgatccgctgatcgacccgaaatacctcgatgacccggaggatatgaaaaccatgatcgcgggggtcaagatcggcaggcgcatcttcgacgcgcctgccatggctgttcattcccggcgcgaggttttgcccggtcccgcggttcagagcgatgacgaaatcgccgccgatatccgcaagcgggccgagacgatctatcacccggtcggaacctgccggatgggcgccgatccggcgtcggtggtcgatccgcagcttcgggtgcgcggtatcgaggggctgcgggtgatcgacgcctcgatcatgccgacgctggtggcgggcaacaccaatgcgccgaccatcatgatcgcggaaaatgctgctgacatgattttggggaagatccatatttag

SEQ ID NO: 6128 - DNA, 510 bp, BradyrhizobiumColbertium
ttgctggactgccggttctatcacttccgtctgccgttttccggcttcgaacacgcccatgtcgtgctcggtggcgagagctttgtcgcgctggcggaagggttgcagaacgccctgtggtcgctgggcggggttcccgagcagcaccgaagcgacagcctttcggcggcgttccgcaatctcggcgccgacgccaaggaggatttgacgacacgctacgaggcattctgcggctattacggcatgacaccgacccgcaacaatcgcggagtgtcgcatgagaatggttcgatcgagagcgcgcatggccatctcaagagggcgctcgccgacgccctgttgctgcgcgcgtcgcgcgacttcgacgatcttgcggcatggcgaggcttcgtcgacgagagcgtcggacgtaggcttttcatccgaactcggttggagtcacacccgccggatcggcatatttcacacggattgacagctttgctggaaatattctgcgacacagcctaa

SEQ ID NO: 6129 - DNA, 2007 bp, BradyrhizobiumColbertium
atggcgctgtccgatcgtcacttggccgccattgacttaactctcgttctcggttcctgcgccgtgatggcggcgttgatgatcgggcttgccatcgggtacttcgtcgataggagcatgttgaggccaatcgaattgctcaccgctgccatggaacggttacgcaccggcgaaacgccgcttgcccggacttcctcggctatcgagcggcccgaaacatctgctgacgcatatccggggatggagtttttgcccgagtatgaaggccgcaaacatgagatcggagcgttggcccgaacgctccgccagttccatgagcgtggcctggacgtccagtttaaatcaaatctactgaattcggccatggcgaacatgtcgcaggggctttgcatgtacgacgccgatgaccggcttgtcgtctgcaacagccgctttcaggatatttacggtctccccgccgaggccatcgagcccggaactcccatccaccgcgttgccgagccggaatgcgtgggccacgattgggaatgcgaccttgtggaagcttacgcgacgataaaggctgctctcgcgagggatgagcgtctgctacctgagcagcggctcgcggatggccgcacgatctcgatctcggccgtaccaacggagaatggtggctgggtcgcgaccttcgaggacatcagcgaacgtcgcgcggcggatgcgaggatcgcgcatatggcgcatcacgacgcgctcacgggcttgcccaaccgggtgctgttccgtctagaggccgagcaggcgctcaagcgagcgcgccggggcgaacagctcgccgttatctaccttgacctggatggtttcaaggccgtgaacgatatgcttggccacgcgatcggggaccggttgctggtcgctgtcgcggatcggttgcgcgcgagcatgcgtgacgacgcctttgtcgcccgccttgggggagacgagtttgcagttgtgttggccgtgggtcagccggacgacttggccgtgctggcgcaacgaatcatcgagacgctcagcacgccctacgacatcggcgaccatcagctcatgatcggagcgagcgtcggcatcgccgtggcgcccaccgatggtcacgacccagaccagcttctgaagaaggccgatatggctctttatcgagccaaggcggatggccggggcaagtacttctttttcgaagcctggatggacgagagaatgcaagctcgtcgagcgcttgaggtcgatctccgcaaggctctggcgcgggaggagttcgaggtgttctatcagcctctcgtcaaccttcagacgaacgaggtcagcagcttcgaggcgctgctgcgctggcgacaccccgtgcgcggcatggttgggcccgacaatttcataccgcttgcggaagagatcggattgatcaacgaaatcggagcctgggtgctgaaacaggcgtgttcggacgccatgggatggcccgatcacctgaaactcgccgttaacgtatcttctcttcaatttaggagtaacaggttatccctcgatgtcgtggcagccttaggtcattcgggactgcctgcaagccggcttgaaattgagatcaccgagaccgcgttgttgcaggatacggaggcgaccatcgcggtcctgtatgagcttcgacaactcggactcagcatcgccatggatgatttcgggacaggctactcttcgttgggctacctgcggaaattcccgttcgacaagatcaagatcgacaagtctttcactctaggtttgccggatcgggccgattccttggcgatcgtgcgggctatgatggggctcggggtgaaccttggcatgatcacgaccgccgagggcgtcgagacggaggagcagcttgctgcgctacgagccgaaggctgcaccgaggtgcagggctatctgttcagcccagcgcgaccggccggggagatcgctgccctgctttccagaatgcggggacagaccagagtcgttgcgtga

SEQ ID NO: 6130 - DNA, 417 bp, BradyrhizobiumColbertium
atgcttctggcgatggccgagcggcgtctcggtttggccgacaagttggcccggatgttcccggatcggcgcgacccgacgcgggtcgtgcacagccttgtcgatatgttccgcgctcgcatgtttgcgatctgctgcggctacgaggacgccgacgatctcgaccatctgcggtccgatccggcgttcaagctggcctgcggacggctgccggacagcggtcgcgatctgtgttctcaaccgacgctgtcgcgcctggagaatgctccacgcctgcgcgacgtgatccgcctgacctacactttggtcgacgcatggatggataaagccgtaaccgcgcggccacgtggatttggatcactcaaataccaaaatgctggaacagaagcggggacggcaaccctgggggaggtgtga

SEQ ID NO: 6131 - DNA, 444 bp, BradyrhizobiumColbertium
atgacgatcgtcgatgacaaggccaagatcgtctacatttctccgatccacgaagcgtttttcgggctgaaggccggcgaaggaaacggacgcccggtcgagaccgtcatcgacaacacgcgactgcatgagatcgtggccacgggcaaggccgaggtcgggaaaattcagcgcatgcgcggcggagacagagtcgtttcccgcattcccatcaagagggacgggaaggtgctcggcgccattgggcgggtccgcgagcgaccgatacgctacctcagccggaatggtcgcggcggcgttcatcaggtcccactcgcccttcgattccgacggcttcttggtctgcaaaaggtacatgtcgcgcatcatgcggccgtcgtcgcggatgcttccgttcttggtcatgaagtcgttgacggggcatccgcgtcagccggtccttag

SEQ ID NO: 6132 - DNA, 249 bp, BradyrhizobiumColbertium
atgcagttcgacgagttcaaggcctgcacgacgtggtggacgaagcgcgaggacaacgaccaggcgtggaaagtgcaggtcaaggaattgctggatgcgggctgcaacctcgaccgaaagaacccgcgcgccaaagtggattttgagcacctgccaccggagcaacttgccgacgacattctcaggaaggagctgcggattgccgaactgatgcgagaaatcaaagccgctctaggtgcaagcgcatga

SEQ ID NO: 6133 - DNA, 1179 bp, BradyrhizobiumColbertium
atgaatctaagctggcaatccgtaccgctaaagcaggcgctgaaaagagtcgcgcgtttcgaatctcgcgaagacataaacgaatatgtatttgcgggcacatatagttttggtcgcggcgtattcgtgagcgaaagaaagttgggcgccacgtttaagcttcccaaagtccaacgcttgcgagcaggagattttgtctactgcaaaataatggcctgggaaggcgcttttggaatagtaccgccggaagctgacgactgcgtgatgtcgaacgctttcgttgcttacgaggcggactcatcggttgttgacccgaaatttctcgattggtacttccgagcgccatcaaactggcaacggattggacggcaaagcactggcacgaatgtccgacgacaaagtctgcatcctgagcaatttgaagcatcagagatacccctcccgccgctcggcgagcaacgccgcatcgtcgcacgcatcgagaagttggcggcgcgagtgcaggaggcacaacaagcaaggttacgtgcagttaacgagttatcggctctccacacgaagctgcttctatcgacattcgactcggtaagtaactccagcaccgagattggtgccgaatttgtcgtaacgacagggggtacaccatctcgggcaaattctagctactggggcgggtcgaatgcgtgggtcagctcaggggaagtagcctttcgcgacatcatcgacactcgcgaaaagataactgatcttggcctcagggaaagcaacgcgaaaatctatcctcctggaaccgtactgctggcgatgataggtcaaggaaagacccgggggcagtgcgccattcttcaatgcgctgccgcgaccaatcagaatgtcgctgcgatacatgtgaccaagacgattcattcgccgcgctacgtttactggtggctgtacgccaactatcgaaagagtaggtctacagagaccggcacggctcaaccagccctgtcagcagaccgcgtgaagcgaatgcttattcctctgcctgagcgcaaccgacaagaccaaattgcctctcagctcgaagctcttcaatccaagttcgacgcggtgaaagcacttcaagcccagtctgccatcgaattggatgccttgctccccgccgttctcgacaaggcattcaagggagaattgtag

SEQ ID NO: 6134 - DNA, 264 bp, BradyrhizobiumColbertium
atgctcgcgagcatcgtcaagaacatcgagcgcgtgatggcggccgagtacagtcgcgagctatcggcgaaggtctatgccggtcgatgccgctttgcgcggctgggctataaaccctgcgggcgtgtcggctacgcgctcgtgcgggagctcgtcgatgaagagatgcaaaccagacaagcgatgaagaagggggagcggaagtacatcctggccgaccacattcgcattagaccgggcgatccatggaaatcgctgtcgtga

SEQ ID NO: 6135 - DNA, 150 bp, BradyrhizobiumColbertium
gtgtcagtcatcgctttggagctcaaccagaaaggcctcgtctcgagtaccggcgcggcgtggatccgcgcggcggttggcactgttctcagaaacgagagctatatcggaaatctcatcttcaacaaaagctccgacaggcggcggtga

SEQ ID NO: 6136 - DNA, 189 bp, BradyrhizobiumColbertium
gtgaagaacccgcccgaacaatggataagaagagagggttgcaccgagcccatcatcgatcgcgaggtcttcttcagagtcaggaagattatcgaggagcgtcgggttgatctgtccgaggacgagatgctcggtccgttgcgcaaagctcttagagagggccgcttgacgccgaccaatatagattga

SEQ ID NO: 6137 - DNA, 207 bp, BradyrhizobiumColbertium
atgattgcgtacaagcagtatcacatccagcggtttgagcacggccacaagcgctgggttgcccgcatcacacgctcggatggccaaaacattcgcaccatcctgccggcttctgagcatccctaccttgatacgaaacccaccgcctccgccgaggaagccgaggagcttgccaaggaaggcatcgactttgggggtatcgtttaa

SEQ ID NO: 6138 - DNA, 408 bp, BradyrhizobiumColbertium
atgaagaagattgcaatgtcgacactggtagccggcactatcggtctcagctcggtcgcggcgacgtctcccgcggaagctcattggcgaggctggggacccggcatcgcgggcggccttgttgcaggggccgttatcggcgggctcgcctcctccgcgtatggttgggggcctggctatggctacgctccaggctactaccgcgctggctactatggcggtccatacgcttacgactacggatatgatgcaccgtaccgctggggcggcggatacaccacgaccacgtattatacgcagccggtttcctacggctaccgctatcgccgcgtcgtgcgtcccgctcacgcctattaccgcggatcctatcccgtcgtgcggcaccgttggaatcatcaccactggtaa

SEQ ID NO: 6139 - DNA, 312 bp, BradyrhizobiumColbertium
atggccgttgcggtcgattggcttgacgcctaccgcgcgggtgatctcgagaccatcatggaacttcatgccgacgatgccgtggtgcactgcggctgctccggcgcccaaaccatcaccggccgggaggcccttcgtgcctattggatcgatcgtctccagaactttccggcgggtaccttggacgacctcaatccctccgataacgggacggttatctcctacgtcaccagcacgggcgtcatgagcgcgcttttggcgtttgacgccgtcggcaggatcaagctgctggactgcagtcccctgcaataa

SEQ ID NO: 6140 - DNA, 3438 bp, BradyrhizobiumColbertium
gtgatcgtcgatcggcaaccgatggtcctgcagggtttgaagtcggtactcgggacgcagcaggattttgacgttgtcgcatcgtccagcgatggcgcgagctgtctcgaagccattcgaaaattggcacccgacgtcgcgttgattggcgatgccctgccggatctgaccgcaaatgaaatcctggcgattgcaggagccgagaagctctccacgcggctggtgttctttacggagtccgacgccggtctgaccgcggcgatcgctgccggcacctgtagcgcaatttccaagtatgccgccccggtcaccatgctgcgctccctgaggttgatggcaaagagcggtgtgtcgctgcagcagcgggatctctcgccggtcgagaatgccgccgaggacggcaaaatcgaaaagatgctgacgctgttgacggatcgagaacgtcaaattgcgcggctcgtgtcggagggaatgtcgaacaaggagatcgcgcgcgagctgaacgtttcacaagggacggtcaaggtccacctctacaacattttccagaagctcgagatcaccaaccgaaccgtgctcgcgaccatcgcattgctgcaacgcacgtcgggcctcggcgcgctcgcattggccttcctggcgttcgcaattgcggatgagctcaaggcctcggaagcgaacggcatctcccaggccgatagccaccacgcgggcgagcacgccttgtatgaggtttggaagaaggccattctccagcgtctcatcctctcgcaatccgacgcgacgccggcgttcagcgataaggacttttctgcgagggcgaaccaggtcgcgaacccggcggcggcgatggaagcactgcgcgcagccgagcaattcatcgtctcgaaaccgtggaaggatgtcgatcctgtcggatcgatctcacccaatcttcctggactcttgctgcgaggaatcaacgatacgccggctggcgatgagccggctccgaaacaccaattcccgccattcgcctccagtccgatgtcgccgcaaggcggatatggcgccttcgccgctgtcgccggcgcgctgatcttcgcgctgcaggatcccgatcaagccaaggcgcatgagctggatcaagggtccatagacacccttctggccatcggcggagagaatgcgaccacaagcctggccgcgatcacccatgtcgagggcaatcacgggggcaactccgcgtcggatcatcttccccatgatgccggtcggcattccggttccgtgaccattgcaagcgacatcgcgcaggacagcgttcagggccaagcgggcccggatgtccctggtcacaatgttcaagaacctgtcggcttgttggactccgatcacgatgcaggcccggccggatttggccgcgatcaaccgatggcaggcaacgttgaacacgttgtcaatcattccccgatcgagtccaagtccaacgccaccgagctggtgctggattccacgtccggccccggcaggctcaatctcgcagcattcggagcgctggcctggctgcatctgacggcggcgccgaaatccattccgccacataccctcgcctgggtctacgattccgaacgcaacgagacgatcgtctatgtgaatccgaccgatcgtgtgctcgatgtcggggatcgcagcctcgtggaggtccatctgcagggaatcgtggccgttgccgaggcggacttcgctcagcaaacagagggcggcgtccatgcagccaccttggagcaactcgaacaagcgctgatgccggcctcaaccgatgagaccgctgtgagtgcgagcagcggcgacgcgagcgaggattcgctcgcgacggccgacgtttggagcgctttggccgatgacggcttcagcttccaattcgcagccgttcggatcggctcggggacagcggcaaagtccggcgccgcaacgagcggctcggcggatgcaacggaggagagcaccggtccttccggtgtgtcggcatacggatcatcaaccccgcctggtcatagcgcggcgaccccggccgcggagaatttctccgcgaagaatgagccgatgaattcgaacgccggcgttccgtcgacgaagcagaacgacacggcccaaccgggcttcggcacgggcgccggcatcggcggcggcaaccctgagcatactgcagcgccaggttcgacaaaggcagagatggcgcaggcggattcaaaacccggcaacggtgtcggtcatggcaatgagccgcattcgcaagccccagacgatccgccaaaggcagcgaagacaaaaggaccaggcgccgagcacggcaattcaggccatgcaaattctgcaaaagggtcgaaagcggctgaggccgccgaaccgagcgtcgcaccggatgacaaggcgggccgcggccactcacagcacggtgcggagccgtcgtctgcaaaggcggcggacgcaggcatcaccgaagccaagtccaaacccggcaaaggtgtcggcaacgaccatgaacactattcccaggctctagacagtccccgaggagcagagaagacggcagagtccggcggcatcgagcacggtcattcgggccactcggcttccgccaaaggagcggaagcaagcaagagcgggacaggtggtggtgacacggagcacgggcactcacagcatcctgcggagccggggtctgcaaaggcgggggctgcggagatggccgaggtcaagttgaaacccggcaacggcaccgggaatgaccatgagcaccaatcccaggctccggacagtccgccaggagcagcgaagacggcagagtccggcgaggccgagcacggtcattcgggccgctcggcttctgcaaaaggatcggaagcgggcaaaggcgacgcaaatgctggcgacatggagcacggccattcacagcacgcggcagagccggagtctgcaaaggcgggggcgttggagatcgccgaagccaagcccaaatccggcggcggcattgggaacgacaatgggcatcctcaagacggttcgccgggagccgtgaagacggcagaacccagcggcgccgaacacggcaatccgagccattcaagctcggccaaaggagcggatgcaggcgcgagcatcgcaaccaacagcacggaccagagcaattcgcagcgcgatgcacattccggtgtagcggcatcagaatccgcgcccgcgctcggcggcatcgatcaggtgttccgcttcgacgacggggcagcttcttccacgctcatcaccctcgcagagcctgacgaggttcataaaccgcacgctgcgctcagtcaggaagatgaagtgatgccgcatgcgctggacgagcacggggcccgcgacggtcatcatggttcgcatcccggcattccatctgcgccccatgatctgctgatttga

SEQ ID NO: 6141 - DNA, 282 bp, BradyrhizobiumColbertium
atgaccaatcgcttcgccagctccatctctgccgccctccgtcatcccggcgtgatcgcgctgatcgtggcgggcgtgacgattgcggcaatgctgatcgtcgaccacgggccgtggagccgcgccaagacgcagccggcccatgtggcaatgtatgcgaccacgggcgaagcggcccgggccgcgggcgcgaaggtgcttccgaccaatccgaagtcgtcggtcgaaccggcgcggccggggcccaagacgtccccgaccgtcaatcccgtgacgccgtag

SEQ ID NO: 6142 - DNA, 1215 bp, BradyrhizobiumColbertium
atgaccggatcatcaaaagcaacgaacatcgagattctggcctgcgacgccggctggagaaactatcacttcgtcaagctgacgaccgaagacggcatcgtcggctggagcgagttcgacgagggcttcggctcgcccggcgtcggcgccgcgatccagcgcctctctgcccgggtgatcggtcagaacgtcttccagcacgagcgcatctttgccgaactgttcgcggcgacgcgtcccgccgcgggcggcgtggtggcgcaggcgctcggtgcgatcgagaatgcgttgctggacgccaaggcgaaatcgctcggcgtcccctgctacgagctgctcggcggcaagatccgcgaccgtgtcagggtgtactggtcgcattgcgccacttggcggatcaatcacccctcctggtacaagccgccgatcgaaagtctcgacggcgtcaaggccatggggcgcgaggtgcgcgagaagaagttcaccgcgctcaagaccaacatcttctcctatgacgagggcaggccgaccggctggcgtcccggcttcggctcaccgttcgcgcccgagatcaacgtcgaccgcaagatcctgcgcgacctgcacatgcatctggaggcgatccgcgacggtgccggccccgatgtcgacatcctgctggactgcaacttcaacgccaagaccgaaggctatctgaagatcctgcgcaccattgccgatatcgacatgttctgggtcgagatcgacagcttcaatccggaggcactcggctatatccgcaggcagagcccgcatccgatctcgtcgtgcgagacgctgctctccttgcgcgaattcctgccctattttcacgcgcaggccatggacgtcgcgatcatcgacacaccgtggaacggcgtctggcaatccatgaagatcgctgccgccgccgaggcgttcgaggtcaacgtcgccccgcataatttctacggccatctctgctcgatgatgaacgcgcatttctgtgcggcagtgccgaacctgcgcatcatggagatcgacatcgatcgtctgtcctgggatcgcgagttgttcacgcacgagcctgatatcagggacggccatctgatcgtcacggaccggcccggctggggcaccgagcccaacgaggaagccttgcgcgcgcatccgccgaagacgagcggcgggctgctgaattacggccgcaagagctga

SEQ ID NO: 6143 - DNA, 1287 bp, BradyrhizobiumColbertium
atgcgcgacggcgccctcaccccgacgaaatccgcgccgacgctgctgcaaaggctgggtccgggccttgtcaccggcgccgccgacgacgatccgtcgggcatcgccacctattcgcaggcgggcgcgcaattcggctacggtctgctgtggaccgtgttcctgaccacgccgttcatgatcgcaatccagctcgtcagcgcgcggatcggccgggtcaccggcaaggggctcgccgccaacgtcatgcagctcgcgccgcgctgggccgtcctggcactgatcgccatgctcgtgacagcaaacacgttcaacatcgccgccgacattgccgcgatggccgaggcgctctcgctcgtcatcggcggcctcaaccacgagcacgcgctgattttcgccgccggctcgaccctgctccaggtgtttttgccctaccgccgctattcgccggtgctgaaatttctcactttggcgctgttcgcctacgtcgcgaccgccttcaccgtcgaaataccctggagcacggcgctgctggccgcggtgtggccgaaggcgaatgttagcgccgactatttgatgatggtggtcgccgtgctcggcaccaccatcagcccctatctgtttttctggcaggcctcgcaggaggtcgaggagatgaaccagggcaagcgcgacaagccgctccgcgacctcaagcgcggcggcctgcgcgagctcgaccgtatcaagatggacaccgtctgcggcatgctgctgtccaacggcattgccttcttcatcatcctgacgacggcatcggtcctccacgccgccggcgtcaccaggatcaattcggcgacggaagcggccgaagcgctgcggccgctcgccggcgatttcaccttcgccctgttcgcgctcggcatcatcggcaccggcctgcttgccatcccggtgctggcgggctcggccgcctacggcgttgcggagatcttcggctggcgggccacgctggaagcgaagccggacgaagcggccggcttctacaccatcatcgccgcggcaaccctgatcgggttcggcctcggcttcacggggatcgactcgatccacatgctggtgtggagcgcggtgctcaacggcatcgtcgccgtccccatcatggccatgatgatgctgatcgtctcgagcagcaacatcatgggccgattcagggcccgctcatggttgatcgggctcggctggcttggcaccgcgctgatggggctggcagtcctcgccctgctcggctcgtccctgattggctga

SEQ ID NO: 6144 - DNA, 186 bp, BradyrhizobiumColbertium
atgtactacgtcgccgctgcattgctgggactgtcgggactgttctactccgcgggccgtcacgagctcggccagttcggcgcagacgtctgccgctatggcagcacgttctgcgacaacccggtgctcgtcttcgcgggcgccgcgctcgccgccgcctggggcatgttcgtcagcgtgaagtag

SEQ ID NO: 6145 - DNA, 627 bp, BradyrhizobiumColbertium
atgacgaccaccatctctcgcctctacgacaattattccgatgccgagcgggccgtagcccggctcgagagcgccggcgtgccgcactccgacatcagcctcgtcgccaacaattcggacaattggtacggctcgtcgtccggcaaggtcgaccgtgatcgcgacggcaccgacgatcgcgtcgaaggcgccgggacaggtgccggcatcggtgccggcctcggcggcacggcaggtctgctcgccgggctcggcctcctggcgatcccgggcctcggcccggtcgtcgcggcaggctggctcgccgcgaccgctgcgggcgctgctgccggcgcggccaccggcggcatcatcggcgcgctgacggaagccggcgtctccaaggaagatgcatcgcgatatgccgagggcgtccgccgcggcgggacgctggtctctgcaagagtgcccgaccaggaccgcgcacgcctcgatgcgcttctgcacgaaaagtcagtgaacctcggggagcgcagcgcgacgtggcagaaggccggctggaccgacttcgacgccgcaagcccgccgctgtcgccggaagatatcggccgcgagcgcgagctgtacggcgcgggctcgcggcgataa

SEQ ID NO: 6146 - DNA, 321 bp, BradyrhizobiumColbertium
atgttacgttcagctgtactggctgcaaccttgctgctgctcgccgtggcgcccgcgggcgcgcagtcgcagccggcgcaaagcggccctggaaacaacgccgtcaacagcgccgaccagaacaactccaacgcaccggtcgccggccgcaacagcttcaccgaaggccaggcgaagtcgcgcatcgaggcggcgggctattccaacgtctccggcctgcagaaggacaacgagggcgtctggcgcggcaaggccgacaaggccggcaccaaggccgacgtcagcgtcgacttccagggcaacgtgaaccccgccaagtaa

SEQ ID NO: 6147 - DNA, 198 bp, BradyrhizobiumColbertium
atgctggacgtacggcttgtgacaacttctctggcgacgctggctgcgctgatgaccgtggctgtggctgagcctgtcaaggacaaggcggcacctgtcgctcaaggcgcggccgaagcgcgtcccattcgcgtgatcctgccggcgccctgggagcctgcaacgggccagcgcgaagcagtgcagtctgcgaagtag

SEQ ID NO: 6148 - DNA, 228 bp, BradyrhizobiumColbertium
atgaacatcaaagcgatcattgctgccgccgtgctgacgtcggttgcagctcccgcgttcgcgcaatcgttctacgtggtgcaggacgtcaagaccaagaagtgcaccatcaccgagtcgaagccgacgaccacggaaaccacggtcgtgagcggcgacaccgtttacaagaccaggtccgaggccgaggccggcatgaagaccgtcaaggtctgcacctcgaactaa

SEQ ID NO: 6149 - DNA, 192 bp, BradyrhizobiumColbertium
atgcaatcgcgctatcccttgttgaagaagtggacggcggacgaacacgagcggttgaaagccatggcggaagccggacggcggcccgacgagattgccgctgagctcaatcggagcgaggcggcggtgcgggtgcgagcctggcagcacggcattgcgctgcgcctcgtcacgcagaagcgcggcaagtga

SEQ ID NO: 6150 - DNA, 312 bp, BradyrhizobiumColbertium
atggccgcagcggtcgattggcttgatgcctaccgcgccggcgacatcgagagcatccttggaatgtatgcggaccacgcggcgatccactgcgcctgcggcggctcgaagatgagctcggacccggatggacggcgcgcctattgggttcatcgtctgcggaattatcctgcgaccggcctcgacaacctccagccgttggaagacgcggtggtgatctcgtacgtcgcgcgtggcggcatcgtcagcgcaagcctgacgttcgatccgtgcgggcagatcgccgcgcacgtctgcggtccctcgcactag

SEQ ID NO: 6151 - DNA, 714 bp, BradyrhizobiumColbertium
atggcgttccagccgatcgtcgacgtcgccgaacaccgggtctggggctatgaggccctggtgcgcgggccgaacggcgaaagcgcgcacagcgttctgagccagctcaccgacgatcagctctaccgtttcgaccaggccgcccgcgtcatggcgatcgaaaccgccggacgcctgttcgacgatccgcaggcgcgcctctccatcaacttcatgccgaatgccgtgtacgagccgcgcgcgtgcattcagcaatcgctcgcggcggcgcggcgcgcgaactttcccgcgaccaacctgatgttcgagttcaccgagaacgagcggatgagcgatcccaggcatgtcgagaacatcatcggcgcctacaaggcgctggggttctggaccgcgctcgacgatttcggcgccggctatgccgggctctgcctgctggcgcggctgcagccggacctgatcaagatcgacatggagctgctgcgcggcatcgatgccagccatccgaggcaggtgatcgtgtccgcgctggccgcgatcgcccgcgagctggacatcaccctcctcgccgagggcgtggagaccgaggccgagctcacagccctgcgggcggccggcatccggctgttccaggggtactatttcgccaggcccggcttcatgtcgctgccgcgcgtcgcgggttttcagccgctcgaggtgtcggtcgccggttga

SEQ ID NO: 6152 - DNA, 249 bp, BradyrhizobiumColbertium
atgcccggcttggccgaatgccagagcctgctcaggctcctgatcgccaggggcgatcccaaggccatcccgctcgccgagggcgccatcgaccagttcctgaacacggcgccggccagcatgcgcggacgcggcctgcgcgtgctccagcgcgatgcgctcgaccagcacgatgtggctgtcggcgtgcagcgctcgttcgccgagacggtggacgcctatatcgagcgcaagctcgcggaggaatga

SEQ ID NO: 6153 - DNA, 270 bp, BradyrhizobiumColbertium
atgccccggtactacttcgatcttcgcgacgacaacggaattgcgctggacgaggaggggctggaattatccgggccgcgcgcggttcaggccgaagctgccaagtccgccgccgacgtggcgcgtgatgagatgctgtcggcgcagctcaccggcgcccggcacgagatggcgatcgaggtgcgcgatgcctgcggtcccgtcatgcaggtgaagttctgcttccagatcgaagatctcaagtcgcgaccgtcctcacgcggtcattga

SEQ ID NO: 6154 - DNA, 228 bp, BradyrhizobiumColbertium
atgacccggcaatatcgcgcttatctcgtcggcgaggacggcgtcttccgctcggccgaagcattcgaggccccgtccgattcctccgccctcaccttcgcgcagcggttcacgcggcacggcaaggtggaagtctggcagctcggccgcaaggttgccgtgctggagcccgagcagtccctgccgcccttgcggcagccgtcccgatcggccccggcgcgtcaatga

SEQ ID NO: 6155 - DNA, 201 bp, BradyrhizobiumColbertium
atgctgacacggcgacgtttcaaacaaacaaagaccctcaccgaacgcctcgcggatgaagccgcgcgctgccgcgacgaagcgcgcgcgcttgcgccgggccaccggcgcgagatgctgctgcgccaggcgcggcaggacgagaccgccatgcagatcgaggcctggctgcgctcgcccggcctgagggccccgacatga

SEQ ID NO: 6156 - DNA, 855 bp, BradyrhizobiumColbertium
gtgagggtctttgtttgtttgaaacgtcgccgtgtcagcatggcgcatctcccttgttcgaaagggcgggagcgaaattcgcgttctcatcaccgaccaatgcaattcgcttgcggtgacgggtccaccttacgcttcttgcgggcgcagagtcatatcatttggcaaaggcgcggcgatttttttgccgcgctgagattgaggatgttgagcggcttactcattttgcgccgccgcaggaaagccacctgcacagcaaaagagagcaccgcaatgcgcgtcgatcggccgttgcctgtcgagcacgagcaggccgaatacatgcgcttcggcagcgaggcgattgcaagcaatgagttcggcggcttccgacagtcgctggacgttctgcttcaatccggcgtaacgcgagaacatcgcacgcaagctgtcaccggctatcctcccccttcggaggcacctccatcgtcttccgtcccaaaacgcatcgggaagcggctgcttcaacaactcgcggcattcgcgcgcgatctggcgcctcgcgcggtctgctcagcacgcacagttcgtgccgccagtttcattcacgggaggccaaactcactcggtgctgggctaggagggtggtcacgcctgttgacattgttcctgttttgttctagtaatctatattacaacctacaggtgaagagtcgaagtagcggctcgccctcgattttctgcggggtcgttcatgagaaactcgcttctcgctttggtcctattgaacaagccagtgacgccggacatgtcggcggttgccaaggtccttcgcgcccgacatccggagttggcaacggagacggcgaacaatga

SEQ ID NO: 6157 - DNA, 708 bp, BradyrhizobiumColbertium
ttggcaacggagacggcgaacaatgaagagaagcaaccgtctcagacgaatgcgccgctcattcgctgcggcgacaagctttttgcggtcatgtcgatgcctgcacctattccgcaggagccggagctgtgggcgcgcgctgcgcgaacctggccagagagcgaggctgtggcaaagcgccatcaaggtcacatgatcgtctcgctgatcggaaaaagcgagcggccgttgaccgccgcgcgccttacgaccgcggccatcggcgcgttgattgaggccgtgccggaatgttgtggtgtggtgtgggctggccgggtggcgcggccggcggatgtatggatcgaggcgtcacgctggtcgctcgcaccatatccagattatccctttagactttgggtcgacatccttccgttccggtcaggtgcaaaggtcggggtcattacgatgggattgtcggcatttgttgaccgcgagatcgaatttgtgtcgagtaagctcgcgcttcctgcgttgttcgacaaagtagcaggactttccgtgtatctgatcgagcatggaaaggtggtgaaggatggcgatacgatcggtgcaagtgcgagcgagcggattgcggttcgctacaagaactctgatctctttggagggatggcggtgttttgctgtactgattccgcggaggcggactccgtccgcacgcgatttgcatga

SEQ ID NO: 6158 - DNA, 453 bp, BradyrhizobiumColbertium
gtgttcaacaagaagaaaggtcgcctgccgtacgacctcgagctctgttatcaatggtggctcatctcggatcgggccaaggcagtgttcgagaggctcgaccccgaagctttcgtatttgtgccgtgcgatgtgcgaaagccgcaaggcatctatgatggacccaaatattggctttgcgatgttgcccgagttctagacgcgctggacgaatcgcaatcaagcctgcgcatcggaatacgaaacgatgtccgctatctcgaccacggcaagaagtactacgagatcttcacgggtgacaaactagtcttcagagatgccgcaatcggcaacgctcatatcttccgcatggctttcgctgattcggctgtcatatgcgatcaagacttcaaagatgcctgcacgtctgcgggcctaaaaaggatttggtttcacgacgttctgaaattatga

SEQ ID NO: 6159 - DNA, 1647 bp, BradyrhizobiumColbertium
atgtattctattctctttgatcatcatattattcccaaacaatgtagagaccataaggcatttcgcgatatagccaaagaaacgttcgatttcgactctcccgcaaatcgtatctacttgccagcagatcaaaagcttgccgcccaattgaatgtgtctcctcatcccgggagacatcttgctacctacagcaaatcagtctgcgaagcacttgatcagatcgagacgatcgatagtccgagcgagcgagttgcggagatagggatcctcatcgatgcactgcgcgtcggcttcgtcaacggcgatctctatacaaacttgccgatcggtaggacgccagcggaggctgacgccgaaattaggagggtcttgaaagaccacaaagcctaccttgctcagtacccggaccaactcagggctatcagggatcttgagcaaagaggcgccaacgctggtttaaaccatctaatcaaatggttgccgtacctggacaacccagagaggcagaaagcgttgaatgaggtgattgcccgcaatcccgacgttaatctgacatctgggaatcgcgatcgggacggaacaccttggtccaagttcgaagcgtcggatccctcttcgggcattcttcgcatacccggctcgattccactcgacccgagagactctccgcaactgcctggctacagttcaccttcgctagccggtttggacgaacaagaagggttcacgggaagtgatccccgcttcacacgtgcgctgccaccctctcccacgccagatcccaatgaacagcggctgggtcaattgccgcctactacggccgccccggcggatccgctggtcctccgatccgatccgcactccggaacgccggatccataccatgagaatccattagcaggcggcacaccagtgttgcgcaatgcacttccttggttggccggagcggcggcggtcggcgcagcggctccccttattcccgcttggctgcttaccattgggggcaccttggcgcttgcgcgcgccgtcaacgctcaggaaaccgatgccgccgcgacgatgggcgatgccattcccagtggaggagttctctcagcaggagcgcctgcacacaacgccgtgggcgatggactcagcgccggcaacgctgccggcaccagcggctcttcggcatcatcgtcgacaatctggccgcggctgggcggagcttggtcggttgatccagaagtgccggctagtacttttgctgatcgcttcggcaactgggttagcacgtcgggcggcaccatgcctgccagagatttgccagaaggcccacctcggcctcacgcaggatcagtcgcgcctgaaaacgtccggcgtctcacccgggccaacgcgtcggctgcaagcagcgtgttctcgtccgggagtgcgcctgtcccatttctgccatctaccgaattcagcgaacagtctggtagctggagcgtgccggtcgccgatagccggccagcccagatgagcaggccgacagaagcattcgcgcacgagcccagctacctcattcaaccgccgatcttcggagtggatggcgcgggcaatccgcgcaatgacaccgaggagtggttctcgcgctggatacggttttcgtttgggccggaatga

SEQ ID NO: 6160 - DNA, 1521 bp, BradyrhizobiumColbertium
atgcctgtcttgcttccgacgtcccggtcgcgccgccgaccgcgtgcagaacgcgcgatcaccggccatgaggtcgtcatcgccggcggcggcccggccggcctgatgctggcggccgagctcgcgctcgcgcatgtcgacgtcgcgatcgtcgagcggcgccccgatcaggcgatcgtcgagacgcgcgccggcggactgcacgcccgcacgatcgagatcctcgatcagcgcggcgtcgccgagcgtttcctgcgcgaagggcagatcacccagctcgccggcttcgcctggaccaggctcgacatcggcgacctccccacccgccatccttacgggcttgcgctgcggcagagccacatcgagcgcatcctcgccggctgggtcgcggagctcgcggtgccggtctatcggagccgcgaggtgacgggcttcgcgcaggacgagaccggcgtcgacgtcgccctgtcctgcggcgagcgcttgcgcgccgattatctcgtcggctgcgacggcggccgcagcgcggtgcgcaaggcggccggcatcgacttcaccggcttcccgccgacgctcagcaatctgatggccgaggtcgagatgcacgatgagccggtgctcggcctgcgccacgacgcgctcggcttccacggcctcagcaggacggagcatggacgcattctcgtcgtcgtgacggaagcgacgctggcgcgcgggggcgagcccaccttgcgcgatctcggcgcggccctcgccgccgtgtacggcacggacttcggcgtgcgaaatcccgcctggatctcccgcttcaccgatgcggcgcggcaggccgagtcctatcgcaagggccgcgtgctgctcgccggcgatgccgcgcacgtccatcattccgtcggcggccagggcctcaacctcggtgtgcaggacgcggtcaatctcggctggaagctggcgcaggtcgtcaggggcatctcgccggacggcctgcttgagagctaccatgccgagcgccatcccgtcgccgcgcgcgtcttgaagcacaccatggcgcagatcgccctgctccgccgcggcgacgacggccgcaaggccgcgcgcgagatcgtgtccgacctgctcgccatggacgagccgcgacgacgcttcggcgcgatgatgagcgggctcgacatcgcctacgatctcggcgaaggccacgctttgctcggccgccgcatgcccgatctcgatctcgtggtggacggacgcaagcagcggctgttcacgcttctgcacggcgcgcgcggcctgctgctcaatttcggcgaggtgcgcggcatcgacatcacgccctgggctgatcgcatcgtcgcagtcgatgccgaacacgacggcgcatggcagcttccggcgatcggagcggtccccccgccgggcgccgtgctggtgcggccagacgggcatgtggcctgggtaggcgatgaaaacagctgcgggcttgcggaggcgttgacgacgtggttcggagctgccgatgcgtag

SEQ ID NO: 6161 - DNA, 195 bp, BradyrhizobiumColbertium
gtgacccctcgaccggttgttcgggtcgaggggtcttacgcgatcgccgggggcttgaagcaagtccctcgcgcaccacatatcgagctgggaggaggggctttcggcttccgtgccggccgcgttgacacgtcgggcaaaacaccggcagaatggcatcatcgaaagagttcggccgagcccgcgcggaagtga

SEQ ID NO: 6162 - DNA, 345 bp, BradyrhizobiumColbertium
atgagccacaccgtcctggttgtcgacgacgatcccgctgtcctcggcgtgatcgtggacatgctggaggatctcggctgcgaggtgatcagcgcccacgacggcgcgcatgcgctcgagcggctcgagcagaatccggacatctccatcctcatcaccgacatcaacatgccaggcatggacggccacgagctcgccgagctggcgaggcgggcgcgtccggagctgaagatgctgcaattgtccgggcgcgagccgcggcgcggcggcctgccgatgatccgcaagcccttctccttcgaggagctcgccgacgtgatgcagcgaaccaccggcatctgctga

SEQ ID NO: 6163 - DNA, 216 bp, BradyrhizobiumColbertium
atgacatccaactcgattccacaagagacatcgcgcaacctggccggagccggcccgcgcagcgaacagaagccacgcggcgaggaggcgcgcgacgagcgaggtatcgtcaaagatagcggcgagaacgaagatacgggccgcgacctcgcgcatggcgagggcggcgccatggacctccccgccaagcccggcgatttgtcgaaggacgactag

SEQ ID NO: 6164 - DNA, 174 bp, BradyrhizobiumColbertium
atgggttattgcgtcgcgctctatttcgcaaagctcctggtctgggacaaggttctcggattgggctcgaccgatgccctggccggatttgcggcgatcacggccaatcttgtggtctcgttctacttcgccaagcgcggtttcgagaacgtcgcgaggataatcaagcgatga

SEQ ID NO: 6165 - DNA, 300 bp, BradyrhizobiumColbertium
atgaagatgccggaaaacgagatcaaggccattgtggccgaagcgctggctgaacatcacaggctccagcaagaaaacatcaacgcgatcgtgttgaaggcggtggcttcggtgctggcctcattcggcatcgaagatgacgatcgaagggagctgagggccgatctccaacatttgcgaaggtggcggaggagcgtggagcaggcccagagctacactctcaaggccgtgatcacgatgatcgccaccggcctgatgggggccgtctggcttggcgtcaaggtcgtgctcggcaagtga

SEQ ID NO: 6166 - DNA, 141 bp, BradyrhizobiumColbertium
gtgagccttcacgacgacggcgatgctgcacttgcggttacgtcaatccttgcggacggtttcgatccatctacagaattcgtattgtcgatgcgtccgatgacgacatcgtcgattcgttgtgtgaactgcatcggttga

SEQ ID NO: 6167 - DNA, 324 bp, BradyrhizobiumColbertium
ttgacgttcctcaattcagccaccatgcctcaattcgagattggagcgtggtggctggcctatcatggggatgttgcagtcgctttcgccggcatcgttccatcgacgcacgtgagcaatggtggttatttctccagggtcggcgtgctgcaacggcattgggggatgcggccttcagcgcagatgatgcgtgcggtcgaggcaaggggaagccgcatgggttgggacagcatcgtctccgacacaacggacaaaccggtatctgccaacaacttcatccaggctggttatcggctcttcgcgccgaagacgccatgggcctga

SEQ ID NO: 6168 - DNA, 1269 bp, BradyrhizobiumColbertium
atgcccaccaagccccaattgccggaacgttcaccgcgagggacggcaggtccggctgcgctcgatggtctgttggtcgtcgattttacgcgggtggtcgccggaccggcctgcacacagacgctcgccgatttcggtgcacacgtcatcaagatcgagaatcccgatggaggcgacgacacgcgtgcctatgagcacgccgaaatcggtggtgaaagcgccgcctatctcagcctgaaccgcaacaagcgcggtattgcgctcgaccttgccattccggaggctcgagagatcgcgctggatttgatccgcaaggcagatgtggtcgtggagaacttttcgagcggggtcatgaagaagttcggactcgactatcagtcggtcgcgccgctgaacccacggctggtctattgctcgatctccgcctacggacgcaccggaccgtttgcctcgcggcccggcttcgatcccatcacccaggcggaaagcggcttcatgtcgctcaacggatttgccgacggccctgcggttcgtaccggtccgcccatcgttgacatggcgacgggcatgtctgcctgcaatgcgatcctgctcgcgctgctggcgcgcgaccggctcgggcggggccagcatgtcgaagtcgccctgttcgacgttgcgatgggcatgacaggcttctacggcatggcctatctcatcaacggcgaaaaccccggccggttcggcaattcgcccagtgggtctcccacggtcggcgtctacgaagcctccgacgggccgctctacatggcctgcgccaacgaccggctctaccgtcggctcgtggtcgacgtgctgaatcggcctgatctcatcaccgacccgcaatttgcgacgcgcaaagcgcgttcggagaacaaggagctgttgcgcgcggccatcgcggaggtcttcgcaagctatactctggagaactggatggccaagatgaagcgggccaatattccggtcggttatcttcggacggtcgaggaggggttcaatgcgcccgaggctcgcgagcgccatcgcctgaatcggattccgcacccgacggcggaatgggtgccgaatatcgagccgccaatcacaatgagcctgaccggcgcgatcgatcccgttgcggcacctctgttgggcgagcataccgggcaagtcctgcatgatacgctcggctacgacgaaagccggatcgcggaatttgccgagaggggcgcgtttggcgcggtcaagcctccaacctcggcgtga

SEQ ID NO: 6169 - DNA, 1206 bp, BradyrhizobiumColbertium
atgatccaacccaccggttcgcaagccggtggaggggcctatgcatcactgatcgcgaaggcccgggcgcttctgccgcagctgcgcgagcgagcggcgcagacggaggaactgcggcgtctcccgccggaaaccgaaagagatctccacgattccggcttgttccggatgctccagccatcacgggtcggcggcgccgagcttgactatgtcgccctcgtcgattgcgctgagctgctcggaaaggcagatgcgtcggttgcctggaatctcgccaacctggcgagccatcactggatgctcggcatgttcgagcagaaggcacaggatctcatttggggccgtgatccggatacgctgatcgcatcctccttcatttttccggccggacgcgccacgcgggtcgagggcggataccggctgcacggcagctggccgttctcgtccggcgttgcctcttgcgaatggaacatgctggcaagcgtggtctactccgacgacgaggcggatggtatcgaatatcgaatcttcctgctgccgaagggcgattacaaggtgctggacacctggaatgtcgccggactgcgcgggacggggtcttgcgacgtggaggtgagggaggccttcgtggccgaccacatgaccgtcggggtcggggatctctcaggtggcccgacgccgggaagctccgtcaatccgaatccgctttacgcactgcccgtgttctcgctcttcccatacgtcctctccggcgtggcgctggggaatgcacaggcgtgtctcgacgattatactgaggtcgcgcggcatcgcatttcgacttacaaccgcgccaagcttagcgattttcagagcacgcagatcaagatcgcggaggcttccgccaaaatcgatgccgcacgcctgatcatgcgttcggcctgcctggatgccatggatgacgcgcggcgcggccatatccctgacatggcgaccaagaccagatatcggcgcgacggatcgtattcagtgaacttgtgcacggatgcggtctcgatgctgttcgcagccagtggtgcgcgcggtctgttcacgagcggtgtgttgcagcgacagttccgcgatgcgcacgcgatcaattcgcatctggcattcaatttcgacgcggccggaaccaactacggacgggtggcgctgggcctgccctccgaaaatctcacgctgtga

SEQ ID NO: 6170 - DNA, 564 bp, BradyrhizobiumColbertium
atgaatgatctgccgaagcagccccgcgcgcccgatcccgccaacgagttcgcgagcgacagctcgcagatcgatccgcgcgactttcggaacgcgctcgggacctatgcaaccggcgtgacgatcatcaccgcggcagcgcccgacggcaagccctacgggctgacttgcaattcgttcgcctctgtctcgctgaatccgccgctggtgctgtggagcctcgtcgtctattcctccagcctgaccattttccagaacgccagccattttaccgtcaacgttctaggcgcctcgcaacaagcgcttgcgaacaagttcgcgaaatcgtcggacgacaagttcaccggcgtcgcctggacacctggcctcggcaatgcacccgtgcttgccgagagcgtcgccaattttcaatgtcgctccgtgaaccgctactatggcggcgaccacgtgatctttctcggtgcagtcgaggcctacacatacaatgcgaaggagccgctgcttttcgcgcggggagcgttcggtcgcttcatggctgacgatgagcggaagaagtcgtcatga

SEQ ID NO: 6171 - DNA, 345 bp, BradyrhizobiumColbertium
atggccgtcctcgcggaagcagcgcgattggccgtgaacgcgggtatcgacgccaaccgattgcccgaagcgctcgccggcggctttgcggattccattccgctccagctgttcgtgccgcggatggtgcagggcattcacagccctccgctcggccacatcgccacgatgctcaaggacctcgatacggtcgccgatgtcgcacaggcgacctcgacgccggtgccgatggcctcgctcgcgggacagcttttcaggatggcgaaggcggcgcgcggcgcagaggcggatgcgctggagatctacaagctttcagcgacagagcacccgtccaaggcaagctga

SEQ ID NO: 6172 - DNA, 342 bp, BradyrhizobiumColbertium
atgccgaacatcgtgcacatcctggaagcttgccgtgccgatttcgtcgacaagaacccggaactggtcaaagcctatgtccgcgacatcacgtccggcatgaagaaggcgctggcgaaccgcgaggaaaccttgaaagtcgtgtccgaagtgctgaaggcgcccgttccggtgctcgagacctatttgctcaaggacaacgatttcggccgcgacccgggcgcggcgccgaactttccggcgatccagaagatgctggacatctatgcggagacaggaatgctgccgaagctggatgtcgcacagttcaagcatccgtcgatcgtcgctccgttgcaataa

SEQ ID NO: 6173 - DNA, 1695 bp, BradyrhizobiumColbertium
atgaagaaactgcgatcacgcgttaccacggatgggctcgaccgggccccgcatcgtgcattcatgcgtgccatggggctcgacgacgctgcgatcgccaggccgatggtgggcatcgtcagcatgaagggcgagcagacgccctgcaacatgacccacgacttccaggtggctgcagccaagaccggaatcgaggaagccggcggcacaccacgggaattttcgacagtctcggtttccgacggcatcagcatgaatcatgagggcatgaagttctcgctgttctcgcgggagctgattgccgactcgatcgaggccgtggttcatggcctggcctacgatgcgttgatcggatacggcggatgcgacaagacgcctcccggagtgatgatgggcatggttcgctgcaacgtgccgtccattttcatctacggcggcagctcgctgccggggcgcattgacggacgaacgttgacggtgctcgactcttatgaagctgtcgggagcttcatgacgggcgagatcgacggcgccacgctcgagcggatcgagcgcgcctgcctgccgacgatcggcgcgtgtgccggccagttcacggcgaataccatgggcatggtgtcggaggcgatggggctgaccattcccaacgtctcgatggtgccgggcgtctattccgagcgtgcacagatctcgcgacgtgcggggcgcctgatcatggagatgctggagcgcggcgggccgttgccacgcgacatggtgacgcggaaatccctggagaacggcgcggcgatcgtcgccgcgacgggcggctccaccaatgctgccctgcatctgccggcgatcgcgaacgaggccggaattgcgttcacgatcgatgatgtgggtgaggtcttcgccaggacgcccttgatcgggaattttcggcccggaggcaaatatacggcgaaggatgtctacgatatcggcggcgctgcggtcataatccgtgagctgatccagagcgggcatatcgacggcaactgcttgtccattactggccgcacacttgccgaagagtatggtgcggcgaatgcgcccgacggagaggtcgtgcacgcggctggcgcgccgatcatggctgacggcggcgtcgcggtgctgaaaggcaacctctgtcccgacggcgcggtgatcaaggttgcaggtttgaagagcctgttcttcgaaggcgtggcgcgggtttttgaggatgaagaagcctgcgtcgccgccgttcgcgaccgcagctacaaggcgggcgaggttctcgtgatccgcaatgaggggccggtcggcggacccggcatgcgcgagatgctcggcgtcacggcgctgatctacgggcagggcatgggcgaaaaagtggcgctgatcaccgatggccggttctctggcgcgacccgtggcatgtgcatcggctacgtatcgcccgaggcttttgtcggcggtccgctggcgcttgttcgcgacggcgacaacatcaggatcgatgcggcgaaccgacggatggatgtcctgctcgaggagcaggaactcgccgcgcggcgacgcgaatggaagcaacgaccgccccgtcaccgcgcaggtgcgcttgccaaatacgcgcgcctggtcgggcaggcgccgggcggagccgttacgcatgaaggcccggcggaatggccgtggttcgaatga

SEQ ID NO: 6174 - DNA, 846 bp, BradyrhizobiumColbertium
atgacgatagtgcctgcgagatcgagcgaatgggtgagaccggtggcgcaacaggagccggcttctgcaatcatcgagatcgatcgcgtctcgcaggtcttccagacctcggcgcgcaaagatcatgtggcgctttcagacatctcgctcacgatcgaggagggagccttcgtctccatccttggcccgtccggctgcggcaagtcgacactgctctacattgtcggcggattcgtcagtccgaccagcggtgcggcgaagatgaaggggcaggcgatcacggcgcccggtccggatcgcggaccggtgttccaggaatttgcgctgtttccctggaagaccgtgctcggcaacgtgatgtacgggccacgtcagcaaggcgttcgcgccaccgaggccgaagcgcagagccgggccttgatcgagatggtcggcctcaagggctacgagaacttctaccccaaggaattgtccggcggcatgaagcaacgcgtggcattggcgcggacgcttgcttatcatcccgaagtgctgctgatggacgagccgttcggcgccctcgacgcgcacacgaggacacgcctgcagaacgatcttctgaacatctgggagcgtgaccgcaagacggtgctgttcgtcacgcattccgtcgacgaagcggtcttcctctccgacaaggtcgtcatgatgtcgaaatcgcccggacggatccggcaagtcatcgacatcgacctgccgcggccgcggcgccgcaatgagctgttgctcgacccgcgttaccagaagtacgtcgtcgatatcgagcggatgttcgatgagagcgacgaaggcggcgtgtccgcatga

SEQ ID NO: 6175 - DNA, 786 bp, BradyrhizobiumColbertium
atgatgtcgccggctgccgtgaccaaatacgctgccccggtgctcgcctgcattggactgctggcggtgtggcaagtcgcgtcactggcgctgaagaacgacagctttccgacggcgatcgaagcgatcagtgcgattcccagcatccttggcgacaaggaatccttgatcaacatcctggcctcgctccggcgcatggcgatgggatttggcgcggccgtgctcgtgtcgattccgcttggtcttttgatgggacgtagtgctgcgatcgcggcctttttcaatccgctcctgatggtgatctatccggtgccgaaggctgccttgatgccgatcatcatgctgtggctgggtgtcggcgacatcacgaagacgctcgtgatcttcctcggggtcagtctgcccgtgatctatcacagcttcgaaggcgccaaagcgatagaggagaagatgctctggtcaggcgtcgcgatggggctctcaccgctgcaacgcctggtgcgcatcgtgctgccggcggcgctcccggaaattctgacggggtgtcgtacgggattggtgctggcgctgatcacgatgatcaccagcgagatgatcgcccgtcagtcgggcgctggaaacatcctgttcaatgcgctcgatatgggccaatacgacaccgtatttgcgatgattatcatcgtgggagcgatgggaatctgcctcgatgcaatcttcgaacgagtccgcgcaagattggtgcgctggtccgaacctcagttcgacatgccgctgagtttctcatga

SEQ ID NO: 6176 - DNA, 768 bp, BradyrhizobiumColbertium
atgatgtcgcggtttctctcaccaagtgtcgctcttgggatcgccccgatcgtcatggtgatcgcgctgtggcagggcctggtgtctttcggcttcgcgccagcagttctgctgccgccgccaggcttcgtctttggccggttattgcagcagcttgtgacttcaacattccagcaggagatcgcggcgacgctgatcaggctgtttgccggtttcgcgattgctgtcgtggtcggtgtcagcgtcggcatcgccgctgcagcaagtccggcgatcaacgccgtggtccggccgatcgtgcgtgtcttggctcctctgcccaaggtcgcgctctatccggcgttgctgctgctgctcggatttggccacggatcgaagattactttggtggctgccgatgctcttttcccgatcctgctgtccacctattacggtgcatcgacggtcgagcagaagctgatctggtcggccatggcggcgggaacgccgcgccgcgaaatcctcttcaaagtggtgctgccggcggcgatgccgtcgatcctgaccgggtgccggattggccttgtcatttcctgcatcgtggtgtttctggccgaaatgatcacgtcgacggacggattgggacacgccctcgtgacggcggcccgaaccttccaggcggtggacatgttcgtgccgctgatcacgatctcgctgctgggattgatcctgaacgggctgctgggagtcctgcgctcttacctgctccggggcttccccgaagcgtaa

SEQ ID NO: 6177 - DNA, 1047 bp, BradyrhizobiumColbertium
atgctggctgaccgcatcgaagcaaaatggatcgacgcgttttgcgagattttcgaacgttgcgccgtcaaggcgggcgatacggctgcgatcctctcggaaacccagtcgcgcgccttgaacgtgcatctggcggaattggccctgctgcgcatgggggcccggccgtttcacgtggtgatgccaacaccgcgcaaccggaatatcgttccggttcgctccaccggcgcgagcgaggcgattcagcggctcggcccggtcatcaccgcgcttcagcaggcggggtttgtggtggattgtaccatcgaaggcctcatgcacgcggtggagacgccggagatcctcaaagccggcgcgcgcatcctggtgatctcgaacgagcatcccgaggccctggagcgcatggtgccggattccgcgctcgagaagcgcgttcgtgcagcggccaagatgctgcgtggaacgaagcgcatgcgggtcacctcgaaggcaggcacggcgctcgatgtcgacatggtcggggcgtccacggtgggcgtatggggctggaccgacaagcccggcacgctggcgcattggccgggcggcatcgtcgtcagctttccgaagagcgggaccatcaacggcacgctggtgatggcgcccggcgacatcaatctgaccttcaagcgttacctgacctcgccggtgaagatgacgctgaaggacgattatgtcgtcgaactggaaggcgacggcacggacgcggcgatgatgcgcgcctatctcgccgcctggggcgatcgtgaggcctatgcggtttcccatgtcggcttcggcatgaaccccggcgctcgctacgaggcgctgtccatgtacgaccagcgcgacaccaacggcaccgaaattcgggccgtctccggcaacttcctgttctcgaccggcgcgaatgagttcgcagggcgctatacggcagggcatttcgacctgccgatgatgggaacgacgatcgaactcgacggcgttgccgtggtccgggaggggatgctccaggacgtcttcggctaa

SEQ ID NO: 6178 - DNA, 993 bp, BradyrhizobiumColbertium
atgaccaatcgcatcaatatcgcctgtctcggcgctggccgcatgggccggggcatcgccgtcgccttcgcttatgcggggcacagggtcacgatgatcgatatcaaggcgcgctcggccgaggagttcgccaagctcgaagcggacgcgcttggtgaagtcaggaagaccttcgccagtctgtcgaagctggggctcttggccgaggcggatgtcgatctgctgatcgcgcgcgtctcggttgtcgcggccggcggaagcgctgcagctctgtccgaggccggcatggtcttcgagggcgttcccgaggtggtcgagctcaagcgcgaggtgctggcggcagcgtcgcgacaagtcggcccggaccccatcattgcatcgacgacatcgacgatcctcgtcgatgatctctccggcgcgatcgtgaatccccgccgcttcctcaatgtgcattggctcaacccggcctatctgatcccgctcgtcgagatttcgccaggcaaggccaccgacccggctgtcatcgacgaggtcaaggcattgctcgaaggcatcggcaaggtaccggtggtctgcgccgccacacccggcttcatcgtcccgcgcatccaggcgctggcgatgaacgaagccgcgcgcatggtcgaagagggcgtggccagcgcggaggagatcgacaaggcgatccgctacggcttcggcttccgctatgccgtgctcggcctgctcgaattcatcgactggggcggcggcgacatcctctactacgcgagcaggtatctggaaggcgcgctcggcagcgaccggtaccgggcgccggacgtcatatcacgcaacatgcatgaaggccggatcggcctgcgcacaggagcaggctttctcgactactcaggcctcgacgtcgacgcgtaccgcgcgaaacggctccaggccatggtcgatctgctccgccacttcgggctggcgcgccccccggtgctcggcagcaattag

SEQ ID NO: 6179 - DNA, 1089 bp, BradyrhizobiumColbertium
ttgaagatcgcagttctgggtgggggaaacggctctttcgcggccgcgggcgattttgcgctatcggggcacgaggttcggctttggcgccgcgatgccgatcaggtcgcggcgcagcgcgccgccgggacgcgcatcctggtcaaggatcacaacggccgtcacgacgtggaggtcgccctggtcacgaccgacatggccgaagccgtcgatggcacggagctgatcctgtgccctgcacctgctttcgcgcaagcagatatcgctcggctgcttgccccgcatctgcgggacggccaggtcgtgtttctgccgccggcgacattcggctcgatgatcttcgccaaggccgcacaggatgctggaaaccgggccaaggcgagctttgcggaaaccggcacattgccctggttgacgcgcaagcatggaccgttcgaggtggcgatcaccatccgcgccaagcgacttccggtcggggtgttcccgcttgatcaggcgccgcatgccctcgacgtgatcggacgtgcattcccgggcgttattgagccctgcggagacgcgctgtccggggcgctgatgaacgcaggtccgatcatccatccgccgctgatcgtgatgaacgcagggccgatcgaacatttcgagcgctgggacattcacaaggaaggcacgcaagcggcgatccgccgggtcaccgacgcgctcgatgacgagcgcatcgcggtgcgcgaggcgcttggctacggcgcgccgcatttcccgctcgcgcatcactacgcgaagaaaggcgagatctggatgtacggccgcggctcgcacgaccggctgaccgattccggcgactggcgcgagcggatcgtgctgaccgagcaccgctacatgcgggaagacctgcggcttgggctatcgctgctggtgtccgtcgccgggttggccggcgttgcaacgccgctggccaacgcgttcctgtcgatcggcggcgcgatctgcggcgaagattttgcccgaggtggccgaacgctcgagacgctcgggctcgggaatctcagcaaggctgaactacagacgctgctccgcaatggattctga

SEQ ID NO: 6180 - DNA, 1536 bp, BradyrhizobiumColbertium
gtggacctctgcagcctgatcgaccgcaacgcggcgttcgcgccagacaagacggccattgccttcgaaggcgaacggctgagctatgccgcattcgccgcacgcatcgaacggaccgcaacggctttgaaacaggagttcggcgtcggccgcggtgaccgcatcgcgatcttgagcctgaacaggccggattacctggttctgctctacgcctgcgcgcggctcggcgcgatgctggtgccactgaactggcggcttgcggtggcggagcaactcttcattctgagcgatgccggcgccaaggtcctggtgctcgagcaggcgttttccggagtgcttgccgagctggggcagaccgccccgggaaaatccgtcgtcggcctcgacttcgcgccgcccggcggcatgacattcgaggatctgctggctgggagcggcggcaccggtcgaaatccacacaccgacctctcctgcccgttgctgatcgtctacacgtcgggaacgaccggacggccgaaaggtgcggtgttgcgccaggaggcgctgttctggaatggcgtcatgagccagcacatgcacaacatgacgtccgatgaccacgtactcaccgtattgccgttcttccatgtcggcggcctcaacatccagaccacgcccgcgctccaattgggcgccactgtcacggtgcacgctcgcttcacgccggacgcagcactcgccgccatcgagcaggagcggccgacactcacagtcatggtgcccgcggtcatccaggccgtgagcgaacatcccgcctgggcgaccaccgatctctcgtcactcaaggccgtcgccaccggctcgacgatcgtgccgccgcacctgatcgagcgcttcgtcgcgcgcaatgtccccgtgcttcaggtctatggttcgacggaaacctgcccgatcgccgtctacacgcggcttggcggcgatctgtcgcgcgccggatcgaccggccttgccggcttgtgctgtgaggcgaaagtgatcgaccaggccggcaacgaactgccggcgggcacaccgggcgagatcgcggtgcgcgggcccaatgtgttcttcgaatactggggcaacgaggccgcgacgcgcgacgcattgcacgacggctggtatcgcaccggcgacatcggcctgtgcgatgccgatggctatttctgggttcgcgaccgcaagaagaacatgatcatttccggcggcgagaatgtctacccggccgaggtcgaacgcgtcctgctcgaacaccctgatgtaagcgaatgcgcggtgatcggccggccagacccgcgctgggacgaggtgccgatcgcctatgtgattgcgagatccggctgccggctcgaagcggacgatttgagggcccatcttcaggcgcagctcgcgcgctacaaggttccgcgcgacatcgtcttcgtcaccgacatgccgcggacggcgctgggcaaggttcagcatttcctgctgaaacagcttgatgcgcaatcccgcgggcaaggagaagcatcttga

SEQ ID NO: 6181 - DNA, 1284 bp, BradyrhizobiumColbertium
atgcaagtcagtaagaccctcgacacgaccaacaaggtcgcgctggatgcgccgatcttcgatcccatcgcatttcgtctgagcgacgagcaggccggcatcattgcccgcgcaagggagatcggccagaccgtgtttgccggccgcgccgccacttacgatcgcgaggcgaccttcccgaccgaaaactatcgcgatctgcatcgcgtcggcctgctcggcattgccgtgccgaaaaaacacggcggcctcggcgcgaactaccagacctatgccttggcggcggccgagatcggccgctattgcggcgccaccgcgctgacctggaacatgcatgtctgctcgaccctgtggtcggggccactcgccgacgatctcgacatggatgcggagacccgtgccgagcacgagcggcggcgtgcggtccattacaagcgcatcgtcgcggacggtgcgatttactcgcaaccgttctccgaaggtggcgctgccgctgcaggcggcgtcgctttcggcaccgaagcaaggccggtcgcgggcggctggatcgtcaacggcaagaagatctttgcatcgctctcaggccacgccgactattacggcgtgctctgcaccgagatcgaggaaggcgagaaggcgtcgcgccgcaacacgctatacctcgcgatatcggccaaatcagacggcgtctcggttgtcggcgactgggatccactcggcatgcggggcacggtctctcggaccctcctgttcaaggacgtgttcgtgccggaggattccgcgctgatgccgcgcggcgtctatttccaggctgcgatgcgctggccgcacatgttcctgacgctgtcgccgacttatatgggcctcgcgcaggccgcctacgacttcacggtgcactacttgcgcggcgaggtcccgggcatgccgccggtcaagcgcaggatgtacccgaccaagcagatcgccgtcgcgcagatgcagatcaagctggagcagatcaaggggatctggttccaggctgtcaccgaagcctgcgccaatccgagcaaggagcaggtgttgcgggcctatgccgcgcaatattcggtgatggaaggagccaatgagctcgccgcgctcgcgatccgcacctgtggcggccaggcgatgctgcgctcgctgccgctggagcggatctatcgcgacagccgttgcggctcgctgatgctgccctggaccgccgagctttgcctcgaccggatcgggcgcgaggcgctgtacgaggccggcgaaacggacgactga

SEQ ID NO: 6182 - DNA, 816 bp, BradyrhizobiumColbertium
gtgtcgcagcctgtgccaatgataacaaaagacggacgcttcgcctatgaagccgcgggcgatccggctgcgatacctttgatattcctgcatggtatcggcggtgccgcacgggcttggcggcggcagcttgccacattcagcgaccgcttccgcgctatcgcatgggatatgccggggtacggcggatcggaaccgctcgccagcgtcagcatcgctgccctggcggaggcactccaacgattcatcgaacagctcgatgtcagcaggcctgttctggtcggccattccatcggcggcatgatcgtccagaggtggctggtggaatctcccaaactggcacgtgcggttgtgctggcgcagaccagccctgccttcggcaaggcagatggcgactggcagaaatcattcatcgctgcacggctagggccgctcgatcgcggcgagacaatgaagtctctggcgccatcactggtgaaagagcttgtcggcgacgatcccgatccggacggcatggagctggcgcgcgaatgcatgggaagcgtgcccgaagcaagctatcgcgccatgatgctggctctgatcggcttcgatcaacgcagcacgcttgggaacatctccgtgccgacgctgctgctgtccggctcgaaggacaacaacgcacctgcgcccatgatggcaaagacggcgacctatatccccggggctaagtatgttgagctcgccggtgtgggccatctcgcaaatctcgagcgccctgatgccttcgacgatgccctaggcgggtttctgaactctctcgcgagcaaagcgtaa

SEQ ID NO: 6183 - DNA, 762 bp, BradyrhizobiumColbertium
atgtccggattgccgcatttgccgcacgcgctggtgaccggtggcggtcgcggcatcggccgcgcaatcgctgcttctctcgtcggcgctggcgcaaccgtaactgtgcttggccgcaacgcggcggttctcgaagaggcagtcaatgcaggtgccgcgcactttgccgccgtcgctgacgtctcgaacgaaacgtcaatgaacgccgccatcgccgcagcgagtgcgcacaagccgatcgatatcctgatagccaacgccggcagcgctgaatcggcgccattttcgaagtcggactcggccctttttgcgcgcatgatggatgtcaatttcatgggcgtggttcacgccgtccgtgccgtgctgccgggcatgaaggatcgtccctacggccgcatcgtcgcggttgcgtccaccgccgggctcaaaggttacgcctatgtcagcgcgtatgctgccgccaagcacgccgtcgtcggtctggtgcgctcccttgctctcgaaatggccggaagcaaggtgaccgtgaatgcggtgtgtcccggtttcaccgacaccgacctggtcgccggcagcatcgaaaacatcatgaagaagaccggcaggacccgcgagcaggcgatcgccgagcttgcgaagcacaatccgcaggggcgtctgatcactccccaggaggtggccgatgcggtgctctggctttgcggcgagggcgccggcgcgatcaccggacaggcgattgcggttgccggcggtgaaatttag

SEQ ID NO: 6184 - DNA, 873 bp, BradyrhizobiumColbertium
gtgtgcaatgcggaacagggaatccaaggagatcgcatgagcaggccagccaatcccgtcaccctcccgcttgcagattattcgcctcagcattttttgctggctgtggtcgacggcgtcgcgacggtcacgctcaatcggcccgagcggaagaatcccctgacattcgagagctatcgggaattgaccgatttcttccgcgcctgcgccttcgacgacgcggtcaagtgcatcgtcgtcaccggtgccggcggtaatttctcgtcgggcggtgacgtgttcgagatcatcggtccgctcgtgaagatggacaccaaggggctgactgccttcacgcgcatgaccggcgacctcgtcaaggcgatgcgggcatgtcctcagccgatcgtggccgcggtcgagggcatctgtgccggggccggggccattatcgccatggcatccgacatgcgccttgcggcgagcggcgccaaggtggcattcctgttcaacaaggtgggcctcgccggctgcgacatgggcgcctgcgcaatcctgccgcggatcatcgggcagtcccgcgcctccgagctgctctacacaggccggttcatgaccgcggacgagggcgagcgctggggcttcttcagccgcatcgtcacgccggagcaggtgttgtcccaggcgcaagttctggcgaaacagattgcggaggggccgaccttcgccaacaccatgaccaagcgaatgctggcgatggaatgggcgatgtcggtggaggaggcgatcgaagcggaggcggttgcccaagcgctgtgcatgaccacggcggatttcgagcgcgccttcgaggctttcgccaacaaggtcaagccggtcttcaggggcgattag

SEQ ID NO: 6185 - DNA, 2352 bp, BradyrhizobiumColbertium
atgaaagtcgcgatcatcggtggcggacctgcgggtctctatgctgcaatcctgctcaagaagcagcgcccgagcgccgacatcacggtctacgaacgcaaccggcccgacgacaccttcggtttcggcgtagtgttctcggacgcgacactcgacaatttcgagaagcacgatctcccgagctatcgccgtattactcaggaattcgcctattgggacgatatcgccgtgcatttccgcggcacggtgcatcgcgtcggcggcaacggcttctgcggctgctcgcggcagaagttgctcctgatcctccaggaacgagcacgcgagctgggcgtcgcgctgcatttcgaagtggacatcgacgacgagacccgattcgccgacgccgatctcatcctgctcgcggacggcatcaacagccgcttccgcgagaaatatatcgagcatttccagcccgaggtcgacgtccgtgccaacaagttcgcttggatgggctctaccagaccgcttgatgctttcaccttcatcttccaggagacagagtgggggccgttcatcgcccatgcctatcagtatgaggccgggcactcgacctggatcttcgagaccgatcctgaaacgttcgagcgcgcggggctgacgggcctcgacgaggctcagtccgccgcgcggatggcggatatcttcggctggttcctgggtgggcacaagctgctgaccaaccgctcgatgtggcgcaacttcccgatgatccgcagcaagcgctgggtcaaggacaacatggtcctgctcggtgacgccaaggccagcgcgcatttttcgattggatctggcaccaagctcgcgatggaagacgcgattgcgctggccgaagccatggagaaggcgcccagcatcgaggcggcgctggaggtctacgagcacggccgccgcgaggaggtcgaaaagacgcagcatgccgccgacgtctccctggtctggttcgagcatgtcgaccgcttctgggattttgacccggtgcagttcgccttcggcgtcatgacgcgctcgaaggcgatcacctatgacaatctcaagctccgcgcgccggatttcgtggccgaggtcgacaagtcgtttgccagacaggtccggagcagcggcttcgatgtcgacaccgagcggcccttggtgccgctgttccagccattccgtttgcgcgagatgaagctcgccaatcgcgcggttatgtcgccgatgtgcatgtattcggccaaggagggggtgccgacggatttccacctcgtgcactacggctcgcgcgcgattggcggcgccgggctgatcttcaccgagatgacttgtgtcagccgcgacgcccggatcacgcccggctgcgccggtctctggaacgacgagcaggaagccgcatggcgacgcatcgtggacttcgtccacgacaactcggccgcaaagatctgcctgcaactggggcacgccggccgcaagggcgcaaccaaattgatgtgggacggcatggaccggccgctcgagcagggcggctgggacattttctcggcatcgccgttgccctatttccccgatagccaggtgccgcgcgagctcgatcgcgccggcatggacgcggtgagggatactttcgttgcggcggccgagcgcggcgagcgctgcggcttcgacatgttggagctacactgtgcccatggctatctgctcgcgagcttcatctcgccgctgaccaatacccgcacggaccagtatggcggttcgctcgaaaaccgtctgcggttcccgctcgaggggttcgaagcgctgcgcgcggcatggccctcgcacaagccgatgtctgtgcgcatctctgcaaccgactgggtcgacggcggcatcaccggcgatgatgccgtcaccatcgcgcgcgcctttgccgaggccggggtcgatctcatcgacgtttcgaccggccagaccgtgcgtgacgcgcagccgatctacgggcgcatgttccagacaccgttctcggatcaggtccgcaacgaggcgcgcgtcgccaccatgtgcgtcggcaacatcaccacggcggaccaggccaacacgatcctggccgcgggccggtcggatctcgttgcgctgggccgtccgcatctcgtcgaccccttcttcaccatgaaggcggcggcctggtacggggcaaacgacgccttctgtcctccgcaatatctgcccggaaaagaccagattttccgcaacagcgtccgcgaccggcaggacctcgaagagctgaggattaaggctaagcccaagacccgggccgagctcaaggccgaggcgacaaagccgcttgcggcggagtga

SEQ ID NO: 6186 - DNA, 1251 bp, BradyrhizobiumColbertium
atgaaggcgattatcgtcggcggcggtatcggtggtctcaccacggcattgatgttccgctcgcgcggccttgactgcgagatctacgagcaggccgacaccattcgcgagctcggggtcggcatcaacacgctgccgcatgccatgcgcgagctcgccggccttggcctgctccagaagctcgacgatgtcgcgatccgcaccgatcagctttattacctcaatcgccacggccaggaggtctggcgcgaagctcgcggcatcgaggccggccacgacgtgccgcaattctcgatccatcgcggccgccttcagggcgtgatccatcgcgcggtcgaggagcggctcgggcgagaggcgattcacaccggttgccggctcggtgcgttcacgcaggacgagggcggcgtcaccgcttactttttcgatcgcgccggcgcccatgtccacaccgcgcgcggcgatatcctgatcggcgccgacggcatccactcacgcgtccgagagacactgtttccgaacgagggcccgccgtgctggaacggcctcatgctgtggcgcggtgcccgggactggccgctgtttctgaccggcaagtccatgatcgtggccggcggtctcaatgccaaggtggtgatctacccgatcgcggaaggatcgagcccggcaagccgcctcaccaattgggcggtgctggtcaaggtgggtgagggcaacgtgcccccgccccggaaagaagattggtcgcggccgggccgccgcgaggaactgatgccgcacgtcgcccgcttctcggttccctatatcgacgtgaagagcctgatctcggcgacgcccgagttctacgaatatccaacctgcgatcgcgatcccttgccctattggtcatcggggcgcgtcacgttgctcggcgatgccgctcatcccatgtatccggtcggctccaacggcgcctcccaggccatcctcgacgcgcgctgccttgcggatgcgctggtgcgtgccgaacatccgcgccaggccttgctcgaatacgagaagaagcgcctgccgatgacggccgagatcgtccgctccaaccggcgcggcgggcctgaaggcgtcatcgacgccgtcgagcagctcgcgcccgacggcttcgacaacgtcgacaacgtcctgagctattcccagcgcgaggccatcgtgcgcggctatgccaccaaggccggcttcgccgccgtgccgggacttgctgcggtgcgcgcctga

SEQ ID NO: 6187 - DNA, 456 bp, BradyrhizobiumColbertium
atgaagagcgaaatcaccggcatcacgcgggccaatgagggcatccagggcatctcctggaacatcctcggccagacctatgtgccgaagagctacgccgaacacagcttctcctggcatgcgacactgccgccaggcacgttcgtgccgccgcacattcatcccgatcaggatgagtatctctacatgctggagggcaagctcgatttcatgctcggcgattctgagtcgcaggccagcgccggcgacctgatccgcctcggcatgggcgtgcctcacggcatcttcaacaagtcggagcagaccgcaaaggtgctgttctgggtctccccgagccgcaagttgttcgacctgttctggggccttcacaacatgaaggagcagaagcccgaggacgtcgttgcgctggccgccgagttcaacatccacttcctgccgccgcctccgggcggctag

SEQ ID NO: 6188 - DNA, 1218 bp, BradyrhizobiumColbertium
atgcggctcgcagcgcttgccgatagtcacgagggacagatcatgaagatgaaaatgacgttggccgcagccaccctgctgcttggcaccgcgatgacccctgccctcgcccaggagaagatcaagctgggcgtgatcgtgaccctgtccgggccagcggctgcgctcggccaacaggtacgggacgggttcgcgctcgcagtcaaagatctcggcaacaagatgggaggccgcgatgtcgaggtcgtcgtggtcgatgatgaactcaagccggatgcggcggtcaccaaggtcaagggtctcctcgagcgcgagaaggtcgacttcgtggtcggaccgatcttctccaacattctgcaggcgattcaccggcccattacggaatcgaagacgttcctgatcagccccaacgccggcccgtcgacctttgccggcaaggactgcaacccgttcttctatgtgacgtcctatcagaacgatcaggttcacgagatcctcggcaaggtcgcgcaggatcgcggctacaagcgcatgtacctgatggtgccgaactatcaggccggcaaggattcggtggccggcttcaagctcgactacaagggcgagatcgtcgaagagtcctacatgccgctcaacacgctggatttccagccggaactctccaagatctcctcgcagaagccggatgcgctgttcacgttcatgccgggcggcctcggcgtcaacctcgtcaagcagtatcggcaggcagggctcgccgacagcattccggttctctcggccttcaccgtggatgaatcgacgctgcccgcgcagcaggatgcagccgtcggcatgttcggcggcgcgaactgggcccccaatctcgacaatccccagaacaagaagttcgtcgccgcctatgaggccgcctacaacagcgtgcctggaacctacgctttccaggcctatgacaccgcgatgctgatcgacagtgccgtcagggcggtgaagggcgatctgtcgaacaaggacgccgtccgggcagcgatcaagaaagccgacttcacctcgctgcgcggcgcgttcaagttcaacaccaacggctatccgatccaggatttctacctgaccaaggtcgccaagcgtcccgacggcaaattccagaccgagatcgtgcagaaggtcttcgagaattacggcgaccgctatgccaaggattgcaaggcgacgaattaa

SEQ ID NO: 6189 - DNA, 141 bp, BradyrhizobiumColbertium
gtgactatcggcaagcgctgcgagccgcatactcaatccaagcttatgctgacgatggctgccgcggcaagcaagctcaaggcatcgtcatctcggcaggcggtgtgcatgcaagcagcgcgccaatcatttgaagcctaa

SEQ ID NO: 6190 - DNA, 519 bp, BradyrhizobiumColbertium
atgttggccgtgagtgactgcatcaacatgctcgattccgagaccaaggccgtcgaaacaccggaggaccacgccgaagaacttcggctgtggttgcggctcttgacctgcacgacgctgatcgagggcgaggtgcgcggccggctgcggcagcggttcgacgtcacgctgccccgtttcgacctgatggcgcagctcgacaaggcgcccgacggtatgacgctgtccgatgtctccaagcgcatgatggtgtcgaacggcaacgtgaccggcctggtggaacggctggtcgaatccggccatctcgaccggcggacgtcggagaccgaccgccgcgtccaggtgatccgcctcacaaagctcgggcgctccgagttccgccggatggctgcagagcacgagacctggatcgccgatctcttcgccgatctcacgccgaaggatgtgcgcgaattgatgcggctcttggccaagaccaaggcgtcggcgcagaaatcggccgcgcggcgccggccgtag

SEQ ID NO: 6191 - DNA, 1692 bp, BradyrhizobiumColbertium
atggccaacgccgccaaggttcaagtgacgggctcgcatgacggcaacgccgcgtcggcccatgtcgatacgttcgcgcggcagcacctgccgccccgcgaactgtggcccgagttcatcttcacacggccggaactgcgctatcccccgcgactgaactgcgtcagctatttcctcgatcgctgggtcgagcagggccatggcgacgcgccttgcgtcatcagccccgccgtcagctacacctatcgcgagttgcaggcgctggtgaatcgcatcgccaacgtgctggtcggcaagctgggcctcgtcaccggcgagcgcgtcctgctgcgctcggccaacagtcccatgatggttgcgacgtatctggcggtgatcaaggccggcgggatctgcgtggcgaccatgccgctcttacgcgccaaggagctgtcctatccgatccagaaggcggagatcacgctggcgctgtgcgatggaaagctcgccgacgagatggagaaggcgaaagcgacggcgcccgatctcaagcgggtcgtttattgggggaacggcgcggcagactcgctcgaggcgctgatcgcggatgccggcgccgagttcgcggccgtcgataccgcatccgacgatatctgcctgatcgctttcacctcgggcacgaccggtgatcccaaggggaccatgcatttccatcgcgacatgctcgcggtctgcgacggctatgcgcgcaacatactgcgtgcggagcagagcgatcgcttcatcggctcggcgccgctcgcgttcaccttcggcttcggcggcgtgctgtttccgatgcatatcggcgcctcctttgtcgtgctggaaaagacgacgccggacgacattctgaacgcgatcgagcagtacaagacgacggtctgctttacggcgccgactgcataccgggcgatgctgggtaagctttcgggccgcgatatctcttcgcttcgcaaatgcgtctccgcgggcgagaccctgcccaagccgacgttcgatgcgtggctcaaggcgaccgggatcaagctgatggacggcatcggctcgaccgagatgctgcacatcttcatcagcgcgaccgaggacgagattcgtccgggcgcaaccggaaagcccgtgccggggtatgaagccaagatcgtcgacgatgagggccgcgacgttccgcccgggacgatgggccgtcttgccgtgcgcgggccgaccggctgccgctatctggcagacgagcggcagcggaagtacgtccagaatggctggaacatcaccggcgatacctacctgatggatagcgacggctatttctggtatcagtcgcgctccgacgacatgatcgtgtcggccggctacaacatcgcgggcacggatgtcgaggcggcgctgctgacgcatccggcggttgccgagtgcggcgtggtcggcgccccggacgaggcacgcggcatgatcgtgaaggcctatgtcatcgccgcgcccggcgtgacgcccgatgctcagctcacggccgagttgcaggagcatgtcaaacgcgagatcgcaccatacaaatatccgcgcgcgatcgagttcgtgacgcaattgccgaagaccgagaccggcaagctgaaacgctttgccctgcgccagttggcgcaagccgcggcgacgtcctcgggcgttgcggcggaatga

SEQ ID NO: 6192 - DNA, 456 bp, BradyrhizobiumColbertium
gtgacgacgccgaaaggcccgcaactcgcggtgctgccgacagcagccgaggacggaacgcgcaaagcgcaaatcctccagccgtcaggctggccgatgccgaaaggctatgccaacggcatggctgccgaagggcgtatcgtcgtcaccggcggggtgatcggctgggatgcccaagagcgtctcgccgacggcttcgtcgcgcaggtgcgccaaaccctggacaacatctccgcgatcctggccgaggctggtgcccggcccgagcacctcgtacgtctgacctggtacgtcgtcgacatggacgagtacctcgccaatctgaaggagctgggcaggatctaccgcgacgtcttcggcgcgcactatcctgcgatggctctggttcaggtcggccgtctcgtggagaaggcggcgcgcgtcgaaatcgaggccaccgccgtcatccctcgctga

SEQ ID NO: 6193 - DNA, 729 bp, BradyrhizobiumColbertium
atgcgcgcccaccagatcatgacccggtcggtcatctcggtaacccccgacaccagcatcgtcgaagcggcaaacatcatgctgaagcggcatgtcagcggtctcacggtggtcgacgagacgggcaacctggtcggtgtggtctcggaaggagacttcatccgccgcagcgaaatcggcaccgggcgcaagcgcgggcgttggctgcggttcatccttggtccgggcaagtccgccagcgagttcgttcacgagcacggccgcaaagtctcggaagtgatgaccgactcgccggtaaccatcacggaggataccgcgctcgcagagatcgtcgagctcatggagcggaacaacatcaagcgactgccggtcgtgcgcggcgacaaagtcgtcgggatcgtatcccgagccaatctgctgcaggcggtggcggggctcgcccgcgaggtgcccgatccgaccgcggacgatgatcacatccgcagccgcatcatcgacaccatcgagaagagcgactggtgcccgttcgggctgaacgtcatcgtgtgcgacggcatcgttcacctcagcggcgtcatcaccgaagaggctgcacggcaggccgcgatcgtcgccgcggagaacgtcgagggcgtgaagaaggtgcacgatcatctgtgctgggtcgacaccatatccggcgtctatttcaactcgcccgaggacgacgagctcgccaaggcgagctga

SEQ ID NO: 6194 - DNA, 297 bp, BradyrhizobiumColbertium
gtgaaaggcacggtcaaaaggatacggctcagatccaggcggaggatcggcggagactggcatacgctcgtgccgttcgaggctcaccgtcgaggcttcagaacgagcaaggggatgggtgggagcaacctgcgtgacttgctcttcggcccgtggaaatatctggacgacgctcatagctctagttcctgcgggcttcggttcgacgtcggcagcaggataaggcgcgacctcgaatacgtcttgagctgcatcaaatccgggtgcggatcgtcacagctgccgaattggcattga

SEQ ID NO: 6195 - DNA, 1764 bp, BradyrhizobiumColbertium
gtgagcctcgaacggcacgagcgtatgccagtctccgccgatcctccgcctggatctgagccgtatccttttgaccgtgcctttcacgcgatgctggcgcggttcacgggcgggatttcgccgctggctttgtcgctcgcctggctcgattggagttcgcatctcgccgcggcgccccagcgccagatggaaatttatcgtaacatcgttcgcgacaccggccggctcgtggatgctgctgcacacgcgatgtcgcccgagcaaaagccgtgggctgtgatcgcgccgcagcagcgggatcgccgcttcagcggaccgcaatgggagaccccgtcgttcaatctgctggcgcaggcatttctgctcgcagagcgctggtggcgcgatgccgcgacgggcgtgcgcggcgtgtcgcacgcaaacgaggccatcgtcgagttctcgatgcgccagatgcttgacatgctggcgccgtcgaatttcgcggcgaccaatccgaaagtgctggagaaggcattccagagtggcggggagaatttcgtctttggctggcagaattggtgcagcgacctgttgcgcctgctctccggctcgaagttgaccgacgacggaaagtttgtcgtcggcaagacggtggcggtttcgcctggcaaggtcgtctaccgcaacgatttgattgagctgattcagtaccagccaaccaccgcgcaggtgcgacccgaacccatcctgatcgtgccggcctggatcatgaagtactacattctcgacctgtcgccacagaactcgctggtcaaatatctgacaggccaaggattcaccgtgttcgcgatctcttggcgcaacccggatgccagggatcgggacctcgccttcgacgattatcgcaagctgggcgtcatggccgcgctggacgtgatcggcctgatcatgccgggtcggaagactcatgcgctgggctattgcctgggaggtactttgctgtcgatcgccgccgccgcgatggagcgtgacgccgacaaccgcctcggcaccatcactctccttgccgcccagaccgacttcactgaggccggcgagctgacgctcttcatcagcgagagccaggtagcctttctcgaggacatgatgtggcagcgcggctatctcgatacgacgcagatggccggcgccttccagctgctgcgctccaacgaactgatctggtcgcggctgtcacatgattatctgatgggcgagagcgcgccgccgagcgatctgatggcctggaacgccgacgccacgcggctgccttatcgcatgcactccgagtatttgcgcaagctgtttctcgacaatgatctggcgggcggacgctatctcgtcgaaggcaggagtgtttcgctctccgacattcacgcaccgatgttcgtggtcggcacggttgccgatcacgtggcgccatggcgatctgtctacaagatccactatcaggtcgatgctgacgtgacgttcttgttgaccagcggcggccacaacgccggtatcgtcgcgcctccggaggaccccgaccacttctatcaggtgctgaccaaggctgccgacgcgccctatgtcggtgcggatgagtggctcaagctggcgccgcgagttgaagggtcatggtggccggaatggaccagatggctggcggcacgctcaggcccgccctgcgacccgccgccgatcgggcttggtgacgcgcccgacctgccggatgctccgggagattacgtccacacctaa

SEQ ID NO: 6196 - DNA, 987 bp, BradyrhizobiumColbertium
atgcgggcaaggatgttgcgacccaccacaaaggcgacggcgaccacgcaggccaagccgtcggcgcggcgcaaggccctgcccgctcgcctcagccccggcatggcctgcgataccgccttccggatcatcgcccgtcgtcacctcgacgccgtgctcgcccagcacgacggcacctgccgcggcgatcctgacgcgctgcaccagatccgcatcgcactgacccatctgcggactgccatccgcttcttctcgccgatggttgacgatacccagcggccgaatgtctgggccgaactgaaatggctgaacggtcagctcggcatggtgcgggacctcgacgtcgcaatcgagcgggtcgtcgctgagagtggcgacgaactcgcggtggtcgccgagcttcagcactggaacgaaaaacgggccgagagccaccggctgctggcgcgcgcgctgcaatacgcgcggtaccgccgtctggtcgagcaggtctcgacctggatcgatagcgggccctgggcgacccgccgaagcaaggaagccattcgattgcgccgccgcacgctcgccgaccacgcgacagagcggctggcggagtgggaaacgacgctgctcaagaaggcccgaaagctgaagaggctcgatgtcgggaaacgtcacaagctgcggctcctcaacaagcggatgacctattcgatcgagtcgcttgcggatctgttcgccgatggggcagcgacgaagcagaaatccattctcaagcaattgcgcaaggcgcagcggtcgctggggcagctgaacgacgatgcacgcggacaagctctggcagcatcgttgcatggcgccggccccaatgcaggccagcgcttccacaaccgcaagcgggaaaagaagctgttgcgggcggcgtctgtcgcctaccggcaactcgacgaggccacgcccttccgctcctcggatctcgcgccaagctcggagccggaggtttag

SEQ ID NO: 6197 - DNA, 1533 bp, BradyrhizobiumColbertium
atgaaggatgaaacggcggcccaggagcgcatctttcagatgctgaccgaccatcccggcgtgacgcggatcgacacgcatggagcttccgtgttcctggatggaaagcgcgcgctgaagatcaagcgtgccgttcggtttccgtttctcgactattcgacactcgagaagcgcaaggcggcctgcgaggaggagatcaggatcaaccggccgctggcgccgcagatctatcagggcgtcgttgcgatcacggaagacccggatgggtctttgcaggtcggcggtccaggccggccgatcgagtatgcggtcgacatgtcgcgtttcgacgaaagcaggacgctggatcatctggcaaaggccgggccgctggacgcgaaactcgcctcggctgccgcggacgcgatcgtggcttcgcatgcggcggcgacacccgtggacggacaagcatggctctccgccatccctgcgctgatcgacggcaacagcgacggtctgcgggccggaggccatttcaacaccgaagagatccaagagctcggcgagacctcgcatgaggcatttctgcgtattcgccccctgctcgccgaacgtggccgccgcggcttcgtgcgccgttgtcacggcgatctgcatctcgcaaacatcgttctgatcgatgatcggcccgtgcttttcgacgccatcgagttcgatgcgcagatcgcgaccgtagacgtgctctacgaccttgcgttcacgctgatggacctgttgcagcacgcccaacccggcgcggccaacatcgtcctgaatcgctatctcgccacgacgccggccgacaatctcgaagcgctttcggccctgccgctgttcatgtccgtccgggcggcgatccgcgcccaggttacgctggctcggctcaaccggccgcattccgaccgtcgcggcattctcgacgaggcgcaaaaatacctagatctcgccgggaagctgatccgtcctcccggtccgcgcctgatcgcggttggaggactatccggcaccggaaagacggttttggcgcacgcgctcgcgccggtcatcccgccggagccgggcgccgtggtgctgcgcagcgatctcgtgcgcaagcagatgttcggagtcgaggacacccaccgcctgccatcatctgcctatacggcggagatcacgacccgcgtctacgacacgctggctcgacgcgcccggcaggtgctgacccagggccattcggcgatcatcgacggcgtattcgccggcgaggacgaacgtgacgcgatcgccgcgctggcacgcgagtgcaacgtgccgctgaacggtctattcctggtcgcagacctcgcgacccggcaggcacgcatcggcagccgacgaggagacgcatcggacgccacccaagaggttgccgcgctgcaagagcactataatatcggccatctcggctgggcgacgatagatgcatcgggaacgcaagaacaaacgctccataactgccgccacgcgatcgctgtgagcaacgaggcaatctga

SEQ ID NO: 6198 - DNA, 984 bp, BradyrhizobiumColbertium
atgcatgccatggtgttgcccgccccacgagcgcggctccagatggaggagcggcccgacccgctgcccggtgagggtcaagtccgcgtgaagatcagcgcctgcggcgtgtgccgcaccgatcttcatctcgtcgatgccgagctgcccgacatccgctatccgatcgtgcccggccacgaaatcgtcggccgggtcgaccatgtaggcctgaatgtttccacacatgcgctgggcgatcgggtcggcattccatggctcggcttcacctgcggaaagtgtcgcttctgccggcacggcatggaaaacctgtgtgacgcaccgttgttcaccggctacacgcgcgatggcggctacgcgacgcataccatcgccgacgcacgctacgcatttccgctcggcgagaccgccggcgacgtggagattgcgcctctgctctgcgcagggctgatcggctggcgctcgctggtcctggccggccctgccgagcggctcggcatctatggctttggcgcggccggccacatcattgcgcaagtcgcggtttggcaaggacgagccgtccatgccttcacccggcgcggcgacgtcgccgcacaagaccttgcacgtcgtctcggcgcggtctgggcgggggcatctgacgaggtgcccgacgagccgctcgacgccgcgatcatctacgcaccagccggcgagcttgtacccgccgccttgcgtgccgtccgcaagggcggtcgcgtcgtatgcgccggcattcatatgaccgatattccaagctttccgtatgacttgctctggcaagagcggcagctcgtctccgtcgccaatctgacccggcaggacggcctcgattttctgaaggtcgctccgcaagcgggcgtacgcaccgagacgacggaatttccgctagaccaggccaacgaggttctgagcatgctgcggaacggccagattctcggcgccgccgtgctgacgccctga

SEQ ID NO: 6199 - DNA, 153 bp, BradyrhizobiumColbertium
atgattgcgatgcggccgaaacaaggagcctggtgcgagatcataatccagcacggtggctggccaatgacggcctttgtcacattgtcgacgacatggaagttcgaagacgagcccggcgggaattggaaagctccttggcttccaaaatag

SEQ ID NO: 6200 - DNA, 2694 bp, BradyrhizobiumColbertium
atgtcagtctatcgcctgaaaaacctgctatcgccgcgctcggtcgcgctcgtcggggcgagcgcccgtccagcctcggtgggacgtgccgtcctggagaatattcacaaggccgaattcaagggacagtttggcctcgtcaatccgcgccatgccgagatcggcggcatcgcggcggtgaagagccttgaacgcctggatttcgtgcccgaactcgtggtcatcaccgccccggcgggagagattccgggtattgtcgaacaagccggccgtcgcgggtctgcgggcgcgctgatcgtgtcggccgggctcggtcagggaccgggatcgctgcacgaggctgcgagcgttgctgcccgcaaacacggcatgcggctgatcgggccgaactgcctcggcatcatgatgcccggcgtcagcctgaatgccagttttgccgcacatatgccgggggcaggcagcctcgcactggtctcgcaatcgggcgcaattgccgccggcatggtcgattgggccgcgcagcgcggcgtcggcttctccggcatcgtctcgatcggcgaccagatcgacgtcgatatcgccgatctgctcgactatttcgcgatggatcacaagactcgcgcgatcctgctctacatcgaggctatcaaagacgcgcggaagttcatgtcggctgcgcgcgccgccgcgcgcgtgaaacccgtcgtcgtggtgaaatccggccgcatggcgcagggcgcgaaggcggctgccacgcataccggcgcgctcgccggtgccgacgccgtctacgacgcggctttccgccgcgcgggtgtcctgcgagtttccgatctgcgtgagctgttcgattgtgccgagacgcttgggcgcgtcgagtccccgacggggaagcgtcttgccatcctgaccaatggcggcggcatcggcgtcctcgcgatcgatcgattggtcgagctcgatggaattccggcaaccatttcggcagaggcgcgcaggaagctggatgcggcgctgccgccgacctggtccggcgcaaatcccgtcgacatcgtgggcgatgctgacgcctcgcgctacgcggccgcgctggaggtactgctcggcgatcccgacaacgacgccgtcctcgttctcaatgtgcaaacggcgatcgcctcggccgccgagatcgccacgaccgtgacggagctcgtcggcaaatatcgccagcagcaccgcagctgggcgaagcctgtattggcggcctgggttggagccgatcagcatatcattcagacgctgtcagatgccggggtgccgaactatccgaccgaggacgacgccgtgcgcggcttcatgcatctggtccggcaccgcgaagtggtggaggaactgagccaggttcctcctgcgatgcccgatacgttcgttccggacgcccaaggcgcgcgggagatcgtcaccgctgcgattgcggacggtcgcgaatggctcgagcctgtcgaaatcaagcacctgctcgaagcctacgatatcgccatggtgccgacctacgcggcaaccgatgtcgagcaggcggtggcctatgcggaggatatcttcgcacagggcggcaccgtcgtgctgaagatcatgtcgcgggacatcatccacaaatccgatgtcggcggcgtcgtgctcaacctgaccacgcccgaggccgtccgaggggccgctaccgacattctcgcgcgggcgaagaagctgcgtcccgaggcccgcatcggcggcgtcatcgtccaggcgatggtcgtcaaggcaaaagcgcgggagctgatcctgggtctcgccgacgatccgaccttcggcacggtggtcgttttcggccggggcggcacggcggtggagatcatcaacgataaggctcttgcactgccgccgctcgatctgcaattggcccgtgacctgatcgaacgcacgcgcgtgtcgcggctgctcaaggcctatcgtgatgtgccggcggtcaagccggacgcagtcgccttggtactcgtcaagctcgcgcagatggctgccgatattccggagatccgcgaattcgacatcaacccgctgctggcggacgagacgggcgtgaccgcggtcgatgcccgcgtcgcggtcgggccaccgcagcggaagtttgtcggctccggtccggccaatttcgccgttcgcgcctatccctcgcagtgggagcgccgcctcaagctcaaggacgactggcgaatcttcgtgcggcccatgcgccccgaggacgagccgacgatccacgagttcctgcgtcatgtgacgccgcacgatctgcgcctgcgtttcttcgcaccgatgaaggagttcacccacgagttcatcgcgcgcctgacccagctcgactatgcgcgtgcgatggccttcatcgcattcgacgaggccaccggcgaaatggtcggtgcggtccggctccattcggattcgatctacgagagtggcgagtacgcgatcctgttgcggtccgacctcaagggcagggggctcggctgggcgctcatgcagctgatcatcgactacgcgcgctcggaaggcctgaaagccatttcgggcgacgtgctccaggagaataccgtcatgctcgagatgtgccggcagctcggcttcgaggtcaagccggatccgacagagcccgacatttgcgacgtcaagctgaagctctga

SEQ ID NO: 6201 - DNA, 486 bp, BradyrhizobiumColbertium
gtgaatacggagaacgtcgtcagacatctgcgcgtgctgtggcgcaccgacaggatcatcgcggacatcaggctgcgtcatttgcttgtcggcctcggcctgcgcgccttcgcggcgctgatcgcagccttcgggctcctgatgctggagctgtctgcctatttcgcgctggtgcagatctggagcgcaattgccgcggccgcgatcctcggcgccgtcaatttcgccatcgcggcagtgctcttcgtgatcgccggccgtgccccgtcgggtcgtgacatcgaactcgccaacgagattcacgacacctccatcgaggccctacagctcgaagcccgcgcgctccaggctcaagtgtcgggcgcaatgcatcatccgctcagcacggtcgcgccgctgctgatgccgctgatcgcgaccatcatcaagaatttgcggacgacgaccaaggcgtctgccgacgcgccatcggctggggcgcggtga

SEQ ID NO: 6202 - DNA, 276 bp, BradyrhizobiumColbertium
atgttcgacagtgacaggatgggcgaagaattgcgggctctgaagctcgacgtcacgcgcttgctgagttccgccggcgaggagatgttcgagagttcgaaagagcgtgccgaggcactcgccgatcagatcaaggctgcgctcaccgaactcggcgagaccgtcgagcaggagcatgaacagctccagggcctcgttgcgcagcgtccaatcacgtcgctcgcctccgccttcgcgctgggcgtggtcgtcggcttcatgctgaggagacattag

SEQ ID NO: 6203 - DNA, 1122 bp, BradyrhizobiumColbertium
atgttgctcgcagcgccgtccggcgatgtgctgaacttgcgacccgaggggccctggactgccgcaaatgtggtgacgctcgagaccttgtcccggtcggtcggagccgatgtcgatcgctcgcgcgttgtaacactggacatgtcgggcgtcagtgcgctcgacacgctcggcgcctgggttctggagaagctgtcgcgcagggcgacatcttcaggcagatcggccgaattcgtcggcgtcgccgaccatttcagcgggctgatggacgaggtccggcaggtcaaccgccatacgccggccccgacggctgcgcccaatccggttctggcgaggctgggcgatctcggcaagtcgacggtcggcgcgcgggaagacatcacgatcttcctccagatgctcggtgccttgttcatggccatcataggcgtgctgcgccggccgcgttctctgcggctgacgtcgctcgtctatcagctctaccgcatcggatggcaggcgatcccgatcgtcgcgctgatcaccttcctgatcggcgccatcatcgcgcaacagggtttcttccacttccgcagattcggcgccgagtcctacaccgtcgacatggtcgggatcctggtgctgcgcgagctcggcgtgctgatcgtcgccatcatggtcgcggggcgctcgggaagcgcctacaccgccgagctcggctcgatgaagatgcgtgaggagatcgacgcgctctcgaccatggggctcgatcccgtcgacgtcctgatcctgccgcgcgttgcagccctggtcatcgcgctcccgatcctcaccttcatcggatcgatcgccgcgctctacggcggcggccttgtcgcccagttctacggcgacatgggaccggctatctatatcgcccggctgcacgaggccatttcggtcacccacttcaaggtgggcatcctgaaggcaccgttcatggcgctggtgatcgggatcgtcgcctgcagcgaggggttgcgcgtcaagggcagcgctgagtcgctggggcggcagaccacgacttcggtcgtgaagtcgatcttcctggtgatcgtgctggacggcctgttcgccgtgttctttgcctcgatcggaatgtga

SEQ ID NO: 6204 - DNA, 417 bp, BradyrhizobiumColbertium
atggacgagatcgcgatcgccaagctcgaaatggtcggcctgcgccccgaggacgccgacaagtatccggcggagctctcgggcggcatgaccaagcgcgtggcgctggcgcgcgcgctcgcgctcgatcctccgatcctgttcctggacgagccgacctccggcctcgatccgatcgccgccggcgatttcgacgcgctgatcaagacactgcaaaggaccctggggctcacggttttcatggtgacccacgaccttgcgagcctgaccacggtctgcgaccgcgttgccgcgctcgcggatggcaagatcgtggcgatcggtccgatgcgcgaactgctgcaatccgagcatccctgggtgcgcgcctatttccacggcaagcgctcgcagatgctgcaacacgagatgagatga

SEQ ID NO: 6205 - DNA, 1104 bp, BradyrhizobiumColbertium
atggaaacccgcgctccctatgtgctgatcggtagtttcgtgctggccgcgatcctcgcggtgttcggcttcgtctattggctgaacaacaccggtggcatcggcccgcgtacgaattatcacgtgcagttccagggaccggtgccgggcctgctggtcggcgcaggcgtgctgttcaacggcattcgcgttggagaggtgacccagctcgggctcgcgccggacaacccgcgcttcgtcaatgcgacgatcgcggtcgccactgccacgccggtccgtgccgacaccaaggttggactcgaattccagggcctgaccggcgttccggtcgtgacgttggagggcggcgtgatcgtcgccaaatccggcgagcctctgaccttgatcgcggacgccggtgccggccagagcatgacacaggcggcgcgcgacgcgctgcggcgcgtcgacacggtcctccaagacaattccggcccgctgaaggacactatcgcgaatttcaagacgttctctgaggggctcgcgcgcaacaccggcaagatcgacggcattctggcggggctcgagaagatgaccggcggcggcgcgcccgcgcagaagatcacctacgacctgcgtacgccgcagaacatcgggcctgccgacaagacgctgtccgcgtcgctggcgatccccgagccgaccgcggttgcgatgctgcagacccagcgcatgctgttcgcccctagcggggacaggccggactttgccgatttcctctgggccgacagcattccgaaattggtgcaggcccgcctgatcgacagcttcgagaactacgacatcgcccacgccccgctccgcacgagcgacctcggacaggcggactaccagctcctgatcgacatcaggcgctttcggatcgctacggagggtgatgcacgggtcgagatcgccctgtcggcgcggatcgtcgacaagggcggcaaggtggtggcctcgcgcctcgtcgaggccagcgaaaagctcgacaaggtcgaaccggccgcttcagtcgcggccttcgatgcagccttcgcgcgcgtcgtgaaggagctgatcgggtggaccgtgcaggcggtgtga

SEQ ID NO: 6206 - DNA, 318 bp, BradyrhizobiumColbertium
atgctgcaaagcgcactgcgtcacggcctgattgggctgcttctgatcacgcctgcgctggcggccccgaccgccgagcaacgcggcaaggcctttgctcgggccaattgcgcacgctgtcacgcgatcgaccgcgtctccaagagtccgctcgggaccgcgcctccgctacgcagcctgcaccggcgctatccgatcgacagccttggtgaggcgctggcggagggaatctataccgggcatgacgatatgcccgccttcgagctcagcccgggccagatccacgacctgctgtcctacctgaagacgctggaatag

SEQ ID NO: 6207 - DNA, 714 bp, BradyrhizobiumColbertium
atgaagccttccgtggtcatgattgagccgaacgggcatttttgcgacgattgcgccgtacgcggagcggcggtctgttcgtcgctgaatgcggccgagctcagggaattcgagcatctcggccgccgcgttcatttcggggcaggcgacaccgtgttctccgaagaggacatcactacctcgttctacaacgtcctcgaaggcgtcatgcggctgtacaagctgctgcccgatggccggcggcagatcgtgggttttgccttgcccggcgacttccttgggatgaatctatccggccggcacaatttttcggccgatgcaatcggcgtggtgaccgtgtgccagttcgcaaaggcgctcttcacgcgtttcatcgaggaccggccgcaactgctcaggcggatcaatgagctggccattcgggagctaagccaggctcgcgaccacatggtcctgctcggtcgacgctcggccgatgagaaggttgcaacctttctgctcggctggcgcgagcggcaggtcgcaatcaagggattgtcggacacggtacccctcccgatgagccgtcaggatatagccgactacctcggtctgaccattgaaacggtgagccgcaccttcaccaaactggagcggcagggcgtgatcgagatcattcacggcggcatcagcctgctcgatccggctcgcgtcgaagcaatggcggccgcctga

SEQ ID NO: 6208 - DNA, 126 bp, BradyrhizobiumColbertium
atgcctgctgacgcgctactggtgacctttgtcgtcgtctcgatcttcgtcgcattcgccgcagttctggcttgggcagaccggcaaaccagctcaggccggctcgattcgaattccaagagctga

SEQ ID NO: 6209 - DNA, 729 bp, BradyrhizobiumColbertium
gtgcctcaggacaagaccggcgacccccgacagccggcgggtaacaaactagcggtcctgcgcaagcacccgatcttcgcggatctggagccggaggcgctggatcagctctgccgttacgccaagcacacgacggtcaagcgcggcgcaacgatcgccgccaagggcgatcccggcaacagcctgttcgcggtgatcgcggggacggtgaagatctcgtcgtcgtcgcccgatggtcggaatgccatcctcaacctgatcggtccgggcgaaatctttggcgagatcgcagtgctcgacggcgcgcccaggtcggcggatgcgaccgccaacacaaattgcgagctctacgtcatcgatcgccgggacttccttccgttcgtgaagagccagccggcgctggcgatgaagttcatcgagctgctttgcgcgcgtctgcgctggaccagtcagcaggtcgagcaggtgatcctgcagaatctgccgggccggcttgcgagcgcgctgctcggtctcaccgaagagcgcaagctcgattccggcagtggcacgctctccatcacgcagcaggagatcagcgagatggtggggatgacgcgagagagcatcaacaagcagttgcgcgcctgggccggccgtaactgggttcgcctcgagcacggcgccatcgtcgtgctggatacggatgcgctacgcgcacttgcggagagcggcgtcgacggtacgtga

SEQ ID NO: 6210 - DNA, 750 bp, BradyrhizobiumColbertium
gtggcgctcgcgaacgacgtgaccgccgatcccccaggcaatcacccgaccatccagtatatcgatcatcagcagggcctgccgcgcatgctgcagttcttcgacggcctcaaggcggaagaccttccggatggccagggctgggccgtcgagcaggtctcactctcgacgcacaacgggacgcatctcgacgcgccctggcacttccatcccaccatgaaccgcggcgagcggtcgtggaccatcgacgaagtgccgctcgaatggtgcttccagcccggcgtgaagctcgacttccggcatctgcccgatggctacgtggtgaatgccgaggatgtcgagaacgaactgaagcgcatcgggcacacactgtcaccgctggagatcgtcgtcgtcaacaccagtgccggcgcaaagttcgggcaagccgactacgtcagttccggctgcggcatgggctatgaagcaaccatgtatctgctccaacgcggcgtgcggctgacgggcaccgacggctggagctgggacgcgccgttcgtctacactgcgaagaagtatgccgaaaaaagagatgccggcctgatctgggagggccacaaggcgggacggcacatcggctattgccatctcgagaagctgcacaatctcgaccagctgccttcgaccggcttcacgatcgcctgctttcctgtgaagatcgagagggcgtccgcgggctggacccgcgcggtcgccatcctcgacaactag

SEQ ID NO: 6211 - DNA, 807 bp, BradyrhizobiumColbertium
gtgacggactatcgcaagctcttcgatctcaccggcaagaccgcagtcgttctcggcgccgcgtccggcatcggcaagtcatcggccgaggcgctggccgggctgggcgcccgtgtcatctgcgccgatcgcgcgttcgacgcggcggaagcgaccgccgccggcattcgcgacaagggcggctgggcggaggcagcggcgtgcgacgccgcgagcgcgatggacgtcaatgcgctggcgaagaccgtgatgcaaaaattctcgcggctcgacatcgccgtgacgacgcccggactcaacatccgcaagaccatcctcgactataccgaggaggatctcgaccgcgtcctcaatctcaatgtgaagggcacggtctggttcttccaggcctttggcaggataatggtcgagcagaagggcggcagcatcatcgcctgctcctcggtgcgcgcggtcaccattgagcctggcctcggagtctacggttcgaccaaagcggcgatcggtcttctggtgaagggctttgcatccgaagtcgggcacgcaggcgttcgcgtcaacgcggtcgcgccaagcattgccgagaccgcactgaccggcccgttcaagcagcggcctgacatctacaatctctacgccggtcacaccgtcttcaaccgctggagcagtgccgacgaggtcgccgccgcggtggcctatctcgcttcggatgccgcaagctatgtcagcggcagcacgctgttcgtcgacggcggctggaccgcggtcgacggccccccgaccggtcttacccaattgcacaaatag

SEQ ID NO: 6212 - DNA, 174 bp, BradyrhizobiumColbertium
gtgctggttcatgccccagttcgtaacactaaaataccggccagccgagcgcatttatccggcaagccccctgtgatttgctcaaagcggacgcgccgcgagtttttgctgcaaccgcgaagacggctcgctctgcctgaagcgcagcctcgcgcgcagcactctcccccctaa

SEQ ID NO: 6213 - DNA, 2091 bp, BradyrhizobiumColbertium
atgaaccagcacgccaagatcgaaatccgccattcgacctgtccgcatgattgcccctcggcctgcgccctcgatgtcgaggtaatcgaaggtcgcagcattggccgcgtccgaggttcgaaaaagcagacctatacggccggcgttgtctgcgccaaggtcgcacgctacgccgagcgcatccatcaccccgagcgggtcacctttcccatgcgccgcacaggcgcgaagggctccgggcaatttgcgcggatttcctgggacgaggctttggacgagatcgctgctcggttcaatgcggccgagcgcgaattcggcgcggaatcgatctggccttattactacgccggcacgatgggcctcgtgatgcgcgatggcctcaatcgcctcacccatgtgaagaaatactcgcgcttctatcagaccatctgcgccaacgtcgcgcggatcggctttgcgatcggcaccggcaagatcgccggcgtcgatccgcgcgagatggcgatgtccgacctcgtggtgatctggggcaccaatcccgtcaacacccaagtcaacgtgatgacgcacgcctctcgcgcccgcaaggagcgaggcgcgaagatcgccgccgtcgacatctacgacaacgagaccatgaagcaggcggacatcaagatcatcctgcgtcccggcaccgacggcgccttcgcctgcggcgtgatgcatgtcctgttccgcgacggctatgccgaccgcgcctacatggacaagtacacggactgtcccgccgagctcgaggcgcatctggagacgcgcacgccggaatgggcgtccgccatctgcggcgtgcctgtttcggagatcgaagcctttgccaaggcggtgggcgagaccaggcgggcgttcttccgctttggctacggcttcacccgctcgcgcaacggcgcgacgcagatgcatgcggcgctttgcattcctgcggtgacgggcgcctggcaatatgaaggcggcggcgccttcttcaacaacttcgcgctttggcatttcaacgaatccatcatcgagggccacgacgcgatcgacaagacgacacgtgcactcgaccagtcgcagatcggacgcatcctcaccggtgatgccgaggccctgcacggcaggggcccggtcaaggccatgctgatccagaataccaatccgatgaccgtggcgccggagcaggcgctggtccgccagggctttgcgcgagaggatctgttcgtcgcggtgcacgagcagttcatgaccgagacggcgcaaatggcggatatcgtgctgccggcgaccatgttcatggagcatgatgatctctattacggcggcggccaccagcacatctcggtcgggccgaagctgatcgatccgcccggcgaatgccgttccaatcatgaggtgttgcaggcgctggcgccgcggcttggcgcaaagcatccgggctttgagatgagcccgcgcgaattgatcgacgccacgctgaagctgagcaatcacggcgacatcgcgggcctcgaagccgacatctggcgcgatctgcagccggatttccgcacctcgcattatctcgacggctttgcccatgccgatgggaagttccatttcaaagccgactgggcacatccgcccttcggccagaccatgggcgactacgacaagatgcccgcgctgccggaccattgggccgtgatcgagcacgccgatcaggcccatccgttccggcttgccaccagcccgtcgcgcagctttctcaacacgacgttcaacgagacgccatcctcccaggcgcgcgagggcagggccagcgtgatgatccatccgctggacgcagcgccgctcgacattgcctatggcgatgcggtgacgctcggcaacagccgtggcgagaccacgctgatttcgacgctgttcgagggcgtacgacgcggcgtgctgatcgccgaatccgttcaccccaacaagaaccacatcggcggccgcggcatcaacatgctgaccggtgcggataccatcgcgccgatcggcggagctgcattccacgacaacaaggtctggctcaggaaggccgtcgtggcctga

SEQ ID NO: 6214 - DNA, 783 bp, BradyrhizobiumColbertium
atgagcgacaccacagccgtcattaccgagaagcgcggccaggcattctggatcaccatcaaccggccggagaagcgcaatgcgctgaacggcgacgtgatcgccggcatcagcaagggctatcgcgacgcgcatgacgacaaggacgtccgcgtgatcgtgctgacgggcgcgggcgacaaggcgttctgcgccggcgccgacctgcagaattcaggcgcggctttcgcgatggattactccaagccgaatgtcgactatgcggatctgctgcggctgtcgcagaacgccaccaagccggcgatcgcgcgggtgggcggcgtctgcatggccggcggcatgggcctcctctgcatgaccgacatggcggtcgcggccgatcacgtcgtcttcggtcttccggaggtcaaggtgggcgtgttcccaatgcaggtgctgagcctgttgcagtcgatcgcgccgccgcggctcgtcaacgaatgggcgctcaccggcgagccgttcgacgccaaggccgcgcaggccgcgggcctcctcaactacgtcgtgcccgcagccgagctcgacgccaaggtcgactggctgatcggtcgcatcgtcgacaagtccccgacggcgatccgtcgcggcaaatatgcgatgcgcgcgattgcctcgatgtcgttcgacgagagcatcgcctacaccgagagccagatcgcgctgcttgcaatgaccgaggacgccaaggaaggtttgaaagccttcagcgagaagcgcaaaccgtcctggtcgggaagataa

SEQ ID NO: 6215 - DNA, 342 bp, BradyrhizobiumColbertium
atgggcaccaagcccgatctaagccgcgtcagcgaacgccccgatccggagagctgggccgacgacgaacttctgacgctcgcggaggccgccgaattgttctggccgaagggcccgctccgcaccgcctcgctgcgcaccgccgcccgcgacggccagctcgcgatcgcggtcatcgccggcaagttcatgaccaccaagcgggcgctgaaggagatggcgacctgctcgatgatgaagaggcgctcgagcgccggcaccgagccgctatcggcaaaaaccttggtaaggcatctggtcgaggcgaccgaacggcgtcacgagcgcaccgagatcgcctag

SEQ ID NO: 6216 - DNA, 144 bp, BradyrhizobiumColbertium
atgatgcatccggacgtgatcgcggacatcaagcaggttgccatcgacgagcatcgggcggcctgggatgtgatggagcaggccgcgcgggagttcttgaagcggcgacagcgtgcccggcccataacgacatgggacggctaa

SEQ ID NO: 6217 - DNA, 369 bp, BradyrhizobiumColbertium
ttgtcgctcggcggcgcgctagtcaagggagtgattgtcggactcattgtgtgggtgctaggcctgttcggcgtctccaaggtctcttacctcgtccttgcgatattcgcttggatgctcagcgttgcccgaactcacgctgttgccgaactcgagggcttgggccgattccgcatcgcattgggcacggaaggaatgatgcaatggcgacatgagatgatgcgccgttcgcttctgggcaaccttgccttcgcctgtctcctgggcggtttctggcccttcgctgaggcggtcgccagcccctcgcgcgacgactggcggacggtcatcgcgctgatgctcggcttggtgtccagcgtactcatgtaa

SEQ ID NO: 6218 - DNA, 234 bp, BradyrhizobiumColbertium
atgcgaacatcgacgatctatcaggtagcgatattcgtggcgcttgcagcgggactctcgcctgcccgcgccctgacccaagacgagcttgtcgccaagatccaagcggccggctactcgcaggtgaccgacgtcaagtcgaccgccgagggcatcactgccaaggctatgaagaacggcaagccggtgactctcgtcgtcgacagcagcggccagatcaaagagcgaaactga

SEQ ID NO: 6219 - DNA, 903 bp, BradyrhizobiumColbertium
atgaaaagcaaaatctggtccctggccgtgaccggcctcgctctcgcctacttgtccttcgtctacatggcacacgcgcaagcgatcgattggcaaaaggtcgacgagaccctcggccggaaggccgcggtctctgatgacgtccaccgctacggctttccacgtagcgacctttcggtgaccctggacggcgtgacgatcaagccttcactggcgcttggcggatgggtcgcctttaaacctgggcacggtggcgccatggtcatgggtgaccttgtgctgctcgagaccgaaattaatcccgtgatggcgaagatgatcgcgaacggtctcgaaatcaccgccgtgcacaatcatctgctgcgcgcgagcccggcgacgttctacatgcacgtggccggccacggcgaccctctcaagctggcctcggcgatccacgatgcgatggccgagagtaagacgccattgacggtcgcgcccccggcgggcccggcggccgccgtggatctcgatacggcgaagctcgaccagataatcggcgtgaagggccaagccaacggcggcgtctaccagttcaacgtgaagcggagcgacccgatcacgcaggacggcataccgttgacgcccgtcggcccgatgggcgtggcgatcgggatcaacttccagccgagcgggggcgggaaggccgccatcactggcgatttcgttctgaccggcgacgaggtcaaccccgtcatcctggcgctgcggacgcatggcatagaggtgacggcgctgcacagtcacatgctcgacgagcagccgcggctgttcttcatgcacttttgggcgaatgacgatgcgatccggctcgccgaaggcttgcgcgttgcgctggacaagacggcgagcacgaagaactga

SEQ ID NO: 6220 - DNA, 132 bp, BradyrhizobiumColbertium
ttgccggagcgaaagcacgttcctcaggtcgagagcgccgccatgcagctcttcgacgtagtcaccggccatcggaaaccagaaggggatggcgacgttcccgcgggagcgtcatcgaagttcaaggtctga

SEQ ID NO: 6221 - DNA, 222 bp, BradyrhizobiumColbertium
gtggtcttctccgaacagaagggcaagataatggaccgtgaacatgtgaaaggcgccgccgacaaggcaaaaggagcgatcaaggagggggctggcaagcttacaggagacaaggacctgcaagccgaaggcaagatggacaaggctaaggggtccgcccacaacgctgcgggagacgtgaaggacgccgcgcgggacgccgctgacgccctcaagaaataa

SEQ ID NO: 6222 - DNA, 1401 bp, BradyrhizobiumColbertium
atgtcgtcttccgccccggtcaatggttctgccgatcgacgccaacgaaggctcctgatcttgttggctgcgggattcgtcgccttcggggctgcagcggccggccttttctacatcctgcagcccgagacccttcggatcgccgtcggcccttcaggcagtgaggaccatcaggttgttcaggcgatggccgaggccttcgagcaggaaagcaggacggtcaggatcttgccgatcaccaccgcgggagcagcagaatcgctcgcgctgatgggcgccggcaaagccgagttggccgtcggccgcagcgaccttgcgatgccggccgacgcgcagacgctcgcggtcctccgcaagaactacgtcgtgttatggtccccttcgggaagagcgggcaaggactccaagaagaaggccgccgcgaaagtcggtgagatcgccgatcttgcgggacacaaggtcggtatcatcggaaagaccggcgctaacgtcgcgctcctgcgaacaattcttgagggctcgggcgtgccggtcgataaggttgccacggctcaattcgggaccgaagagatcgcaaagctggcgcaggacaccacgctggatgcgtatctcgccgtcggtcccctcgacagcaagatcacgactgccgccatcgtcgcgacgtcccgatcgcgcggagcaccgaagtttcttcaggtcgaagcatccgaggcgatcgcactccggcacccccgctacgaagccgaggagattcccggcagcgtcttcaacgccaacccgccctggcccgaggacaagatcgacaccatcagcgtcaaccatctcatgctggccaggaaagaactatcggaagccaaagcggcggccttctaccggcagcttttcgcggtacgcgatacgatcacgcaacgagtcgccggggccgggcgcatcacaaagccggaaacggaaaaggaggcggagccctcggtgcacaggggagctgcggcggtcatcaacgggacggagcggacctttctggacaagtacagcgactacttctggttcgcgctgcttcttctttccggcatcggctcggcggtcgcctggctccggcgttatctaaaccgggacgaacgcgacgacaacgccagctaccgcaaccgtcttctcgcggtggtcaccgaggtccgcggtgccgcatccgagcaggatctgctggcgtcgcagcgcgaggtcgacgcgatcatcgctgaaaccctcaaatgctacgacgagggagccatcgaacaggaggacatggccgcgttcggcctcgtccttaacctgttcgatcatgcggtcgcggaaaggcgggcggcgctgcagagcggccccatggaggcaagggccgcgggaccaaccatagcgtctcgccgttag

SEQ ID NO: 6223 - DNA, 1299 bp, BradyrhizobiumColbertium
gtggcgaggaggaaaacgcgcaagaagccgatcgagaataaagatcaggacaacttcttgcagcgcctcgggcctggcctcatcaccggggcttccgacgacgatccttccggtatcggcacctatagtcaggcgggcgcccaactcggattcggcatcggctggacgatgctgatcacctatccgctgatggcggcaacccaggagatctcgggacgcattggccgcgtcacgggccacggcatcgcaggaaacgtctgccgaaattttcccgcccccgtcatctggtccatgatcgtgctgctgttcgtcgccaacacgatcaatgttgccgcagaccttggagcgatgggcgatgcactcaggcttctgataggtgggccgggcacgctttacgtcgtgattttcggcgctgtttcagtgatcgcgcagatcttctttcagtatgagcgttacgtgtccattctgaagtggctgacgctggtcttgttcgcctacgtcattgcgctttttcttttaaaggtgccttggggcgaggctctgaggggattgctcattcctaagctccaatggaacgggcctttcctgaccaccctggtcgcgatcctcgggacgacgatttcgccctatctgttcatctggcagtcctcccaggaagccgaggagcaccagatcaatccggacaagaagccgctcaagcgcgaaccggagaaggaggacgaggaagtcaagcgaatccggatcgatacccttgtcggcatggcagtgtcgaacgtcatcgccgtcgcgatcatcatgacgacggcagcaacgttgcacgcgtccggcaagaccgacatcgaatcctcagctcaggctgccgaagccttacggcccgtcgcgggagcaatggccgagttgatctttgcgcttggaatcatcgggacgggccttcttgcgatcccagtgctggccggctcgactgcctacgctatcggagaaggtcgcaagtggccggtcggcctgtcgcgaaagccgaaggaggctgtcgcgttctatggtgtactcgcgctttcggtcgcgctcggcgtcgggctcaacttcacggcgctggacccgatcaaagcgctctattggagcgctgtcatcaacggtatactggccgctccgatcatgaccgtgatgatgctcttagtgcggcggaaatcggtcatgggcgatctgctgatttcggggccggtctattggctaggctggatcgcgaccgccgcgatgttcttgtgcatcgtcggtatggcttgctcgatgatatggtcataa

SEQ ID NO: 6224 - DNA, 417 bp, BradyrhizobiumColbertium
gtggccctgctgtttttccggaaccttgccatcattagcgggttctcgcatgccgcatctggcggcgaggagaacaacatgaaccagcttctactgacgacggcgttggccgcgctgatctcgacgggcgcgctggcgcagtcgacggtcgtcaccaccaccggcaccggtcacgcggccgccgtgcagatcgagccggaataccgcaccaagatccgcacttacgtgaccgagcacaaggtccgtcccgtgcagcagaagatcgtggtcggccagctcgtgccgcgcgaagtcgaactcgaggcggtgcccgccgactggggaccttcgctcaccaagtatcgctatgtctactcgggcgagcgcgtgatgctggtcgatccgtcgacccgcacggtcgtccaggagatcgactaa

SEQ ID NO: 6225 - DNA, 420 bp, BradyrhizobiumColbertium
atgccgatcattcgttatttcgtcttcgtcggcgggttcttgctggcgctgctcttcgctgcggatcggtacctgcccgctcccgtcgaagccgccgccgtggccgaccccgacaggaccatcatccggataaaatcggcgaggagcctccccgagaagatcgtcttcgacaccagccagcgggccgaggtgccgatgatcgcgcaggccgatccgatcccggaagagccgccgcgggaagtgcgagaagccatggccgccgtgcctggagcaccttccggcgaggcccggaaggaagcgccggcccgcgctgcggcggtcctcacgcatccgaagcggtcggcaaagctgcagaaacgaacgcccgaccggcgtctcgccttcgagcggaccgatccatttgccggcagatggtggtga

SEQ ID NO: 6226 - DNA, 321 bp, BradyrhizobiumColbertium
gtggcgaccgaggcgagaccaagggcgccgaccatcagcgctgacatcgcaatcttcttcatgaaggatccttccacatggttcgagcgccccgaccgcaacgggaaaaatggcaatggtttcgccgtcccagcggcgagcgggcaatggatgctcggcgcgggggcagcttcactcgagagcatcgagcttggaccacagcagcaagctctgggttgggttcagttcatgttgcgccgcgaaagctctcgacggccttcgcttgatgtgatcgcgttaactttgttgaattcgccgcacagcgtttccgcagtaggctaa

SEQ ID NO: 6227 - DNA, 201 bp, BradyrhizobiumColbertium
atgttcgatccgggcacgacggcgctcttgcgcgccgtattcgacgaggtctgcgaagacgtctcgcgccacgaaaccgcggcgcgcacccatgtagcctcaaggattctggaagcggctaccgacggtgacacctcgcccgagaggctgaagcaggtcggacgcgcggccctccacgacgctccgaccatgtggcgatag

SEQ ID NO: 6228 - DNA, 243 bp, BradyrhizobiumColbertium
gtgaacttccaggtcaccgtgctcaagatcctggtgagctatcccggcgggttcgccgtcatgaccgatctcaagcgcgacatggcgattctggcgacgagcgggcgtgactgggccgaccgaaccaagcgccttgccgctcgcgtgccgaagctcgacatcttctcccaaggactagtcgagcgtctgaatggcggatggcggatcacggagaagggccgtgccgtgctcgagttcatgtaa

SEQ ID NO: 6229 - DNA, 210 bp, BradyrhizobiumColbertium
atggttgacgatgtcgtgttgaagaacgccaccgagaccgcctggaacgtctaccgggctcggcgccccgatgtcggcgctcgcgacagccgacgctgtttgctggagcgccatctgcacaggagatgggaagagcgacagagcgataccgaagagcttgccgcctttggattagcctacctgcaccggcttcccaaagacgaatgttga

SEQ ID NO: 6230 - DNA, 117 bp, BradyrhizobiumColbertium
atgctcgtcgcacgcgcggccatcggaagcacaaggcccggttggacgccgatcgcgatttcgtttctgatctccgcgatcatcgtaatcgtccttcgcatcgcgttcggggcctag

SEQ ID NO: 6231 - DNA, 1029 bp, BradyrhizobiumColbertium
atgcggatcgcccagctcgctccgttggcggagagcgttcctccgaagctatacggcggcaccgaatgggtgatcgcctggctggtggacgagctcgtcgatcgcgggcacgatgtgacgctgtttgcgagcggagactccgccacgaaagccaagctccacgccgtatggccgcgcgcgctacgcctggggcggaaaggcgtcgatccaaacgccgcctgcgcgctcttgatcgaggccatcggcgagcgcgcgcgcgacttcgacgtgattcattcccatgtggattggctgcctctgccggtcctgagccgcaccggagtgccgtttctgacgaccatgcatggtcggctcgaccttccgggcttgcccgatgtgatcgggaccttcccaaaggctccctttgtctcgatctcggacaaccagcggcgtccgcttccggacgcgaaatggatcgcgacgattccgcacgggctgcccaaggacctgtttcgtccttcctacgaagccggtgcgtacctggccttcctcggtcggctgacggcggaaaaggggccggaagctgcgatacgcatcgcacgggcggtccagatgccgctccggatcgcggccaagataccccgggccgagaccacctacttcaagaagaagctcgaacccgagatcgacggaaagagtgtccagctcatcggcgaggtggacgaaatccggaagcaacctttcctcgccggcgccgcagctctcttgtttcctatcgattggccggagccgttcggtctcgtcatgatcgaggcgatggcgtgcggcacgcccgtgatcgcctaccgttcaggatcggtgccggaagtcgtggaggacggtgtcaccggcttcatcgtggacggcgaggagcaggcgatcgaggcgatcaagaaagtcgtgcgcttggatcgaagaaaagtccgcgctcggtttgaggaacgatttatcgcgagcagaatggcgagggaatacgagaaacgatatcgcgagctggtcgctggcaggtaa

SEQ ID NO: 6232 - DNA, 228 bp, BradyrhizobiumColbertium
atgaagaagctgatcgtgtgcggcgcgctcgccgctttcgttctcggcacccaggccgccagtgccgccgagttttacatcgtccgcgacgcgaccaccaagaagtgcaccgtcgtcgacaccaagccgacgaccaccaccacgacggtcgtgggcaacggcgtctacaagaccaagacggaggccgagtccgccgtgaagaccaccaaggtttgcaccgagcagtaa

SEQ ID NO: 6233 - DNA, 228 bp, BradyrhizobiumColbertium
atgtggacgtcaaccctcggcgcggccttcggttccgagtcgggaaatcgtggcaattggcgcgagatccaagcgtggaattttcttcgacgaaccggagatgctgcttcgcggaagggcaagcgcgcggaacgacaagccacagatttcgacgcggtcgtcgtgccgccagccaaactggccaccgcgcgatttcaggtcatcgaccggggcaagccggccacctga

SEQ ID NO: 6234 - DNA, 285 bp, BradyrhizobiumColbertium
ttgttcgtgctcgacggagagttggtctgcgcctggttggaaggcgtcgtggtctggccggacggctgtctggtctgcgcctggttggtcgaattgttcgatgcaggcgcctgcgtcgtattgatgccgccgccggagttggacgactggcccgccgcagtctggccggtcgaggacggagaatgcgtctgggcggaattcgtcgaaggattgctttgcgcggaccccgacgaggagccgggcgacgttgtcggcggcgacgtggtcgacgtggaatcctgctga

SEQ ID NO: 6235 - DNA, 150 bp, BradyrhizobiumColbertium
gtgcccaccgacaaggagaagttcacgctggtgagcggctgcacgttcagatgcgagatcgacgcgctgatccgggtccgctgctgggcgttgatgttcaccgacgcgttcacgttggtattcgacgaacgatccgccgtgttctgctga

SEQ ID NO: 6236 - DNA, 477 bp, BradyrhizobiumColbertium
gtgggcaccgtcgtcccgcgcgacgtacgcctgcagccgctgccgcccgaggtcgtcgagatcgtgccgcagtaccgcggttacaacttcgtcctggtcaaggacgagatagtcatcgtggagccgtcgacttacaagatcgtgacggttctgccgtactccggccgctcaacggcgtcggcgccgacgcgcagcgagcggcgcaaggtgacgttcagcgaccgcgatcgcgaggtcgttcgcaagcacacaaaggcgcacccggtcgagcgcgagaagcgggtgaccaccggcagctcggtccggaccgaaatccgtaccggcgagcgcgtgcctgagggcgtggagatcgaggcttttccggaggaggtctatcgggatgctccgacccttcgtgagtatcggtacatcaaccgggacagtcggacctacatcgtcgaaccccacgagcgtcgcatcatcgaagagatcgactaa

SEQ ID NO: 6237 - DNA, 321 bp, BradyrhizobiumColbertium
atgaagaccatcgcactgggactgttcgccgcctcccttctgggatcggcagcgatcgccgccccactcaacccgagcgcgctcggctcgaccgagatctcctccaacatggagcaggtccggctcgtctgcaacgagtacggccgttgtttccggacgcgcggcccgcgctacgttcagcgatactacggcggcgacgacggatacgtggttcgccggagctacggctactacggcggtcccggctcctacgaccgcggctacggctactacggcggcggaccgagcatcggtttcagcttcggtacccggagctggtga

SEQ ID NO: 6238 - DNA, 366 bp, BradyrhizobiumColbertium
gtgagcatacttctcgtcgaggacgaccctctgatccgcgaattcgtcgtcgaagcgctgcgcgaggcgggctatcacgtgatacacgcgagcaccggcgaggaggcgctggcctggtgcaaacgccgggtcccgaatgtgctggtcaccgacgtcaggctgcccgggcagttggatggctggcaggttgcggagcgataccgtgaacaggatccggagctgccggtcatctacgccaccggcttctcgcccgtcactccacgcccggtccccggcagtcgcatcgtgaagaagccgtttcatccggaggagatcgttcggctagtggaggagttcggcgagatgaagggtcgcaacccgagttaa

SEQ ID NO: 6239 - DNA, 117 bp, BradyrhizobiumColbertium
atgtgtctcgcatcgaacggcgcaaaggctggcgcgttcctggcttcgatggctcttgcggatgagccggtcaggtggaatggaggctcagcaggaacggctgtccgcggcaagtag

SEQ ID NO: 6240 - DNA, 876 bp, BradyrhizobiumColbertium
atgctcgtctgcgccgtcctgcaaatggcgcttcagaggcagacgggcgcgcctggctacttcctgttgctcccgggcgtgtttctctccggcctgatcttcgatcgaggctcgggaatcttcgcggccgtgattgccgtgggggtcggcgcctacgtcagctacgcgggcggcatcggcctcgaattcctgaccacgaatccgctcttcgccattaccgcggcggggaccgccacggtcgcggaattccagcgggcggagctccggcgggtcatgctggccgacaagaagaaggccttgctgctgcaggagatggcgcatcggaccaagaataaccttgcgatcctcgggggcatgatccggctggaggcgcggcacggcagccccgaactcgcggccgcgctcgaggccaccgcccgaaggctgcaggtgatggccgaggtctacgaccacctctcggtcaagcaggactcccgctcggtcaacatgcgctacttcctgaacgacgtcgtcgaaaaggtcttccagtccttggcgccgtcagggcccgtcgccttccaggtggtctgtggtgactttttcctgccgcacaaccatgcccttgcgatcggcatgatcgctaacgagctcgtcaccaactccctgaagtatgcctttcccgacaatagggcaggtcacgtcacggtcacgctttccaatgcggatgagatcgagctgtcggttgcggacgacggcgtcggtctggcggatgactccgcacccggcggcctggggtcgcggatcgtccagcttctcacgcagcagtttgaaggcgagctcacctacgagcggcaagatcccggattatgcgttcgggtccgcgcgaatcctcgctag

SEQ ID NO: 6241 - DNA, 156 bp, BradyrhizobiumColbertium
atgagcaatccagaccgccccgacgacctgcctggccgcgcgatcgcagcagagatcggcgaacggcttggccagatgttgcgcgtcgacaaggagcttccgccttccctgaagtccctgcttgaacgattgcgagtcctagagcgcgcgtcgtaa

SEQ ID NO: 6242 - DNA, 387 bp, BradyrhizobiumColbertium
gtgaccgaatctctcaccatcctcgtggccgaggacgactaccagatccaggaaatggttgaggaggcgctgaccgaagccggcttccggccgcagatcctgtcgtcggcggaagaagccgcgaccgttctgaaaagtggcatctatgaattccgggcacgggtcacggatgtgaacttgaggggcaagacgagcggctgggacctcgcgcgtctcgttcgggagcgggatccggagtttcccgtcgtctacatgactggcatgtccgccgacgaatgggcgaggctcggagtgcccaagagcattctgctcaccaagcccttcgcgccggcccagctcatcaccgccgtctcgcagcttctcaacacgggatcggcccctctctga

SEQ ID NO: 6243 - DNA, 171 bp, BradyrhizobiumColbertium
atgtcgacggtggcgaacctgctcgcgcagaagcaacagctgctcgagcgactggaaaacgattcgggcccgaacgagcgcgatgaagtcgagagattgctcgccaagatcgagaccgccctgatggtgctggagtccaacgacccggtcgaggaaggcggaccgctgtag

SEQ ID NO: 6244 - DNA, 468 bp, BradyrhizobiumColbertium
atgagagtgacggcaccggcgatcgcgtttgcattcgctgtctcagcatcggccatctcggcacaacccgtcacgtggacgacctacagcattcctcagaccggcacctcggtcgacttcccctcctcgatattcaccgaggaggcgggtcgaccggatggatatgggcagcacttccggaccgccgacggccgcgccgacatcacgatacaggccgcccccaacgtcgcgagcgattcgccagctgcgttcctcgccaaaaagcatccgccccctcgcatccagtacaaacgagtgactccccgcttcttcgcggtttccagctacaagggcgacaaggtctggtacaaccgctgcaacttcgccggccagctggttcattgcgtgctgatcaattatcccgccagcgaggagcacgactgggacgacatcgtcacccgcatcagcctttcacttcgcagcaagtag

SEQ ID NO: 6245 - DNA, 237 bp, BradyrhizobiumColbertium
atgatagtaacgtcggcctcgccgctgtcgttcactttgcacttgacggacggccgcaggatcaggacgttcgccgaggcggtggcgttcgtcggcagtttgtcccccgaggcaagaagtcggaagcattgggaactgtcacatcggatgctgcagaggtgcctggaaagcccggacttcctgcacgctgccacgatgtcgttgcgcagcgcgctcctgatggacggcctatcttga

SEQ ID NO: 6246 - DNA, 483 bp, BradyrhizobiumColbertium
atgtcccaatattcgctcgatgtgttgcgtcagcgctatgtcgtcgagaaacgaccactcgaggccagcgtcgaacagatcttgcgggccgacacccgcgcgggtgcccgcgccatcctggcttcgatcgataagagacgcttcgaaaacaggtccgaagggcagcgcctccgcaagatgctccgcttcgagacccctctctgggacagccgccttcatgccgtggcaggcgtggacgaggccggaatgagccctctcgccgggccagtctccgctggcgccgtgatcctgaaacccggcacgcggatagtcgggatcgacgactcgaagaaactcgacgccgcggctcgcgaggaactcgcgaaggagatcaaggaaaaggcagagagttggtgtgtggcgttcgtcgaggtcgaggagatcgacgcgatcaacatctattgggctggcattcaggccatgcagcgcgccgtccggggctag

SEQ ID NO: 6247 - DNA, 360 bp, BradyrhizobiumColbertium
ttgacgccgcaacacctgctgatcgacgccaagcgattgaaggagatcgacatcccccagcaggccatcatcaagggcgatgccaagtcagccagcatcgctgcggcgtcgatcctggcgaaagtcgagcgcgacacggtcatgcgaactctcgacattcttcaccccggctacggcttcgcggatcacaagggttaccccgtgccggcccactatgaagctcttgccaggctcggtgcatgcgcagctcaccgtgggtcgttcgggccagtacgcaaggttctcgggttgccgcccctgccgccgtggccttctgcatccgagcgagccgccggtgaacaggccgatcgcttcgtctag

SEQ ID NO: 6248 - DNA, 948 bp, BradyrhizobiumColbertium
atggcccgaaaatcgacgctgcctcctcgcctgcagcccatgctggccacgctgaccgattcgccattcgacgatctcgattgggtcttcgaggacaagttcgatggtttccgcatggtcgcggaaatccggggtggtcgggtcgcgctctacagccgtaacgggaagatcatcagtcactccgacgtcgaggtcgcgaaggcgcttgagggcgtgaaggcggacgccgtgatcgatggcgaactcgtcgcgatcggcaaagacggcgtctcccatttccaattgcttcagaacgccctgcgccatgaggccaagctcttgtactgcgcgttcgacctcatgttcgcggacggcgaggaccggcgcgcgctgcctctcctcgagcgcaagaagcggctcaaggccatcctgccgcgccacaagctgatcgcgttcagcaagcatcgcggaggtaaaggaacaaagttcttcgcagaagctgagcgaaggcatctcgaaggcatcatggccaagcgcgccgatagtccgtacgcgtccggacaccggaccgcggactggctgaaggtgaagatcgcgcagcggcaggaggtggtgatcgccggcttcacggcgccgaggcgaacccggcctttcttcggcgctctcgttctgacggtacgtgaggacgatgcatggcgatacatcggccatgttggcaccggtttcagccaccagaacctcgaagagcttcacggcaagctcatgaaactcaagactcccaagtcgccctttcctgccaaggtgaaggacgagcaggtcacgacctgggtgcgtcccacgctggtcgcggaagtgaagttcgcggagtggaccagcaagggcgagctgcgccagccggtctatctcggacagcggtccgacaaaaaggccaaggacgtcgttcgtgaaaagagctggtcgcgggaatag

SEQ ID NO: 6249 - DNA, 168 bp, BradyrhizobiumColbertium
gtgggcgtcgccttcgacgccgtggccttccaccaggattatgcgctcctgagttggtttgctgaagtggtgcccgcgatcggcggcgaccgccacgacgctgccctcgagcgccagatcgtggccctgcgacatcaggcggcgcgggcgagcgagcgccgcttctga

SEQ ID NO: 6250 - DNA, 720 bp, BradyrhizobiumColbertium
gtgtggcgagtcttctgcgacggcaccgagacgctggagaccatggccaaggccacgcgccagcggggcttcgagtatttcggcgtggcggaccattccaagtccgcccactatgccggcggtctctccgttgaggagatcgcgcagcagcaccgggaagctgatcgactgaacaagcgcttcggcaaggacttccggatcctcaagggtatcgaatccgacatccttgcggacgggtcgctcgactatgacggcgacgttctcgagcgcttcgatttcgtggtcgccagcatccatgggcgcttcaagctggatcgcaaggcgcagacgcagcgcctgcttcgggccatctccgatcctcataccatcatcatcggccacatgacggggcggcagctccagcggcggccgggttacgaaatcgatgtcgagaaggtgctgcgggcgtgcgccaagcacgacgttgtggtcgagatcaatgcccacccatggcggctcgacctggactggcgttggcaccaggcggccctcgacttcggttgcatgttgagcatcaatcccgacgcgcactcgatccccgaactcgaccacatgcactggggcgtcgagatggcccgcaagggcggcgtccctgccgaccgggtcctgaacgcgatgacgctcccggagatcacgcgctacctgcgtcagaagcggcgctcgctcgcccgcgccgcctga

SEQ ID NO: 6251 - DNA, 216 bp, BradyrhizobiumColbertium
atgccgcggggcaagatgaagcatctgcaactagtggccggccggatctacaatctcctcaagaaggaggctgcctacggccccaatgtccagcaccttgaggattttcgcgcagcccagaagctcgaggcctctctcgatcgccggccaagtgaccgctccggcgctcgccttgctccggcggcgccgcaaggctcggaccgggaggctggctga

SEQ ID NO: 6252 - DNA, 891 bp, BradyrhizobiumColbertium
atgccggggttcatcgaaccccagttggcgaccctgaagctgaaggcgccttcgggaccccaatggattcacgaggtcaaatacgacggttaccgcattcagctccggatcgatgacgacgatcgccgagcctacacccgcaacggctacaattggatcagcaaattttcgaggatcgctgccgcgttcgacatcaaaggccaagctattgtggacggcgaggtcgttatcatccatgatgggcgcacgaacttctccgagctgcaggcagacctcggcaggggcgatcaggatcgactggtctacttcgctttcgatctgctctggcgggacggcagagatctgcggaaggagccgcagatcgagcggaagaggctgctcaaggatctgatcgaggagcacgacctcaaggagcccgtcctctatagcgagcaccacgaaggggacggccaggcactgttcgcggcagccagcaagctgaattacgaaggcatcgtctccaagcgggtggacgcaccataccgatcagatcgagtggaggcttggcagaagatcaaggtcgttcagaagggcaagtttcccgtggtcggcttcatcaaggacccatccggcgtggccgcactctatctgggcaagaaggaaggcaaggatctggtctacatgggaaaggtcgggaccgggtggagccgaaccacctcagcgcagatccgaaaggcgctcgacaccgtggtgagcccgaagcagaagttgaccaagatcattaggaagccgaaggccacgtgggtcgaacccgagttttatgccgacatcgagtaccgcgacatcacctccgaaggtctgttgcggaccagctcgttcaaggggctgagcaaaggaacgcgccgatcatag

SEQ ID NO: 6253 - DNA, 306 bp, BradyrhizobiumColbertium
atggatccggaacagcgagttgcgaaggccttggaagacgcacaaggcatcttggcccggcatgtcgagcccggccccagagattgcgagcaaaccataaacaagctgctcgatgtgctcgacgacgaaaccgtcgtgcaggccctcaaggattcgaagatggaaaagcccaccacggaacaactcgacgagctcaagaggctcagtgcaatcgcgcgggtgccggacgaatcagagattgtcacttcgaaggaagaagccgaaatccggatccgcgatttgaaagacaaggctcggatggaatga

SEQ ID NO: 6254 - DNA, 837 bp, BradyrhizobiumColbertium
atgaccaggcttgcagacgatttcgaaggtgctgtcggccagatcatcggaacggtctcgtccgcctcgacgcagctcgaggcgtcggccaccacccttaccggcacggccgaacgctcgcaacaactggcgaccacggtcgccgccgcttcggaggaagcctcgaccaacgtgcaatcggtggcttcggcgacggaagagatggcgtcctcggtcggcgagatcagccgtcaggtgcaagagtccgcacggatggcgggcgacgccgtcggccaggcccgcgccaccaccgaccgcgtcagcgagctctccaaggccgccgctcgcatcggcgacgtcgtcgagttgatcaacaccatcgccggccagaccaacttgctggcgctgaatgcgaccatcgaagccgcacgtgccggtgaagccggtcgtggctttgccgtcgtggcgtccgaagtgaaagcgctcgccgagcagaccgcgaaggctaccggcgagatcggccaacagatctccggcatccaggccgcgaccaacgattccgtcggcgcgatcaaggagatctcctcgaccatcgagcgcctgtcggagatctcgtcggccattgccgctgcggtggaagagcagggcgccgcgacccaggagatcgcccgcaacgtgcaacaggccgcgcaaggcacccagcaggtgtcttccaacatcaccgacgtgcagcgcggcgcgaccgagaccggcacggcctcctcgcaggtgctgtcggcggcgcagatgctgtcgaatgattccggacggttgaagaacgaggtcagcaagttcctcgccaacgtccgcgcggcgtag

SEQ ID NO: 6255 - DNA, 624 bp, BradyrhizobiumColbertium
atgtcgaccggcgcggcccgcgccggggacgacgacgaagaagacgatatgaccttcgaagagaggctcatcgacaacctgatgtcgggcatcggtgccaagagcatggagaagaagggcatcgagtaccgcgagcgctcgccgctggtcgtgccgcccaaactcgatctgccgccgcctgcgaccgaagccaaggctgcgccgaactggcccaaggaccccgacgagaggcgccgcaaggaagccatcgccgcacgcaagaaggccacgaaggcaacggagagctggcaggccgcccagcctctgactcctgccgagatgaagtctggccaggtcgccgcagcgccccgcaccagcaacgatccaattcagccgggtaccaacagcaacccttctctgagccccgccgaactcggtttcaccggtggcctgtggaatatgatgaagggcggcagcagctccgaaaccaagcagttcacgtcggagccgccgcgccaatcgctggtcgagccgccgccgggataccagacgccctcgccgaactatgcctatggcgccggcgggccggacaagtcgcgacggatgtactacgacatcatgtcgggcaaggagaaggaacaatag

SEQ ID NO: 6256 - DNA, 180 bp, BradyrhizobiumColbertium
atgaagagacggaagttcagtcgcgagttcaagatcgaggcggtcaagctggtcagggagcgcggggtctcggtggcgcaggccagccgcgacctggacgttcatgagaacgtgctgcgcaaatgggtgaaggagttcggctccgaccccgcgcaggccttcccggtcatgggcaaatga

SEQ ID NO: 6257 - DNA, 216 bp, BradyrhizobiumColbertium
atgccgttcgagcaggtcgccctcgttccggtctgggccgaggtgccccacctgtttcccgacaagtaccgcgctgccctcgcgtgggcggaggaagtcacgctcgtcagcgagacgcacgcctccgacgacgcctatgcggccgcaagcgcggcattcgggccaaaggatctcgcggacctcacgatcatttgccccgtgtctgaccgcggctga

SEQ ID NO: 6258 - DNA, 513 bp, BradyrhizobiumColbertium
atgaagagacaagcccatacccttcagagccatgcaacggaacagatctcgcgcacgcttacgacggtcgaactcttgtggctcgaaaagcgcatcgagaaccgagtccgttttgggcgacacgtttcggagaagattctcgaccgcaaccggcgtgtcctttcgttcgcgcctggcagcgtcttcgctttcgtccgttggacgtccaacgacttcgggaccattctttcccgcatcgatatcttgcgtgctgttacgccaggccaacgctattccaccatcccctggatcacgccgggcggtgaaagtctgctccggctgtcgggctggcccaaggtcgaacgtgtcctgcaattgatcgatgctgtcgaagcactcggcatcgatcctgccgacgccgcgcccgactattggcatcacgttcacaaccgagtgtcggtcaacgaaacaccccggccatacacccgatcccgtcaccaggcgtggctccatcgacggagggttacgtcatga

SEQ ID NO: 6259 - DNA, 519 bp, BradyrhizobiumColbertium
gtgccaatccgcccggcatcgctcgccagctcgcatacacatgtcaggctggatctgagcgagctgaacgaaggccaattccggcaagctcaggatggttggcacgccgtattatatttgcgcggcgtagagcatcgtgtctggttcaaagaagcgccgatcgtcgccgctacctacaccgtcgaactcccgctcgaccgcgacttcgagttcagggcggatgcgggcagacgtttgtggcgggggctcaatggccgcccccaaggagcgcctccgcacgcgatctcagcgcatcgccggcggcgaatcgcgcttgccttgcgtgcgtcggatgcacgaagcgacggtgccacttatcgcgaaatcgctgaagttctcctgtccgcggtgcgcattcccgagcgggattgggaaacgcacgaagcgcgggatcggatcatccgtctcgtcaagaccggattcgcattggtccaaggcggttaccgcgccttgctaagaccgcccccgcgaaaaagataa

SEQ ID NO: 6260 - DNA, 288 bp, BradyrhizobiumColbertium
atgaagaagccaccccgagatccggacgttgccgacaccgcaccaacggattccgtgctcacggtctacgacgaggagcacatcatcacttatttgcgcatgcttgatgcggacaaggagggggcggattggcgcgaggtcgcgcaaatcgtgctgcacatcaatccggagttcgagcatgatcgcgcaaagcgtgcgttcgatacccacctgacccgcgcgaaatggatgactgagcacggttatcgtcatttgctgcgcggcggagcgtcaaatcccaacctttag

SEQ ID NO: 6261 - DNA, 228 bp, BradyrhizobiumColbertium
atggatctcaaggagatcatggcgatgaacctgcgtcgtaagcgccacgatctggatatgacgcaagaagaactagccgagcgcgcggggttaagcctccgttacgtcggtgctatcgagcgtgccgacgtgtcggcaagcgtcactgtgctcggtcaaatcgcagaagcattgggaatcgaaccgggagatttgctcaggcgcgctgcgcgatcggccagatcgtag

SEQ ID NO: 6262 - DNA, 180 bp, BradyrhizobiumColbertium
gtgggccgggccgagatcggcgccgcctggtcgaagcgctccgaagaaggtcgcgactacctttcgctcaagctcgacgatccctccttcaacgccccgatctacgccaacctgttcgacgacgagggcggtgaaggctacaccctgctgtggtcgcggccgcgcaagaacggcgagtga

SEQ ID NO: 6263 - DNA, 1929 bp, BradyrhizobiumColbertium
atgaccggcgcgcatggaccgcgcaagcatcacaaccacatcttcttctgggatatcggcgacaaggacggtaccgacgaagcctttgccaaggccgacgtcgtctccaaggatatgtttacctatcaccgggtccatccgtcgccgctggagacctgccagtgcgtcgcctcgatggacaagatcaagggcgaattgacgctgtggggcaccttccaggcgccgcacgtgattcgcacagtggtgtcgctgatctcggggttgcccgagcacaagatccacgtgatcgcgccggatatcggcggcggtttcggcaacaaggttggcgcctattccggctatgtctgcgcggtggtcgcgtccatcgtgctgggcgtgccggtgaagtgggtcgaggaccggatggagaatctctccaccacctcgtttgcgcgtgattaccacatgacgactgaactcgccgccaccaaggacggcaagatcctcgccatgcgctgccatgtgctcgccgatcacggcgcattcgacgcttgcgccgatccgtcgaaatggccggcaggtttcatgaacatctgcaccggctcctatgacatgccggtggcgtatctctcggtagacggcgtttacaccaacaaggcatcgggtggcgtcgcctatcgttgctcattccgggtgacggaagcggtctatgccatcgaacgcgccatcgagacgctggcgcagcggctcggcatggattcggcggacctgcgcatcaagaacttcatccagccggagcagtttccgtatcatgctccgctcggatgggaatacgacagcggcaactatccgctcgccatgaaaaaggcgatggatgctgtcggctatcgtgcgctgcgcgccgagcagaagcaaaagcaggaagccttcaagcgtggcgaaacccgcgagttgatgggcatcggcatctccttcttcactgagatcgtcggcgccggtccatccaagaattgcgacattctcggcgtcgccatgttcgactccgccgaaatccgcatccatccgaccggctcgatcatcgcccgcatgggcaccaagagccaggggcagggccacgagacgacctacgcccagatcattgccaccgaactcggcattcccgccgacgatatcatgatcgaggaaggcaacactgacactgcgccttacggtcttggtacatatggctcgcgttcaacgccgaccgccggcgcggccacggccgtggccgcgcgcaagatcaaggccaaggcgcagatgatcgcggctcaccttctcgaagtgcatgaaggcgatcttgaatgggacgttgatcgcttccgggtgaagggtctgcctgaaaaattcaagaccatgaaggaaatcgcctgggcgtcgtacaacagtccgccgcccaatctggaaccgggtcttgaggcggtgaattattacgatccgccgaacatgacctatccgttcggcgcgtatttctgcgtcatggacatcgatgtcgataccggcgtcgccaagacccggcgcttctatgcactcgacgattgcggcacgcgcatcaatcccatgattatcgaaggacaggtccacggtggtctcactgaggccttcgccgtcgcgatgggtcaggagatccgttacgacgaacagggcaacgtgataggcgcgtcattcatggatttcttcctgccgactgcggtggagacgccgaagtgggaaacggactacaccgtcacgccgtcgccgcatcacccgatcggcgccaagggcgtgggcgaaagcccccatgtcggcggcgtgccatgtttctctaacgcagtgaacgatgcctttgcgtttctgaatgcaggccacatccagatgccgcacgatgcctggcggctctggaaggtcggcgaaagactgggcctgcatgtttaa

SEQ ID NO: 6264 - DNA, 888 bp, BradyrhizobiumColbertium
atgcgtcatcatattccacgcgatcgaatcgcagatcggctggccgccgcaggctatattccggatcgtgatcttgcgacggccgtctggctgatggagcacctgtcgcgcccgctattgctggaaggcgaggcgggcgtcgggaagaccgaggttgcgctggctttggctcgggcgaatgacgcgcgcctcattcgcctgcaatgctatgaaggacttgatcagaacgcggcgctctacgagtggaactatcagcgccagttgctggcgatcaaggcgcgcgaaacccatgctgacgctgccgatgtcgtcgaagatcatatcttctcggaaaaattcctgcttgaacgtccgctgctgtcgtccatccgtcagccgaaatcgcctgtgctgctgatcgatgaggtcgatcgcgctgacgaggaattcgaggcgttcctgctggaattgctgtcggatttccaggtgtccatccccgagcttggaaccatccgcgccaccacgatcccgcatgtcgtgctgacgtccaacggaacgcgcgaactctccgacgcgctgcgccgccgctgtctctatcattacgtcgattttcccgacgtcgaacgcgaggcgcgtatcatcaccgcgcgcatgcccgacatcgacgtggatctggcgttgcagatcgcgcgcatggtcgaggccatccgcaaggaggatttgcgaaagagccccggcgttgccgaaacactcgactgggcagccgctctggccgggcttggcatcgacgatctgcgcgcggaaccggaagtcgtgttcgaaaccatgatgtgcctgatcaagacggcagaggacaagtcgcgcatgacgcgtgaggtgtccgaccggctgctgggcaaggtggcctga

SEQ ID NO: 6265 - DNA, 1338 bp, BradyrhizobiumColbertium
gtggacgctgccgatgttcgcgagaaggactattttatctgggacgacgaactgcccggtttcggcctccgcgtgttcgcctccggcaagcgcagctacctcatccaatatcgcgctgttggacgcacgcgacgctacaccatcggcctgcatggcgtgtggacgccggagacagcccggcaagaagcgaaggtccaactcgggcgcgtcgcgcgcggcgacaacccttccgaagaacgtcagctcgatcacaaggccatcacggtcaaggagctttgcgccctctataccgctgatctgaacgcgggcctcattctgggtaagggcgggcgaccgaaaaagcccaccaccatcgtcaccgacactggccgtatcgagcggcacatcatcccgctgatcggcgcgcgccgggtcaaggatctcaccaaggccgacatcaacaaggtcttgaaggacatcatggccggcaagacgcgcgtcgccgtcaagacgaaaaagctgcgaggaaaggccattgttcgtggtggcgcgggcaccgccacgcgcaccgtcggcctattgggcggaatcctcacctacgctgtcgatgctgggattatagaggtcaatccggcgcacggcatcaagaagcccaaggacaatgttcggaatcgtaggctgaccgaggcggagtatcgcaccctcgggcaaatgcttcgcgatgccgcggcgaacgaaaaatacgccatgaccgtggacatcatccggcagatcgcgctcaccggctgccgccgctcggaaatgatctcgctaatgtggatcgaagctgacaccgacgcgagctgcatgcgcctggtggacagcaaggaaggtgagtccattcgtccaatcggattgcccgtcgtcgagtatctggaggaacggcgcaagaccgcagcgggcacctatgtcttcccaggtcagggcgaggaccatgcgttcggcagcttcccgaaccattgggaacagattttcagcgacagtccgctcgccggcgtcaccccgcatgtcctgcgtcacagctttgccagcatcgccaacgatctcggtttcaccgaggtgaccatcgcggcgctcgtcggccactccaagggctcggtgacgagcaaatacattcacacgctcgacactgcgctcatcatggccgccgacacgatctccggttacatccaagggctactcgaggggatcgaattcaaacagacggcctacgcattggatcgtgattctcgtcgagctgcgcttgacctcttcctgaccaaagcggttggagagccggggaacgaagccgaggacgaggagcgtcgcttggcagcttga

SEQ ID NO: 6266 - DNA, 174 bp, BradyrhizobiumColbertium
ttgaggcttgcgatcagccactggtcggcgagcaattcatcgccgcccacgatgcagtcgaaaaagctttttgaagaaatcgacgatcttcggtttggcgccatcggcgaccaggtcatttgctccgaaccggcagaccatcctgacactcctgcacaccgagcgcagccgtag

SEQ ID NO: 6267 - DNA, 3105 bp, BradyrhizobiumColbertium
atgccgtttcgcggcctgttcatcggcatcgaccgttatagctcgaccggcattgatgagctgacctgcgcgcgtcgcgacgcgacggcgctggaggcactgttcttcgacacgctgggcggcagcacagtcttgctggcagatgcggaggccacgcggcagcggattgaggacgcatttgccgacctggccggctgcggccccgaggatacggtggtgatcgcgttctccggccatgggtcggagacacatgagctcgtcacccacgacgcgaatccagatgatctcgccggctccgcgatcccgctcgagctgttgcaggaatggttctcgcggataccggcaaagcgcctgatcctgttcctcgactgttgtttttccggcggcattggggcgaaggttctgcacgtcgatgcgaagccgcgcagccttttgtccgccgaagcgcgcctggctcagcttggcggcgctggtcggatcatcttcaccgcctccgcggcgaccgagcccgcctatgagcaccgccggttcgggcacggctttctgacccactttctgcttgaggcgctatgtggcgccgaggaagtcgtgagcggcggcaagctctcgctctaccgcctcctcgagcatgtcacgagccgcgtccgggcggccgcgctgcagggcggcaaagagcagaacccgaccatgcgcgggagcatcgacggcgatgtcgcgtggcccgtgttcgtgccgggcgctaagtatcgggcggccttcccggcgcgtctgcctgccaaggtgacgtccgatcttgccagcctctcgtcggccggtttccccgacgcgcttgtcaccgcctgggctggagcgatcccgtccttgaatgcgcttcagatctccgccatcaccgacttcggcgtgctggacggcgagaacctggtggtgtcggccccgacatcctcgggcaagacgatggtgggcgagctcgcggcgctccggaacgtgctggatcgcaaacgggctttgtttctgctgccgcttaaggcccttgtggcagacaagcggcggcacttcgagagcgtctatggcggtttcggggtccgcacggtggaagcgacgggcgagacggacgacatcgcgcctctgctgcggggccaatacgatgtcggtctcctgacctatgagaagttcgccgcgatcgcgctgacattccctcatgtgctggcgcaggtcggcgcgatcgtgatcgacgaagcgcagatgatcgccgaccgtggccgcggcgcgaatctggagttcattttgacgctcatccggatgcgccggcgtgaggggatcgagccccaactgatcgcgctttcggctgtgatcggggacacgaacggccttgagcaatggctcggcgcgcggctcttgcggcgcacggagcggcccgttccgcttgaggagggcttgttgctcggcaccgggcatttccgctttcttgacccggagaatggcaatgagcaggttgaggggccgctcgttcggcgtcttgtcggcggcaaaggatccagccaggattggatcatcccgctggtgcgcaagcttgtcgccgaaggccagcaggtgatcgtgtttcgcgaaaccaagggcgaagcccgcggctgcgccaactatctcgcagagtcgctcggattgcctccggctgccgaggcgctgacgcagatgcccggcggcgatccctcgcaggccagcgccgacttgcggagcgcgctggggcgcggcgtcgctttccacaactcggatctcgaccgcgaagagcggcgcgtcatcgaggaagaatttcgccgtagcggctcgggcctgcgcgtcatcgcagccacgacgacgctggcgatgggcgtgaacacgcccgcgtcatcggtcatcatcgccggcttgaatcatcccggcgacgagccctattcggtagccgaatacaagaacctagtcggtcgcgcgggaaggcttggcttcgccgagaagggagcttcgtatctgctggcgctcgatccgcgcgccgagcatgatctgtggtcgcgatacgtgaccgcggagccggaagacttggtgtcccgcttcctcgacggtacaaccgacccacgctccctgattatccgcgtcctagtcgcggcacaacgagcggccggcgaaggcgtgccgagcgaggagattgtcgaatttctggaatcgagcttcggcgcgttccaagcccggcgcgcccatagcgcgtggcagtggagccggccggatctgctttcggccctagcggatttggaacgccacggcctggtgcagaagaacgctacaggcgcgtatgaattgaccaagctgggccgtctcgctggcgaaagcgcggcagaggtcgggtccatcgtcgcgctcgtagattgcctcggctcgcttcagccccaagaaatcagcgatcccgtcctgattgccgcagctcaaacgacggtcgaggtcgatcaactcctttttccgatcaaccgaaaaagcacgcagaaagagcctcagctatggcccaacgagctgcagaggcagaatgtgccgtggcacgtcctgaacgcgcttcagcgcgggacaacagaagatcatcaggcgaccctgcgtgcgaagaaggcggtcgcttgtcttttgttcgtgtccggtcgtgccatgagcgagatcgagcgcgtgctgacgcagttcggtggtgcgtttggcggcgccgccggccccatacgcgcggtcgcagcgcggacttgcgatctgatgccggtcgcggctcgcgtcgccgagatcctgcaccccacgctcgatctcggtgaccgtgtgagacgtctggcgatccggttgacatatggcgtgcccagcgccgccgtcgacctcgcccaattcgctggagccgatttgctgcggggcgactattgccgcttggccgccgcgcagctctgtgagcccgaacagatcgacgccgcaaatgatgaccaaattctggcatgcgtggacaaggacaggcgcaagcttgcacttgtccgcgatgcggcgaagcgcgttgccaagcgtcgggccgaagcggtggcgccttccgccccgatccttgaagtatatgtgccctaa

SEQ ID NO: 6268 - DNA, 237 bp, BradyrhizobiumColbertium
atggatgctaccgaattcaagcccggcgatcttgtgcgggtgaagtcaggcgggccgatcatgacggtcgagcaggtcgggaagacggccatgctggaggaggatgccgtctggtgtgtctggttcgagaaggtgggcaacaagcaggtcgcgcggaaagacacgttcgcgccggtcgtgctggagaaggctgagaagccacgagccgcgttctccgtcggcgtcgttcgggcgtag

SEQ ID NO: 6269 - DNA, 441 bp, BradyrhizobiumColbertium
gtgatacggcacaagcgactcgaacatcgtttcgtcgaacacatccctgagcgccttgaggcaggcattctctatgtttcgatggaatatgccacatcagcccacagctgctgctgcggttgcggcgaggaggtcgtcgcccccttcacgccgacggactggaagatgacgttcgatggcgagaccgtctcccttcggccgtcgatcggcaattggacgctgaaatgccggtcacactatgtgatcgaccgcagcaaggtgatcgaggccggcccctggagtgacgagcaggtcgaagccgagcgtcgtcgtgaccgcgctgccaaagcgcgcttctacgggcagacgccagcgatcgaacttgccgttcagcccgctcccgtcaaggcggctcccggcttctggcgccgcgcctggcgttggctatctggcagatcgtga

SEQ ID NO: 6270 - DNA, 1173 bp, BradyrhizobiumColbertium
atgtcacgcgcactgttcagtcgtaatccggacctcaagcggctgcgggacgaaggctacttcgtccagcagcagggcgggtatctcgttatgcgcgaggtgccgtatgtcgatgcgcgccgggaggtgcgcatcggcaccctcatctccagcctcacgctggccggagatcagacgcgcccgcccgacacccatgtcatccactgggacggcgatttcccgtgccacgccgacggcaggcccatccagggcatctcgcatgcggccggcgccttcgatctcggccacggcctgaaggcgacgcacagcttctccagcaagccagacggcggctactcggactaccaccacaagatgacgagctacgcgaatatcctcgcgggcccggccgcagtgctgaagtccggcgcgacgcctcgcaccttccgcgaaccggaagaggaggaggacagcgtcttcaactatgtcgagaccgcctccgaccgtgtcgggatcggcgtcctgaccgagcgactcgtcaacgagcgggtcgccatcatcggcgtcggggggaccggcggctacatcctggatttcgtcgccaagacgcctgtccgggaaatccggctgttcgacagcgacgagttcctgacccataacgcgtttcgcgcgccgggcgctccgagcctggaggaattgcgggaagcgcccaagaaggtcgaatacctgaagcgcatctacagccggatgcaccggaacatcgtggcgcacgatgtcgcgctcggcgtcgacaacattcaccttctcgacggcgtcaccttcgcgttcctgtccctcgatgcgggtgacgctaagcggctgatcgtagagaagctcgaggcgatcggcgccgcgttcgtcgatgttggcatggggctcgagctcgacgaggggtcgctgggcggcatcctgcgcgtcaccgccagtacgccggagaagcgcgatcacgcgcggcagcgcatttccttcgtcggcggcggcgccaaggacatctacgcctccaacatccaggtcgcggatctcaacgccctgaatgctgtcctcgcggtcgtcaagtggaagaagattcgcggcttctaccgcgacctcgagcgcgagcatcactgcacctacaccaccgacggcaacatgctgatcaacggggatctcgcgtga

SEQ ID NO: 6271 - DNA, 747 bp, BradyrhizobiumColbertium
atgaacaccgaagaacttcttgattacgacgatctcggcaacgccctgcgcgaaggccgggcgttgcgtccggcgcgggggtatcgctttctcctcgcgcagggcgatctcaacttccagtcccgtgtggtgagcgatcccgtgccgctcggccgccagttgctggaagccgcggcactcgacccgcgggacggttacagcctcatcgcgatcctgccctcgggcgatttcgaggatgtgaggctcaacgagccgttcgacctgcgtgagcgcggcgccgagcggttcatcgccttccagaccgaccgcgacttcaagctgaccctcaacgaccacgagctgctctggggcaagccggtcatcagcggcacggtgctctacggcctcgccaagcccggcgagggggaggccgtcttcctcgaggttcccggcggtgaagatcgcctgatcgagcatggcgagctgatcgatctggtccagcccggcatcgagcggttcatcaccgcgcggctgacgttcgagatcatcgtcaattcgcggccgcgcacggtgaacgcccgcacggtgacgttcgaacagatcgtccagctcgccttcccgggccagcacgaacccaacgtcgtcttctcgatgacctatcggcacgcggcgtcgacgccgcccgccggtgagctcggggttggcggctccgtcgacgtcaagaagaagggcacggtgttcaatgtcacgcgcactgttcagtcgtaa

SEQ ID NO: 6272 - DNA, 3402 bp, BradyrhizobiumColbertium
atggacagtgtggagctcgccaggcaagtcgccgccgagcttcacgctcgcctcgttgcatccggcgccgatccctggtcgccctatgactttgctgtcgccgaggccaagcggcgggggattgatgtcgaacggactgccgccggcgcagccgtcctcaatggcggccgcgcgactttcgtcgccgccgacgatctgattcttcacgagaatatgggctctccgttcgagcaagctttcctcgtggcgcatgagatcggccatgtcgagctgggcgacgatcctggtggcgaagcggcgccgatgattgatccggcacgcccggccgagccctcaccagtcggaatggatcgggttgtcgattatggacgccggcaacgccgcgaagtccagatggacctgttcgcgcgcgaactgctgcttccgcgcaccgtcgcgcgggcgctccatgtcgaccaagggctcgccgcgtccgccatcgccgcgaagctcggcgcgccgttcgaggtcgtcgcgcagcagttgttcgatgctttgctgctgccgcccgtgcctcccgccgcgactgcggcgcatgtcgaacggccgctcaatccgctgcaagcggccgctgcggcgcatcgcggcgaagcctatctgcttgaggcggggcctggcaccggcaagacgcagacgctgatcgcgcgcgtcgagggccttctaggcgagggcgtcgatccacggcgcatactgctgttgaccttttcgaacaaggcagcgggcgagatggccgagcggatcgcgcgcaagcggcccgaggctgcggccgcgatgtggatcggcacgttccatgccttcggcctcgatatcatccgtcgtttccatgcggagctcggcctgccgaaggacccgcggatgatggaccggaccgaagcggtcgaactcctcgagggggagttcccgcggcttaggctcgcgtactaccgcaatctttacgatccgacccagatcattgccgacatgttggccgccgtatcgcgggcgaaggatgaggtggtcgacgccgaaacctacgccgcgctcgccgacgccatgcaggcgaaagcccaggactcggatgcgcgcgaggcggcggaacgcgccggcgaggttgcccgcgtctacgcggcctacgaacagctcaagcgcaacgcgcattgcatcgacttcggcgatcttgtcgccttgccggtgcaactgctcgaaaaggaggcggccatctgcgcggcgctgcaggcgcaatatgatcatgtcctggtggatgagtatcaggacgtgaaccgcagcagcgtgcggctgctgagcgcactgcggcccgacggccgcaatctctggatggtcggcgacgccaagcagtcgatctaccggtttcgcggtgcctcatccttcaacataacccggttcggcaaggaggacttcgccggtggcaatcgcggtcgattgaagcgtaattatcgttcggtgccggagattgtcgccagcttctccagtttcgcgatcacgatgcgcgccggcgatgcggatagtggcctcgacgcggaccgcgacgccaatggacataggcccgagttgcgcacggtccagcgcgccgagcagcagcaggtcgccctggccgacgctatcgaggagctgcggcgtgacggctacgcctatcgtgaccaggcggtcctgtgcaccggcaacgaaaagctgtcgacgatcgggcaggacctggaacggctcggcgtgccggtcctcttcctgggaagtctgttcgagcggggtgaggtcaaggatctcctggctctcctctcgatcctggtcgatcggcgcgccatgggcctggtgcgcattgcctgctggcgagacttcgccacctcctttgccgatgtggtcgcggtcttcgaccatctgcgggcggccgagcacgcgccggcgggctggctgcggcatggcgaggcgatccccggtttgagcgacagggggcggcagaccgttgccaagctcgcgactgcgctcgatggtttcgatcagacggcctcgccctggaccgtgctcgcgacgctgttgctcgatcgcacacgcatcgccgcgcgcctgggcgcgtcggaggatctcgccgaccgcacacggggcatcgcgatctggcaattcctcaactttgtgcgggtacaaccggccggacgcgggctgcccatcacgcgcctgctcgatcgtgtgcgcaggctcgtgcggctcggcgacgaccgcgacctgcgccaattgccggcggccgcccagcatctcgacgccgtgcggctgatgaccatccatggcgccaagggcctagagttcggtggcgtccatattcctgggcttaacagcgacacgatcccacgcacgccgccggcgccgccctgtccggcgcccgacgggatgatcgcgggggcggagggcagtgcgctggaggcattccgcgcaggtcaggccgaggagcaggagtgcctattttacgtggcgcagtcgcgcgcccgcgatcgcctgatcctttatgcgccgaccgagaagagtaacggccacaaccgaccgctttcgccattcctcgaccgtctcggggcgaccttaacacgccgttcgctcgtgccggcacggccgcttcccgtggccgcggaagctcgggatatcgatttggtggtcgacggacggctgcggttaggcgccccgcagatcgctctttatgaatcctgcccgcgtcgcttcttctacacgcatgtcctgcaggtcggcggccggcgaaccgcgaccgccttcatgcatctgcatgaggcggttcgcgtggtggtcgaggcggtgatcgcgtcggatggacccgtgtccgagcaggcgctgcaagatcgcatcgatgcggcgctcgccggcgaggggctcggcgagcacggctatcgcgcggaattccgcgatctggcgctggcaatgctgcgcttcttcctggcgaaccgcgccgaagcagtccccgaagcgccggtcgcgctcagcctcagtttcggcggcgaggagatcatcgttcggccggacgaggtgctggtgcggccggacggcatccgcgccgtgcgccgcattcgcacgggtcacatgcggtcggccgagggcaaggatgtcggcgcggcggcgctgatgctggcggtcaggcagtcctttcccggcgcggtcgcagagctcgtccatctttccgacggcgaggcacatgcgcttgccttgtccgatcgggagctgaaggggcgcaaggacaagctcgcaaagtttctcggcgacatccgcgccggacggtttccggccgaggtttcgtcgcgcacctgcccgaactgcccggccttcttcatctgcgggcagacccccgacggccccttgcaaaaaaagttcgtctga

SEQ ID NO: 6273 - DNA, 579 bp, BradyrhizobiumColbertium
gtgagccccggcggcggacgtccatcccgcgaggccgtgctcgacgcgttcgcggtcgagagcgagcctggccggtcgaccttggaacgctatctgcggctatacccggaatatgccggggagctcatcgacctctcgcgcgaactcagccgcgaggcttatgaagatgccgcacccctctctgctaccgatcgggcgctgatcgacgctgcctggtcgcaacacgcgaaggttatgccggcggcagcagccgaccctttcgcggcgctgacggtcgatgactggcgcgccgtcgcgcagcgtctggacgtgccccggcaggtcgtgaccgcactgcgcgaacggcgggtctctctcgtcagtatcccgcgacgcttcctggcgatattggcggatgcgatgcgcagctctgtcgcacagttggagtcgtcctgggggccagcgcacctgattgtcgcgcgcagctataaggccgacagcaaaccggtggccggcgagcaggtcaccttcgagcaagtgctgatcgatgccggcgtcccggccgagaagcgcgcccggctgttggcggaggcggactga

SEQ ID NO: 6274 - DNA, 858 bp, BradyrhizobiumColbertium
atgaaccagttggagggagctttcgacaccgggcaaaaggcagacgcgcgtggcgcgggcgaagcgatcgtaaccccgctgcgcaaacgccgcctcagcggcgaactctacgagcgcgacccgaagatagaagccctcatcgccgaattggcagtcctgccgcgtgatggcttgatcgccagggcggaaatcaccaagcgctcggacccgggctacgtcccgagcgaatgtctcgtttacttcattcgcgcgagccgtcgcgacaacaacgaggtgtggttcgagcgcctctatcggatcttgaccgaacgggtgctgcgcagtttgcccagggcggaaagctccgatggaaagacggaatcgctgacgcgcggggtcgtgcgcgacaaggtgttcggccggttcgtcgagctcttttcggcggaccgcgccgcctacgacgaaaaggtcgactacttcgaggtgcgcttcgatggcgcgctagcgagcctgcggcgcgatgcgcaggaaaaggcctggcgcgacgaaaaccgttcccagcccctcgaatatgacgaggagagcggagaactgtcaccggaggtcgaggcggccgcagggacccacgatcccttcgccgtgtcggatttcgacgacccgtcttaccggtcgcgcctggatgcagcgattgaagctctaccgacagaacaaagcaggatcattcacatgttgagacagggcttccccatcgactccaaggagccggacgtcatgaccatcgccaaggctttgggccgctccgaaaagaccgtccgaacctaccgcgacaaggccttcgccgccctgcgagctgccatggccgacggagacgagcggtga

SEQ ID NO: 6275 - DNA, 1080 bp, BradyrhizobiumColbertium
atgaatccggctttcgacgaggttctcgcggccgggtcggacgcgatgttgagcgccttcgatacgacggcgctacgcctcggcacggcgtctcagaatatcgagaaggacttctgggtctgctggacgctggatgccttgttcaatggcttgaaagagggcggaccccgcctcctcttcaaaggtggaacctccctgtccaaagggtttggtttgatcaatcgcttctccgaagacattgatgtcacggtgtttcgggacgacatcggcgagccggcgaccatcgaggagctcgaagcgctgagtagcaaaaagcgccgggcgcgcctcgatgcgatcaaggacgcctgccaagcctacatcaacggcccgctgcgggctgagttgacgcagatcctgcaggaccggcttcaggctgccggcctcgatgccggcgcggcccgagtggaagccgatgacgctgatcccgacgggcagacgcttctgatctggtatcccgcggcgacgccgcgatcggattatgtgcgggcagcgatcaagatcgagtcgggcgcgaaatccgcgctcgatccgaacagcgaagtgccgatcaaaccctatgtcgatgatgatctgccggcgctcgacctgaccgtgccggccgtccgcacggtcgatccggaacgtaccttctgggacaaggttgtcatcctccatgggctgcggcgctggttcgacaagcgcggcgagctgcgcgggggcggccaacgcgtttcccgtcactattatgacctgcaccagctcgccgcggcccgcgtcggcgccgccgccatcgctgatccggcgctcggtgcggattgcgtcgcgcacgcccggatgttcttcaatcgaccggacttcgatctcgcgagcgctgcgcctggctcgtttgcactcgccccgcatgacgcgatgatcgagcaactgcgcgtcgactacagggccatgcagggcatgatctttggcgatccaccggatttcgaggcggtgctcgacagcatcggctcgctcgagacgcgtctcaacaagaagggcgatacgggaggcggggccgcgcgatga

SEQ ID NO: 6276 - DNA, 831 bp, BradyrhizobiumColbertium
atgaacaccgactcgcccgatctgaagaaagccatgctcgagcgcatccgtgcggatgcgccacgcaaggtctggacgcccagtgacttcgtcgatctcgcctcgcgggacgcggtcgataaggcgttgcagcggctgacgaaggtcgaaatccttaggcggattgatcgtgggctctacgatcagcctggcttcaacaaactcacccagaaacccaatccgcctgatccgcgctcagtcatcgacgccgtcgggcgacgtgaccaaacccggatgcttgtcgacggcatgaccgcggcgaacgatctgggcctaactgacgccgtccccgccaaaatcgtggtgcacagcgacgctcggcgccgcgcgatcaagctcggcaacgtaacgatcaccttccgtccaaccgcggccagcaagctattctgggccggacgaccagcgatgcgcgtcgtccaagcgcttcactggctgcgcgatctcctggttcgtgaaggagaaagtgatcaggttaggcgcaagctcgccaatcttttcgaagatcccacggtgggaccgcccctcaaagcggatctcactgccggtatgacagctcttccgacatggatgtgggtgtttctcaagccgctcgttgaaagcgacgccggcgttcgtcgtcggcacgtcgatgatgatcgtgatgatgctgatcatgatcgtcatcaacaaagaacggcggacgatgccgatgatcagcgtcatgctgccgtcgcccggcccaagcgaaagccgctctccccgcagaaggcacaaactgccaagcgcggtgcagcccgggcggtgaagacatga

SEQ ID NO: 6277 - DNA, 630 bp, BradyrhizobiumColbertium
gtgcaacgactgaccgaacagattctggcgcacaccgagggcttgcccgagggcgctccgatcgcggcgaagagcctgctccatctcggcaatcgcgccgcggtggatcaagccttgtcgcgactggctgaacgtggccggctgatgcgtgccgggcgcggcgtctatctgcgcccggtttcgagtcggttcggcgtccgcgcgccctccgtcgagaaggccgtcgaagccctcgcgctccagcgcggcgaaaccatcgtgtcgaacggtgccgcggccgctaacgcgctcggcctcacgacacaggtgccggtccggtcggtctatctgacatcgggccgtagccggacgatgaatctgggccagcaggtcgtcgagctgcggcatgcgccgcgctggcagttggcgctggccgatcggcccgccggacaggcggtgcgagcgctcgcctggctggggccggaaaaggcagaagccgccttgatgacgttgaagcgcaagttgccgtcttccacgttcggcgaactcgtcgcggtcgcgccccagctaccgagctggctcgccaggacggtcggcaaagttgcatacggccgaaggagccattctcaggtgggcggcctacctatttag

SEQ ID NO: 6278 - DNA, 1194 bp, BradyrhizobiumColbertium
atgaacatgcaggttctcgatgcccggcgcgacgtgagtggcggctggaaggtggacatcaaccgcggcgagcgcatcggtcgggtttcctcggagtggttctcgcgacccgacgacgagcgctatctctcgctcgccgaactcggccggaccgtccgcgagcgcaccgagcgcagccgaacgcgcgttgtcgaatccgcgcttatccatgtcgaagccagccgcaccgatcccgaacggcttgccctgatcctaccaggcgccgacaagcccatcgctccgacgcactggagtttcggtcagctcgcgagccaggtcggcgcgccggccgcctatctgcggcagctccccgccgcgctcgccggcatcaacctgcaatatgggctgaccgcccaccgcgccgagcagatcaagaccctcgagaccgacgacggccgcgtcgagctgcgcgccgtgaccggccccgactacggccggatctacgaccacgagctggtcgaagccgtgcagcgcatcgccggcaacggcaccggcgacacccgttggaaagtgcccggtgtcctcgactggtcgaccggcgtctataatccgcgcgtcgacatcaccaaggacaccacgacgctctacgcttccgatcgcgacgtcttccttttcctcgtcgacgatctgaatccgatcgaagccggcaagctcgcggatggatcgcccgatctctatttcaggggcttctatgcctggaacagcgaagtgggcgccaagacccttggtatcgcgtccttctatctcagggccgtgtgccagaatcgcaatttgtggggcgtcgaagatttcgaggagatctccatccgccattccaaatacgccgcttcgcgcttcgcccatgaggcggcgccggccttgctcagcttcgcggactcctcaccgcagccgttcatcaccggcatcaaggcggcgcgcgaacgcatcgtcgcgcacaaggacgaagagcgcaccgaattcctgcgccgccgcggcttctcgaaagccgagacgggcaaaatcatcgacgcggtgctggccgaggaaggccgcccgccggaaagcatcttcgatttcgtccagggcatcaccgccgtcgcgcgcgacaagccccaccaggacgcgcggctcgagctcgaaggcaaggccaagaagctgctcgatcgcgccgcctga

SEQ ID NO: 6279 - DNA, 1119 bp, BradyrhizobiumColbertium
atgctagagcaggcgcctgcggaatattacatcgatgaaagcggcaataccggcgacctgagcacggtcaaaatcgactcctacttcgtcgaacagcgcatgttcgccttggctgcattcggctgcacgctcgaccaggacttcaccgataaattgggcgcactaaaaaaggcgcaccgcatccagtcgtcggagctcaaatcaaaacaggcttatgacaagccgcgcttcatctttgatcttctggacctccttgagacgcgccgcgccccaatctttatcgagcttgtcgacaagcacttcttcgttgtcgtgaacatcatcgagcgaatggtggtgccctatgtgggggaatgcgacactcaacctggcgccctttggatgaagggcgttatggcgaactacatggcgctatatgcacctcccgagctggctcacgcctttgccgcatgttgccaaagcagagaccacgcggaaatacgcgaactttacaagcaaataattcggtgggcgcagggaagcggagttccgcctactgacgtggcggcggggatcatccgttttgcgcgcgacagcttgaaggacttccgcaagctgccgaaagccaaggccgtcgagcgggcattaccgattcccgacaagaatcccgccgggaagctgctctgggttctgccgaacctgacatcgttcaccaacatctacgcccggatcaatcgcttcgcgcgaaagcaggtttccggcgtgacgctgttccacgacgagcaattgcagttcggagacattcttctgcacaacaagaagctcgcagaggacctggcgcagcttggcgtgaaattgcccctgcagacggccgacttcgaattctcgcaggcggccgacctgcaattccagcgatcgcacgattctatcggcattcaggtcgccgacgtcctcgccggtttcatcgcgcgatatgtacaggacgctgtgtggggcggcgcccccatgcatcctgacaaggtagcgattttccgccgcctcgtcgcaacaggcgaccgcagcttgggttcgggtgtcaacttcgtcgcgcccgacaacatgatccgcttcctcggcatcgaaccgcgctcgaatttctag

SEQ ID NO: 6280 - DNA, 2139 bp, BradyrhizobiumColbertium
atggcaactgccattcagaagatcaccctgtcgtcggcgcaggacatccccttcaacaagctggtgctgagccagtcgaacgtccgccgcgtcaaggctggcgtctcgatcgacgagctggccgagtcgatcacccggcgcggtctcatccagtccctccacgtccggccggtgctcgatgccgacggccaggaaaccggcatgtacgaagtgccggcgggcgggcgtcgcttccgcgcgctgcagctcctcgtcaagcagaagcgcctcaccaagacctccaaggtgccgtgcgtggtgtcggacgccaatgccgacatcctcgtcgacgaggtgtcgctggccgagaatatcgaacgcgccccgctgcatcctctcgaccagttccgcgcgttccaggcgatgcgcgagaagggcatgaccgaggaggcgattgcggctgcattcttcgcgtccgtccaggtcgtgaagcagcggcttcgcctcgcggccgtctcgccgtcattgctcgatatctatgccgaggacggcatcacgctcgaacagctcatggccttcaccgtcaccaacgatcatgcgcgtcaggagcaggtctgggagtcggttcgcaatagctggcagagggaaccctaccagatccggcgcatgctgaccgagaccgccgtccgcgcatccgacaagcgggccgtattcgtcggcatcgatgcctatgaaaccaacggcggctgcgtgctgcgcgatctcttccaggatgacgacggcggctggctgcaggatcctgcgctgctcgatcgcctggtcgccgacaagctgaaagcctccgccgaagcgatcgccggcgaaggctggaaatggatcgaggtggcgatgagcttcccctatggcgccacccacggcctgcgcgagatcgtgggcacgccgctcgacctgacggctgacgaacaggcgaccatcgaggcgctcaacgccgagtgcgccaagctggaggccgaatatgagaacgccgacgagttgccggacgagatcgatcagcgccttggcgaaatcgaaaccgcgctcgccagcttcgacgagcggccggtccactacgaacccgccgacatcgcgatcgccggggtcttcgtcagcctggacgccgacggcacgctgtcgatcgaccgcggctatgtccgacccgaggacgagatcgccaaccaggcgggcgatggcgagggtgaagagcaggatggcggcgacgatgacgctgactatccggcgtcgccttcggtccagcgcgcggtcatcaccatctgcggcaaacctgccgagcccgaggaggaggacgaggacgacacgatcaagccgctccccgatcgactgatcacggagctgaccgccgatcgcaccctcgcgctccgcgacaagctcgccaccgatccctcggtcgccttcgtcgccgtcctgcacaagttctgccaggacgtgttctacggcggcagccagtacggcttcgcgatggaggtcagcgtgcggggcacgaccttccattcgcagcccgaagggcttcgtgacagcgtctatgccaaggcgatcgaggcccggcacgatagctggcgcaaacggctcccggccaaagtcgctgatctctgggatgggctggccgcactgactggccccgaacaggccgaactcttcgcccattgcgcttcgttcggcgtcaatgcgctttatgagcgggccgatcgctacggtggccgtgtctcggcgcatagtgtcgaacagcgcatcgccgaagccgatcgcctgtcgctggcggtcgggctcgacatggccgaagccgggtggcggccgaccgtcgccaactatctcggccgcgtcaccaagccccgcatcctcgaagcggtgcgtgaaggcgccggcgagcgcgccgcccaactcatcgcacatctgaagaagggcgacatggcgaccgaagccgaacgtctcctcgccgagacgggctggctgcccgaaccgctgcgcaattccggcgccgatgccgaaagcaccgaggcggactctggcgagggcgacgaggcgttgccggacttcctcgacggcgatgacgaggagaccaacaccgatgatgaggaggaacggcacctcgccgccgcggagtga

SEQ ID NO: 6281 - DNA, 414 bp, BradyrhizobiumColbertium
atggccgactatttcacccatttctcatgcctgctcgatgtcggcacgcccgagaccgcagcccgcgcgctcgatctctacaaccaactgtccgaggacggagcatccgaggaaccgccgtccgatggcttcctcctgtccatccagcccgagcatggcggctccaaactctggatgcgcgacgatgtcaccggcgatcccgaacggctgatccagttcgtcatacgctgcgccgccgaattccacctcaccggccgatggggctttcagtacgccaacacctgctcccggccgcgtctcgatggcttcggtggcggcgcgcatgtcctcgatctcgcgaccggcgaaactgtggcgtggatctataccaacggttggctcgccgaggtgatcgatggcggcgatggtgcctga

SEQ ID NO: 6282 - DNA, 4314 bp, BradyrhizobiumColbertium
atgaatgctcacacccttgcggcggcgctgccgaccgccgccgatcagccgaccgacgctgccgccatccatgccgcggcacttctcctccttcctcacatcgagcgcggcgagcgcatcgacgccgcggtcttgcgcaccgccatggagaccgccttcggcgcgtccgatactgccggcgcctgggactggaaggacgcctatgacgcctgcgaagccgcaaccgtcctcatgctccgcaaatacggaaaggcgcttttgcgcaaagccgggtctccggctgcggcggttcctctgttcggcaagatcgcgggacttctgcccacccacacgcgccgctccgaggaggcgcaggccttccagcaattctcgacgccgatcccgctcggcctggccgcgatcactgcggccgccatcacacccgccgatcgcgtgctcgaaccatcggccggcaccggcctgctcgccatcctcgccgagatcgccggcggcacgcttgtcctcaacgaactcgccgaaacccgggccgcactcatctcctccctctttccggccattcccgtgacccgcttcgacgcagcccagatcgacgatcatctcgacccggcgaccgtcccaacaatcgtggtgatgaacccgccattctcggtcctcgccaatgtcgaggggcgtgtcgccgacgcagcctatcgccatctcgcatccgcgctcgcgcggctcgccgatggcgggcgcctggtcgcgatcaccggcgcgaatttcggccccgacataccggcctggcgcgacgccttcgtccgcctgcaggagaggggccgcgtcgtgttcaccgccgccgtccatggctcagtctatgccaagcacggcacgaccgtcgaaacccggctgaccgtgatcgacaagatcccggccgacgagccatccgcatttccggcgtcccccggcaccgctcccgacatcgccacgctgatgacgtggatcgccgagcatgtgccgccgcgcctggctgtcgcgcctgctgttcaggtcatgccgaccggcgccacgccgcgcaccgttcgcggctatctcgcgcgcaccgcggcgacatcggcgacccgcgtgggcctcgccgatcccgagggcgtgccgctcgcctatgagcccgtcgactggcccccggccgagggcgcccgcctcagcgacgcgatctacgagcaatacggattgcagacgatccgtattcccggctctcaggcccatcccaccaagctcgtgcaatccgccgccatggcctcggtcgccccgcccaagccgagctatcggccgacgctgccagcgaccatcatggactcgctctcagactcccagctcgaaaccctgatcttcgcgggcgaagcccattccgattttctcgcaggttcctggaccatcgacgacactttcgatgtcgtggcggccgccgccgatgatgcaaacggcgtcgtccgcttccgccgcggcttcttcatcggcgacggcaccggcgtcggaaaggggcgcgagtcggccagcatcgtgctcgacaactggatgcagggccggcgcaaggcggtctggatctccaaatccgacaagctgattgaggatgcgcagcgcgactggtccgcactcggcatggagcgcctgctggtcacgccgctctcgcgcttcccgcggggcaagccgatcgctctgccggaaggcgtcctatttacaacctatgccacgctgcgttccgacgaccgcggcgagaaggtttcgcgggtcaagcagatcgtcgaatggttgggctccgatttcgacggagtgatcattttcgacgaggcgcacgcgatgcagaacgctggcggcggcaagggagaacggggcgatgtcacgccctcgcagcaagggcgcgcggggcttcgcctgcagcacgccttgcccaatgcccgcgtcgtctatgtctccgccaccggcgccaccacggtccagaaccttgcctacgcgcagcgcctcggtctgtggggtggcgacgattttcccttctcgacccgcgccgagtttgtcgaggcgatcgaggccggcggcgtcgcggcgatggaggtgcttgcccgcgaccttcgcgcgctcggcctctacaccgcccgatcgctgtcgttcgacggcgtcgaatatgagctggtcgagcacgagctgaccgccgagcagcggcgcatctacgatgcttatgccggcgccttcgccatcatccacaaccatctcgatgcggccatgcaggcggccaacatcaccggctcgaccgggacgttgaaccgccaggccaaatccgccgcgcgctccgccttcgaaagcgccaagcagcgtttcttcggtcatctgctaacatcgatgaagacgccgacgttgatccgctcgatcgcggcggacctggaggccgggcattccgcggtcatccagatcgtctcgaccggcgaggcgctgatggaacggcgcttggccgaagttccgaccgaggagtggaatgacattcgcgtcgacatcacgccccgcgaatatgtcctcgattatctcgcccattccttcccggtgcagctctacgagcccttcagcgacggcgagggcaatatgtcctcgcgtccggtctttcgcgacggccagccggtcgagagccgcgaggcggtcgcccgccgcaccgagctgatcgagaaactcgcgagccttccgccggtgccgggcgcgctcgaccagatcgtccagcatttcggcgcggacgtggtggccgaagtcaccggccgctcgcgtcgtatcgtgcgcaagggacagcgccttgtggtcgagacccgcgcggcgtccgccaatctcgccgagacccaggccttcatggacgacatgaagcgcgtgctcgtgttcagcgatgccggcggtacgggccgcagctaccatgcggagctgtcggcacggaacacgcggcttcgcgtccactatctgcttgagccgggctggaaagccgacgccgcgatccaaggcctcggccgcacccaccgcaccaaccaggcgcagccgccgctcttccgtccgatcgcgaccaatgtgaaggcggagaagcgcttcctatcgaccatcgcgcgccggctcgacacgctgggcgcgatcacgcgcggacagcgccagaccggcggccagggcctgttccgacccgaggacaatctggagagccactatgcgcgcgatgcgcttcgccagctctacatcctgatcgtccgcggcaagatcgaagggtgctcgctccagcggttcgaggacacgaccggcctgaagctgatggacgacaacggcatcaaggacgagctcccgccgatcacaacctttctcaaccgcctgctcgcgctcaccatcgacctgcaggacgtcctgttcgccgccttcgagcagcttctgaccgccaaggtcgagggcgcgatcgccgccggcatctacgacatcggactggagacgctgcgcgcggagagcttcgtcgtcaccgatcgccagaccatctacacccatcccggcaccggcgcggaaaccagcctgctgaccatccaacagcgcgagcgcaaccggccgatgaccgccgaggaggcgatggcttggctcgacgatccggtcgccaagttgctggtcaacgagcgctcccaccgcgccgcggttcagcttccagcgccttcgctgatgctcgacgacggggagatcgaacgccgcgtgcggctgatccggccgatggagcagcatcacgcctccatccgcatgatggacgaaagccattggatcgccgccagtcgcgccgagttcaccgccgcctggaacgccgagatcgcggaggtgccagcctattccgattccacgatccacatcgtcgctggcctgctgctgccgatctggaagcggctgcccaacgagtcgagccgtgtctatcggctccagaccgatgacggggaacggatcatcggccgccgcgtgtcgcccgcatgggtcgccaacgccacgacagtcggaacgacgaacctgtccgccgaccatgcctatgccgcgctcatcgagggcaagacaatcctcgatctcgccgaaggcctccaactccgtcgcgtgcgcgtcatgggcgccgatcgcatcgaactctccggcttcaccgacgcgatgcgcgagcgcctgcgcgcctttggcctcttcagcgagatcatctcgtggaagctccgcttcttcgtgcccgtcggcgcggacggcgcgaccatcatcggcaagctgatcggcacctacccgatccagcgcgtcggcgagcgggaggcagcgtga

SEQ ID NO: 6283 - DNA, 1038 bp, BradyrhizobiumColbertium
atggcccgtctcgacgcatccgatctcgcgcaacgtctcggccgacaggccgaggcggtgtgccgccattatctcagcaatggccaccgtcagggcaactactggcaggtgggcgacgcccgtaacactaagggccgctcgatgtacgtccggctcaaggactcgcccaaaggccccgccgggaaatggactgacgccgctaccggcgagcatggagacctcctcgacgtcatccgcgagagctgcggcctcatcgacttcaaggatgtcgccgacgaggctcggctcttcctcagcatgccaccaccagcgccggaaccctccgccttccagccgctggcgcccgcaccacatggatcgcccgaagccgcacggcgcctcatccgcatgtcgcagccgattgcgggcacaatcgtcgcggcgtatctccggcaacgcggcattacggatctccgtggagccggaaatctgtatttccacccgcactgctattatcgcccggacgagcatgcgccgaccgagacttggccggccatgatcgccgctgtcactgacctcgacggcatgatcaccggggcgcatcgcacctggctcgactcacgacgccacgacaaggcgccattcgaaaccccgcgccgggcgatgggcgatctcctcggcaacgcggtccgctttggcgctggtggcgaagtgatggcagccggcgaaggcatcgagacggtcctttcaatccgccaggtcgtgcccaacatgccgatggtggcggcgctctccgcggcacatctcgccgccatcctgttcccggacacgctgcggcggctctacatcctgcgcgatgacgatccggcaggcgatggtgcgcgtgacagcctgatcgaacgggcgaacgcggccgggatcgaggcgatcgtgatctctccacagctcggggacttcaacgaggatctccgcaccctcggcatcgcgacattgcgcagtcagactcgggtacagctcgggccgcaggacgtcgcacgcttcatggcgctggcggcatag

SEQ ID NO: 6284 - DNA, 981 bp, BradyrhizobiumColbertium
gtgtgcttcgtcgccatgaaggccgcgacggtcgcggtccatccgacggagcatccgatgcgcgatctcgacgactacgaaccgcaccacgaatcctcaccgactgaccacgtcctcaacgaattgcagctccacggctaccggcctttcgccgacgaacccgatcagcggcttctgccggacggcaacgcggtcgcgggcgcggtcgccgacatcttcgacgccctgatcgtgaccctggaggacacgcgcctcgaacccgacctcgacgatctcctctggtcgaccgtgaacgtctttcatcgcgccgccgaacggatcaaccgcgagctcgacgacaacgagcaggcccaaaagcgctcccaacgcgaacaggacggcagcgaggtgaagtcggtcgatctcgagcgcctgatcgccgagggcaagacacaggtcgaacgccagaccgccttcgaactgatgcgcgaccaggccgccgagcactacgaacgccaggtcggcaaagcctggctcccgcggtcaggatcgaaggtcaatcatcgcaacctcacctcggcgatgatcgacagccgcgacttcatcatggcgaagaagcgtgccgagcaggaagtgctcctgccgcctggaccgaagatcgccgtcaccggcgggctcgatttcgacaaccatcacctcatctgggccaagctcgaccaggttcacgagaagcaccccgacatggtgctgatccacggcaagtcgccgaagggtgccgagaagatcgcttctctctgggccaggaatcgcaatgtcccacagatcggctttgcacccgactggacgaagcacggccgggcagcacccttcaaacgcaatgacgagatgctgcaaatcctgccgaagggcgtgctgcacttccccggcaccggcatcaatgacaacctcgccgacaaagccaagaagctcggcatcccggtgtggaaattcggcggcgcgtaa

SEQ ID NO: 6285 - DNA, 405 bp, BradyrhizobiumColbertium
gtgaaggctgcagccgccgaatgggcggcggatcaaggattcgacaatcaagcccttcatgcgattgcaattgccatcgaactcctcctcaaatcctatctgcttaacgtcgcgaccgatgatgtttggaaccgcgcgaacatcgggcacgatctcgccaaggcactccattattcggctcaagccggcttggtgcctccttcacgcatcgagtggattatcagccacctccatccgcattttcagcgtggcgggtttcagcgcgagccgtcgaggaaatggccaccaggctttgcggatgacgcaggtgaggtcgcacggcagctcgcgcagacagtacggcttcaccaacgtcacggccacatcgactcggcttccagcccggagaagaccactccccgctga

SEQ ID NO: 6286 - DNA, 168 bp, BradyrhizobiumColbertium
atgtccttccccgacgcacacgccttcgccttcagcctcgccaccacgctgatggccgtcatcgtcatcttccgcgcgggcgacggcactctctcggtgacacccgcaaacgaatacgacggcgacgtctcggagatcgtccacgaggtcgatcccttcgcgccatga

SEQ ID NO: 6287 - DNA, 441 bp, BradyrhizobiumColbertium
atgattatcctcggcattgtcctatccttcgcagccatcggcatcttgtgctggttgctgttcacgctcgcggtgttcgcactgccattcttcgcgggcgtgaccgccggcacctgggcctatgacactggcgcgggctggctcggcgccatccttatcggcatgctcggcgccggcctgacgttgggcgtggggcagctcttgcttggaattgtccgcccgctctgggcacgcctgctgatcgcgctggcatttgtcgcacccgcggcgatcgccggcttccacgccacgcatggcatcgtgaaacacaccatgccgtcggagacctggcagctcgtgttctccgtcatcggtgcggtcgcggtcggcgtcaccgcgttcgcgcgcgtcgctgggatggcaagcaccggcccgtccagccagggcattgcaccagcctga

SEQ ID NO: 6288 - DNA, 324 bp, BradyrhizobiumColbertium
atggcgaccatcggcaccttcaagaagaccggctcgaacgagttcaccggcgaaatcgtaaccctcagcgtccaagccaagggcgtgcgcatcgtccccgacacccgcgccaccggcgagaacgcccccagccaccgggttctggtcggccgcgcggaaatcggcgccgcctggtccaagcgctccaacgagggccgcgactatctgggcctcaagctcgacgatccgagcttcaacgcccccatctacgccaacctcttcgacgacgaggacggcgacacccactcgctgatctggtcccgcccgacccgccgcggcgactga

SEQ ID NO: 6289 - DNA, 129 bp, BradyrhizobiumColbertium
gtgtacgagtcgacgcgcgatcaggtgcgaagggcgcttgaaacagccggtatcgtcctgctttccaccgacaagggcgaaggagtgctgctgctccatgagcgggacgaccggccgacgaggcgttag

SEQ ID NO: 6290 - DNA, 1242 bp, BradyrhizobiumColbertium
atgggagggcctccgtgggttcgttggggccgccgggaagcggcgggtaacgaaggccacgttggcgaagcagggccggcgagatgcagggcgaattcaggggggcctaaattcgcccaccaagagtcggatggagatcggctaaagttgccgccgatgacgaagcaacgtgcgatacccacccaccatcatcgcgcgggcatctcgaagcagggctttggtggcgtggcgggcggaagatgcctgccagtcgtcgcgaccgagagcgccgatccgaaatatgacctgcgcaatttcttgctgggtcgcgcccgcgcgatgaccgtcgaaggcctgcagcatccggcacagccgagcacgttgctgccgtgtcagtcgggtgtcgggcggtatggcgcggccatggagggcggagagcaagcgggcgaccgattggagccggtcgaagccttccaggccgagcgggatgaaggcgccaagagatttggcgggtcgtgtctcggacggatgaacaagcgctacgcgctgaccgtttccgagatcgagaaccagatgggtctcgctgccgacatcgacgcttacggcggcgtcgatcgtcggttggggatcagcgcttgcggacggaatatccggaggtgggccaagaacgatggcgcttgtgtcttcctggggaagccagatcacctgcgcttcgggaggtgcctgcatcgggtctacggggaaatcgcaacccccaccgctgcccgatcccgtcggtcagcgtgcgcagatcactttcgctgtcgccgagcgcttgaaaatccctgtcgtaggtttcgttgcggcgcagccattcccacgcgacgtcggacgcggtcatgtcggcgacgtgcgcatagcgttccgatgaacgccagccggaagcatctggtgtcatcgcgatcctccctagtctttgaatttgtgggagagtcaggattcccggctgggttgttcagtggaagtcagagggccggcaaagggtggtgccgaaacggcatcgcggcgatcactgtgcggagcggaccaagtctcgatagccgtgctcggtcatccactgcgcgcgggcgagatgcgtgtcatggacctggcggcaccgctgcggctcacgtgccgtatcgaggccaaagagaatctggacggcttcgcgccaatcagctccgtcgcgcgaggaatcgagcaggcgcagatagagaaccatatgctcgcggtcataggccgtga

SEQ ID NO: 6291 - DNA, 282 bp, BradyrhizobiumColbertium
atgcgacctgatctcgccgttctcccgccgcgctacctgcgcaccaaggaagccgccgaattcctcagcctatcggcccgcaccctcgaaaagcatcggacttacggaacgggtccggcctatcgcaagctcggcggtcgcgtcgtttatgcggtcgacgatcttgaggcctgggccgagcgcggcgccgtcacctccacctccgatccgcgcggcagcgtgcttccggccaagcgccatacgcctgcgccgccggcacatgccggacgatacgcgcgctga

SEQ ID NO: 6292 - DNA, 1161 bp, BradyrhizobiumColbertium
atggcggcgcgacaccagtccctctcggagcgcgggcagctcgatctgttccgtgcgctccccggcgagttcgcagcacgagacgcacaggatctcatggcctatccgtttttctccctctccaaatcgcaccgcgtcgcgccgatcgacttcgccgccggcaatgtgtcgatccgcgtcgaggccgtgcccgatcacggcatggcgaccatttgggacgccgacatcctgatctgggcggcgagccagatcgtcgaggcgcgtgacgccggcctgcgcacgtcgcgcctgatggtcgccacgccctatgaaattctcaaattcatcggccgcggcacgtccttacgcgactatcagcgcttgaaggccgcgctcgatcgtctgcaatccacgacggtctgcacctcgatccgccaatccgccgagggccggcgtcatcgcttctcgtggatcaacgagtggaaggagcgcaccaaccgcaacggcaagccggacgggatcgagatgatcgtcccggactggttttatcaggccgttctcgacgatgcgctcgtgctgacgatcgaccgggcctatttcgatctcacaggcgggctcgatcgctggctctatcgcctggtgcgcaagcacggcgggcgccagcgcaatggctggcgattcgactttcgccacctccaccagaaatccggcgcgttgtcaccgtacaaacgcttcgccttcgagctgcgcgacatcatccgtcgccagccgcttcccggctacacgctgttcctcgagatcgaggccggcggccgaacgttgctcgctttcgagcggacgccgccctgtggaaaagctgtgaaaggcttcgtgccatcgggaacccgaaagcgcgtgccatcaggaaccggcccctcgtgccaacgggaaccgaaacacggcctaacccacgacagcagaaccgaaaatcgcctcgctaacttagaatctaacagagaatctaactttgaagagcgcgcgcgagaggtggaaaacctcgtccggcaggccgcgaacgcgctaagcgccgctggcaagcggcgcaccagcagcgccgctcttaccaacgctggcgcggcgagaaacgggacctccggccctccgcagcttcccttcggtccacgcccgggaggccgccgatga

SEQ ID NO: 6293 - DNA, 639 bp, BradyrhizobiumColbertium
atgatcgtggccttcctcaaccagaagggcggcgtcggcaagacgacgctggcgctgcacctagccggcgaatgggccggtaggggaaagcgggtcacgctcgtcgatgcggacccccagggttcggcgctcgactggtcgcagcaacgcgcccgcgagcacgcgccgcgcctgttcggcgtcgtcggcctggcgcgcgacacgctccaccgtgaggcgcccgagctggcgcgcgatgtcgatcatgtggtgatcgacgggccgccgcgcgtcgccgggctgatgcgatccgcgctgctcgccgccgacctcgtgctgatccccgtgcagccgtcgccgctcgatggttgggcctcggccgagatgctggcgctcctgtcggaggcgcgcatctatcggccggagcttcgcgctcgcttcgtcctcaatcgctgcggcgcgcgcaccgtgatcgcccgcgagacggccgagacgctcgccgaccacgatccgccagtgctgcgcacggcgatcggacagcgcgtcatctacgccgacgccgcgcaatcgggccggctcgctttcgagatcgacgacgacggacccgccgcgcgcgagatcgcggcgctcgtcaccgagctcgaaaggatctcaccatga

SEQ ID NO: 6294 - DNA, 255 bp, BradyrhizobiumColbertium
atgagcgagcgatccgaacggcgcggctttgcggcacgtccgaccaatcaagaggcctggatcaaggccgcagatgccaccgcgccgcgcgcgccggacgatgaagccttcaccgcccgcatgacgatcgacgtcacgcccgccttacgtggacggatcaagatcgctgccttccggcgcggcgttaccgttgccgacatgctgcgcgagatgctcgcgcgcgaattcccacacatcgaaggagaccccacatga

SEQ ID NO: 6295 - DNA, 522 bp, BradyrhizobiumColbertium
atgaccggcgccgcggccccccgcgcgcgcggcggcccgacgccgaccgcacgccaccaagacaatctcacccatgtcgaactgacctgggttgagaagaagatcgagaactggatccgcttcggcacgcacgcccacgaacagattctcgatcgccgtcggcgtgtcctgtcttttcgccccggcgcggtcttcgccttcgtgcgctgggcctcgaatgacttcggaacgatcatctcgcgcatcgacgtcgtgcgctcggttgcgcgcggcgagacgtaccagacgctgcctttcgttcgtcctggcggcgaaatcctgctgaaggtcgagagctggcccagggtcgagcgcgtgctgcaggcgatcgacgccatcgagcgcatcggcatcgatcccgaagcggtttcgcccgatcattggcgtcacgtccacaaccggctcgctgctggacacgagccgcgcacctacacgctcgaccatcatcgcgcattcctgctgcgccgaaaggccgagtcgtga

SEQ ID NO: 6296 - DNA, 546 bp, BradyrhizobiumColbertium
gtgagccgcgccggacttctcctggcgacgacgctcgccgcgctcagcgtcggctatcccggcctcacgccgatgcccatcaagctgatctggaacgcatcggcgagcgcgcccatcgggttctattcgatcgacttcgacgggccgctcgacgttaccgatctcgttgcggtcgatgcgcccgagccgctcgcgacattcctcgccgagcgcggctacctgcccaagggcgtgccgctgatgaagcgcatcctcgccgtctccgggcagaccgtttgccgttcgaacctcactatcaccgtcgatggtgtggaggtcggtgcggcactggagcgcgatcgcgcaggccgcgatcttcccgtctggcaaggctgccgccgggtccagactggcgaagtcttcctcatgaactggcaggtccgcgacagcctcgacggccgctacttcggcctgatctcgaccgaccagatcatcggccgtgccgtcccactgtggaccgatgaagacggcaccggccgcttcgaatggcgtgcgccgacacgctga

SEQ ID NO: 6297 - DNA, 348 bp, BradyrhizobiumColbertium
atgccccagattggcgaattcacgcgcgacgagaccggcttcgtcgggcatctgacgacgctggttttgaaccaggacgtcataatcatcgcagccgaaccgaccgaggttgagaacgcaccgcagtatcgcgtgcatgtcttcgacggcatgaacaatgagccgggcgcggagatcggcgccggatggaaacgctccggagagaaggccggcgaatacgtcgcgctgctgatcgacgatccgacattcccgcacccgatccgcgccaacatgttccgcgacgacgatggcggctcggcctggtcgctgcattggtcgcgtccgcgcgatcgcggcgagaaggactga

SEQ ID NO: 6298 - DNA, 666 bp, BradyrhizobiumColbertium
atgccggcgatcacgatggcgcaggacttgggcgccgatcgaccgtcgccacgcgatccctatggcgatcatatcgccgaggcttcgcggcgcttcggcgttccgatcgcatggatcagggcggtgatgcgtgccgaaagtgcaggcgatccacgcgccctttcgccgaagggcgcgatgggcctgatgcagatcatgccgcccacttgggcaggcttgcgccttcgccaccgtctcggcgctgatccttatgatccgcatgacaacatcatcgccggcgccggctacatccgcgagctgttcgatcgctacggatcgcccggctggatcgcggcctacaatgccggtcctggtcgttacgaggactcgctgaagggccgggcgctgcccgcggaaacgcgcgcctatgtcgccatcgtcgcgccgtcggtgaccagcggcgatgcgacttggccgatcgtggccgccgcggccgatgcactcgcctggacacgcgcgccgctgttcatcgcgcaagctgagcgcatatcgatacccgttcccgtaccggccgagcgcgcttccgatgccgcgatgacgacatcgtccgtgcgcgatgtttccgccatcgagccgcagtcgggcgggctgtttgtcccgcgttcgggccaaaggaatgcgccatga

SEQ ID NO: 6299 - DNA, 1740 bp, BradyrhizobiumColbertium
atgaccggcgacagtgatttccgcatccggccgggccgcatccgctcgacccgtgcgcagcaggctcgtcccttcatcgcgcaggctctcgccgcggcgaagaaggccggggccggcgtctcacgctccggccggatcgtgtccggcaaccgctcgcgcttcgggcggggccagcgtgcgagcatccaggcgaaccggctgctcaccgcgcgaacgcgcggcgctgtcatcaaggcgcgcgtcgtgcgccagacatcgcgctcggcgccgctcgcgacccacctcaattatctgcgccgcgaaggcgtgacccgcgatggggagaaggcccatctcttcggtcccgggggcgacgacgccgatccgaaggcctttgcggaacggtgccaggacgaccgccaccatttccggttcatcgtctcgcccgacgatgcgcccgacatggccgacctgcggtccttcacccgcgatctcgtcacgcagatggaaaaggatctcgacacccgcctcgattgggtggcggtcgaccactggaacaccgagcatccccatgtccacctgatcgtgcgcggggtccgtgacgacgggcaggacctcgtcatctcacgcgactacatcaaggaaggaatgcgcgaccgcgcgcgtgacctcatcacgcaggaattagggccgcgcaccgacctcgacatccagcgcagcctgaaacgccaggtcgatgccgagcgcttcacgcagcttgaccgccagcttatccgcgatggccatgccacgggcgtcatcgagacggcgatcgatccgaacgtccggctcgacgaatttcatgcgctgaaggtcggacggctccgcaagctggaaacactcggcctcgccgagcaggtcggccccggtcaatgggcgatcgacacgaaggccgaggcgactctgcgtgaactcggcgagcgcggcgacatcatcaaacgcatgcaccgggctttgacggatcgcggcatcgaacgcggctcggcgggctatgtgctcgcggccgaaagcctcgatgcgcccgtgatcggccgattggtcgatcgcggtcttgatgacgagctgaagggctccgcctacgccgtggtcgacggcgtcgacggccgcacccatcacatcaagctgcccgatctcgaagccgccggtgacagcgcggcgggttcgatcgtcgagttgcgtgcgttcgatgatgcacagggacagcgccgggtcgcaatcgccgtccgctccgatctcgatatcgatcgtcaggtcacggcaaccggcgcgacttggctcgatcggcagaacatcgcgcgcgaacctgccgccctgtccgaggccggcttcggcgccgaggtacggcaggcgctggatcgacgcgcggatcatctggtcggacagggcttcggcgagcgacacggccagcgtgtcaccttcaatcgcgggctgatcgacacgctgcgccgtcgcgagctggaagcggccggcgaaaaactctccgccgaaacaggccagccgttcaatcgcgcgggaagcggcgagtatgttgccggcacctaccgccagcgtttggcactcgcctccggccgctttgccatgctggacgacggcctcggcttccaactcgtgccctggtcaccctctctggaaaagcacctcggcaagcatgtttccggcgtcgcccgcgatgatggcggcatcgactggagctttggccgcaaacgagggctcggcctctaa

SEQ ID NO: 6300 - DNA, 1989 bp, BradyrhizobiumColbertium
atgtccgccacgaagatcctatggggccagatcctcaccgttttcctgatcgtcctcgccaccacttggggcgcaacggaatgggtggcttggcgattggcgttccagccggagttgggcgcgccgtggttcacgctgttcggctttcctttctatctgccaccctccttcttctggtggtggtacggcttcgacgcctacgcacccgcgatcttcgtcgaaggcgctttcatcgcggcgtccggtggcttcatctcgatcgccgtcgccatcggcatgtcggtctggcgtgcacgcgaggccaagaaggtcgagacctatggctcggcgcgttgggccgagaagaaggaggtggagacggccggccttctcggtcccgatggtgtcgtgctgggacgctacgagcacgcttatctgcgccatgatgggcctgaacatgttctgtgcttcgcgcccacccgaagcggcaagggtgttggcctcgttgtgccctcgctgttgacctggccgggctcggcgattgttcacgacatcaagggcgagaactggcagctcaccgccggcttccgcgccaggcacggccgcgtgctgctctttgacccgaccaacacaaaatccgctgcctacaatcctctgctcgaggtgcgccgcggcgaatgggaggttcgcgacgtccagaacatcgccgacatcctggtcgacccagaagggtcgttggacaagcggaaccattgggaaaagacgagccatgcgctgctagtcggcgcgatcctccacgtcctctatgcggaaaaggacaagactctggccggcgtcgcggcgttcctctctgatccgaagcgaccaattgaatccaccctcgatgcgatgatgaagacggcgcatctcggcgacgccggaccgcatcccgtgatcgccagcgccgcacgcgagctcctcaacaaatccgacaacgaacgctcaggcgtgctctctaccgccatgtcgttcctgggactctatcgcgatcccgtcgtcgccgaagtgacgcggcgctgtgactggcggatctccgatatcgtgggcggaaaatacccggcaacactctatctcgtcgtgccaccatccgacatcaaccgcaccaaaccgcttatccgactgatcctcaatcaaatcggccgacgcctgaccgaggatctgcaagcaaagggcgaacgccatcgtctcctgctgatgttggacgagtttccggcgctggggaggctcgacttctttgagtcagcactggccttcatggccggctacggtctgaagagcttcctgatcgcgcaatccctaaaccagatcgaaaaggcctacggggcgaacaattcgatcctcgacaattgccatgtgcgcgtcagcttcgcgaccaacgacgagcgtaccgccaagcgcgtttcggacgccctcggcaccgccaccgagatgaaggccatgaagaactatgccggccaccggctgtccccctggcttggccatctgatggtttcgcgctcggaaacagctcggccactgctcacacctggcgaaatcatgcagctccctcccaccgacgagatcgtcatggcggcgggcacgccgccgattcgtgcgaagaaggcgcgctattacgaggatgctcggttcaaggaacgcctgctgccgccgcccgcgctcacaacgtcgcagcaaggacagcccgacgattggaccacgcaccagttgccagcccgaccacagattgccgaggccaccttgctagcgcagcccgccgatgaagatccaaccgagtcggaacgccgccagcaaccggaactcaatcgggtgaaccccgtcgagaagaaagtgccaatcgacaacccgttcgagatcgataccgatcgggacgagtctgacgacgatgccgtgcgcaccagccgtatgaaccggctcatgcagggcgtcgcgcgccaggtctcgctcgaccccggtgacggcatggagctgtga

SEQ ID NO: 6301 - DNA, 429 bp, BradyrhizobiumColbertium
gtgacgaaaccaccccgcaagcaacgcctctccgtctatctcgacccctctgtcatgaaccggctcgcagatcacgccgcgcgccgcgaccattcgcgatcgttggtcgcggaggcggcgatcgagtcattcctctcacccgatgccgccgaacgccaggaggccgtcatcacgaaacgcctcgaccagctcgaccgacgcatgtcgcggatggagcgcgatatcggaatatcggtcgagatgctcgcagtcttcgtgcgcttctgggtgaccaccacaccgagtttgccagaacctgctgcgcaggccgcgcgcgccaaagctggcgaacgctatgatcagtttgtcacagctctcggccgccgtctcgcgaagggcccgaagcttcatcaggagatttctgaggacgttgatggcgaggcagaatag

SEQ ID NO: 6302 - DNA, 351 bp, BradyrhizobiumColbertium
atgtcggtccgggctatgaagtttggcgcgatcgaatttctgaccaagccgtttagggaccaagacctacttgatgcgatctatctcggtctccagacttcgcaaatccgacgaaacgagaagacaatgacagctgatcttcgcgcgcggtacgattcgctttctgttcgcgagcgccaagttatggacatgatacttgatggaaaactcacaaagcaaattgctgcgaagtttgcactcagcgaaatcacggtgaaggtgtgtcgggcgcagatcatgcggaagatggaggcggcatccttgcttgaactcgggcggatgtccgagagattggaaagaataagggattga

SEQ ID NO: 6303 - DNA, 1020 bp, BradyrhizobiumColbertium
ttgctgatcggcatcctcactatcggcatcttcatcatcgacaccataaccccttacgagatatccgctgcgacgttttatgtgattgtcgttctattgtcggctcgcttcagccacacgcggggcatgggcacggtctctggaatatgcatcgcgttgacgatcgcgagctacatcctgacgccgagtggaagcttcggaaccggagtcgtcaacacctcgatcagcctgctggcgatcgcggcaacgacctatctcgctgtcaagatggagaccgctcgtgtggcggccgaacaggcgcagacccgccttgcgcacgtcgctcggatcacgactctcggcgagatcgctgcctcaatcgcccatgaggtcaatcagccgctcgccgcaatcgtgaccaacgccaatgcatgtacacgctggattcacggagatcccgcgaacctagaaaaagccgcgtcttcgatagatagcatcgtcagcgacgcaaaccgagcaagtgaaatcatcaagcgcgtccaagcgctgtctatgcgtgcagaaccaaagaggtcctggattgagatcaacgtcgtaatcagagaggtgctggggcttttgcaaagccgtttccgagaaagccgagtttccgtttatacgaacctgtcgagtgatctgcccatgatcttcggtgatcgtattcaacttcaacaggttgcactcaaccttctcgtgaacgcgatagatgcgatgggtacgctgcagagcagtgttcgtgagattcgaataaactccgctaaatcaagcgcgtccggcgtgatgatcacgatagaagatacgggaggcggtatcgatcctggcttcgtaaggcatcttttcgatgcctttcactccaccaagagcgatggcatgggaattggactttcaatatgccgatcaattattgaatctcacggcggtaatatttgggctgagccgaccaatccgcgcggcgctaccttttgttttactctgcctggcgacagggagaaaatactatga

SEQ ID NO: 6304 - DNA, 279 bp, BradyrhizobiumColbertium
atggcgcatgcggtggctgagaagcagaagctgctgaatagggtccgacgccttcgaggtcaggtcgatgcgattgaacgggccctcatcgcggatgagagttgcggcgacgtgatgcggatagtcacggccacgcgcggtgcgatcaacggaatcatggccgaagtcgtcaatgggcacattcaagcgcatatggtcgatgcgaaccgcacgcccacagaagctgaacgtaatgccgcgctcgaattagtcgacgttttgcacacctacatcaagtga

SEQ ID NO: 6305 - DNA, 216 bp, BradyrhizobiumColbertium
atggccgctcatctcaacatcgacacacgtcgggcgccaccggtggtcgcccatgatgatattcaattcgccggggtgtttcccggcttgaaattgggcgctcgcaacttggcgagaccaaagcttcttgcccattggcatcaggaatccgatggccggctgattgggggctggcaattggagacatccgccactctgaagaatcctgacgattga

SEQ ID NO: 6306 - DNA, 372 bp, BradyrhizobiumColbertium
atggtgcatcacgaactaactgcactgcattggcgaaagccaatcagcgttgtggtccacggcagcattgcaggcgtcggcatcatcgctgaggcgtgggcgcgtcgccatgggatcgctgtggtgcgttacccgccaaattgggagttttacggcaagaaggccgaagggctgcgctgcgatttcatgctgacagacagccgacccgactttgtcgtggctttcccaggggggcgccacaccgccgatctcgtccaacgggcaatcaacgtcgggctcgccgtgctcgccattccgcccaacacggctggagcttgcccagtcgcaaagcatccgccgcagcggggccagccaacaaccgcttcgctctga

SEQ ID NO: 6307 - DNA, 1767 bp, BradyrhizobiumColbertium
atgtccgatacctctgcgacatcgcttgaacaaatcgaattggcctcaagcgcgcccgctgtcctggatagcgcgcatattggcgacatccacggcgcgttcggcaccatccggcagcacgacaccggtgtacgaaagacttggcgggctaggctggcgaccttgatggcaatcgtcggcccgggactgattgtcatggtcggcgacaatgatgccggcgcttttggaacctatacgcaggcaggtcagaactacggcacctctctgctgtggacgttgatgctcttgatcccggtgatttacgtgaatcaggagatggtgtcacggctaggtgctgtgacgggcgttggccatgcacgactgatattcgaacgtttcggaaagttctggggtgccttcagccttatagacctagttcttctcaacggactaaccattgtaaccgagttcatcggcatcgtattcgcactccaatattttggtttgccaagagttccgggactgattgtcgcggcggtgctcatagtggccgccgtcagcaccggaagtttcaagcggtttgaacgcttcgcgatggttttggtctttggcagtctgttgctaatacctgtgctcctcgccatccatccaccaatcggtgagatcgcccatggactgctcgtgccgcaatggcccgctcactccgacatggcggcagtcatgctgcttgtcattggcatcgttggcacgaccgtcgcaccttggcagctctttttccaacaaagctatgttgtcgataagcggatcacgcccgccttcaacggctacgagaaagtcgatctttgcctcgggatcctcctggtagtaatcggcgccgttgccatgatggcgttctgtgccgcattgtttgccggacggccggaattcggcaatttcacggatacaggtgcggtgcttacggcgctggacaaatatgtgggtccatattcggcgacgatttttgcaatcgctcttttggatgcttgcctcatcggcgcagcagccgtctcgctctcgacgtcttatgcgatcgccgacgtcctcagggtgaggcactcattgcatcgcaaagtcacggatgccatcggattctacgttgcttacgggattctcatattcattgccgcaggccttgttgccttcgcaagtgatgcgctgctgggcctctttgtcagtgccgtgcaggctctcgctggcgtgctgctaccaagtgccacggtcttcctgctcctcctttgcaacgacaaggcggttgtcggcccctggtccaacggtcctaagctcaatgtattcaccggagcaataatctggtcccttgtgttgctctcgatcatcctcaccgtggcgaccgtcttcccagatgtggctgacagcacaattctgaaaatactgattggcggctctttgctggggctttgcgggttcgtcttttcgttcgcagcacgcaagcgtagttatgacgtgcccgctgccgcatatggcaacgatcaagatcaccgcttcgccaagatgacgatgctcgagcgccggaactggcgcatgccgccgcttaatcggctgcctgccctgcatatgacgttgatgacgaaggtctggatgggcgtgctacgcggctatcttctgattgctgtcgcgctgatcggcttcaaggtcttcgtcgccgcgaccggcgtcgaggtcagcatcccccagatcggcggaacgccaaccagcaacgacgctgctacaagcaataccggctcgaagtag

SEQ ID NO: 6308 - DNA, 126 bp, BradyrhizobiumColbertium
ttgttttgcgtctcctttgagaaaatctgccacggcttttttttgttcgatgaatctcaggcgctggcacgctatcctggcgtgcgcttcggcggccagatcaacatgtttggaagtgtcggataa

SEQ ID NO: 6309 - DNA, 1017 bp, BradyrhizobiumColbertium
atgacagcatcacaccacaattcggaaggcctcgcgcgcggcgcaaggatgctgcgcactgcgctcggtcctgcaatcgcgcgctatcttgatgacgccagcatcgtcgaggtgatgctcaatcccgatgggcgcctctggatcgaccgactctccgaaggactttccgataccggtgagcggctgtcaccagcggacggcgaacgtatcgttcgcttggttgcgcaccatgtcggagccgaggttcatgctggtgctcctcgggtatccgcagagttgcctgaaaccggcgagcggttcgaaggcctgctgccacccgtcgtcgctgcccccgcattcgcgatccgtaagcccgctgtcgcggtgttcacgctcgacgactacgtcgcggccggcatcatgtcagcgacgcaggccgagatactccgccggagtgtctcctcacgcgccaacatcctcgtcgccggcgggacatccaccggcaagacgacgctgacaaacgcgttgctcgccgaagttgcgaagaccgccgatcgcgtcgtcctcatcgaagacacccgcgaactgcaatgcgccgcgccgaacctcgtggcgatgcgaacaaaagatggcgttgcctcactttccgatctcgttcgctcttcgctgcgtctgcggcccgatcgcatacccgttggcgaagtgcgcggcgccgaagcgctcgaactgctcaaggcctggggcaccggccatcctggcggggtcggcaccatccacgccggcagcgcgatcggcgcactgcgccgcatggagcagctcattcaggaggcagtcgtcacggtcccgcgcgcattgatcgcggaaacgatcgacctcgttgccgtcctctccggtcgcgggtccgcgcggcgactctccgaactctcgcgcgtcgaaggcctcggtctcgacggcgactaccgcatcgcgccggccaccacggatggcgacggcagctcgagcttgttcgtcccagcacctgaaggagaaagcctgtga

SEQ ID NO: 6310 - DNA, 333 bp, BradyrhizobiumColbertium
gtgatccaacgcctgcggcgcgcgcgccatcatctcgtcttgaccgtttccatcgccactctgtcggcggtgatggcagcccccgctcacgcttccggttcgtcgatgccgtgggaacagcctctccaacagatcctgcagtcgattgaaggtcccgtggcgaaaatcatggcggtgatcatcatcatcgttaccggcctgacgctggccttcggcgatacctccggcggcttccgcaggttgatccagatcgtgtttggtctctcgattgccttcgccgcgtcgagcttcttcctgtcgttcttctcgttcggcggcggggcgctggtctga

SEQ ID NO: 6311 - DNA, 282 bp, BradyrhizobiumColbertium
atgacgggcgctgtcgatcagggcggcgacgtcccaggctataccgtccccgttcaccgggcactgaccgagccgatcctgctcggcggcgccccacgggctatcgccatcatgaacgggacgctcgctggcgcggtcggcctagggcttcgcctctggctggtggggatcgcgatctgggcgatcggccacgtcaccgcggtgtgggctgccaagcgcgatccgctcttcgtcgacgttgtgcgccgccatctgcgcgtccccgcacacctttcggtctga

SEQ ID NO: 6312 - DNA, 1500 bp, BradyrhizobiumColbertium
atgatgaaccttgccgaatatcgcaatcgcaacagccgcctggccgacttcctcccctgggtcgcgctggtgggctccggcatcgtcctcaacaaggacggcagctttcagcgcaccgcgcggtttcgcggccccgatctcgacagcgccgtacaggctgagctagtcgccatcgccggccgcctcaacaatgcgttccgtcgccttggatcaggctgggcaatcttcgtcgaggcgcagcggcaagcttcgaacctctatcccgacagccgctttcccgatcccgcctcggcgctggtcgacgccgagcgcaaagcggatttcgaggaagctggcgcacatttcgagtcgagctatttcctgaccttcacctatctgccgccggccgaggacgccgcgcgcgcggaatcctggctctatgaaggccgggaaaagtcgggcctcgaccccaacgaggtgatgaccgggttcgccgatcgcaccgatcgcatcctgcgcctggtcgaagccttcatgcccgaatgccgctggcttgatgacgcggagacgctcacctatctccacggctgcgtctcgaccaaacggcaccgtgtccgcgtccccgaaacgccgatctatctcgacgcgctgctcgccgaccagccgctcaccggcgggctcgagccgcgccttggcgcgtcgcatctgcgcatcctcaccgtcacaggctttccaacggcgacgacacctggcctgctcgacgagctgaaccgtctcgcatttccgtatcgttggtcgacgcgggcgatcctgctcgacaagaccgacgcgaccaagctgctgaccaagatccgccggcaatggttcgccaagcgcaagtcgatcgccgcgatcctcaaggaggtaatgaccaacgaggcgtccgtcctcgtggacaccgacgccgcgaacaaggccgccgatgccgacatggcgctccaggaactcggcgccgactatgccgggatggcctacgtcaccgcgacggtgacggtgtgggacgaggatccgcgcgctgccgacgagaagctgcgcctcgtcgagaaggtcattcagggccgcgacttcactgccatggccgagacgatcaacgcggtggacgcctggctcggatcattgcccggccacgtctatgcgaacgtccgccagccgccgatctccacgctcaatctcgcccacatgatcccgctgtcggcggtgtgggcggggccggaacgggacgagcattttgcagcgcccccactgctcttcggcaagaccgaaggctccaccccgttccggctttcgcttcacgtcggcgacgtcggccacacgctgatcgttggcccgaccggcgcgggcaagtcggtcctgctggcgctgatggcgctgcagttccgacgctatgctcgcgcccaagtcttcgccttcgacttcggcggctcgatccgcgcggcggcgctcggcatgggcggcgctcggcatgggcggcgattggcatga

SEQ ID NO: 6313 - DNA, 975 bp, BradyrhizobiumColbertium
atgggcggcgattggcatgacctcggcggcgatctcagtgacggcgcgaccgataacgtcagccttcaaccgctcgcccgcgttcacgacgtgcccgagcgcgcctgggcgggcgactggatcgtatcgatcctgacccgcgagggcgtggcgatcacgcccgaggtgaaggagcatatctggacggcgctgacctcgctggcatcggcgcccgtcgaggagcgcacgatcaccggcctggtcgtgctgctccagtcgaacgatctcaaacaggcgctcaggccctattgcgtcggcggtccctacggccggctgctcgacgctgaacgcgagtatcttggctcggcgttcgttcaagcgttcgagactgaggggctgatcggcaccggcgcggcgccggcggttctctcctatctcttccatcggatcgaagatcggctcgacggttcgccgactcttctcattatcgacgaaggctggctggcgctggacgatgacggtttcgccggccagctccgcgaatggctgaagacgctgcgcaagaagaacgccagcgtcatcttcgccacgcaatcgctcagcgacatcgacggctcggccatcgcgcctgccatcatcgaaagctgccagacccggcttctgctgccgaacgagcgcgcgatcgagccgcagatcacggcgatctatcggcgcttcggcctcaacgaccgccagatcgagatcatcgcgcgggcaatgcccaagcgcgactattactgccagtcgcggcgcggcaaccgcctcttcgagctcggtctgtccgatgtcgcgctcgctctgtgcgccgcgtcatcgaagaccgaccaggcggccattgcccgcatcgtcgccgaacacggccgcgacggcttcctcgccgcatggctcgatcaccgtgaggtcggttgggccgccgatctcatccccacgctcaccaacaaggagacgtcccaatga

SEQ ID NO: 6314 - DNA, 762 bp, BradyrhizobiumColbertium
atgaaactgcgcaattcccgcgcagcgcgttttgctgccgcgctgctgaccgctcccgtcgcgctcgcgcccatgctggcgacgcccgctcacgccatcatcgtattcgatccctcgaactatgcgcagaacgtgctcacggcggcgcgatcgcttcagcagatcaccaaccagatcacctcgcttcagaacgaagcgcaaatgctgatcaaccaggcacgcaaccttgcgagcctgccgttctcgtcgctgcaacagcttcagcagtccgtccagcgcacgcagcagcttctcaaccaggcgcagaatatcgcctacgacgtccagcagatcgaccggatgttccagcagaagtacgggaacgtctcgctgtccgcttcggatcagcaactcgtcaccgatgcccgctcgcgctggcagaacacggtcggcggcctgcaggacgcaatgcgggtgcaggcgggcgtcgtcggcaacatcgacaccaatcgcacgcagatgtcggcgctgatcggccagagccagggcgcgaccggcgcgctgcaggcgacgcaggccggcaaccaactccttgcgctccaggcgcagcaactcgcggatctcaccgccgtcgtggcggccaacggccgggcgcaggccttgcagtcggccgagcaggccgccgccgccgaacagggccgcgagcagcgccggcgtttcctgacgccgggctcgggctaccagcccggcaatgcccgcatgttcccgaacagcggcaactga

SEQ ID NO: 6315 - DNA, 402 bp, BradyrhizobiumColbertium
atggacggcaagaccctcgctcgcgtcggcgccatcgtcttcgtcgcggtcgccatcacggcgaccgcgatcgagatgaaccgcaaggacgtttcgacggacgtcctcgcgacgcagggccgtccggtcacaacatcggatcctctcgccgccgaattgcttcgttgttccgagatcggcgaggccggcacgcgcgatcccaattgcctgaaggcatgggcagagaaccggcgccgcttcctcggccagccggcccccgtttcatcaccatcgccggttgcgccgaccacgctgtttccaagcgcgcccgcgtcggccgctcccatccacaaagacagtgcgccagcggacgtgaccgggcctgcgatgcaggccgagcccgctcagccagaggttcgctga

SEQ ID NO: 6316 - DNA, 1356 bp, BradyrhizobiumColbertium
atgggcggcaccggtgtcatcgaccatttcctcgaggtcttcactcgctacatcgacggaggattcgggctgctcggcggcgaagtcggtttcatcgccaccaccttgatcgtcatcgacgtcacgctcgccgcgcttttctggtcatggggcgccgacgacgacatcatggcgaggctggtcaagaagacgctcttcgtcggtgtcttcgcctacctgatctccaactggaacaatctcgcccgcatcgtcttcgagagcttcgcgggcctcggcctgaaggcttcgggaacgggctttgccgtgagcgatctcatgcgccccggcaaggtggcgcagactggtctcgatgccggccggccgctgctcgactccatctccagcctgatgggctactggtcgttcttcgagaacttcatccagatcgcctgcatgtttttcgcctgggcgctggtgctgctggcgttcttcatcctggcgatccagctcttcgtcaccctgatcgagttcaagctgaccacgctcgccggcttcgtcctcattcccttcggcctgttcggcaaatcggcgttcatggccgagcgcgtgctcggcaacgtcatctcctccggcatcaaggtgctggtgctcgccgtcatcatcggcatcggctcgacgctgttctccgagttcacctcgggcttcaacggcgcaacgccatcgatcgacgatgccatggcgatcgtgcttgccgcgctgtcgctgcttggtctcggcatcttcggtcccggcatcgctaacggcctcatctccggtggcccgcagctcggcgccggcgcggccattggcactggtcttgccgccggcggcgttgtcgcagcaggcgcggccgctgccggcgccgtcgtgacaggcggcgctgcacttgctggcggcgctgccgccgccgcgcgtggcggtgcagccctcgccggtggcgcctccaccgcctacagcctcggcgcggccggccaggccggcgcatccggcgtcgcgtcgggtcttggcagtgttgccagcaccggcgcgaaggcggccgtctcaccgctgaagcgcgcagccggtcgtgccgccgacagcctgaagcagagctatcaggccggtggccaggccgcgacggagatcgccaccggcgcatccggtgctgcgacgaccgccaccgcggaggccgcatctcccggagctgcgtcttccaccagcgacgggccgccggcctgggcgaaacgcatgaagcgctcgcagcagatgtcccatggcgttcaggccgccgcccacgccgtgcgtagcggcgacagccatggcggcggctcctccgtcaacctctccgaaagcgactga

SEQ ID NO: 6317 - DNA, 684 bp, BradyrhizobiumColbertium
atgttcaagcgaccatccacccactacggcaaagcccctcagcccgagactccctatcagcgcgccgctcaggtctgggacgatcgcatcggctccgcccgcgtgcaggcccgtaactggcgctacatggccttcggatcattggccctcgcgggcggcctttcggccgcgctggtctggcagtccgccaacggctcgatcgtgccttgggtagtgcaggtcgaccggctcggccaggcgcaggcgatcgcgccggcgaccgccgactatcagccaaacgatccgcaaatcgccttctacctcgcgcgcttcatcgagcaggtccgctcgatcccgtccgacgccatcatcgtgcggcagaactggctgcgcgcctacgacttcacgacacagggtggcgcgctcgcgctgaacgattatgcgcgcgccaacgaccccttcaccaaggtcggcaagcagcagatcgcgatcgaagtgtcgtcggtgatccgcgcctcgccgtcgagcttccgcatcgcctggatcgagcgacgctatcaggacggctcactggcctccaccgaacgctggtccgcgatcctcaccgtcgtcgtgcagcccccacgcgacgccgacacgctgcggaagaacccactcggaatctacatcaacgccatcaactggtcgaaggagcttggacaatga

SEQ ID NO: 6318 - DNA, 978 bp, BradyrhizobiumColbertium
ttgccgggaatcttgctcgccggttcggcgctggcagggtgcgccactcacaccccgccgccggagatttcctacgacaatgcggtgccggctgtgcagacctccgatccgccagcgcccgtccgggtggtggagcttcccaaaccgctcccgctgcctggtcagttgaagcccatcggcaaggacggcaagcccgagccggaaccgtccgatcccgccgcgcgcgtcaaccaggccaatgccgcagcgcgcgtccagcccgtccgcaacggcttcatcaactcgatgcaggtctatcccttcgtcgatggcgcgctctatcaggtctacgcctcgccggggcagatcaccgacatcgcgcttcagcccggcgagcagctcgtcggctccggtcctgtcgccgctggcgacacagtgcgctggatcatcggcgataccgagagcggcgttggcgcggccaagcaggtccatatcctcgtgaagccaacgcgggccgagctgatgaccaatctcgtcatcaacaccgaccggcgcacctatcacatggagctgcgcgcgacgccatcgacctatatggcatcggtgtcttggcaatatccgcaggaccagctcatcgcgctgcgccgccagaacagccaagccgaggccgcgcagccggtgtcgggcggcatcgatctcgcccgtgtcaatttccgctacgaggtgaccggcgaccgcgcaccgtggcggccgctgcgcgccttcgatgacggcaagcaggtgttcatcgaattcccccgcggcatcggacagggcgagatgccgcccttgttcgtggtcggaccggagggcgacacctccgagctggtgaactatcgcgtgcgcggcaactacatgatcgtcgatcgactgttcgccgccgccgaactgcggttcggcgcgggcaagaaccagaagcgtgtccgcatctcccgcaccgacgggaggccggcatcgtga

SEQ ID NO: 6319 - DNA, 1257 bp, BradyrhizobiumColbertium
gtgagcgacgaacgcgatcccgaaaaggaggaaggccggacgcccggttcggcgccccagcctcagccgaccgacgacgacgctcggccgctgaccggcgagccggccgcgaccatgcggctgcgcgccgagccgccgcgtgtgacccgcctgtcccgcaaggtgctggccggtctgggtcttgcggcaagcctcggtgtcggtggggcgctgatctatgcgctccagactcgtcacagcggccagggtcaggagctttactctacggacaaccgctcgacaccggacggtctggctggattgccgaaggattattccggcgtcccgaagctcggcccgccgctgcccggcgacctcggtcgcccgatcctcaacgcgcagaacggtggcacagtgccgccgatcggcgcaccggcatcaggtccgacgggaccgagccccgaggaacagcgccgggcgcaggaactggaggcggctcggaccgcacggctgttcgcatccaccgagactcggcccgctacggctggagcttcgacacagccgactgcgaccgccacgccgtcggccgatctcgccagcctcggccttgcgccgcagccagcgacaccctccgcgcaggatcgtcagctcgcattcctcaatcagacgcccgacaagcgcactgtctcgccggatcgcgttgccgcgccagcgtcgaagaacgtcctgcaggccggcgccgtcatcgcggccgcgctcatcaccggcatccgctccgacctgccgggtcagatcaccgcacaggtgacggagaacatctatgacagcccgaccggcaagatcctgcttgtgccacagggcacgcgcgttatcggccagtatgacagtggcgtcggcttcggtcagaggcgcatacttctcgtctggaaccggctgatcttccccaatggccgctccatcgttctggagcgtcagcctggtgcggacgccgagggctatgcgggccttgaggatggcgtcgactatcactggggcgaactgttcaaggccgctgcactttccacgattctgagcatcggtgcggaggcgggctcgtctggccaggacagcgatattgtgcgggcgctgcgacagggtgcctccaatagcgtcagtcaaaccggccagcagatcgtccagcgccagctcaacatcgcaccgaccctcaccatccggccaggcttgcccgtccgcgtcatcgtcacccgcgatctcgttctcgaaccctacggaggctga

SEQ ID NO: 6320 - DNA, 960 bp, BradyrhizobiumColbertium
atgcttgaattccgccagatctggtattttcttgcggcggccgaatatggcagcttccgaaaggcggccttggccttgggaatacaggaatcggcgatcagccgtcgcgttcgcgatctcgaagacgaactcggcgcttccctatttcagaggcacaacggcggcgtctgcctgacgttggcaggacagcagtttgtgcgtcgagcacgcaaagcacttcaacagatcgactgcggcgcgaaggatgtggccgccataggtcgctccgagcgggggcatatcaaggtcggcatcttttcgtcgctcgcgtctggattcctgtccgatctgctgggagcctacggcaaggagcatgcaagtgtacgggtcgaattttttgacggcgatcctgcggatcacgttgcctcgatccggcgacttcaactcgatgtggcttttatcacgggaaccacacagtggtcggactgtgaaacagagcaactttggtccgagcgagtattcgccgtacttcccagcgatcatcctctctctgagaaatcggagcttggctggcgtgatcttgtggacgagagattcattgtaagtgacggtgcccctggatcggaaattcacgactatttggttcaacgcctcgccgatcttgggcgtcacccagaaatcgatacccaatacgtcgggagggacaatctcctgtcgcttgtggcgatcggccaaggcgtcacggtcatgagcgaggccgggacggcggctcagtttccgggaactgcctatcggcagcttgccggcgaggttctgccgttctgcgcggtgtggtcgccgcggaatgataacccggcctggcgccgcctcctcagtcttgcgcgttcaatgtcgcgctcggctgccgccacaatcattcagacggtttcggcagttcttttgacttcctcgctttcgcaaatccccgatccgtggctatga

SEQ ID NO: 6321 - DNA, 633 bp, BradyrhizobiumColbertium
atgaaaaatgaaccgacggcggattcgcggccgcagcccatcgtctatgtcatcgatgacgatcggtccgttcgcgccgcgctcgaagatttgctcgcatccgttgggctacaggtgcgctcgtatagctcggttgccgaatttctggaaagctccatgccggacgcgcccggctgcctgctgctcgatgtgagaatgcccggacaaagcgggatcgattttcatcggcaaatgcctgaatacggcattcatctgccgacgatattcatcacgggacatggggacatcacgatgggcgtgaacgccatcaagaatggcgccttcgagttcttgaccaagccgtttcgcgaccaagacctgctggatgctatccaacaagcgatcgaaaaagaccggcgaaggcgcgagagcgaagcgcgttcgctggatttgaatgcgcgttgggagacattgacgcccggcgaacgagacgttttcaagctcgttgtaaagggcctcctcaataaacaaatcgccgccgacctgaatgttagcgagatcacggtgaaggttcgccgtagccatctcatgcagaagatgcaggccaagacgattattgaccttgttagaatgtcggacagtttgagcgtttga

SEQ ID NO: 6322 - DNA, 1065 bp, BradyrhizobiumColbertium
atgctcaagatcgccaatgatatacgtcccggatcggcgctgacgttgatcgcgatgggcgttgcgatggccggcatttttatcgccgatacggtcacggactacgccatcgcagcggccgtattctacacagcggtcattctcgttgcgacacgcatcttgtctggcacggctgtagtggccctcgcttgcatttgtgtcgcgctgaccctgatcagttttttcttgacccactccggtgcgtatgaggtcggcatcgtcaataccgggattagtatcgttgcgatcggcgttacaacctatctcagtttaaggatggtggctgcgaaggccgaggcgctggaggcgcgcgatcggcttttgcgaattgcgcgggtcacgacgctcggtcaactgtcggcgtcgatcgcgcacgaagtcaaccagcccctggctgccgtcgtcgccagcggcggcgcgtgcacccgatggcttgcccaggagccgccaaatctcgacaaggcccgcctcgcgctcgaccgcatcgtcagcgatgccaaccgggcaagccaggtcatcgcgcgcattcgcgccctttcgaagggcgaggcgccgcgccgacaaccattcgacctcagggaagctgtcatggaaatcgcgaccttgtcgcgcggcgagatcgagcgtggcggcgtcgccttgcaactggacctgcatgacggcctacctcgcgtttttgccgatcgggtccagatccagcaggtcatcagcaatctcgtcctcaatgcgaccgaggcgatgtcggaccgcgcattgcccgagcgtcgtctgcgaattgccgcctcgcaggatggacgggatgcgatcgttctcgcggtggccgattccggcaccggtctggcgccgggagctcgtgagcacctctttgacgccttctggacgacgaaagagggaggcatgggtcttggccttaccatcagtcagacgatcgttgaagcgaatggcggacagatttccgcggctccagtccctggaggcgggaccgtatttgaggtgcgcctgccgcgccacatggaggcagcctga

SEQ ID NO: 6323 - DNA, 699 bp, BradyrhizobiumColbertium
atggattggcaaagccttggccacaccgcactcacgctcgggggcgcattccttcttggcggcttgatcggcttcgaacggcaatggcgccagcgcctggccgggctgcgaaccaataccctcgtcgcgctcggcgcggccatcttcgtcctctttgccgggctgttccccggcgaggcgagcccgacgcgcgttgcggcccagattgtttccggcatcggctttatgggcgccggcatcatcttcaaggaagggttgaatgtgcgcgggctcaacaccgccgcgacgctgtggtgctccgccgcgatcggcgcgctgtgtggggccggatttttctttcatgcattgattgcgacgacgttcgtcatcgccgtcaacgcagttctgcgcccgctcgtgcgcctcgttgagcgccagtcattcgccgcaagcccgttggacagcgcatatgcgatcagcatcatctgccatggagaggctgaggcgcatgttcgggcgcttcttcttcgcgatctcgccggtgcgctgcacatccgcgacctcgaaagcacgaatatcgaggacacaaaccgagtccaggtgagcgcgacagtgcgagccgacactcggcaggatcgccttttggaacagattatcggtcgtctcagtctggagccgctggtaacatctgctcggtggcggttcgagccaggcgagtga

SEQ ID NO: 6324 - DNA, 2160 bp, BradyrhizobiumColbertium
atgacttattttacgacccacggacttcccaatttcactatcaccaccggactgaaggttttcaggcgtcgtcgggttcttttttgccgactgatggtgatcgctttctacttgctggcgctcggtcttgtagcggttcttcaggtaaccaaagcgcacgcgcaagaacttcaaacgactcccggccatccggatgcggcacggctcaacactagtggaccgcaacccatcctggcgatgccaacgaaggcaccgggggcctcgcgtgacaataaggtggaatcgggcgggcccgactggtcgggcgtctattttggcggacacaccggtttcggggctggcagccttggcccgggaacgaaccccgtcttgaatcagtccgttggcctgccgcctacggtgacaggaatgatcggcggctttcagggaggctacaactttcaggccagcgatcgttgggtgctcggcgcggaagccgatgtcacttttgtgagcccgcccgatgagacgcgacggataccggctcccttcaacacatccctggatgtcgtggggacggtgcgtggcaggatcggctatgcttttggcccattcctcccctatgcaacgggaggcctcgcttggacacgaacgaacgtcgacatcaatggcgatgacggcagcgttttgtcaaaactggggcgctggcacgctgggtggacggcaggcgcaggtgtcgaaatggccttgggcggaccatggacggcacgcgtccagtacgactacctcgatctggcttcctcgacctatcgactcgatggtgccggactgcgcgatgtgtccgtccgcccccgaacccagaggttcacgcttggcctgaactaccgactgggcgatgtggcctcgacactcccaagaccaccggcaactgtcgaaatgtcgccggactggaatattcatggccagaccacattcatcgcccaaggctatcccgcgattcgttccccctacgcttccagcgccagcctgcccggtggtgggcaagttcgtgagacgtggaccgcggacgcatttcttggcgtgaggctttgggacggtggtgcgttctatttcaatcccgagctagcccaaggcttcgggctgaacgggacgctcggactcgcaggctttccaaatggagaagcgcaaaaaggcggcgctgaatttccgaaatttcggccacagcgctactatcttcagcagacattcggtcttggtggcgagcaggaggatgtcgcagacggccccctgcaactggcggggcgacgcgatatcgatcgcgtcactgtcacggttggtcgtttcgcggttggcgatttcttcgacgcgaatgcctatgccaaggatccgcgcgcggatttcatgaattgggcaatctggtcgtcgggggcctatgacttccccgccgaccttcccggcatgacgcgcggtgcggtcatcgagctgaatcgtaaggattgggctgtgcgagccggggccttccaagtgcccagggagccgaacagtgatgttttggtcttcaatgggggcggcggtggcgccgtcgagttcgaggaacggcacagcctgttcgggcagccgggtaaggttcggatcggcgctttcatcaaccgtggttacaccggcgcgtatcgcgacgctatcaacctcgcgcaagcgagccctcaaacagatatcaacgatgcgatgacggccctgcgccgcaatcagaataagtatggcttttatggaaatatcgaacaggctttgacagctgacctcgggcttttcgcccgtgcaagctggaacgacggccgcaccgaaatcctctccttcacggacatcgaccgcagcatttccggtggtttctccctaaagggttctgcatggggacggcctgcggacacgatcggagtcggtgctgcggtcaacggcctctcgagtgcacatcgtaacttcctcgccgccggaggcacggggttgctgatcggtgatgggagactgcgctacggccacgagtcgatcgtcgaggcgtattacgccttgcgggtcaacggctggagcaccgtcaccttcgactatcagtttgttgcaaaccccgcctacaacgccgaccgcggaccagcctcgattctgtcgcttcgcgcccacgccgaattctga

SEQ ID NO: 6325 - DNA, 117 bp, BradyrhizobiumColbertium
gtgctttggttccatgcaagcgatcgttttgcgcttgtgtggctcaccagcggcaacgccgcattcgcgatatcgccgctctgttcaaccgtgcgccgcaacgcagcaggaatctga

SEQ ID NO: 6326 - DNA, 2715 bp, BradyrhizobiumColbertium
atgaatgcccccatcctcaaggcggctctcaagccgcgcggaaaagacgaacgcaagctgtcgatgaaggcggtccgtgaagcccagaatgggttggatgacaccttcgaaaacgtcaaaggcgaccgcaacggcctgattgcccgagatgcgatcgaacggctggcaaaagacggccccaatgaggttgcgcaagagcgacgcctgccagcggttgttcagttttttggcgctttcaagaatccgttcattgcagtgctgctgatcctggctgggatcagcgctgtaacggacatctggcttcggcttcaacatggcgaggatgcggatccgacaaaagtcaccatcatcatcgtgatggtgcttgccagcgccttgatgcgcttcgttcaggagtaccgatcgagcgctgcggccgaagctctgaaggcgatggtccgcacgacggcgacggttcttcgtcgaggatcggcaacgtcaaatcccgaagcattcgaaatcccgatgcgagagatcgtcgccggcgacatcgtgcgtctttcagcaggggatatgatcccggcagacgtgaggctgatcgaatcccgcgatctgtttgtgagccaggcagtgctcaccggtgaggccatccctgttgagaagtatgacacgctcgggtctgtcgccgagaagtccgcggcgagcgtagcgtccagcgaaatgaacgcgctcgacatgcccaacgtctgcttcatgggcaccaacgtcgtgagcggcacggcgaccgcgcttgtcgttgccacgggtgctcgcacctatttcggatcgttagccaaggcgatcgtcggatcgcgcgctcaaacggcgttcgatcgcggcatcaacagtgtgagctggctgctcatccgcttcatgctcgtcatggttcctgtcgtctttgtcatcaacggcctgaccaaaggcgactgggtggaagcgctgttgttcggccttgccgtcgccgtcggacttacccccgaaatgctgccgatgatcgtttcctcgaacctcgcgaagggcgccgtagcgatggcgcggcgcaaagtcgtcgtgaagcgactcaacgccattcagaacttcggcgcgatggatgttctctgcacggacaagaccggcacgctgactcaggacaagatcattctggagcaccacgtcgacgttaccgggcaacccaacgctgacgttctccggttgggctggttgaacagctaccaccagagcggcgtgaagaacctgatggatcaggccgtcgtgcgattcgccggggcggagccagccatcacgaacacggccgcgagctaccgaaaagtcgatgaacttccgttcgacttcgtgcgccgccgactctcagtggtcgtcgagggcgaggacggagatcacttgctcatctgcaagggcgcggttgaggagatgctgtcgatctctacgcacgtcagaagaggcaaagatctgatccgccttggtgacgttgagcgcaagaatctggctgcgatggctcgggcgtacaacgaggacggattccgtgtgctggtcgtcgccacccgagggtttgtggcgtccgaggccaagacgcattatgccatcgcggacgaagccgatctcacgattcaggggttccttacttttctcgacccgccaaaggagacggctggaccagcaatcgctgcgctcgcggagcatggcgtcaaggtcaaggttcttacgggcgacaatgcggtcgtgagtgccaagatctgccgtgaagtaggacttgaaccgggccaagccgtactcgggcgcgacatagaaaaattggacgacaccgcgcttcgcgttttggtcgaggagcggacgatcttcgcgaagctcactccgctccagaagtcgcgtgtattgcaggcgcttcaggctaacggtcataccgtcggatttctcggtgacggcatcaatgacgccccggcgctgcgcgatgccgatgtcggcatttccgtcgatagcggcgccgatattgcgaaggagtcggccgatatcatcctgctcgagaagagcctgatggttcttgaggagggtgtgctgaaggggcgcgaaaccttcggcaacatcatgaaatacctcaacatgaccgccagctcgaacttcggaaacgtgttttcagtgctggtggcgagcgcattcattccgttcctgccgatgctgtcgatccatttgctcgtgcaaaacctgatgtacgacatttcccaattggcgctgccttgggatcacatggacaaggagtttctcagcaaaccgcggaagtgggatgccaagaatatcggtcgtttcatgatctggatcgggccgacgtcctcgatcttcgacatcacgacgttcgctctgatgtggttcgtctttgccgccaatagcccggagcatcaatcgctctttcagtcgggctggttcatcgagggcctgctttctcaaacgctcgtggtccatatgctgcgtacccagaagattcccttcgtcaacagcacagcggctttgccggtcttgctgatgtcgagcgtcatctgcgtactggggatctatttgccgttctctccgctgggagcagccatcggattgcagcccctgcctatcgcctacttcccgtggctggccggaacgctgctctgctactgcctcgtcgctcaactgatgaagaccgtctacatccgccggttcggacaatggttctga

SEQ ID NO: 6327 - DNA, 696 bp, BradyrhizobiumColbertium
atgcgagcccttcataaagagaaccatctgatcgaacgaataggttggcttcgcgcagcggtgctaggcgccaatgacgggctgatttcaacatcgagtctgatcgtcggtgttgccgccgcgaccgccgcttcccacgaaattctggttgctggcgtagcggggctcgtcgccggagcaatgtcgatggctgcaggcgaatatgtgtcggtcagttcccaggccgatacggaagaagccgacatggcgcgtgagcgccgcgaacttgccacgcaacctgaagcggagctggccgaactcgccgcgatctacgagcagcgtggtgtaacgcccgaactggcgcgacaggtcgccgagcagatgatggcaaaggacgccttcggggcccatgcgcgggatgaactcggactgaccagtcatgtgatggcgaagccagttcaagcggctttcacttcggcggtcaccttcgcatctggcgcgactttgccgctggccgtcgctctcctgtcgccggcctggaccgccacctggaccgtctccattgcctgcctcatcggacttggcgttctcggagcgatcggcgctcgcgctggcggcgccagcatatggaaacccactcttcgggtcgtgttttggggagcagtcgccatggcctcaactgcgaccattggtgccctcatcggtcgagccgtctag

SEQ ID NO: 6328 - DNA, 3231 bp, BradyrhizobiumColbertium
atgacgcggcggattctggaatggacaaccggtcgaccagccacggtgatgatcatcgctttgctgatcgctggtcttggaatctggtctttcgtgaatctgcaaatcgatgtcattcccgacatcacaggcgtgcaggtgcagatcaacacgactgttcctgccctggcgccagaggaaatcgagcgtcttgtgacgctgcccatcgagcgcagcatgggtggtcagccgggcctgcgggaaatgcgatcgctcaccaagaccggactgtcacaggtcacgctcatctatcaggacggcacggaccagcttcgcgcacgccaattcgtcaacgagcggctttccgcagtgcgcgacatgctgccagccggatcatcgccgcgcctcgctccgatcaccaccgggcttggcgaaatctggtactacacactcgaatgggcgcaaccgccgtccgatttggacgagcggcaacaactgatggagttgttcgaggctcaggaatatatcgtgcgcccgatgctgcgcgcgatcgagggggtcgccgacgtcaattccaacggcggcctcgaacgtcagtttgtcatcgagcctgatctgaagaagctcacgacagcgggcatcacgccgagcgagcttgcccaggctgttggcgccaacgtcgccaatgccggcggcgggaccatcaccaagaacggccaacgcttcaccgtccgaaccgaagcgcgtgtcacgacggcggagatgatccgcgcattacccgtgaaattcgcaggtggcgtgcggccgctgactgtagcggatctggcgaccgtgaccatcggccatgctccacgcgatggcgccgcgaccaccaacggcaaggaaaccgtgctcggcacagtgatgatgctggtcgggcagaacagccgggacgttgcccggcgcgtcgatgcgcaattgccgaacctgcgcgccgcgctgcccaaaggcatgatccttcaggttcagtacgatcgttcagaattggtggatcgcaccatcgcgacggtcgagcgcaaccttggcgagggagcgttgctggtcgccgtcgtattgctgatcgtggtcggcaactggcgcgcggcatttatcgtcgcgtcggtcatcccgctggcctttctcatgatgatctcgggcatgcatgcgctcggtatatcgggcaatctgatgagcctcggcgcgctcgacttcggcctggtcgtagatggcgcgatcgtcgtcgtggaaaacacattgcgtctgatgggcgaggcacagcgcctcaaggggcgcgagctgacggccgatgaacgccgtcgcatcgtcatcaacgctgcggggggcgtggcgcggcccgtgttcttcggcatggccatcatcgcgctggtttatgtgccggtactcagcctgggcggcgtcgaggggaagctgtttcagccgatggcgcaagccgtgatgctggcgctggcagcggcgctgatcgttacctttacgctagtgccggcgctgtgcgcccggctgctacgaggcgagaaggtgcgtcagccgagcgtcagtgaaaaggaagattctctcccggagataaccgccgacaaccacatcacgcataacggtggcttcgccggcctcgtgatccggggctaccgtcccgtcctggacttcgccctccgtcatcccgctgcccttctcgttccatcggcagtcctgttggccgtggcattgaggatattcctgacccttggctcgcagtttacgccacgcctcgatgagggctccatcacggcgatggtctacaagcccgtggggatgtcgctcgaccgtagccttgagatcgagcagcaaaccgagcgtgaaattttgcgtcgctttccgcaagtgacccgaaccttctcccgcatcggcaccagcgcggttgcgaccgacccgatgccgccgaatgagaacgacctctacatcttctacaagccgctcgaccaatggccgcaaggtccggacatgccgcgcaacaagagcgagctggttgcggcgatcgaaaaggctgccactgcgctggcgccggagcagtcattccttttcgcgcagcctatcgagatgcgcttcaacgaaatgttggagggcacgcgggcggatctgtcggtcaagatattcggagacgactacgacgtgcttgagcggctcgccgcgcaggcgcgagaggaattgcaaggcgtgcccggcaccgccaatgccgcattcgaagcggccagccgcacccacagtgtggtggtcgagatcaatcacgacgcgatggtgcggttggggctgggaaccgccgaggtcaaccgtgccattgcgtcagcgatcggtggggacgaggtcggcttcatcgcggacggagagcatcgacacgcgatcgtcgttcgtatgcccgagtccttacgcgcggacacaaaatcgatcctctcccttccattgcgcgtcggcgcgtccggccttgtgccgctggaccgcgttgcaagtctgcgcgagatgagaacggtcgaaccgatcctgcacgacaatggtaagcgccgcgccgccttgatggtcaatctcaacaccagcgacatcgaaggttatgtgaccgcagcgcgtgcacgcctcgacggcaagcttgcgctgcctgaatcctatcgcatcgagttcggaggccagttccgtcagctagaagcggcccgagcccgtctgatgatcgtcgtgccggcggcgctgctgatgatcttcttgctcgtttattcggcgttggggagcgtccgtcatgccgccgtcgtctataccggtattccgtttgcgatcaccggtggcgtgctggcactctggctacgtgacatgccattctcgatcaccgccgcgatcggctttatcgcggtctccggcatcgcgatgctgaatggtctcgttctgatcgatcatatcaatgcgttgcggcggaagctgcctgttatcgaggcagtccggcaagccgccacggatcggctccgtccggtattgtcgaccgccatggtcgcgggaatcggcttcgtaccgatggcgatttcacagggcgcgggagcggaggtgcaacgaccgctcgccactgtcgtcatcggcggcgtcctgtcgtccaccgttctgacgctgctgctgttgccggcgatctaccgatggatggagcgccgctccgcagccgtcgtcgaacgagagaaacagccgttggaagtggaggtttcagcatga

SEQ ID NO: 6329 - DNA, 1275 bp, BradyrhizobiumColbertium
atgttaaaattgctcctgataatcgttcgcatatcaacaattatcttggtgaccccagccttcgctcagcaggccgccgtgctgtcgattgatgcacttgccaattccgtcgtggcaagtaaccccgaacgacgcttttatttccagcagatcgggcttgcaggtgttgagcgcgacgcggctgatcgcctgccggaccctgaagctgcattcgagttaggcgaacgccggatggccgacggcctgacaggtgcaccgaaaggcgccgggccgacatatggcttgtcgattatgcagccgctcgactttgccggacgcggggcgctccgtcgcgccatcgccgagcatcagatcgcgctggcgcggctcggtcttgcgcaattcgacgcaacgctcgcaagccgggcacgctctttgggatatgccttgttcgcggccgagcggaaagccgccgcggcacgcgacgttgccgcgcggatgcgcgagcttgcacgcgttgtggagcagcgggatccggcgggcatcgccaccacgctggacacggccattctggatgcgggtgccatcacggcggagcgaaatgccgcgatggctgattccgagaccagcacgatcgtctacgaactgaatcaacttcgcggcgcgccgctcaaagcgcggctccgcattgctccgcccgatatcacgctgcccggccttccgtcggtcgagcgcatggcgcaacaagctggcatcaacaatttcgagattcagtcgctgcgcgcgcaattgcagcagcaagggttgcgcgttgacctcgcacaagcagcgcgtgtgccgaacgtctcagtcggtccctacttcaatcgcgcgaagtcagacagccgcgagaccaatttcggcatacggctgacgacgacgttgccgctttggaatagccaggctgctggcctcgcacaggagttgagccgtcaatcccagggcgatgcggccctgctcgccgccaaccgacggatcgcgaggcaggtttacgaacaggcagcctactacgaggcgaagcgtcgagcccttgcgggctggccagccggggccaccgagaaatttgcggccgcagctaccgccgccgccgatagttatcgccagggagcgatcccgatcgcaacttacgtcgagatgcagcgccagtatctggacgcgctgtcggctctgctcgacacgcgacgtgaggctatggaagcgatgcttcaacttcgggcgctcaatggcggccgcagcttcgacggcgtgtcccgatga

SEQ ID NO: 6330 - DNA, 141 bp, BradyrhizobiumColbertium
ttgcagcgcgaaggaaagggcgtgctcaccatcttccacatgctcaacgacaaagccaaagctggccaacccttccttcaggcgggcgccaatgtcctgatcgtcttcgacaagaagaatgcgaatggtcatgtctcctga

SEQ ID NO: 6331 - DNA, 1551 bp, BradyrhizobiumColbertium
atgtgggtcgtttcaactcgatgggctgcgaatatcttgaataatgatcagattaaacctggcctatcgatcgatgggcgatactcgctggtcaggcaattaggtctagggttgtctggggcaacttggcttgcgagagataccctggcaagctctgatgtcgtagttaaattttttcccaagcgcacctccgctcaaggcgactaccagcgccacttgatcgcactgcatagtctcctgtctggcatccccttagcgagatgggcggctccgatagctgtaggagaacttgaccaatttgattatcagatactgccattttttaatgattacaatagcttagctgatattataaggaacggtacggaggggctacgaacaaacttccattttattgcggaagttgccgaagctctggccgagttgcatgccgcgcaggtcgttcatgccgatctcaagccttcaaatatcctcgttcgatcagatcatgaagaggtccgccttatcgacttcgggatgatccgtagacttgataatgctgtggagcttgtttcgacgtggcggtacttgcatcccgtgtttagagagggagcttcagcccacagcgagcgggttcataccgatcgcatcaccgttagtcgagggatgttggctggcacgcctgttgatacctacgtcgatgtttatgctttggggattatctccctcgaattgctcaccagccagacaagttacgatcggcctctaaccgatcgttccgtttcggatctcatcgcaaagcataatgaggcattcacgcgtcttccaggcggtctgaaggcgcgcatagcaaacttcgtagctcaactgctatccgttagccccgatcgcgaagttattgaagctcgtactgctgcttcaatagcgagatcaattttatcagatataccatctgatgtatcgtttacgacaattgagcaacggcagcttcgcgcaaaacacgatcaggatgctggcacagcaacggcggtggttgcactacgagatattcgagccaatctcgaacaggaaacgctagtattatttgcagagggaaatcggcaggtttccatttccgctgcagagcccgaggcagcaatcctcgatcaggtttcggaggtgtttacaagcgctcgcgaaagagtgaagtcggcttggcgcattgggatggcaatgacagtcatctgtttctcgttgatcatattgatgatcgtaattgcggtggttatgtcgatcacaacgggcagcttcgcgtggggcggaatatttggctcgctgggagtgtcgtccgtgatcggaactcttatctggcgaccttatgataggttgtttcgtgcgacgatattcgctcagcagattgaggttatccatattcgcgtgatcgctggcctgcgaagcattgatcgtggagaacagcttcgcgtatgcgaagaagcgattgcgtcattaagtgacgtattcaaggagcacactgtcggagataagagcctcgctacagcgcgcaggaaaccggggcggaaaaagctcacatag

SEQ ID NO: 6332 - DNA, 519 bp, BradyrhizobiumColbertium
gtgaataagctaaggagcgaagcccaccgcctccccgatctcctccgccccaacctccgcctcgtcttcgtcggcaccgccgcctcgacgcgctcggcggagctcgggcactactacgcccatcccggcaaccgcttctggcgtgcgctccacgaggccggcatcacgccgcggcgctatcagccaagcgagttcgcttcgctgatcaaactcgggattggcttcaccgatctctccaagaccggcgccgggatggatcaccagatcgcgccggagacgatcgacatagccggcttcagggcgaagatggagaagcaccagccgcgcgcgattgcgttcacgagcaagaaggcggcgagcttgttttacggccggccgtcggcagcgattgcgctggggcggcagacgcgcgatgcgagcctgccggagatcttcgtgctgccctcgccgtcgggcgcggcgtccgggagctggacgctggagccttggcgggagcttgcggcgtggctttgttcatag

SEQ ID NO: 6333 - DNA, 561 bp, BradyrhizobiumColbertium
atgggcgagcagcctgtcgagacctgcggcatcgtgaaggccctgctcgcgcgccgtgcgaaacgtccgccacaggccggcgaagatggcgagattgatggctgcgattacgagcaggaacagcgccgacaccgatgtcccgatcaggccgccgatctccttgagcaggctgtcgccgccaaggctgacgacgccgaatgccagcagcatggtcgcgacgacgacgacggtggaatggccgagggcgaaatagaggccgacgctgcgcggcgtctcacctgcctgcatcagcttgcgcacgacgttgtcgatggcggcgatgtgatcggcatcgacggcgtggcgaaggccgaacacccaggccagcagcgcggtcgccatgatggtcggccggtcgccgaacgccgcgaaggcccaggcccatgcagcgacgttggcggcgataagcccgccgaacagcaacgccattccgggctcgaccgcccgcaaagacaatttcgtcacgccaaacattccgtccgttacacgccccgtcccgccatcagtatgatcttttcatag

SEQ ID NO: 6334 - DNA, 1074 bp, BradyrhizobiumColbertium
gtggccaacctcgccgacaggggtcgtatgatacgccttgcaagcctgaaacgcctgggcttctttacgcggctgctcgacgaggctccggccgccgagcgatatcgcttcgcggccgagcagatcgtgcacgccgaaagagcgggcctggattccgcgtggatcgcgcagcatcacttccacgagcaggagggtggcctgccgtcgcctttcgcgtttctcggttacgccgccgcccagacctcgcgtatccgcctcggcaccggcatcgtcactctgccgctggagaatgcggtcagggttgcagaggacgccgcggtgctcgatctcctctgcaacgggcgcttcgaactcggcgtcggcaccggcggcaacccgtccgcctttgccgccttcggcctcgatagcgcccaacgcaacgagatctttgcgcgcaatctcgagatcgtccgcacggccttgctaggcaagccgctcgccggtggcgatacgctctatccgcagcggccgcaattggacaagcgcatctggcaggcgacattctcggtcgcgggcggcgcccgcgccggcaaggccggcgatggcctcatgctgtcgcggacgcagccgcgatccaaggaggcgcccaaggccacgctcgccgagatccagaacccgatcatcgatgcctatctcggggcgctgccacacggctgcgagccgcgcatcatggcatcgcgcagcgtcttcgtggccgacgaccatggcgaggcgatgcgcttcgcagagatcggactgcgccgcgcgttgccgcagttcctcaagggcggccacgccaggccgggcgagaccctgcaggaaatgatcgcggcgtttgatacccatgtcggtaccgccgacgaggtcatcgcttcgctccgctcggatgccacgctggagcgggtgacggatctggtgttccaggcgcattcggtcgatgcgccgcatccttacgtgctgcgctcgatcgacctcgtggcagaaaaggtcgcgccggcgctgggctggaccgggacggcggcatccgacggggcgctggcgggctcgccgggatga

SEQ ID NO: 6335 - DNA, 225 bp, BradyrhizobiumColbertium
atgacctccaccctcgaagcaacgtcgtcaccggctgtgtgctcgccagttcagcacgtcgggctcggcggagtcaaagaggtgcggcgggcccgagccgccgtagccggattgcgcggcgccggcccgatcccgcgggcagccttgcgccatggccgcttgcctggaactgcggcaatcgacatcatcgggacgtggccaacctcgccgacaggggtcgtatga

SEQ ID NO: 6336 - DNA, 1788 bp, BradyrhizobiumColbertium
atgaacgagaacgaaatccgcaaatgcatcgcagaggtaaagcaaggcacgctgtcgcggcgctctttcattaagacactggccgcgctcggaatcgccgcgccggtcgcgagccagatcctcgcctggcacgacgtcgccatggcggacgccacgcttgcctacaagccgaccaaggctggcggcggcggcacgctcaaaatcctgctctggcaggcgcccaccctgctcaatccccatttcgcgctcggcaccaaggaccagatcgccgcgcgcatcttcttcgagccgctcgccggctgggacaaggagggcaacctcattccctgccttgccgccgaggctccgaccaaggcgaacggcggccttgctgcggacggcatgagcgtggtgtggaagctcaagcagggcgtcaagtggcatgacggcaagccgttcaccgccgacgatgtcgtcttcacctggcagtatgccgccgacctcgccaccgcggcatacacgacgggctcctacaaggacatcaaggtcgagaagatcgacgaccataccgtgaaggtgaacttcagggccccgacgccgttctgggccgatccgttcgtcggctcggtcgggatggtcctgccgaagcatcatttcggcgactatgtcggcgccaagtcgcgcgaagcgccaggcaatctgaagccggtcggcaccggcccgtacaagttcgtcgagttcaagccgggcgacatgatccgtgccgagcgcaatcccgactatcacatcaagaaccagccgcatttcgacacgctcgaggtcaagggcggcggtgatgctgtatcggcggcacgtgccgtgctgcagactggcgaatacgactttgcctggaacatgcaggtggaggaggaggtgctcaagcgcatggaggccggcggcaagggcaagctcgacatcacgccgtccggcaatgtcgagttcatcatcctcaacacgacggacccgtggaccgaggtcgacggcgagcgctccagcgtcaagaccaagcacccgaccctgtccgatcctgccgtgcgccgcgcgatcaacctcctgatcgaccgcgactcgatccagaagttcatctatgggcgcggcgccatagccaccgcgagcttcgtcaacgcgcccaagcagttcaagtcgcccaagctgaaatacgagttcgatatcgacaaggccaacaagatcctcgacgaggccggctggaccaggggcgcggacggcatccgagagaaggacggcaagaagctcaaatacgtgttccagacctcgaccaacgcgccgcggcagaagacgcaggctatcatcaagcaggcctgccagaaggccggcatcgagatcgagatcaaggcggtcaccgcctcggtgttcttctcctccgacgtcggcaatcccgacacatattcgaaattctatgccgatatggagatgtacaacacgacgcagccgcagcccgatccggaacgcctactgaaccagtgcgtgtcctgggagatcgccaccaaggacaacaagtggctcggccgcaacaactcgcgctattccgaccccgaggccgacaaggcctacaaggccgcgcagaacgagctcgatccggtcaagcgcgccgcgctgctgatgaaggtcgacgagatcttttgcggggcgaacgtgttcctgccgctgctctcgcgccacgtcgtcaacgccagcgtcaacaacttgatgatcgacatctccggctgggacaccatcacgtggaatgtggccgcgtggcatcggagctga

SEQ ID NO: 6337 - DNA, 426 bp, BradyrhizobiumColbertium
gtggaatgtggccgcgtggcatcggagctgaggggcggtgagcgcctatttttgcggcgcagcgcgagcctcggaacgctgcaccgaatcccctccactgtgtgctccagatcacagcagaatcacgcgccttcccctacaaggattgtgcatggccgcaaacaaggtaacggcggtacgcacgaggctgggaagacgatcaacagctacggacttcgcaaagccgtcagggtgaagaacccggcggctttttccttgctttcgaacggcatcggctacggcgtgcagcggacgcggacaccacgcgcctacgaggcgcccgagccctttcgctcctcgcgttcatcctcgatctggcgttcggcttcgagccaaaagtccagctcccgattgctcggccggccggcctgttcccagagctcatag

SEQ ID NO: 6338 - DNA, 186 bp, BradyrhizobiumColbertium
gtgaccgacaaggcctgcccattctgccagggtattggatgggtctgcgaaaaccatccgctccgggtctggagcgagaagctcggcggctgccgctgcggcgagggcatgccctgcacctgcaacacggccgaggaccctgaagtcagagtggtgatcgtcgaagccgataccacatggcactag

SEQ ID NO: 6339 - DNA, 162 bp, BradyrhizobiumColbertium
ttgtccgagccgaccgagcaagagatcagagaacgcgcgcatcaattgtgggagcaggccggcaagcccgaaggccgcgaggaggaattctggcacgcagccgagcaggatctgcgcaacgaggacaagtcgaacacgttgcggaccccggatacgctgtga

SEQ ID NO: 6340 - DNA, 8496 bp, BradyrhizobiumColbertium
atgtcgacgacccctcatgtcctggcgaacggcgatttcctgcaggactggtccaacaccggcctcatcacgactaacgatgattggtcgggggtcgcatcgatcgtcggctatctcggcaacgatgtcgtttcggccaccggggtggacgcgcgcacggctaccggatcgtcgtcgggagacgtcgacgtcatcgccaaccagaccaacaccgccatcaccaacggcggtgtggccgaattccagatcgccaacccgacgctggcgctgaacggctcgaacagcgcggatgctcctggcctcgtgatccatctcgacgccaccggccgcaaagacgtccggctgagcttcaatgcacgcgacctcgacggcggcacggacgactccgcgcagcagatcaacgtgcagtaccggctcggttcgagcgggtcgtggaccaacgttccgagcggttacgccgccgacaccaccaccggtggcgccgcaacccaggtgacgccgttcgatctgctgctgcccgccgccgtcgacggccgcaacgacatccaggttcgcattctcaccacaaacgccgccggcaatgacgagtgggtcggtatcgacgacatccgcgtcaccagttcatccgaatcgtcggtcgaagcgcagcacgtttccttcgcgccgggttcgcttacggtgtcgcatgacgaaggcaacagcggtccgaccgtctatcagttcatcgtcgagcgcagcggcggtaccacgggcgacgtcgcgttctcgggaacgatcgcttcggcacagaccgatgcggccgactatgtcggcggcaacccggtcagcttcagcggcagcatcgcggcgggagagacctccgcgatcgtgaccgtcaccgttgctggcgacaccgacaatgaggcgagcgagagcttcacgctgacgctgcagaacgtttccaattcggtgggcgtgaccaccacgatcggcagcgccacgacggcgaccggcaccatcgtcaacgacgacgtcggcatcacaaagatcagcgcgattcagggcagcggagccagcagcgccatggtcggtcagactgtgaccgtcgaagccatcgtggttggcgacttccagaacggcgatgccgacgccggccgcaatctcaacggcttctatgtccaggaggagaccaccgattccgacggcaacgtgctgacctccgaggcgatcttcgtctacggcggcgctaccgacgtccagatcggcgaccgggtccgcgtcaccggctcgatcagcgaatatttcggcctgaccgagctcaccgccagcaacatttcggtcgtccaggccggcgcggtggccgacgtcgacacgatggcggtgcagatcgacctgtcggcgatgggcaccacgctgagccaggacggcgattaccagcccgatcttgaagcctatgaaggcatgctggtcacgattccgcagaccctgaccgtcaccgagcagtacaatctcgaccggttcaacgagatcaagctgacggcgggcgaacggcccgagcaattcacgcaggagagcgcgcccgacgccgccgcctaccaggcgtatctggcggagctcggtgctcgcaccatcacctatgacgatggcctcaacgtccagaacgccgcgatcaacaatctcgacggcttcgatccgaacgacaacccgtccgccacgccgaactacggcaccgccgacgcggtccggatgggtgataccgtcaccggcctgaccggcgtgctcgactatcaatgggccggaaactccgcctcgggggcgacttggcggatccgctcggtcgaggacggcgccaacaccttcgaagccggcgccaatccgcgcaccgatgcgccggaagacgtcggcggccgcctgaaggttgcgagcttcaacgtgctgaactacttcaccacgctggacaacggtggcaccaccgcgatcggcgaagcgccgcgcggcgccgacaatgcggcggagtttgcacgtcagaccgagaagctggtcgcgaccatcctcgacatggacgtcgacgtgctggcgctgaccgagctggagaacgatttctccgctgcatcgtccggcaacgcgatcaagtatctggtcgaacagctcaatgccgtggctggggccggtacctatgcctgggtcgatcccggccggcagttcgttggcggcgacgccatcgcggtcggcttcatctacgacaccaccgcagtgaagatcgccgacggtacgaccatcgagaccctcaacgacgccgacctgcccggcctcggcctcggcggcctgatcgggcagagcacggtcggcgcggtgttcgacggcgagaacaccagccgcaacgcgctcgcggtgaccttcgaggagcttgcgaccggggaaaccttcacggcgatcgccaaccatctcaagtccaagagcggtaccggctccggcgccgattccgatcagggcgacggccagggcaactggcagaaccagcgcgagctggccgccaaagcgctgaccgcgtgggcggcgagcgatccgaccggctcgggcgatccggacgtgatgctgctcggcgattttaacggctacgccaaggagcagtcgaccgctctcatcgagagcgcgggctatgagaatctgcaggatcgcgaggacggcgcttattcctatgtattcgacggccagaccggcacgctcgactatgccttcgccaatgccagcctcggcgggcaggtgtccggtgtgaccacctggcacatcaatgccgacgaggccgacgcgctcgactacaataccgactatggccgcgacacctcgatcttcgacggcgactcctcgatccgggtgtccgaccacgacccggtgatcgtgggcctcaatctgggggaacaggagccgactccggcttacacgctgcaaatcctgcatgcatcggacttcgaggcgggcctgaacgcagtcgatcgcgccggcaacttcgcggcgatcgtcgattatctcgaggagacctacgacaactcgatcacgctgtcttcgggagataatttcattcccagcccgttcttcagcgccggcagcgacagctcgctgaaggaggtctacgaaaccgcgctggaaacctattacggcctcgctgccgggacgctgaacatctcgcccggcttcggcaccgccgacatggcgatgctgaacatcatcggcgtgcaggcctcggcgatcggcaatcacgaattcgacgccggcaccaaggcgttcgccgacatcatcaagcagaccgccggatatcccggcgcgcagttcccgtacctcgcggccaatctggacttctcggccgatgccaatctcgcttcggtctaccccggcacgatccaggatgccgacgtctacaccggcttcccgccggtggccggtatcggcaagaagatcgcgccggccacggtcatcgaggagaacggcgaaaagatcggcgtgatcggcgcgaccacccagatcgtgcagagcatctcctcgaccggcggcgtcgaagtgatcggcgacaatgtcgatgacatggcggctctggcggcaatcctgcagccgacgatcgatggtctgctggctcagggcatcaacaagatcatcctggtcagccatctgcagcagctcgcgctcgaaaaggcgctggcgcccctgctgcacggcgtcgacgtcatcgtcgccggcggctcgcacacgctgctggcggacgagaccgacacgctccgtgtcggcgagaccgctgccgacacctatccgatcgtcgccgcgaacgccgacggcaaaaccacgcttatcgtcaacacctccggcgaatactcctatgtcggacgactggtggtcgatttcgatgctgaaggcaacgtgatctacaccgccaactcggcggtcaatggcgcctacgccagcacggaagaggtggtcacctccctgtacgacggcaacaccacggtcgacgtcgaccatgacggcgacgtggataccgacgacgccgatccgtttgccgacggcggccgcggcgatctggtcaacgacatcgcccaggcggtgggcggcatcatcgacgcgcaggacggcaacactttcggcaagacggacgtctatctcgagggccgtcgcagcgaggctcgcaccgaggagaccaacctcggcgacctctccgccgatgcgaacctgtggtacgcccagaaggtcgacccgaccgtgctggtttcgatcaagaacggcggcggcatccgcgactcgatcggctacgtctatgcggtcggtggcgaagcggtggagagcccgccgctggcgaacaccagcgtcggcaaggaagcgggcgaggtgtcgcagctcgatatcgccaactcgctgcgcttcaacaacgcgctgtcgatggtcacggtgaccgcggatcagctgctcaaggtgctcgagcacgcagtggcggcgaccacggcgaccgcgacgcccggccagttcgcccaggtcggcggcatcgcattctcgttcgacaaggatttgccggccggcaaccgcgtgcagtcggcagcgctgatcgatgacaacggcaacccggtgctggcgttggtcgcgaacggcgaactggtggtcgatccgaagatggcgatccgggtcgtgaccttgagcttcctgctcaccggcggcgacggctatccgttcgcgagcttcatcacggccaatcccacctttgccaacgtcgtcaatctgtcgccagacctagttccagatgcggggcaggaggcgaacttcgccaccgagggcaccgagcaggatgccttcgccgaatacatggcggcgaactactccgacacgccctacgacgtcgccgacaccgaccgggcgcacgacgagcgcatccagaacctcgactatcgtcaagacacggtgctcgaaacagaggcgctggtgctggtcggcgacgacggtgacaaccaactcgccggcgcgctcggagacgacgtcctcaccggcctcgggggcgacgacgtcctcgccgggctcggcggcgacgatcaactcgatggcggcgagggcgatgataccctgtccggcggcgatggcgacgacacgctgcttggcggtgcaggcgacgacacgctcgacggtggcgctggcgacgaccggctggtgggcggcgacggtgacgacaccctgaccggcggcgatggcgacgacgtcctgatcggcggcgaaggctatgacaccttgcaaggcggcgacggcaacgacgaactgatggctggcgccggcgacaccgcggaagccggtgacggcgacgatctcatcatcgtctccaccgacgaccccgcgccgggctcgatcgacggcggcgccggcaacgacaccgtcaagctgatcggcggcggcacggcggaattgatcgccacgctcaatgtcgagaacctgctggtggccgcaggcacttggtcggtggccggatcggcatcgtacgacgatgtgacgatccagggcggcgcgatgctggcttcgagcctcgtcgtggacaacaacgatcacgtcgccatcgaggccggcggcgcgctctctgtgtccggcaacgcgatcgtctggcagggcggtggcaacgcggtcatcgacaatgccggcgagatctcgggctcgacccgtgcgctcaccaccacggcgggggcgaccggctcggtgaccctcgacaaccaggccggcggcgtcgtccgcggcgcgctgaccccggaacgggccggtcacgccgacgcgaccatcatcgtcaacaacgccggcgtgatcgaagcgaacggccgcgtcatcgacttccgcaccttcgacaacaacggcgcctcggcggtgatcaacaaccttgccgggggcgtcatccgccagcatggcagcgacaccgacgtgatccgcccgggcactgacggcgtcgtcaacaactgggggacgatcacgacggatccgacgttcgtgggcggaggcgatctgatcgacttccagagcgacaccggcggcaaggtcaccaactatgctggtggctggatggaaggttcgcgtcacgctgtaaccggtgacaatgccgtcaccgtcatcaacagtggcacgatgatcggccgcaacgggtccgccgtgaacctggacaccgacgggaccgaagcgcagaaggcgttcatcaccaaccacggcgtgatggagggccgctcggccgaactgtccgacagcgacggcgacgccatcgatgtcgacggtctggtgcagatcgtgaactacggcaagatctcgggcctcggcgccgagggctatcacgacggcgagccgaacgtctccgaagcgatcgcgatcggcggcggcagcatcgtcaacaatgccggcggcgagatctacggctacggccgtgcgatccaggtcgacaactccagcaacgccaacgcgctgggggtgacgaccatcgtcaaccacggcctgatcaagggtgacggccacggtccggaaggggtcacccccgaggatgcggcgcggttcgacctgcgcggcaacgaggcgatcaacctggtcggcacatatgccgacagcctcaccaacagcgccaccggtcagatcgtcggcggcgtctcgatgggcggcggcagcgacacgctgagcaatgacggctcgatcaccgccaccggcggatcagcggtgaacatgggcgagggtgacgatctgatcgtcaaccgcgccatcatcaccggcgacgtcctgctcggcgccggtgccgacgagctgatcaaccagagctccggcgtcatcaccggcgacgtcagcttcggcgacggcaacgacaggctcggcaacaccggcaagatcgtcggcaaggtcgatctcggcgccggcgacgacttcgtcaacatctggatcgggtccgatatccagggccatatcctgctcggcgacggcaacgatatcttgatctccaacgactggatctcgaccaagatggagatcgacggcggtgccgggaatgacgagatctacacctcgttcggtaacgacaccatccacggcggcgaaggcaacgatcggatctatgccaaccagggcaacgacaccgtctacggcgatgcaggcaacgacgagatctacggcaacgacggcgacgatctgatcattggtggtgccggtgacgacatcatcgacggcggcgccgggaccgacaccgcgaccttctccggcgcgattgccggttacgcgatgacgctgaacgccgatgactcggtgaacatcgctgatcaggccggcaccgacggcaccgacacgctcagcaacatcgaggaactcggcttcgccgacggcacctggacgctgcgcaccggaaccggcggcagcgatacgatcgtcggcggccttggcaacgatctggtgttcggcggcgccggcgacgacaccttcatcggcggctatggtctggatcgctacgatggcggcgacggcgtcgacaccatcgactacagcaacatctcgttcaagctgacgatcgatctcgactccgggctggcctactatcccggctacatcccgggcgccgaccatctcgccgggatcgagaacgcggtaggcacggcgtatgacgacacgctgatcggctcggccggagccaacaccctgaatggcggccttggcaatgacctgctgatcggcggcgccggtgacgacgtgctgctcggcggcttcggcgacgacgtgctccgtggcggtgctggtgacgacaccatcgacggcggcttcggtcaggatctgttggatctgtccgacgccaccggtgcggtcaccatcaacctggtgtccggcaccgcgaccggcgcaggcattggcaccgaccacttcagcggcatcgagggcttcgtgctcggtgccggtgcggaccatgtcacaggcggcaacggcgccgatatgttcgatggcggagccggtaacgatgtcatcgccggtggtgccggcaatgacacgctgcgtggcggccaaggcgacgatagcgtcgacggtggctccggcaacgacgtgatcgagggtggcgtcggcaaggacacgttgaagggcggttcgggggtcgacgtcgtctccggcggcgacggcgacgacaacatcgatggcggctccgagaacgacatgctgaatggcggtgccggcaacgacaccatcaagggtggctcgggtgccgacatcctcgcgggcgatgccggcaacgacatcctgtccggtggttcgggcgccgacgtgttcacgttcgccgccggcttcggcaaggacaccgtcaccgacttcgccgccaccggtggctcggccgacgtgctgcaattctcgagcagcctgttcgccgacttcgccgaagtgatgtcgcacaccacgcaggtcggcaacaacgtcgtcgtgacgctcgatgccgacaacaccgtgaccctggccaatatgcagatggcctcgctcgcggcagacgatttccgcttcgtctga

SEQ ID NO: 6341 - DNA, 1779 bp, BradyrhizobiumColbertium
atgactgcaacaacgtcctccgcgtcgtcccccccgtccggcgatctcgcgtcggccgcgctcgcctcctgcagaacggcctttctgacggtgggactgttctcggcggtgctcaatctgctgatgctcagcggctcgatctacatgcttcaggtgtacgaccgagtcattccatcgcacagcattccgaccttgatcgcactgtcgatcgcggtggcggcggcgtatgcgatgcaagggctgttcgatctgttgcgtcagcgcattctgacgcggatcggatcagcgctgcacgccgcgctgtggcaaccggtcgtctgcaacatcctgcgggggccgctgcgcggcggcggcgcaaatcgcggcctgcaattgtctcatgatctggactcggtccggtcgttcctttccgggctcggcccgacgaccctgttcgacttgccatggatgccgctgtatctcgccggctgctttctcttgcatccctatctcggctggacgttggtcgtgggcgcggtgctgctgttcgggatcgcgctgctcaccgaggtgctgacgcgggcgccgacccgggacgcgtcgcgtgccggcgcaatccgcggcgttcaacttgaagccggtcggcgcaacgccgaaatcgtggccgcgctggggatggagcagcggttgatcgaccggatcggcgccgccaatgacgatctcgtcgccgcccagcagcgcaacgccgatatcgccggatcgctcggcgcgttgtcgaaggcgctgcgcttcatgctgcaatcggcgctgctcggcctcggcgcctatttagtaatcgaggggctggccagcggcggcgtgatgatcgccgcgtcgatcatgggcagccgcgcgctcgcgccggtggagcttgcgatctccatctggcgtccgttcctcggcgcgcgacaggcgggccaacggctccgcgccgctctgcgcaacggcgacgccccgaagcccgacgtcgcccccgaacgcgccgtccatcgactcacggtcgagcaggtaacgatcgccgcccccggcggcacgaccgcgatcgtgcacaacgcctcgttcgtacttgaagccggccaggcggtcggcatcattggcccgtcagccgccggcaaatcgacgctggcgcgggcgctggtcgggatctggccgatcgcacgcggcgagatccgccttgatggcgccaccctcgaccagtggccggcagaaattcgtggcggcatgatcggctatctgccgcaggatgttgaattgttcgacggaacggtggcggagaacatcgcacgtttcgaccgggagatcgacgaggcggcggtgatcgccgcggcgaaggccgccggcgcctacgagatgatcctgaagctgccgaagggcttcgagatgcggatcggcgaagccggcgccaccctgtcgggcggccagcggcagcggatcgcgttggcgcgcgcgctctacaaggatccgttcatggtggtgctcgacgagccgaacgccagcctggacgccgaaggcgacgccgcgctgaccgacgccatccggcgtgtccgggctcgcggcggcattgccgtcatcatcgcgcatcggccggcggcgctcgcggcagtcgatctcgtgttgacgctggcggccggtcaggtgcaagcgttcggcccgaaggacgaagtgctgcgcaaatcgcttgccgctcatccggcgccgggcggggcggcgctgcaggcggtgcccgatgcgcgctcggttccggccgcagccgtcagttga

SEQ ID NO: 6342 - DNA, 1323 bp, BradyrhizobiumColbertium
atgaccgccctctccacgcccgaagctcgccgcaacgatccgtttcgcgatatccggcgcgccaccggactcggaatcggtaccttggcgatcgtggtgtccaccgccggagtctgggcgatgaccgcgccgctcgccagcgccgtgatcgcgccggcgcaagtggtggtcgacagcaacgtccgcagggttcagcacccgaccggcggcgtggtcgccgaaatctacgtcaacgacggggatcaggttcgggccggcgatatgctggtccgcctcgacgagacgctgtcgcgcgccaaccttgcgctgatcgaaaaccagctcaaccagcttggggtgcgtcgcgcccggctgcagtccgagcagaacggccgtgacgcggtggtgctgcccggcgagatctccgcacgccgcgccatcggtgcgatcacggagatgatcgagggggagaccacgttgttcgcccggcggcgcgaggcgatcagcggccagcagtcgcagctgcgcgaacgcaaggcgcagatcgtggacgaaatccgcggcctggaggcgcagatcgcgtcgaagcgcgaacagatccgctggatcgaaaccgagctggagggcgtccgtcagctatacgaaaagcgtctggtgccctatgcgcgcctcactgcgctcgagcgcgaggcctcccgcctgaccggcgaggaaggccagctgatcgccgagatcgcgcgcgccaagggccggatcaccgaaaccgaactgcagatcatccagctggttcaggaccagcgccgtgaggtcgcgaccgaactgcgcgacgtcgagaccaagcttgccgacctcggtgaacgccgcatcgccgcgatggaccagctcgatcgcgtggtgttgcgcgcgccgcaagacggcctgatccaccagaaatcggtcttcaccgtcggcggcgtgattactgcgggcgaacagctgatgctgatcgtgccgaaggactcgcttgtggtcgaggcccgggtcgatccacaaatgatcgaccggctcaaggtggggcaatccgccaagctccgcttcagcgcgttcgacgccgccgtgacccccgagctcgacggcacgctgacgcggatcgccgccgacttgaccaaagacccgcagtccggcgcggcttactacgtcgcccgcatcagcctcgacgcgagcgaactcgccaagctcgacggcaaggctttggtgcccggcatgccggttgaagccttcatccagaacggcgtgcggacggcgatcgcctacctgcgcaagccgctggaagatcagctcgcccgcgcgctgcggcagaaataa

SEQ ID NO: 6343 - DNA, 74 bp, BradyrhizobiumColbertium
ggcggggtagctcagctggttagagcacgggaatcataatcctggggtcgggggttcgagtccctcccccgcta

SEQ ID NO: 6344 - DNA, 126 bp, BradyrhizobiumColbertium
gtgctctgccagccctcgggcgtcgatcccgacatgcacgaccccgcgcctagcaccgacagcaacaccccggtcatcccgccccccggcagccccggcggcgacccgaatgtgaggccgaaatag

SEQ ID NO: 6345 - DNA, 225 bp, BradyrhizobiumColbertium
gtgaacgccgacaagacgctgacgacgcttgcagatgccgaggccaaattcgcggcccagggcgtcacgcgcgacaagagcgtgatctgctattgcggcggcggcatctcggcgacgatcgatctgttcctgctggcccaactcggcttccacgagctgacgctctacgacgcctcgatgggcgaatgggcgagagatccgacactgccgatcgagacggattag

SEQ ID NO: 6346 - DNA, 651 bp, BradyrhizobiumColbertium
atggaggccgcactgatcgaccgcgcgcggcgccgggacgagaccgccttgcgggagatcatgcaggccaacaaccggaggctttatcgcctggcgcgcggaatcctgcgcagcgacagcgaagccgaagacgtggtgcaggaaacctatgttcgcgccttcacccgtctcgacggctttcttggcgagtcggcgctatcgacgtggttgtcgcgcattgcgatcaacgaggcgctcggccgcttacgcaatcgaaagccgcaggtcgaactggagtcggtgccggaggcaacgctcgaagcggaaatcatccagttccccctttcttccgccgcagccgatccggaaaagtccatggcccaacgcgagatccagcgcgtcgtcgaacaggcggtcgacgaattgcccgaggcctatcgtatggtcttcaccgcgcgaataatggagggcatgagcatggaggagacggccgagctgctcggtatcaaaccggagaccgttaagacacggttgcaccgcgcgcgcacgctgctgcgcgagaacgtcgagaagaagatcgggccggtgatcatggatgcgtttccgttcgccggccggcgctgcgagcgcctgaccgaggccgtgctcaggcgccttggcgtcggcgcgtaa

SEQ ID NO: 6347 - DNA, 534 bp, BradyrhizobiumColbertium
atgttgatccgatggagcgcggcagccgccgcagcgatcatgttgtcgagtcccgtcctgctgcaaaaggcgagcgcagccgacaagcccaccgatccgcagattgcacatatcgcctacaccgcgggcgtcatcgatatcaatgccgccaagcaggcgcaaaagaaggccaaaagcaagaacgtgaaggcgttcgccgaagacatgctccgcgaccacgaggcggtcaacaagcaggcgctcgcactcgtcaagaagctgaacgtcacgcctgaagacaacgaggccagcaaggcgctgtccaggcaggcgagcgacaagctggccgagctcgacaagctcgacggtacagcgttcgacaaggcttatgtcgcgaacgaggttgcctaccacaaggcggtcaatggcgcgctggagacgcagctcattccctcagcgaacaacgcggagctgaagagcctgctgcagaccggcctgaagattttccggggccatcagcagcacgccgagcatgttgcggccgagctgaaatag

SEQ ID NO: 6348 - DNA, 321 bp, BradyrhizobiumColbertium
atgaagccgggacgcctcgcttcgaccgcgcttgcggtcgtcttcctgtcgatggtcgtcccggcgcatgccgcgaccattcggatcacgatggaggatctcgtgatctcacctgccgatatgtcggcgaaggtcggtgacaccatcgaatggatcaacaaggatgtcttcgcccacactgctacggcgaagaacggcgatttcgatgtgatgctaccgccgcagaaatcggcgaccttcgttttgaagaaggcgggaacgatcgactattactgccgctatcatcccaacatgaaagcgaccctcaaggtcgagccataa

SEQ ID NO: 6349 - DNA, 267 bp, BradyrhizobiumColbertium
atgagccagccgatttcctacgcacccgcccgcgcgccactgcccgaccatgagcagaagcaggcagccctgagctatctgaacgaggcctgggccgaggcgcgccatgacggcgtcgacggcgactgcctggcgcaggcgagcctgttcgcggcctttgccgagctcgtcggcacctatggggaggacgcggtggcgaaattcgtcgagggctttcccggccgcattcgcaacggcgagttctcggtcggcatctccaggcagtaa

SEQ ID NO: 6350 - DNA, 378 bp, BradyrhizobiumColbertium
atgaccccgcgctttctggccgttcttgccgtgattcttgcctgcgcctccgtgcccacgaaggcccaggacggggcggccccgttcgacggcgaattgcagcggctggccgagatcctcgggggcttgcactatctgcgcggcatctgcggggccaatgagggcaacaaatggcgcaacgagatgcaggcgctcatcgatgccgagaccccctccggggagcgccgcacccgcatgatcgccggattcaatcgcggctataacggttttcagcaaacctaccggagctgcacgccggccgcgacggtggcgatccgccgctacatcgaggaaggctcgaagatctcgcgcgatctcacggcgcgctacgcgaactga

SEQ ID NO: 6351 - DNA, 435 bp, BradyrhizobiumColbertium
ttggccgcggtcgcccaacccacgcacccccagcttgcagtcagcgcggcgatcttccgggacggcaaggtgctgctggtccggcgggcccgttcgcctgccaaggggttctattcgctgccgggcgggcgggtcgaattcggcgaatcgctgcatcaggccctgagccgcgaggtcgacgaagagaccggccttcgcatcaggatcattggtctcgccggctggcgcgaggtgctgccggccgccgccggcgccggccattatctgatcatgtcgtttgccgcccgctgggttgccaacgaaccggccctgaacgacgagctcgacgattatcgctgggtcgcgccggacgctctcggcggccttggcgacctcaagctgaccggagggctggaggaggtcatccagtccgcccaccggctgatagggacctga

SEQ ID NO: 6352 - DNA, 429 bp, BradyrhizobiumColbertium
gtggccaatatcaatccgcggacggggcttgccaccgactatctcaaccatttcaatgaagccgtgatgctgctcgagatggttccggacatgccggaatgcgccgaggacttcctgacctggacgccgctatcctatgccgagcatttcacggcgtcgaatttcaaggcgcgggatttggcaatcgaggcttatgagaaggccgatcccaacgtgcgtgcccagttcgaccacatcaccgataccatgacctcgatcctgaccgccgtcggctcggccatgcgcgaggtcgaaaaggactccacccgtgtccgcctcgccgagcaggcgaccctctgggtcaagccgctgatcgcggcctgcggcggcatcatcaatggcggcacggaagccgacgtcgataccatcatggcgaactcggccggatag

SEQ ID NO: 6353 - DNA, 723 bp, BradyrhizobiumColbertium
ttgcggcaactgttcggctatgtcgagcagccgaatttcccgccccggtacaatgtcgctccgacgcaaccgattccggttgtgctggtcgagaacggcgcgcgccatttccgcctgatgcgctggggcttgctgccgggctgggtcaaggatccgcgcgggttcacgctcctgatcaacgcgcgttccgagaccgtgctggagaagcccgccttcaagaccgcgattcgccgtcggcgcggcctgatcccggccgatggctattacgagtggaagacggaagccggccgcaagcagcccttcttcatccaccgcgccgacggcgagccgcttggctttgcggcggtgttcgaaacctggctcgggctgaacggcgaggagctcgacacagtcgcgatcgtgacggccgccgcaagcgaggacctcgccgcgctgcatgaccgcgtgcccgtgaccatcagtccgcgcgatttcgagcgctggctcgacacaagcggcgacgaggtggacgcgatcctgccgctgatgaccgctccgcgcgtcggcgaattcgcctggcacgccgtctccacccgcgtcaaccgtgtcgccaatgacgacgagcagctcgtgttgccgatcagcgccgaggagatcgaggcggaagcagaggcggccaagccgaagaaggcgcggaaggtggcggctgtgtcatcggacgacgggcaggggtcgttgttctag

SEQ ID NO: 6354 - DNA, 1194 bp, BradyrhizobiumColbertium
gtgacgcgaccgttcgagggcgtgaagatcctggactttacccaagtgcttgccggcccctatgcgagctaccagctcgcgctgctcggcgccgacgtcatcaaggtcgagcggcgcgagggcgaggacatgcgccgcacgccgctcagccgcgaatgggccgagcgcgggctcgcgccggcgttccaggccgtcaacggcaacaagcgcagcctgacgctcgatctgcagaagccggaggcaatcgcgatcgtgaagaagcttgccgcgcaggtcgacgtcgtcatggagaatttccgtccgggcgtgatggacaagctcggcatcggctacgaggcgctctcggcgatcaatcccaagctgatctattgcgcggtctccggcttcggccagaccggcccggaccgcctgcggcccggctatgacggcaagatgcaggcactgtcgggcatcatggcgatcacgggccatcccgagacgggaccgacgcgcgccggctttgcggtctgcgacgtgctgtcgggcgccaccgccgccttcggcgtgtcgagcgcgctctatcagcgcgaccgcaccggccagggacagctcatcgacgtctccatgctggaggcgacgctggcgtttctgtccggacagatcgcggactggtccgtggccggccatcggcaagagctctcgggcaaccaggcggtgagccgcaggaccacggcgaacttgttcaagtgcggcgacggccacatcctgctcgcggtcaacaacgagaagcaataccgcgcgctgatgagcgcgctcggccgcgaggacacgctaaccgatccgcggtttaccgactggttcgcccgcaacgagaacgagccggcgcttcgcgcgatcatcgaggaggcattggcgcaacgcccggcacgtgaatgggagacgatcctcgaagacgccggcgcgccctgcgccagcatctggaaggtcgaggaggtcatcgatcatccgcaaattgccgcgcgaggtgccattcaagaactggacacgccctacggcccgctccgcttcgccggcagcggcttcaggctcgcgcatggcggcggcaggctggaccggatggcgccggaactgggcgcggataccgataccgtgctgggcgagctcggattcgatgcggcggcgattgcggggcttcgggcaagagagatcgtgtga

SEQ ID NO: 6355 - DNA, 930 bp, BradyrhizobiumColbertium
atgtccgctccgcgcgacgacgaattcggctttgcacccgattacgactcccccgttccctacatgcagcgcacgcgcgattattatgcggcgatcggctacaccacgccgtatcgctgggcgcattacaccgaggcgccgttcgagccgctgaagaagccgctggcaaagtcgcgcgtcaccatcatcaccacggccgcgccgttcgatccggccaggggcgaccaggggcctggcgcggcgtataacggcagcgcgaaattctaccaggtctatgacggcgacacgtcgaaagagcacgatttgcgcatctcgcacatcggctacgaccgcaagcacacctcggcgaccgacagcggcacctggtttccgctaccgcagctgttgaaggcgagtgctgcgggtcgcatcggcgaagtcgccccgcgcttcttcggcgcccccacgaaccgcagccaccgcgtcacgctcgacaccgacgcgccggagattttttcgcgttgcctcgcggacgcggtggacgtcgcggtgctggtgccgaactgcccggtctgtcaccagaccacggcgctggtggcgcggcatcttgagcgcaacggcatcccgaccgtgatcatgggctgcgccaaggacatcgtcgagcacgcggccgtgccgcgcttcttgttcagcgatttcccgctcggcaattccgccggcaagccgcaggatgtcgcctcgcaggcgcagacgctggagctcgcgctcacgctgctggagacggcgagcggtccgcaaaccacgatgcagtcgccgctgcgctggagcgaggacgcctcctggaagctcgactacaacaacgtcgcgcagctcagccccgaggagctggcgcgccgccgcgccgaattcgacaagcagaaggagatcgcgcgcggcaaccgcgccgcctga

SEQ ID NO: 6356 - DNA, 582 bp, BradyrhizobiumColbertium
atgaccatttccgatcgcgtccgcatcaaggacgtccgcgtgctctcggacaattggacgccgctgaagaccaccacgttcgagtaccgccgcgccaatggcgagtggcagacgcagcaccgcgagacctacgagcgcgacaatgccgccgcggtgctgccctataatctcgcccggcgcacggtaatcctggtacgccaattccgcctgccggccttcatccgcggctacgacgacctcctgatcgaggccgccgccggcgtgctcgacgatgccgcccccgaggtgcgcatccgcgccgaggccgaggaggagaccggctatcgcctgcacgacgtccacaaggtgttcgaggccttcatgagccccggcgccatcaccgagaagctgcatttcttcgtcgccgaatacgagcctgagatgcgcgtcagcgacggcggcggactcgaacacgagggcgaggacatcgaggtgctggagctttcgatcgacgaggcgctggcgatgatcgccgacggccgcatcatcgacgccaaggcgatcatgctgctgcaatatgcggcgctgcatgttttcaggtag

SEQ ID NO: 6357 - DNA, 447 bp, BradyrhizobiumColbertium
gtgagcgcatcgcttgcgatcgaagcgatcaccgatgccgatgtcgagggcgtcgtcgcgctgtggcagcgctgcggcctgacgcggccctggaacgatccgcataccgacatcgcgctggcgcggcgatgcgacaattccaccgtgctggtcggccgcgccaatggcgcagtcgtcgcgacaatcatggtcggccatgacggccatcgcggctgggtctattacgtcgcggtcgatcccaactgccagaagcgcgggttcggccgcctcatcatggcggccgccgaggactggctgcggcgtgagggcatcgccaagctccagctcctggtccggcgcgagaacgcgcaggccaatgcgttctatggctcgctgggcttcgagctatcgacgtccgtgatgttccagaagtggctcgacggccgcgcgaccacgccaagcaactga

SEQ ID NO: 6358 - DNA, 1428 bp, BradyrhizobiumColbertium
atgaacatcgaaaagcctgccatcccgccgcttgcgcccgagctgatcgagcaattccgcaagatcgtcggcgagcgccacgcgattaccgacgcgaacgacatcgcgccctacgtcaccgaggagcgcaatctgttccacggccgctcgccgctggtgctgcgcccgggctcgacggcggaggtctcggctatctgcaagctcgcctccgcgcacaacatcgcgctggtgccgcagggcggcaacaccgggctcgtcgggggacagacgccgcacaacggcgaggtggtggtgtcgttgcgccgcctcgacaagatccgcgaggtcgataccgcctccaacaccatgacctgcgaggccggcgtggtgctgcagatcgcgcaacagaaggcggccgaggccgacaggctgtttccgctgtcgctgggcgccgaaggcagttgcaccatcggcggcaatctctcgaccaatgccggcggcaccgccgcgctggcctatggcgtcgcccgcgagatggcgttgggccttgaggtggtgctggccgacggccgcgtgctcaacacgctgtcgaagctcaagaaggacaacaccggctacaatctgcacaatctcttcatcggcgcggaaggcacgctcggcatcgtcacggcggcgacgctgaagctgtttccgaagccgcgcgcgatcgagaccgcgttcgtcggcctgaagtcgccggacgcggcgttgaagctgctgacgatcgcgcaaggcgaagccgccaatgcgctgacgagcttcgagctgctgtcggagatggcggtggatttctcggtgcgccacggcatcgacgtgcgcgatccgcttcaagcgaagcatccctggtacgtgctgatggaattgtcttctccgggcgaggacgcccgcacgccgctggagacgatcctcgcccgcgccatggaggaggagatcgtcgacgacgcggtgatcgccgcaagcctcgcccagcgcggtgcgttctggaagctgcgcgacgagatgtccgcggcgcagaagccggaaggcggctcgatcaagcacgacatctccgtgcccgtcgccgccgtgcctgccttcatcgccgaggccgatgccgccgtggtgaagctgatccccggcgcgcggccggtgccgttcggccatctcggcgacggcaatctgcactacaatgtcagccagccgatcggtgccgacaccgcggattatctggcgcgctggcacgaggtgaacgcggtggtgttcgagatcgtgctgcgcatgggcggctcgatctcggccgagcacggcatcggcgtgctcaagcgcgacgaattgccggaggtgaaggacaagaccgcgatcgagctgatgcgctcgatcaaggccatgctcgatccgaagggcatcatgaatccggggaaggtgctgtga

SEQ ID NO: 6359 - DNA, 990 bp, BradyrhizobiumColbertium
gtgaaaacgggtcttgaaacgctgattttgccggccggcgcggccggcgcggaggccgccgcccggaccctggcggccggcgggctggtcgcgtttccgaccgagacggtctatggactgggggccgacgccgccaatgccaccgcgatcgcccacctttacgccgccaaggggcggccggcgttcaatccgctcatcgcgcatgtcgcagatctcaacgccgcgcggcggatcgggcgattcgacgcgcgcgccttgagccttgccgaggcgttctggccggggccgctgacgctggtggtgccgaagacggaaggctgcccggtggcggacctcgccaccgcgggcctcgacaccgtcgccatccgcatccccgcccacccggtcgcgcaggcgatcctgcgcgcgttcggaggggccgtggtggcgccgtccgccaacatctccggccacgtctcgccgacgctggccgcccatgtcgagagcgacctgtcggggcggatcgacctgatcgtggacggcgggcctgttacggtcggcgtcgaatccaccattgtcggctgcttcgacatgccgatgttgctgcggcccggcgggctgtcgcgggagcggatcgaggcggtgctcggcctgccgctggcgcggccgcccgtggaggccgaaagcgacgacagccagccgctggctccgggcatgctggcctcgcattacgcgccgcgcgcccatgtgcggctcgatgcgcgcgatgtcgccccggacgaagcgctgctcgcgttcggccccgcgcggctgccgggcgtcgatgcggctgccgccgtcatgaatttgtcgcccaccggtgatctcgatgaagccgccgccaacctgttcggctatcttcgcagcctggatgcgcgaaggccgcgagcgatcgccgtaatggcaattcccgaggagggcctgggcgaagcgatcaacgaccggctgcgccgggcggcggtggcgcgctag

SEQ ID NO: 6360 - DNA, 74 bp, BradyrhizobiumColbertium
cggagtgtggctcagcccggtagagcactgcgttcgggacgcaggggtcgcaggttcgaatcctgccactccga

SEQ ID NO: 6361 - DNA, 309 bp, BradyrhizobiumColbertium
ttgatcgccgggcgcggcctccgcgatggatggcgatcgctctctcctgccgtcgcaggctttgcctgggtgatgccgctgatcggcgcggcgctcgcggcgcgcttcgcctggctcatcggcctatcggcaggcagcaccgccaccctgatgacgttagggcatccgcctcgcctgaccgaggagttcgaacgcacgggcgaggccgatccgggcgatgggaagcggacgacgaggtcggcgaaccgccgggatgttcgtcctgtggtgcatcgtcgcccggcagatgggtctcgtctccgtcagtga

SEQ ID NO: 6362 - DNA, 504 bp, BradyrhizobiumColbertium
atgacacccgcaattcgttcgtttgtggccggtgcggccatgctcgctggcctggttggcccttccgtcgcgcgtgctgccgacatcgtggacaccgcggtttccgccggctcgttcacgacgctggtgacggccgtgaaggccgccggtctggtgaagaccctcaagagcaagggaccgtttacggtgtttgcgccaaacgatgccgccttcgccaagctgccgcccggaacggtcgaatcgctcttgaagaacaaggccaagcttgcggccgttctgaagtatcatgtcattccgggtcgcgtgaaggctgccgatgtcgccggcaagtcgctgaacgtcgcaaccgttcaaggtcagcccgtcagcgtcgacgggcgtttcggtgtccgcgtcaatgacgcgcacgtcattcagccggacatcgaggcgtcgaatggtgtcatccacgtcatcgatacggtgctgctgccgccggcgcgtgcaaagaagatgcatcactga

SEQ ID NO: 6363 - DNA, 327 bp, BradyrhizobiumColbertium
atgacgtccgaccctgaggaatcagtcaggctccaaggttttggcgagatgacgttgcgcacggccgtcgagaccttgatgctgctggcgccgcgcgaacgatccgaggccgcgatcttccgcgtccgcgacggcgtgcgtctggcgcaaagcgagatcgccgagctcgcctcgagctggggcttgacaccggcgcctcacgtgcgatcgccgcggctggtccccgagcaccactggccggacctcgtccgcggcatggtgcgcgaggcgccgctgccgtcactgatggtggcgtttctggtgggcgtgctggtggcgcggcggtaa

SEQ ID NO: 6364 - DNA, 201 bp, BradyrhizobiumColbertium
gtgaatggagctgccagcatcgggcagcttcaatcgagactggatgatctgaacaagcggctcggccagctggaaagccagcatccggacagctggaaggtcgaagagctgaaatcgagcgcgctcagcctgtcgcgcgagatcgacgacatccgctgcgccgaggcgacggcggccctgagcgagctgctaaggaagtaa

SEQ ID NO: 6365 - DNA, 354 bp, BradyrhizobiumColbertium
gtgcgcctggcgcatcaacgccatcagccgcgccaccactgcggttctggtgtcgcttctcgcgatcggcccgagctggccggctgcaacggtcacaaatctcgccacgcctcattcccccaattttccgagtgcgccgggcctctcctaccgaacggcgcaccgcgcgcacaggccgccggccctcggtgccgagagcacaatcaaattccgtgccggcgggtatcatcttgcggcgctgggacttcttgcggcgctgggacttcgttgccgatctgcaacggttccccacgatctgaagccggacaaaacaaacccccattccggccacgaaccgctttcacaaggccgtga

SEQ ID NO: 6366 - DNA, 867 bp, BradyrhizobiumColbertium
atgcgccaggcgcacacaaatggctgcgacctgatcgtctatcccgagctggcgctgaccacgttctttccgcgctggtacttcgaggaccaggccgagatcgacagcttcttcgagcgcgagatgccgggttctgaaacgcaggtgctgttcgatctcgcacgcgagctcggggtcggcttctgcatcggctatgccgagctgaccgccgaagctggaattgtcaggcgctacaacacctccattctcgtcgacaagagcggtgcgatcgtcctgaagtatcgcaaggtccatctgcccggtcatgccgagcacgagccgtggcgcaaatttcagcatctggagaagcgctatttcgagccggggagccgcttcggcgtcgtcgatgccttcggtggcgtgatgggcatggcgatctgcaatgaccggcgctggagcgagacctatcgggtgatgggcctgcagggcgtcgagatggtgatgatcggctacaacacgccggtgcacaatccccccgcgcccgagcatgacgatctttcgctgtttcacaaccagctggtgatgcaggccggcgcctaccagaacggcaccttcgtggtcggcgtcgccaaggccggcgtggaggagggcgtcgaccacatcggcggcagctgcatcatcgcgccctccggcgagatcatcgcgcgatgcacgaccaagggcgacgagctcgcgctggcgcgctgcgatctcgatctctgcaattcctacaagcgcaccaccttcaatttcgacgtgcaccggcagccgcaggcctacgggatgatcgtggggcgcaagggcgtgacgacgatggcggatgggaagccggtgccgcggaaggggtga

SEQ ID NO: 6367 - DNA, 399 bp, BradyrhizobiumColbertium
atgaccttcatcgcggcgctgcgtcacgatcggatcagcgcgccttgggtgattgatggtcccatcaacggtgagctcttcacgctgtacgtcgagaaggtcttggcacctaccctcgcaccgggcgagatcgtcatcctcgacaatcttggcagccacaaaggcaaggcggctcggcaagccatccgcgccagaggcgcccaccgcatcttcctgccgccatatagccctgacctcaatccgatcgagcaggtcttcgccaaactcaaacatctcatgcgagctgcggaaccacgcgatgtggaggcaacctggaggaaggtcggtgaactcctcgacctcttctccaacgaggagtgcaccaactatttcaagaactcaggttatgtttccgtataa

SEQ ID NO: 6368 - DNA, 159 bp, BradyrhizobiumColbertium
atgaaagacattcgtgacatctatcaggaaatcgccgagcagcgcgcggagctgatgtactgcattctcagcgccgaggagcggagagaaacgcaggcacggttggatgcggcgcttgcagaggcagagcgtcgcctccgggaagaggagggggcgtaa

SEQ ID NO: 6369 - DNA, 243 bp, BradyrhizobiumColbertium
atggaagtagcgttgcttgttgcgggtctgttggcgatcgtcattgtgctctacatgtttttatcagtgccgggaaagcgtgcttcgacgaaggtgaagtgtttgatcttcagcgttctcgtcgccttgatgactgcgctctggtgcgcagtgtatggccccgatttctgggttatggttcaggccgcagtcatcatcgtggtcgcggccgctgtcggcctactttcgtcatcgaacaattga

SEQ ID NO: 6370 - DNA, 201 bp, BradyrhizobiumColbertium
ttgggcgagccgcctgcggcggacggctctattcgcttcgctcacggagcccgcacgcggtctccgccgattccggtgacgatcctctcgctgaagacgatcgtgccggtcgattgccccacatcgtttgcgccggaggcgcgcctaagcctcaatcccggcctctcgcgatcgaaggcggagcgatcaattgttcgatga

SEQ ID NO: 6371 - DNA, 564 bp, BradyrhizobiumColbertium
atgactgttgcactccatccctcgatcgacaacggcatcaagcagggcagcggcagcttcgccggtggcaccctggtctgcaaatgcacggatcacccggtcaaggtcggcatcaagggcgacgtcgcgcacaaccacgcctgtggctgcaccaaatgctggaagccgcagggcgcgaccttctccgtcgtcgccgtggtcccgcgccagaacgtcaccgtgctcgagaacggcgacaagctgcagatcgtcgatccctccgcggtgatccagcgctatgcctgcaaggcctgcggcacgcacatgtacggacgcatcgagaacaagggccacccgttctatggtctcgacttcatccatcccgaactgttccaggagcagggttcgcaggcgccgcaattcgccgccttcgtctcctcggtgatcgagtcgggcgtgaagcccgagcagatggcaggcatccgctcgcggctgaaggagctcggcctcgagccctacgactgcctgtccccggcgctgatggacgcgatcgctactcacgtggcgaaagccaaagcggcctga

SEQ ID NO: 6372 - DNA, 1110 bp, BradyrhizobiumColbertium
atgaagacacgtgccgccgtcgctttcgaggccaagaagccgctcgagatcgtcgagatcgatctggagggcccgaaggccggcgaagtcctggtcgagatcaaggcgaccggcatctgccataccgacgcctacacgctcgacggcttcgacagcgaaggaatctttccgtcgatcctgggacatgagggtgcgggcatcatccgcgagatcggcccgggcgtgacctcggtgaagccgggcgatcacgtcatcccgctttacacgccggaatgccggcagtgcaaaagctgcctcagccagaagaccaatctctgcaccgcgatccgtgcgacgcagggcaagggcgtgatgcccgacggcaccagccgtttctcctacaagggcaagccgatctaccactatatgggctgctcgacgttctcgaacttcaccgtgctgcccgagatcgcggtcgccaagatccgcgaggacgcgccgttcgacaagagctgctacatcggctgcggcgtcaccaccggcgtcggggccgttgtcaacaccgcgaaagtcgagccgggcgcaaacgtggtcgtgttcggccttggcggcatcggcctcaacgtcatccagggggccaagatggccggcgccgacaagatcatcggcgtcgacatcaacgactcgaaggaggagtggggcaagcggttcggcatgacccacttcgtcaacccgaagaaggtgaccggcgacatcgtccagcacctcgttggcctcactgacggcggcgccgactacaccttcgactgcaccggcaacaccactgtgatgcgtcaggccttggaagcctgccaccgcggctggggcacctcgatcatcatcggcgtcgccgaagccggcaaggagatctccacgcgccccttccagctcgtcaccgggcgcaactggcgcggcaccgccttcggcggcgcacgcgggcgcaccgacgtgccgaagatcgtcgactggtacatgaacggaaagatccagatcgatccgatgatcacccacgtgctgaagctcgaggagatcaacaagggctttgacctcatgcacgagggcaaatccatccgttcagtcgtcgtgttctag

SEQ ID NO: 6373 - DNA, 1308 bp, BradyrhizobiumColbertium
gtgctcgttcctggctacagcgagctgctccaagcggctccgcagctgcggatcgttggacgacttgacgctttcgccggccttccttactgcgaaatcggccagttcgagacgatcgatggcctgacggtatatgcacttgtctgtcccagcctctacgaacgcgatggaacgccttactgcgatccaagtggtgcagattggaaagacaacgacatccggttcgggcgcctcgcgtcggcggccgccgagatcgctattggcggcgccgatccgggatggcgtcccgatctcatccatgtgaacgactggacctcggcgcttgcgccggcctacctcgcttggcgcgggtgctccattccaagcatcttgacgatccataatgccgcctatgccggcgtcttcgatcgggaacgactgggaccactcggcgtgccggagagcgcctttacggtcgacggcatggaattctatggccgggcgtcctttctgaaggctgggatttcctattgctcgcacgtgacgaccgtgagctccacttatgcggacgagatcacgagaccagagttcggttgcggtctcgacggcgttctgaggctcaaagccgaggacggtcggcttaccggcatcgtcaatgggatcgaccggagctgggacccccgacgcgatccgcacctggatagacctttcgaaatcggcgattggggtagccgacaggcgaacgccaaggccctgcgcaaggcattcggtctggccgtttctgaaggaccgttgttcgccgtcatctcccggctcgttcatcagaagggcgtcgatctcacgatccaggccacggagagcatcgtccggcagggcggacagatcgtcgtcgcaggtcgcggagatccgggtctggaatccgaactcgcgaagcttgccgtgaagtaccgcggcaaggtgggcgtcaaaatcggttatgaagacgggctggcccgccgcatgtatgccggaagcgatttcctactgatgccgtcgcgattcgagccttgcggcctcacgcagatgtacgcgcagcgcttcgggtcgcttccgatcgcccatcaaaccggaggtttggccgacaccatccaggacggcgtgaccggttttctctttcaggacgcgtcgttggcgccgatgctcaacgcgatctatcggtccttcgacgtgttcagctcagccaggcgactcggcgccatgcggcgggcagccatgaagcgacatttcggctggcaacgatcagcgaagaaatacaccgaagtctacgagcatgccgcgcgcagccactga

SEQ ID NO: 6374 - DNA, 381 bp, BradyrhizobiumColbertium
atgcgcgacgctctggcgcatgccggcaagagtgggcggcgcgtcgtcgccgccttcatcgccaccgcctatacccaggacgacaccgacgcggcacggacgcaatggcggcgcatcgccgatcagctgcgccccaaagtgcccaagctcgcggtcttcctcgatgaggccgagaccgacgcgctgggctacatgagctttcccgccgcgcatcgggccaaactgtactcgaccaatccgctcgaacgcctcaacggtcaggtcaagcggcgaaccgaagcggtcggcatctccccaacgaagacgccatcacccgcttggtcggcgccatcctgctcgagcagaacgacgagtgggccgttcagcgcggtcgcgacatga

SEQ ID NO: 6375 - DNA, 204 bp, BradyrhizobiumColbertium
ttgggcgctcccgttcatggcggctccggctcggccgggctaacgtcccgtatccggttcaattccaggcggcgaatgacggggctgacggtggcgggtgacacctcgacctcggccgcgatctgcttcctggtgtggcgctgccggcgtaaggcctcgatggcgatgcacgtggctggcggggtttggctcggcgatgaatga

SEQ ID NO: 6376 - DNA, 489 bp, BradyrhizobiumColbertium
gtgcaaatgaaggcgtccggcaagaggaagcaggacaccattcagcgcttcgcctgggagatcaattcgatcagcgtgcacctgcaggaaatccattatctttgggcgaagtcgctcagcatcagcgtcccgcaatggaggatgattgcagccttgtatgacctcgaccgcggtgccggggtgccagtcaacgcagtttccaaaatgctgcatgttgatccgtcatttgtcacgacccaatcgaaactgctcgagaaaaggggattcgtgcagcgaaagccttcgccagaagaccgtcggatagtgcggatgtcgctgacggacatgacccgcaagcatttagcaactttggcgcttcggcaggaacgcctgaacgagtatatctccgctgaattcggtgcgcgcaagctggatgatctgatcgacgacctcgccgcccttaagaggcgattggaaagggcctgcgtgaaattcgccgctgatctttag

SEQ ID NO: 6377 - DNA, 1419 bp, BradyrhizobiumColbertium
atgcacaagcaagaccattcaggttctccgcacggaagtatttctccattcggattcggcgactacttcttcttcatgggcgatagggcgaacaacggctaccccggctctgacggcatggacgtcgcattcggcagaggaggaaatgatcgtctcaccggcgggccggccgacgacgatctgatcggcggaattggaaacgatcgtttgtccggcggatcgggagctgatcatctggacgggggcgcaggaaacgacgtccttgccggcggcgatgccgacgacatgctggtgggtggcaccggcaacgactacctgaacgagggagcgggacacggcgatctcgaaggagggcctggcaacgacattctcgtgggtgggcccggtgcggacgccttcgtggtcgaacccgaaagcggacacgatgtcatcaaggatttccgggcagggcccggtatgttcgatcacctggctcttcaggacatcagcccgaacgagctctcgttccaggacaccccggacggcgtcctgatcagctggaaccggggaacgagttcggtcttactcgaaggtgtcgcgaaaagcgagctcgcccaagatgacttcatgtttgccgacagcaaggagcttcttcccgtcggtgttcctgaaagcgcatcggtcgcggcgtcttcaaacgcattttggtggtcttctcacggttcgcaggccgcgacggagacgtttcaattcgacgacgtcaatctgaagaccggcacgtccgcagacgacgtattccaggcaacagcggatcgcgacttctatttcggcggaggtggcaacgaccgcctctctggaggtgcaggggccgatcatctcgccggagacgccggaaacgatgccttgtacggcggcaacggcgaaaacgaccttcgcggcggcgacggaaatgatcagctgttcggcggaaaggatgccgatatgctgatgggcgggaacggcagcgacaggctgagcgccggagccgggcacgatatgctcgacggaggtccgggcgacgacatcttggacggcgggcccggtgcggacgccttcgtggtcacgccgacgagcggaaacgacgtcatcgtcggcggattcactccgggcccgggtgcgttcgaccacatcgcgttcgaggacatcctgccgaatcaggtgagcgtgaacgatacgctccaaggcgttctggtgagctggggatccggatccattctgctcgaggggattcagaaagatcagctggcgcaggacgacttcatgttcgacagcgtggaaggcggcgccttcgtgccggatccctcgatcacatcggaagggtccgcgctgctgttccccgagaacgagcaggacttggtccatgcgaatccagtgagcgacaactggaccatcatcgcctga

SEQ ID NO: 6378 - DNA, 186 bp, BradyrhizobiumColbertium
atggatagcggtgcgcagccgccatcgcctcgttcacccgatggattttatggcgacggcgagatagaagcgacatcgaacattctccttgcggtcgtcgatgacaaacagcagctgctccggctcgccgccgcaccttggatcgtgccggccctcttgtgcaaactcggccggtccgatgcctga

SEQ ID NO: 6379 - DNA, 240 bp, BradyrhizobiumColbertium
gtgggcacgggatcggacgtcagccatattcgcgcggtcttgaaggaaatcttcgagaatgctgcgatccggagcaatgccgagatgctgatcgacggcagcgacattcgaagccgcgaagcggcaatccgtttcaagatgttgatcggcacgatcgatatcacagacgccgatctcgttgcggcctttcatgagctttgggtcggacgtgagatgaacgcgcccatctccagcttctga

SEQ ID NO: 6380 - DNA, 438 bp, BradyrhizobiumColbertium
atggccgccgccgcaggctcctccctgcgcctacacattcaacgccgattgaggccgttcttcggtccgtacccgttgctgatgatggtcacttgggcagataagatcggcttaatcaaaggaaatggagaagcgctcgcgctcctcgaaaggctgcgtcgagcggcgatcgagggagagctcgagttctatggacaactggtcacgacgacgggcgtggagcgcgaattgaccaaagtgcctcctggccacctccaggtgtgcgcgataggtctgggcacctcgcgtgcgcaggggaggaacgaggatgcattcacctacgatccgaagcgaccggcttcaaaggcctcgcggcaggtgggtcacttccgcaatctccatgtgagcaggagcgtgctggggatcatccggcggatctgggaagacgcgcacgggtga

SEQ ID NO: 6381 - DNA, 198 bp, BradyrhizobiumColbertium
gtgcttctggtgagcgcgtgccaattaagatcgcgacagcgtccacgtcgtccgcagacaccgaccgagctcgatcccgaagatcacgtgctgagcccggtcggcaacgaggagtggctgcgttcctactggaatgggatcgccggccggctgacccggggcatgctggctgccgatgcgtcgccgggacatcggtga

SEQ ID NO: 6382 - DNA, 141 bp, BradyrhizobiumColbertium
gtgcagtcccaagccggaattcccagcgcgagcgccacccatccctcaatgaaggcgcttcgcgacgatctgacggagatcgttcgcatactcctcaaagatccagagcgcctcgtcctgccgccccgctatgggctttga

SEQ ID NO: 6383 - DNA, 363 bp, BradyrhizobiumColbertium
atgactgccgagcagcaacgcgacctgttggagatgacggaggatcgccatagccgcggctcgacggtcgtgacaagccagctcccggtcgagcattggcacgaactcatcggcaacccaaccattgccgacgctatcctcgatcgcctcgtgcacaacgcccacaggctcacaagggcgagtgcctacgcaaagccgccgccaaacgtcagacgcttgacgacgagcccgccaactgacctgatgacgtcgtcggagacggtcgggatcatcgcaatccttggccggcttcaatcggtacaggcggccgacttggctcggaatccacggcccactcgtcggaatgcgctggctggggcttga

SEQ ID NO: 6384 - DNA, 426 bp, BradyrhizobiumColbertium
atggcggccgtcgccccgcgcgagggtgagcgcctcgaacagccgaagcagcagttgatagagcacggagcggttgtctcggcagaccttgctgcccaaggcgcaagcaattcagctcttgccgtcgccggtcgggccgatgatgagcagattctgatgcctgtcgatccactcgtcggcgacgagtttttggaacagcggcttgtcgagccacgcggtgccttcacgtcgatatcctggcgacggcgttctgccggaggctggcgaaccgcaatccgagcgaccagccgcttgttctcgcgctcggtcgcctcatggtcgaccagcagtgcgaggcgctcgtcgcgaaccacgttattgcgagaccaaggcttgcgagagcacaatcgccagcagtccgaccgctgcggcttcggtctcggctaa

SEQ ID NO: 6385 - DNA, 144 bp, BradyrhizobiumColbertium
ttgcttgcgccggatggggaagcgccaatcgaaccaacgcgtctcgattgcgacaagatcgatcctctgcgctcgcccgagctggatagatggacgcacagtcaatcgctcaaaccagcgaccaacgagaacgcccgggactaa

SEQ ID NO: 6386 - DNA, 132 bp, BradyrhizobiumColbertium
gtggtcgcatctttccgtcatgcagatggcaggacgcacggcgtcggtgatttctgcgatgagcagatcatcgaggctatcgaatccctcaacgtcacaaagtttcaccggctttatagcctcgtagaatga

SEQ ID NO: 6387 - DNA, 426 bp, BradyrhizobiumColbertium
gtgatcgacggcgatacgatcgagatccacggccagcgcgtcaggctctggggtatcgacgctccagagagcaaccagctctgtcggaacgaccacagcaagctgtaccagtgtgggcgcgtcgcggcgacggcgctcgccggtctgctatgggccatcaagcggcccgtgagttgctctccggttgaccgagaccggtacgggcgcacggtcgcgacctgcacagttgggacgcccggccccgatatcggacactggcttgtcgccaacggccatgcgctcgattggtcgaaatactccaagggcaagtacgaggacgcccaacgcggggcggagaaggccagcataggaatctgggctggaagctttgtcgagccgtggcgctaccgcgcttgcctcagggctggaggcaggccaagcaagtga

SEQ ID NO: 6388 - DNA, 246 bp, BradyrhizobiumColbertium
atgatttcgatcgaacagataagagcggcgcgtgggctattgggttggtctcaaaccgaccttgcggaagcggccggacgatcgctgccgaccatcaagcgccttgagcgcgagagtgatgacggctcggccgtgtccgaagatgttcgggatgcagtccgcgctgcgctcgagaaggccggcgtcgagttcatcccggaaaacggaggcggagccggcgtgaggatgaagaagcggaagcgttga

SEQ ID NO: 6389 - DNA, 318 bp, BradyrhizobiumColbertium
atgtccgcacccttcctcgccgatcagcaggtcgggcagttcatccccaccccaaccttgggccgccgcgaggctctcgccaacgccaaggcgcactcagcggccaacgcgctccgctccaagctcatgatcgaggcccacgcccgcgccaaggcggactatgccgacgaactcgcctgccgtggtcgcgcccaccacgtcaaccgaccctatagctattacctcgcgctccagatgcgcagcggcttcgctgaggctcgtgttgcgcggactggtatcgcgccagctttcgaacttctcccgcagcattgggcataa

SEQ ID NO: 6390 - DNA, 612 bp, BradyrhizobiumColbertium
atgctttcccctaccgccaacatcgaccgcgttcgcgttccagctcgcctgctgctgaagggcgatgtcaccggctccggcgagatcgtcctcggcgtcagcttcggtatcgcgacgccccgcggcaaggtcgaagtgtctctaagcaagggcgaacacggtcgtgtggggatatggaacgccggtacaatcatcgtcgtgcgccgcagcacttccaatgccaccgcacccgaggtagccgacgataccgacgaaatccccctgtctcaccggctgcctacatttaatgagctggccagcttcgatgctggcaaggcatgggaccagttatcgcccgaccagcagcgagagatcggcgtgctcgcgctcaggttcggtacggtcggccagtgtgagggctacttccacgacaccattgaaggcgtgcgcaagggcttcaactcagcccattggacgccccaggttcaggcaacggcagtttggccgcgcctgcacgtcgagctgatcgagagcgcagctcaggtcgcgtttcaggacctttgcgagcacttcgatcccctgtggccccagctattcggctggcaagctcggaaggaggtgaagcaaccctag

SEQ ID NO: 6391 - DNA, 141 bp, BradyrhizobiumColbertium
atggtgggagcggcgaccggcgtagcggatgccactgatatggagacaagcgagttcacgaacgacctcctgctgatctgcgcccctgtctcaggaatgatctgcccgacagatggttctgaccgcgccgatccggtctga

SEQ ID NO: 6392 - DNA, 267 bp, BradyrhizobiumColbertium
gtggagatctgcgcagcttatgatgcttggtataaccagcctcgcaagcgcggcttcgctaaggcggccaaggccaaggaaagagcgtcccgcgcctatcatcgcgctgaagcggcggtttgctcggagcgggcgacaacgctgtctggcctccaggcaaaattgaggtgcatcgaaatcaacggccagctcgatgacctgaatacaccgatcacggaatcgttgctccttgatcttcagcagatgggcaaaacaatcagcgcctaa

SEQ ID NO: 6393 - DNA, 156 bp, BradyrhizobiumColbertium
ttgaccgtatggatttacgaccaaggcgaagacttgaaagtattcgcgtcggaggaagcggcccagtcctggattgacgagaacgattccgagggcgttgcgttcgaatacaaagtgatcggcccgccagttccactcggcgggccggcgccttag

SEQ ID NO: 6394 - DNA, 222 bp, BradyrhizobiumColbertium
atggcgcgcctttctcctgccgagcagatccagcagagctacgacctcgccatgatggcgctcgccgactaccttacgcaagagcgcgacgcgaccgcgacggtcgacgcgctgatccgcattctcgatcgtgacaacttacgcgacgccatcaccgaggtactcgttgacgcccgggtacatccaaggccgggtatagatatctcggaggggcagctttga

SEQ ID NO: 6395 - DNA, 243 bp, BradyrhizobiumColbertium
atgttcgcgacggctcctgcgccagctcaagtcgatctgcgtcaacccaacggtcctgtcgacctgcgtgtcgatgggcgcgcgaacaagcgcgagggtttgccgccgagtgccgccgacaaaggcaactttgtttatggcaatccggtgtatgagagcgattgcgccgaggtcgagcagttgagcccgaacgtcagacgacgttatcagtcgcgggtgcgtcgtgcctgcgggctggaatga

SEQ ID NO: 6396 - DNA, 147 bp, BradyrhizobiumColbertium
atgcgcagatcgctattgatatgtcctgcggcccgcttcccgattgctgctcaatttgatcattacggcaatctcgcgctgaataccgaagcgaaggagcgcaacaatcggagatttgcggccaggctctctaagggcaagcggtga

SEQ ID NO: 6397 - DNA, 288 bp, BradyrhizobiumColbertium
atgttgacggtgctcgcctgcattcccggtgatcggctgatcgatctcagggacaagctgccccgcaccgtcaggacgattgacttactggtttcggtcgagccgttctacgcgcggctatatgtttaccagccgggtttcccggccagcgctcaaagttgctgccggaacctgcccaactcggtgctcaagttaccagtcatcgacggcaggttctgcatccggcagagccagccgaagatgaagtggaagatgcaggtcttggggcggcccggcgaatccgcctga

SEQ ID NO: 6398 - DNA, 117 bp, BradyrhizobiumColbertium
atgctgattggtttgcgcgacctgaaacagagcgttctgatcgaaatcaccaaggccatttacggcctggatgactatggcggcgtgggcggacgaagcggcagcaatggccaatga

SEQ ID NO: 6399 - DNA, 492 bp, BradyrhizobiumColbertium
ttgataacgatcaccagcaatgatgcgctgagtacgaacgccaacggccaagccaagatcacagcgttcaatgtcgcattcgatgacctctccttcgtccctgcgggaacggttacaggctatagcgcggtgctgttcaacatccaggccccaaagctggacaagaacgaggctccgaccacagtgagcttcagcttcaacaacggagcctatggagatctgacgcttggcaacaacgtctatgatttcgtcctgaaggacggcggcagcaacttctttctggcgaccgtggccgatggcagcgtgattacgcaaggctccctaatcaccagccgcaacatcgatgcgttcgaacaggttagggtcgacatcgcggcacccgtgaccgctgttcccgaaccctcgacctgggccatgatgatcctcggctttgccggcgtcggcttcctggcatatcggcgtcgcagccaggctgctgccaacccagcgtag

SEQ ID NO: 6400 - DNA, 270 bp, BradyrhizobiumColbertium
atgtatcatccaccagatcacggattgccgctggttcaattgaaagagcgccgccgcgagctggtcgttgcgctcagaaatcataagggcccgattggagacgacgagctaacgcaaattgctgtcctccagcagacgatctctgcgttcgaggatgttatcgccgacttggattgcgagcagaacgaagccaccaacgacaactcggatcgtttgctgcgttcgtttccggccttcggacggcgaagcgtcgctcactcgccagcctaa

SEQ ID NO: 6401 - DNA, 363 bp, BradyrhizobiumColbertium
atgagcgagctttcccaatacgcgatccttttcgggctgagtgtcggtgtgttcggtttcgtgctcagcctctacgggctcgcccgggccatcgggcgcacgcgctcggaaccgggcaaggacgtgcccgccacggccggtaccttgtcgcgcgatccggtctgggtccgctatcatgcgcgctatgccggttatgcgctgctgtttctggcctttgatatggagatggcgttcatgtatccgtgggcggtcgtctaccgcgaagaagggctgatcgcattgctcgacatgggcgttttcctctcaatcctgttcctgggcctgctctatggctggagccagggcgcgttgaggcggcaatga

SEQ ID NO: 6402 - DNA, 786 bp, BradyrhizobiumColbertium
ttgggtcaacaccgatcgacgcagcgcaagactccaacgacacccgatgacgaggcggctttgactgccgacatcatcgagcttgcccgccaatatggccgctacggatatcgccgaattacggcgttgcttcgcagagccggctggatggtgaacaagaagcgtgttgagcggatctggcgatgcgaggggctgaaggtccccctaaaacaacctaaacgcgggcgtctctggttcaacgacggctcatgcatccgtctgcggccggagcgacccaaccatgtctggtcctatgacttcgtcgccgaccgcacccacgacggcaaggcgttccggatgttgtgcatcatcgacgagttcagccgtgagagcctggccatccgtgtcgcgcggaagctcaaagcaactgacgtcatcgaagcgctctgcgagctgttcgtctcgcggggcatccctgcgcacatacgttcggacaatggccctgagttcgtcgccgaggcgctgcgggattggatcgccaccgtcggagccaggactgcttacatcgagccgggcagtccgtgggagaatggctattgcgagagcttcaacggcaagctgcgcgatgaactgctcaacggcgaaatcttctacacattgaaggaggcccagatcgtgatcgaaaactggcgacgtcactacaacacggtgcgtccacactcatcgcttggatatcgaccaccggcacccgaagccatcgtctggccagcaccaaaggaggtagtcaaaatgcaatccctaaactaa

SEQ ID NO: 6403 - DNA, 279 bp, BradyrhizobiumColbertium
atggcaaggaagaggcatacggctgaagagatcgttgcgaagctgcggcaggttgatgtgctgatggcacagggccggcaggtagcagacgcagtccgagcgataggcgtgacggaagtaacgtactatcgatggcgaaacgagtacggtggcctgaagggcgatcaggtgaagcgactcaaagagctggagactgagaacaatcgtctccggcgagcggtgtcggatctgacgctggacaagctgatcctggcggaggccgcaaagggaaacttctaa

SEQ ID NO: 6404 - DNA, 2142 bp, BradyrhizobiumColbertium
gtggcgcaggtgatcaagctcggccaaaagctcaccgacgatgcgataatgatgttcatcaagctgatgggacgcctgttctctcaggtcaacaaccggaaaaaacagcgccacatgaacgcccgcatcgaaacgtccaaggcgctgcgactgttcctcgacacgattctggccctgcaggctgccaatgatgccgatgaagatgcaatcgaggcggtaaaccgagaagtcggctggcatcggctgctgcagatcaagcccagccttgaagccatggtcgagaacggcgacgtgtcgcctttggtgatggcggccgagcaatatgggaacatccgcaagttcgcgggggccttccttcaggcattcacattccgctcgcgccgccggcacgatccgctgcttgcggcggtcgcggtcctgaaaatgctttatgtagaaggacgtcgtgtcctgccggatcgcgtgccggtcggccatttgggtgcgaccgaaaagaaactgattttcgaggatggcaagccggatcggcggctttatgaaatcgccacgttcgctcatttacgggaccggctgcattcgcgcgatgtgtgggtcgagggcagccggtcattccgaccgatagacgaagatcttatgccgacgccaacttttgtcgctctgaaggggcaagatcagctcggcctcggtgtcgcgtccgactgcgctatctggctggctgaagtcaggcaaatgatggactttaatctcaaacgactggcctggcgcgcccgtttcggcaagcttgatggcgtcaggatggaaaacgggacgttgatcgtgacgccgcataccagcgacgttcccgcggcggcggaagccctcaatgccgaaatcacggacatgtatcccctggtcgaggtgcccgatctcttgcgggaagtgcatgaatggaccggatttgccgatcagttcacccacgtccggacgggagatgcgccacaaaatatcgccgccatgctggccggcgtgcttgccgatggcacgaatctcggtccaaaacgcatggcgggggcgtcgaaggggattagcgcccaccagatcggctggatgcgcagcttccatgcccgctcagaaacctaccgggccgcgcaggcatgcgtcaccgatgcccatacgcgccatccgcattcgcaaatatggggcgacggaacgacggcctcatccgatgggcaattctttcgtgccagcgaccgggccgccaggcgcagcgacatcaacctgcattatggcagcgagccgggttcgaaattctacagcggtctttccgaccagtacggatattacagcatcctgccgatcagcccgaccgagagcgaggccgtctatgtgctcgacggcctgttcgaccacgacacgattttggagatcgaggagctatttacggataccggcggcgcgagcgatcatgtctttgcgctgttctgcctgatcggcaggcgcttcgcgccacgccttcgcaacatcaaggacagaaaattccataccttcgaaaaggccgatgcctatccgacattggcgaaccatattggcgcgccgatcaacaccgcgctcatcatggaacattgggacgagctcctgcgcctggccgcgtcgatcaccacgcgcaccgtcgcgccgtcggcgatcctgaagcggttgtccgcctcatcgaaatccagcgatctggccaaagcgttgcgcgagttcggccgcatcgagcgcacgttgttcatgatcgaatggtattccagcccggcgctgcgccggcgttgtcaggccgggctcaacaagggcgaagccgctcacaagctcaagcgcgccgtcttcttccatgagcgcggcgaaatccgtgatcgttcctttgacagtcaggcattccgggcttccggcctcaacctcgtggtcagcgccatcgttcattggaacaccgtctatctcagccgggcaacggctcatctgcgccagcggggccggaatattcccgacagattgctgaagcacgtctcgccgctgagctgggagcacatcaatctcaccggcatctattcctgggacaccgagcagcagttgtccgaaggcttcaggctcttgcggcttcccggccggatgttgcgcgccgcatga

SEQ ID NO: 6405 - DNA, 306 bp, BradyrhizobiumColbertium
atggaacatcaagatctgctgagcggactcattcgccttcacgttctgcatcatgcagccgaaggcgaggtttatggtcagtggatgatcgaggaactggcccatcatggctacaagttgagtgccgggacgctctatccgatgctgcgatcgatggagaagaagggctatctagtttccgagaagcaacgtgcgggtcgctccgtccggcacatctatcgagccacgccgctcggccgcgaggcactggagatggctcggggcaaggtccgcgaactgatcggcgagatgatagagcaccgctga

SEQ ID NO: 6406 - DNA, 1227 bp, BradyrhizobiumColbertium
atgacagcgcatgataattccgtgcgcctcgcgcaacctatcgcaggctcgccttttgaagtctttcgcgtgttcctcaaactcgggctgacgtccttcggcgggccaattgcgcatcttggatacttccgcgatgagctggtggtgcgccgcaagtggatcgacgaggaagggtatgcggatctcgtcgccctctgtcagttcctgcccggacccgcttcgagtcaggtcggattctcgctcggtgtcctgcgcggcaatgggttgctcggcgggttggccgcttggctcgccttcacgattccgtcggccgcaatcctgtttgccttcgcgctcggcgcagcggcatttacgggagcgatagcggaaggtgtgttgcatggcttgaagctggtcgccgtcgccgtggtcgcgcaggcgatctggggcatggcgaagaacctcacacccgatcgggaacgcgccgcaattgccttggtggggatcgcgattgtggttttcatcggcggctcgttcggccagatcggggcgatcgcgctgggagccgttgccggactctggctctgccgtggcgagctttccaagccaacaggccatctccgctttccggtttcgcgtcgcggcggagcagtcgccctcattgtgtttctggcgcttttcgtgatcccgccgctgctggtcatgacgactggccatcaggcggtggcgctgttcgatgctttctaccgctccggcgctttggtgttcggtggcggacatgtcgtgctccccttgttgcaagcacaggtggtggcgccgggttgggtcacgaacgaatccttcctgaccggctacggtctcgcgcaggccgtcccagggccgctgttcacctttgctgcctacctcggcacggtcatgggccccacgcccgatggactcgtgggcgcgtccatcgcgctcgttgcgatcttcctgccgggtgtcctgctggtctacggaatgctcccctattgggatgcgctgcggttgcggccgaccgctcaggccgccatgcgtggtgcaaacgccgccgtcgtcggcatcctcggcgcagccctctacgacccggtttggacaagcgcggttctatcaccaccggatttcgcattggcgttggccgggtttctcctgctcaccgtctggaagacgcagccgtggatcgtcgtcgtgctcttggccgcaggcgggacattgcttcatgtgatttaa

SEQ ID NO: 6407 - DNA, 1920 bp, BradyrhizobiumColbertium
gtgcgcgacaccctgaaatccttcgccgaaatcggcggagccctggtcgatgcgcaggatgatggccagccgctgggcgacgtcatcgcgagcggatctggttgggacggcttcaaaacccttgtcgtgatggcaacgaggctcaccgccaccatggcggacgatccgctcaatcatgtgctcgacggctatcaccgtttccgccgatacgctccccgcatgctacgcctgctcgacctccgggccgcccctgttgcgcagccgcttctggaagcagtgacggcactgcgcaccggttcgaacgatgccgcgcaaaccgccttcctgcggccgagctcgaagtggcatcgccatcttcgtgcccaggcggccggtgatactcgcctctggaagattgcggttctgttccatctgcgcgatgcgttccgctccggagatatctggctggccagatcccggcgctatggcgatctgaaacaggcactcgttccggcgcaagctgtcgcggaagacggccgtctcgctgtgccattacggccggaggaatggctagcagatcggcaagcccgcctcgatatccggctgcgcgagctggggcgtgcggcacgctcgggaacgattcccggcgggtcgatcgaaaacggcgttctgcatatcgagaagctcgaagccgccgcgccgatcggcgccgaagatctggtgcttgatctctataagcagatcccgcccacgcgcatcaccgatctcttattggaagtggatgcagcgagcggctttaccgaagcgttcacccatctgcgcacgggagcgccctgcgccgaccggatcggtctgatgaacgtcattcttgcggaaggggtcaacctcggcctgcgcaaaatggctgacgcgacgaacacccacaccttctgggaattgatccgcattggacggtggcatgtcgagggcgaagcctacgaccgggcgctggcgatcgtcgtcgaggcgcaggcggcgttacccatggcccggttctggggcatgggcacctcggcttcgagcgacgggcaattcttcgccgccacagagcatggtgaggccatgaatctggtcaacgcgaaatacggcaatactccgggcctgaaagcttatagtcacgtctcggaccaatatgcgccgttcgcaatccaggtgatccctgcaacggcgagcgaagctccttacatcctcgacggcctgctcatgaacgatgccggccgccatgtccgtgaacagttcgccgacacgggtggcttcaccgatcacgtctttgccgcatgcgccattctcggctaccggttcgcgccccgcatccgcgatctgccgtccaagcggctctatgcgttcaacccatcggccgccccggcccacttgcgggcaatgatcggcggaaaaatcaaccaggccatgatcgagcgcaactggcctgatatcctgcgcatcgccgctaccattgccgccggaagcatcgcgcccagccagatcctgcgcaagctcgcctcctatccgcgacagaacgaactggccacggccttgcgcgaggtcggccgcgtcgagcggaccttgttcatgatcgactggattctggatgccgaactgcaacgccgcgcccagatcgggctcaacaagggcgaggcccatcatgcgctgaaacgtgccatcagcttccaccggcgaggcgaaatccgcgaccgatccgccgaaggccagcattaccggatcgccggcatgaacctcctcgctgccatcatcatcttctggaacaccatgaaactgggcgaagtcgtcgccaaccagaagcgcgatggaaaggtgctatcgcccgatctgctggcccatgtctcgccgctgggatgggagcacatcaacctcaccggcgaatataggtggccgaaggcatag

SEQ ID NO: 6408 - DNA, 1608 bp, BradyrhizobiumColbertium
gtggccgtccagctgcgcttcctgatccgatggatggcgggccggggcatgcacgggttcgacgagttggacaccgatacggcaaaagagttcatgcgatccgtcacggagcgacgcggccatgcaggcatgccgctccgaccgggcacccgtcaggcatacgccaatctattgatcggcctcttccagcaaagagccagactggcctgcccaccgagcgagcatcccttcgccgatgagcgcgctagccggttctccggcttcggccgccagaccatccagcgcttgccccacacgccggacgacatcgccgttgcgctcatctcggcagcgatccggctgatcgggcaaccagccgccgacgtcatcgcgctgcgcgaccgcgtcgtgccgtttcgcaaggacgatcctggcccaacgcctttcgcccaccgccaggccgtccgtgcgctcgtctcctcgttccgcttttccacgatcgagggcgaggaggtcgcctggcaccctccgttgacccgcacaagggagttgcgcctgctgatcaaccggattcaggaggcgtgtttcgtcaccatctcctatctggtcggcgcgcgcgtgtcagagattctctcgcttcaagcgaactgcgtcgaagagcgcccatccgccgatggcgccgaatcctttagctatctccgcgggcggatcttcaagaccgccggcactgacgccggaacgccgcatctctggccggcgccggcacccgtcctgcgcgccgtcgaggtcctgcatcatctgtcggagccatttcgcgctgagacaggccgatcggagctctggctctccctcgctggcaggggcgtcgtcgaccgccgcccgccggaggtcccgaccggctggtctctcatcatccggctgaaccggaggttcgctcccttcatcgatctgccttgtcagggtgacggcacgccctggcacctgaccacgcatcaggggcgcaagactttcgcccgcttcgtcggcaagcgcgatcgcaccggcctgcacgctctccagcatcacttcgggcatgtgacccgcatcatgaccgacagcgcctatgtcggtaccgattttgatctgagcgagctcgtggacgcacagaccctcgaagagacgcgcttcgctctcgaggagctgctcaccgcctcgcgcctcgccggcaatggcgggcgccgtttgtcctcccgatcgcgtttccgcggccgcacgcgcgacggcgagctcgccgcctacatcaatttcctgatcgaagacagcggcatgcggctcggcgtctgcgattgggggtattgcgtctaccgtgtggagaccgccgcctgcatgggcgacaatcgtggtccgaacgcgctctggcgcacccagagcacctgcgcaagctgcgccaacttcgccgtcaccgagcgtcatcgcccggtctggcaggcacgcctcgaccgcaatctggcgttgatcgccgatcgacgcctcgacgatccaagcctcgcgctcgccaacacgcgcatcgccgagtgccaacgcattctgtccgatctttccgccgcaggagaaggccatgcccaagagatccaccgcaaatccggatga

SEQ ID NO: 6409 - DNA, 462 bp, BradyrhizobiumColbertium
atgcccaagagatccaccgcaaatccggatgatcggcgcataaaggccacggcggagaagctgcgcgcggcgctcgatcgattgacgaatggatcctcagaacaacccgccgcttcgatccgacgtttgaccgtcgctgcgctcgcgcgcgaggcgggcgtcggccgcaacgccatctacgccaatcaccgtgacatcctcgacgccctcatccgagcccgccgacggcaaagcgtacctgatcggatcaccaccatgggcgacacactcgtcgaacagcgtggtgtaatcgacaacatgcagcagcagatccggcagatcgtcactgagaatgccggcctcctccaacgcgccatcgaggcggaacgccgtgccgagagggccgagcgccgcagcgcccacttgaccaaggagatcgttgtcctgcgcggtcccgcagtgctgcgaacgtcgagcgaatga

SEQ ID NO: 6410 - DNA, 147 bp, BradyrhizobiumColbertium
atgctgatggtgttcaagctcatcctcgccgcattaaagatctggcggcagctcaaaggcacaaatcatttgtcgaaactcattgcaggtgtcagattcaacgaccgcatcgaggtcatccaaaagccggcgaaccgggtcgcctga

SEQ ID NO: 6411 - DNA, 378 bp, BradyrhizobiumColbertium
atgatccaccatgtctcagtagggacgaacgatgttcagcgcgccaagcgcttctacgatgccgtattgcccatcgttggcatcatgccgatggcggaggatcagggtgggctgggctatgggagcggcacgtttcacttcagcgtgcaggttccgatcgatggacgacccgcgaccgtgggcaacggcactcatatcgcctttgccgtcgagaaccgctcgatggtcgatcgcttttacgcaacagcattgaagcacggtggcagcgacgatggcgctcccgggctgcggccgaattacgacccgaactattatggggcgtttgtccgagatccggatggtcacaagatcgaggcagtgacctactcggcaaaatag

SEQ ID NO: 6412 - DNA, 168 bp, BradyrhizobiumColbertium
gtggacaccttctaccgggaagccggaccggaacgctcgccggtcgttctgctgccgcacggctatccctgttcatcccatgaattccgcaatctgatgccgcggctggcggataaattgcggctgattgctcccgactatcgtaagcggcatgaggcacccacctag

SEQ ID NO: 6413 - DNA, 1266 bp, BradyrhizobiumColbertium
atgaacgagactaccaacatcctgcccttccgtcagccgtctgcggttgacgatccactgacagaaattctgcggaacggagcccgtgagctgctcgcccgggccgtcgagatcgagttgcaggcatttctggagacgacggcggagctgaagctgccggatggccgtgccagggtggtgcggcacggctttgggcctgcgcgtaagattgccacggggatcggcgcgatcgaggtcgcccggcccaaggtcagagaccgcggtgcgagcggagctgatcggatccgcttcacctcggcgatcctgccgctgtgggcgcggcggacgaagagcctggatgccctgctgccgatcctctatttgcgcggcatctcgaccggcgatttccaggaagcgctctcggcgctgctcggccaggatgcgccgaacctgtcgccatcggtgatctcaggcctgaaggcgcaatggcagggcgagtacgagcgctggcagaagcgcgatctgtcgacgcggcgctatgtctacgtctgggctgatggcgtcttcctgcaggcccggatggaggaccacagcgaatgcatgctggttttgatcggcgcgacgcccaagggcaagaaggagctgatcggctttcaggtcggcgtgcgcgagagcgcccagagctggcgcgagcttctgatcgacattcgccggcgcggactgcaggctgcgcctgaactggcggtcggcgatggcgccctcggcttctggaaggcgatggacgaagtcttccccggcacgcggcggcagcgctgctggcagcacaagaccgtcaacgtgctcaacaaggttccgagctccgtgcagagcggcatgaagaaagccctgcaggacatctccatggccccacacggggctgccgcggagcttgcactcgaagccttcgccgagaaatacggagcaaaatatgcgcgcgcggtcgattgcctcatcaagaatcgcgaggatctgctggcattctatgacttccctgccgagcactgggtccacctgcgaaccaccaatccgatcgaaagcgtgttcgccacagtgcgacacaggacggttcggaccaagggatcgttgtcgccacagacggccaggctgatggtgttcaagctgatcgatgcagcctcgaaaacctggcgtcgattgaaaggcacaaatcagttgccgaagatcatcgccggtgccagattcgccgacggcatcgaggtcattccgccccagcaaagccacgccgcctga

SEQ ID NO: 6414 - DNA, 243 bp, BradyrhizobiumColbertium
gtgatcgggatcgtcgtcctctacgccatctggatcctgcatctgctgctatttcggggtgacggctttgccgaatggatcgggctcctggtcgtggtgcagaacatcttcacttcactgttcaactcgcatctgttcgacttccacgagggctggatgtacgtcatcggcgtcggcgtcgcagggggcatggtgatccgggcacaacaggccgaggcgaaggtgggggaagtcggttcctga

SEQ ID NO: 6415 - DNA, 1545 bp, BradyrhizobiumColbertium
gtgctggtcgacgctgccgaaggcccgctgccgcagaccaaattcgtggtctccaaggcgctcaaggtcggcctcaagccgatcgtcgtcatcaacaaggtcgaccgccccgacgcgcggccgaccgaagtcatcaacgaggtgttcgacctgttcgcggcgctcgacgccagcgaggagcagctcgacttcccgatcctctacgggtcggccaagcagggctggatggccgagagccccgagggcccgaaagacaagggcatggagccgctgttcgacctgatcctgcgccacgtcgcgcctccgaaggtcgaagaggggccgttccggatgatcgggaccatcctcgaagccaacccctatctcggccgcatcatcaccggccggatctcgtccggcgtgctcaagccgaaccagcaggtcaaggtgctcaacgccgacggcaagctggtcgaacagggccgtatcaccaagatcctggccttccgcggcctcgagcgcacgccgctcgatgaggctgaggccggcgacattgtcgcgatcgcgggtctcaccaagggcaccgtcgccgacaccttctgcgatccgaccgtcgaggtgccgctgccggcgcagccgatcgatccgccgaccgtctcgatgtcgttcatcgtcaacaactcgccgctcgccggcaccgaaggcgacaaggtgacgagccgcatgatccgcgaccgcctgctccgcgaggccgagggcaatgtcgcgctgcgcgtggtcgaatccgccgacaaggatgcgatggaagtgtcgggccgcggcgaattgcagctcgcgatcctgatcgaaaccatgcggcgcgaaggcttcgagctctcggtgtcgcgcccgcgcgtcgtgttccagaaggacgaggcgaccggcgccaccatggagccgatcgaggaagtcgtgatcgacgtcgacgaggagcattccggcgtcgtcgtgcagaagatgagcgagcgcaaggccgagttgatcgagatgcgcccctccggcggcaaccgccagcgcctagtgttctacgcgcccccccgcggcctgatcggctaccaaggcgaactgctcaccgacacccgcggcaccgcgatcatgaaccgcctgttccacggctatgcgccgtacaagggcgaaatccagggccgccgcaacggcgtgctgatctccaatgaccagggcgaagcggtggcctacgccatgttcaagctggaggaccgcggcccgatgatgatcgagccgggctggaaggtctatcgcggcatgatcgtcggcgagcatacccgcgacaacgatctcgagatcaacgtgctcaagggcaagcagctcaccaacatccgcacgacctcgaaggacgaagccgtccgcctgaccccgccgatccgcatgacgctggaaaaggcgctggcctatatcgaggacgacgagctcgtcgaagtcacgccgaagtcgatccgcctgcgcaagaagcacctcgacccgaacgagcgcaagcgcgcggaaaaggccaaggaagcggtggcgtaa

SEQ ID NO: 6416 - DNA, 1257 bp, BradyrhizobiumColbertium
atgagctcccttccctccttcgtcgacatcgcggtcatcggagccggcgcggccgggcttggtgcggcgcatgcgctgaaggactcaggactttccgccatcgtgctcgaagcgcgcgaccggctcggcggccgtgcatggacggtacaggcctcgcccgaggtgacgttcgatgtcggctgcggctggctgcattcggccgacaagaactccttcgttacgatcgccaagcagctcaatttcgagatcaacactgaccttccgccctggggcgaccgcgcctttggcgatgcgtttccggaatccgaacgcaaggaattcgtgcgtgcgatcgacgaattctacgagcggatatgggaagcggcggagcaaggcgaggatgcgcccgccgccggctatctcgagccgggcaatcgctggaatccgatgatcgacgcgatctcgacctacgtgaacgggtgcgagctcgaccaggtctcgctcctcgacatggaggcctacgaggacacctacttcaattggcgcgtgcgcgccggttacgggacgctgatcgccgcctatggcgcgccttgcccggtcgcactgaactgcaacgtcacgctggtcgaccattccggaaagcgcattcggctggagacgtcgcgcggcacgctcgaggccggagctgtgatcatcaccgttccgaccaatctgatcgcggacgaggccatccgcttttccccggccctgcccgtcaagctcgatgccgcgcgcggcctgccactcggcgtcgacgacaaggtgacgctggcgctcgatggcgccgaagcctttccaatcgagggaaacctgcgtggcgccaccatgcgcaccgcgatgggcacgtaccatatccgtcccttcggccagccctgcatcgacggctttttcggcggccggttcgcgcgcgagctggaagatgcaggcgacggcgccttcgccgcccagagcatcgacgaaatcgccgccttcctcggcaacgacatcaggcgcaagctgaggccgctgcgcgagtcgcgctgggcgcacgatccgttcgcccgcggttcctattcgcacgcgctgcccggacatgccggtgaccgcgccgtgctggccgcgccggtcgatggccggttgttctttgccggcgaggccacatcaccgaacttcttctcgacagcccatggcgcgagggacagcggcgagcgggcggcgaaggaggtgctggcggctttgggtgagctacgctcgcaatga

SEQ ID NO: 6417 - DNA, 408 bp, BradyrhizobiumColbertium
atgccaagttggcccgacgatgacgtgatcctgttcgacggcgtctgcatcttctgctcgcgctgggtccggtttgttgcgaaccgcgacatagccaagaggttccggttcacgccgatccagtcggattatggagcccggctggcgcgcacgttcggcatcgacccccatgatcccgataccaacgcggtggtccatggcggtgaggtcttgttgaagtccgacgcggcgctgaccgtgctgtcgctcttgcccggatgggattgggtgcgcgcgctgttcgcgataccgaagccgttgcgggacgccgtctacggcctcgtcgcgcgcaaccgctatcgcatcttcggcaggtacgaggcctgctttgtgccagactcggatttgcgggcaagggtgattgagtag

SEQ ID NO: 6418 - DNA, 1320 bp, BradyrhizobiumColbertium
atgagtgggcgaaccatcctggtgctcggcgcctccggcctgatcggccgcttcgtcaccgacgatctgcgctcacgtggttttcgcgttgtcggcgtggcacgccgcctgtcctcggcgcagaggatgagcgcgctggacgtcgagcttccgatactctcgctggatactgcctcgctgacgcgtctcctcaacgagcatgcggtgagcgtcgtcgtgaactgcctcggcgtgctacaggatggccctggcagcaacacgagcacggtgcatcgcgacttcgtcgcgcagctgctgaaggcggtcggcaatagtggccgtctaatccggctggtgcacatatccatccccggctctgcggaggcggatcgcaccgccttcgccacgaccaagcgcgaggccgagcacctgatcgcaagcagcggcattccccatgccatcctgcgacccggcttcgtggttgcgccctcagcctacggcggcagcgccatgctccgcgcgcttgctgccttcccgatcgatttgccggcgagggaaatggcaacgccattccaaccggtcgcgatcgaggatatttccgcgaccatcgcctggctcgcagcacgcgacatcgacaatgcgtcactgaaggcggtgagctgggacctgatgcaggccgaaccggtttccatgtccggtgtcatcaagcccttccgtgttgcttttggcaccgaaggatggcctcgcatcgcgatgccgactttcatcctcgacctgggcgccaaactcggcgatctcgccaattatctcggctggatgccgccgatgcgctcgacggccatcgccgaactccgtcgcggggtgacgggcgacccctccgcatggatcgctgcgacgggcatcgcgccgaagaggctggccgatgcagtcgggcgccaccccgccaccatccaggacaaatggtttgcgcgcctgtttctgatcaaggcactaatctttgccagcttggtcgccttctggctcgtctccggcttcatcgcactgttcgtgtcctatccggccgccgccggcattctgagcgcgcacaacttcccgcccgcgctggtcgatcccatcacgatcggcaccagcctgatggacatgagcatcggcatcctgatcgcatttcgtcgcactgctgctgttgggttggttgcgggcatcgtcgcctcgttcggctatatggtgggggcggcgatcctgacgcccgacctctggatcgagccgctcggcgcgctggtgaagacgggaccggccatcgtgctgatgttcgtcgcgctcatgatgctggataaccgctga

SEQ ID NO: 6419 - DNA, 330 bp, BradyrhizobiumColbertium
gtggtcgtgatcgcggatgcgatctttacgctgtcggccgtgatcctgcagccgctgacggggggcctgttgatgatgctctcggcaacgtcggtgaccgaacgctggctgctcgcatcgctcgcgctctatgcctttgcgggtctgttctggatcccggttgtcttcatgcagatcgagatgcgcgatctcgccggcagggccgccgctcagcgcagtgcactcccggagcgctatttcgtcctgttccgccggtggtttgcgttcggcttccccggctttggggcaacaatgttgatcctctggctgatgatcgcaaaaccgttctga

SEQ ID NO: 6420 - DNA, 147 bp, BradyrhizobiumColbertium
atgacgccgtatttcctgctcaagtttttccatgtgctgggcgccatcgtcatcctcggcacaggaaccggcatcgccttcttcatgcgatggcacatcgcacggccgacgtggcgttcatcgcccgcaccgcctcggtggtcgtga

SEQ ID NO: 6421 - DNA, 900 bp, BradyrhizobiumColbertium
atgcgactccataacaccatcgcgctcctgcctctgctggctttgctgactgcggcacccctgtgcgcccaggccacgttcggtccatcgggcgaggaggacggaccgtttcgccggcaacattggcttgtgccctcgccggatccgggccttgccgcgaaagccctcctgtttcgtccgccgggggcgggcccgttccggctcgcggtgatcgcacacgcctcgacgcagaacgcactgcgtcgtgcgcaaatgccgccgccggaataccgcgcgctcgccgcctatctcgtcgcgcgcggctttgctgtgctggtgccggagcggcccggccatggtgccaccggaggtcgctatgtcgaggatcagggcggctgtgacgaggccgactatgcgcgctcgggccgtgcaacggccgaggcaatttcgctcgctgtggactatttgcgaacgcaggatttcatcggcaaggacgccgcgatcgtaatcggccattccgccggcggctggggtgcgctggcgctcgccaaggccgatccgaaggtgatatccgcgattacggtgtttgcgccggggcgtggcggccatgccaatgatgagccgaaccgggtctgcgcgccggatacgcttctcggcgccgcggcggagttcggcacggcggcgcgcattccggttacatggctcgtcgcaagcaatgacagctatttcgcgccgccattctcgcagaagctcgccgatgcgtttcgcgcacgtggcggcaaggccgacctgcgcgtcctgccggccgtcggcagcgagggccactggatgatcgaaaccgaagccggggtcaaagccgcaagcagcgaactcgcacgggcactgaacccacccaagcctgtggcgaccaagaagcgatga

SEQ ID NO: 6422 - DNA, 522 bp, BradyrhizobiumColbertium
ttgatcgcgtccatgagcacaaccctgatcgaggtccggcccgcgaaagctgcagatgcaactgcggtggcatcgacccatgacgaagcctggcgttcggcctatcagggcatcatccccggtgccgaactggagaagctgatcaaccgccgcggtccgcagtggtgggacagcgcaatccgcaagggcagccgcgtcagcgtgctcgtgttcggcgacaagatcgcgggttatgccaattacggccgcaaccgtgcccgcagcctgcatttcgacggcgagatctacgagctgtatctgcgtcccgaattccagggcctcggcttcggccgccggctgttcgccgccgctcgccgcgacctcatgcagagcgggctgaagagcatggtggtgtgggcactctcggacaacgatccggcgacagagttctaccgggcactgggcggccgtatggtggcgcgctcgtcggagcggttcgggcccagggcgctcgacaaggttgccttcgcttggaccaattga

SEQ ID NO: 6423 - DNA, 537 bp, BradyrhizobiumColbertium
atgcgtatcgatgcggtctcgatcgggaaaaacgtcccccatgacgtcaatgtcatcatcgaagtccccgtgggcggcgaaccgatcaagtacgagatggacaaggaggccggcacgctggtggtcgatcgcttcctctacacgccgatgcgttaccccggtaactacggcttcatcccgcacacgctgtcagacgacggcgacccctgcgacgtgctgatcatcaacacccgcgccatcatccccggcgccgtcatgagcgtgcgcccggtcggcgtgctgttcatggaagacgaggccggtggcgacgagaagattctggcggtgccgtcgtcgaagctgacgcagcgctacgacaaggtgaagagctattccgacctgccggacatcacgctgcagcagatccagcacttcttcgagcactacaaggatctcgaaaagggcaagtgggtgaagatcctgcgctggggcggcccggaagatgcgcacaagctgattctcgaaggcatggatcgcgagaagaagaagaagggctga

SEQ ID NO: 6424 - DNA, 885 bp, BradyrhizobiumColbertium
atgaccgccaagatcatcgatggaaaaatcattgccgcggaattgcgtgcacgggtcgctgacgaggtcgcccgcgtcaggcgcgagcacaatctgattcccggccttgcggtggtcctggtcggcaacgacccggccagtgaggtctatgtccgctcgaaacacacccagacgcaggcagcgggcatggcctcgttcgagcacaagctgccggccgatgtctcgcaagcagatctgctggcgctggtcgaaaagctcaatcgcgatccgtccgtgcacgggattctggtgcagttgccgctgccgaaggggctgaataccgaagccgtcatcaatgccatcgatcccgccaaggatgtcgacgggctgcatccgaacaatgccggccgactcgccgggggcttcgaggcgctgtcaccctgcacgccgctcggctgcatcatcctgaccagaagcgtgcacgcttcgcttgagggcatgaatgccatcgtcatcggccgctccaacctggtcggccgaccgctggtgcaattgctgttgaacgagaacgccacggtgacgatcgcgcattcgcgctcgcgcgacctgccggggctcgtgaggaaggccgacctcgtctatgccgcggtcggtcggcccgagatggtgcgcggcgactggctgaagcccggtgcgaccgtgatcgacgtcggcatcaaccgcatccccagggacgacggcaagacacgtcttgtcggcgacgtcgcctatcaggaagcgcttggcgttgccggtgccatcacgccggtgccgggcggcgtcggccagatgacggtggcgtgcttgctggtgaatacgctgcgcgcggcctgcgcgatcgcagggctgccgaagccggcggtgtaa

SEQ ID NO: 6425 - DNA, 276 bp, BradyrhizobiumColbertium
gtgacaccgcgtggcggccgcgacgacatcgacgggatcgagcagctcgcggacggccgcagtgtgctcaaggtgcgggtacgcgccatcgccgacggtggcgaggccaacaaggccgttctggtgctgctggcgaaatcgcttggcgtgcccaaggccagtgtgaagctgctgtcaggggccacctcgcggctgaagcagatcgcggtcgacggcgatccggtgcggctcggagaagccctgcgtcagctcgcctcggccaaatcgaacgactga

SEQ ID NO: 6426 - DNA, 291 bp, BradyrhizobiumColbertium
atgcgtgccgttctcgacatcgtcatcatcgtgctcgatctctacgtctggctgctgatcgcctcggcgatcctgtcctggctgatcgctttcaacgtcgtcaacacccgcaaccagttcgtctcggcggtggcggagttcctctaccgcattaccgagccgctgctcgcgccgattcgcaatttcctgccgagcctcggcggcctcgacatctcgccgatcatcctgatcctgatcatcatgtttatcgagcgggtgatcctgtactacgtctatcccaacgtgatctga

SEQ ID NO: 6427 - DNA, 73 bp, BradyrhizobiumColbertium
ggggccatagctcagctgggagagcgcgtcgttcgcaatgacgaggtcggcggttcgatcccgcctggctcca

SEQ ID NO: 6428 - DNA, 813 bp, BradyrhizobiumColbertium
gtggcctacgaacacattctctatgaagtgagcgacaagatcgcgaccatcacgctcaaccgcccggaccgcatgaatgcgtggacgccggtcatggagcgggacgtgcgtcacgcgatggaagcgtcaaatgcggatgacaacgtccgcgtcatcgtgatcaccggcgcgggccgcgccttctgcgccggtgccgacatggacgcgctgaaaggtctcgaccccgacgacgtcaggcgcgcctctagtctgccgcccttcgacatgaaccgccggccggattggcagacccgctacggctattacccttcgatcaagaagcctgtgatcgccatgctcaacggcgcgacggccggcatcggactggtgcatgcactctattgcgacctgcgctttgctgccgacaacaccgtgttcacgacggccttcgcgcggcgcggcctgattgccgagcacggcattagctggatgctgccgcgtatcgtcggccatgccaatgcgctggacctgctgctctcggcgaggcgcgtgtcgagcgaggaggcgttgcggatcgggctggtcaaccggctctgtccgcccgagaagctgcgtgaggagacttacgcctatgcgcgcgatctcgccgatatggtctcgccgagcgccatggccgtgatcaagcggcagctctacgaggtgccgttccagacgctggcggaggcgacgatcgaggccaacagggagatgatggtggctctgggcggtagtgatttccgggagggcgtagcaagcttcatggagaagcgcccgccgcggtttacggggaagtag

SEQ ID NO: 6429 - DNA, 759 bp, BradyrhizobiumColbertium
gtggtcgctttcccacggagagcgccgagcgccgccgcctctgaaagccggcttccggtcctgatcgtcctgcatcaggaatgctcgacaccgggccgagtcggcaacgcgctgcgcgcgctcggccatggcctcgacatccgccgcccccgcttcggcgatgtcctgcccgaaacgctggagcagcatgccggcgcagtgatcttcggcggtcctatgagcgccaatgattccgacgactacattcgtcgtgagatcgactggatcgaaattccgctccgcgagcagcggccgttcctgggcatctgcctgggtgcgcagatgctggcgatgcagctcggggcgcgcgtcgcgccgcatgcggatgcgctgagccagatcggctattacccgatcaggccgaccgccgcgggccatgcgctctgcccgcattggccggatcaggtctatcactggcatcgggagggatttgagctgccggtcggcgctgagctgctcgcggaaggcgatgatttcccggtgcaggcgttccgcgccggccatgctttcggcgtgcagtttcaccccgacgtgacttacgcgatgatgtgtcgctggaccacgcgcggctatgacggcttcagcgcgccaggtgcgcggcagcgccaccaccacttcgcggatcgcgccgtctacgatgccgctgaacgcgcctggctcgatcacttcatcgacggctggctggcgcgccggccggtgctggcgcaagccgccgagtga

SEQ ID NO: 6430 - DNA, 717 bp, BradyrhizobiumColbertium
gtgtttgccgccaatggacatcgcctcgccttgaccgccagacgcgcggatcggctcgaggccctggcgggcgagatcgctgccaagggcggcaagaagccgatcgtgatcgcctgcgatctcgaggaacgaaatgccggcgagacgatcgcgtcagcgcttgctgccgaaggcgtagagctcgaccatctcgtcaacaatgccgggttcggtgtcttcggcgatgccatcgagcaggatcgcgcggaacagctcggcatcgtcgatgtcaatgtccgggcgctcacggatctgtcgctgcgctttgccgaccagctcatcaggaacaagggcggccttctcaatgtcggctcggtcgccggcttcctgcccggccccggcatggccgtctactatgcatccaaagcttacgtgatctccttcaccgaggcgctgcgggcggagctcgccccccacggcgtccgcgtcaccgtgctttgcccgggcccggtccccaccgaattccaggcccgcgccggcgtcggctcccaacacgataccgccctcctcaaggtttcggccgccgatgtcgcgcaggaggcgtatcgtggcctcatgaccaacaagcgggcagtgctgccgggcctcggcatcaagattgtgccgctcgcactgcgtttcttcccgcgcggcttcatcctggctgccaccagccggttccagaggcgcaggcgatag

SEQ ID NO: 6431 - DNA, 489 bp, BradyrhizobiumColbertium
atgctcgacggcttgcgccaattcatcgccgatatcgtcggtccccaggaccatgcccgcgcattcggcgacagcgattatcggctggcagccaccgcactgctgattcacgtggtctcgctggacggccggccaacagcagccgagcagcgcaagctgcacggcctgatcgaaaaccatttcgggctggaccgcggcacggctgatcggctgatcgcggatgcgacggaggtcgagggcgatgcggtggacctctatcgcttcaccagcgtcatcatgcgctcgctcgacgaagagggtcgcaagcgcatcgtgcagatgatgtgggagctggtctatgccgacggtcaggtttccgagttcgaggacaatgtggtctggcgtgcttccgacctgctcgggatttcccagcgggaccggatcgagctgaagcacgcggtcgcggagcgtgccggcggccaggtcaagaatggcgccgtcggcggttga

SEQ ID NO: 6432 - DNA, 984 bp, BradyrhizobiumColbertium
gtgttctggagctccggcgtcgacttcaacaaggactcctttgcgacgctggcgaacgaggtgacgctcgacacgatggagctgccggcgggcgagaaggcgaccatgtcgctgcagcttccgaacgacttcgtcatcatcttcgagccggtgacgcacgccgctcatttcatcgacgttcagggcgagccgaccagggatcgccagcagctcgctatcatgtacaacaaggtccaggccccgacgggcacgacgaccatgcggccgggcccgttgcgtctgtcgctggagaaccaggcgggcgtgcgcgtgctgccgtcggtgttcatcgcagccgaggcgcttcatcatctgatcggcaagcgcaagccgttcctcaccgccaagcgcatgctgtcgaaccagacttttcgggatgtcttcaaggccgacaatctcagtctcgaccagaggctccagatcacctccctgaccttcctgttcaccgatctcaagggctcgaccgcgctctacgagcgcgtcggcgatctcgccgccttcgatctcgtgcgtgcgcatttccatgcgctgctcgagatcatctcctccgagaagggtgcggtggtgaagacgatcggcgatgccgtgatggcgaccttcgtccgtcccgagcatgcgatcgtcgcgggccttcggatgcgcgcggccatggacgagctcaacaggaagcgcggcaccactgacctcatcgtgaagattggtatccatgaaggtccttgccttgcggtgatgctcaacgagcggcaggactatttcggtcagaccgtcaacatcgcggcccgtgtgcagagcctgtcgaccgcgcaggagattcacatcaccggtccggtgctcgatgcgccggcggttgccgaggtgctcgagcagcgcgagatcaagccgatccaaaagcaggctgcgctgcgcggcatcgccgacaagatggtggtctatgagatcccgtga

SEQ ID NO: 6433 - DNA, 411 bp, BradyrhizobiumColbertium
atgagcgacatccaggcccaattttccgttctgaagcagaccgccgacgcgaaggtcgccgatgcgatcgcgcatctcatcgaggatggggaggatcacgagctcaaccgcgtcaacgtcctcgatttttccagacagcacggccttgacgaggaacgcgtgatctcggcgttcctgcactcggcgcggctcggcctcttcgacctcggctggaacgtgctgtgcccgggctgcggcggcgtgctgggcgcgcactcgacgctgaaggcgctcaagccggacgattatcactgcgcgctctgcgcctgcggctacaaggcctccgtcgacgaccaggtcgaggtctccttcaccgtgaacccgcgcgtccggcgtatcgcggcgcatgaccctgacacgcttccggtctga

SEQ ID NO: 6434 - DNA, 1371 bp, BradyrhizobiumColbertium
atgaatatcgcaagcatgcgtcggcccatcatccctccggccccgccgcgggcacccgacgacatgtcgttcttcgcgcgtctcgccgtcgtcaggcagaacatgatcgcgacctggggacagcgagcctatgaggaggacgtcatcccgggccgcttcttcttccggaacagcttcatcctgaaccagccggatgcgatccgtcatgtcctgctcagcaactacgagaactacacgcgcacgccggccggcattcgcatgctgcgtcccgtgctcggcgatggcctcctgatcgcggaaggtcattcctggacctttcagcgccgcaccctcgcgccggctttcacgccgcgcgccaccgcgaatctcgttccgcacatgacggcggtgctcgacgagaccatcgcaaaactggatgcccgaacgggtgaagacatcgatttgcgggaggtcatgcagcgcatgacgctcgagatcgccgggcgcacgatgttctcgttcggcatggaccggcatggcgcgacgttgcgcaacttcatcatggaatatgccgcgcggttgggacggccgtattttctcgacatgctgctgccggtctcctggccgagcccgatggattttgcccgcgcccgtttccgcaagcgctggacggaattcgtcgcgatgctgattgcggagcggcgtgcaaccggcaagaaggaaggcgcgccgccgcgcgacctgttcgatctcatggacgaggcgcgcgatcccgaaaccggcaagggcttctcggacgagcagctcgtggacgaggtcgcgaccatgatcctcgccggtcacgagaccacggcgacggcactgttctgggctctctatctgctcgcactggatcctgacacgcaggaggaggtggcgtccgagacccgcggtgaacacctcgacagcatggccgacatcgatcggcagaaattcacccgggccgtgatcgacgagacgatgcggctctatcccccggctttccttgtcgcgcgtgctgcgcgcgacaaggacaatgcggccggcgtcgagatcggcaagggcgacatcatcatgatcgcgccctggctgctgcaccggcacgagaagctgtgggaccagcccaacgcgttcattccgaaacgcttcatgtcgaaggaggcccccgaccgtttcgcttatctcccgttcggcgcgggtccgcgcgtctgcatcggtgcgccgtttgcccaggccgaatccgtgctggcgctggcgcggctgatcggcgcattccgtgtcgagcttgcggacacggccagtcccgtgatgccgctgggcgtcgtgacgacccagccagatcattcacccatgttccgcatcacgcggcggtga

SEQ ID NO: 6435 - DNA, 1374 bp, BradyrhizobiumColbertium
atgaagctgtcgcgacggacgatcctgcagggcgttggcagcttgccttttgcggttgcgagcttgcggactggtgtgctggcccagaccgcacccgcggcgacgccggacgcggaggtgccgccgatcctgttcgtccatggcaacggcgattacgacgcgctctggataacgacgctttggcggatggaatcgaacggtatcgcgcgcgagcgcatgatggcaatcaatttcagcgatccgcttgcgcgtagtgacgacaaggtcgagcaggcgaaccgctcctcgaccgaggaccagcgccgcgagctcgccgctgccatcactgaactgaagcgcaggacgagcgcgtctcgcgtggcgctggtcggcagctcgcgcggcggctatgccatccgtaacgtcgtcaagaatggcggtgccggcgaggtcagccacgccgtgctgtgcggcacgcccaatcacggcgtgttcgcgaccgacgaccagcccaacaacgaattcaacggccgcggcacgttcctgcgaagcctgaacgagggcgcgagcgaggtgacgcccggcgttgccttcctcaccttgcgcagcgacggcctggacaaatatgcgcagcctgacggccgcttcattggcaagcccggcaccccgaccaatgtcaccgccgagggaccggagctgaatggcgccaccaatctcgtgctcggcgcgctcgaccatcgcgaggtggcttttcacccgcgcgcgttccgggaaatctacaagttcatcgccggccgcgaacccacgcgcatcgcgattgtgccggaggccagcgtgaagctgagtggcctcgtctctggcacgcccggcggcgtgccgaccaaccgtccccttgcgggcgcgaccgtcgacatcttccgtgtcgatgctgataccggggagcgcaagggtggggcggtgcacagctcaaaaacaggtgccgacgggcgctggggaccggcgcaggtcgatccaacctggtcgctcgaattcgtcctgatgtcgcctggcgcgacgacgacgcacatctaccgctcgccgtttccgcgctcgtccgaagtcgtgcatctgcggcctgcgcgcccgctcggcgcggcggacaaggacgcaggggcggtggtcatcatgtcgcggccgcgcggctatttcggcctgccgcgagacgtggtgctgttcgacggcaaggagccggccgacgtcaagccgggcgtacccaccgatgcgacagcaaccctgcggcttccggccggcgagatcgggcgtaacatcgtggcccaattcggcgaagaacgggtcgtggcccgcgcctggcctgccgccgagaacaggattgcgattgccgaaatgacctattag

SEQ ID NO: 6436 - DNA, 1689 bp, BradyrhizobiumColbertium
atgaccgagcagacgaaccgccagaaaatcgccgcagacggcatcactgcgcccctgcggtacacggtgttccggcgcatctggctcgccagcctgctctccaatctcggcctcctgatccagggcgtgggcgcggcctgggcgatgacgcagatggccgcatcggccgaccaggtggcgctggtgcagaccgcattgatgctcccgatcatgctgatttcgatgccggccggcgccatcgccgacatgtatgaccgccgcatcgtcagcataatctcgctatcgatcgcgctgatcggcgcaacggcgctgacgattttggcctggctcgagctcatcactccggaagccctgctcgccttctgcttcgtggtcggcagcggcaatgcgctgttcggaccggcctggcagtcctcggtcagcgaacaggttccgcccgaggcattggcatccgcggtagcgctgaacggcatcagctacaacattgcccgcagcttcggacccgcggtgggcggcgtcatcgtcgctgcgctcggagcggtggccgcgttcgcctgcaacgcaatcctatatctgccactgctggtggtgctgctgctctggcggcgcagcaccgagccctcgcgcctgccgcgggagaagctcaaccgcgccatggtctcgggcttccgctacatcaccaattcgccaccgatcaagatcgtgctgttgcgcacgctggtgatgggcctgatcggcggtgcggtgatggcgctgatgccgctggtcgcgcgcgaccttctgcgcggcggcgcgcaaatgtatggcatcatgctcggcgccttcggcatgggcgcggtgatcggggcgctcaacattcacgaattgcgcaagcgcatgagcggcgaggccgcgatccgcgcctgcaccatctcgatggctttcgcgatggcggccctcgccctgagcacggagccggtgctgacggcggcagcgctggtgctgggcggcgcggtctggatggccgcgatcgcgctgttcaacatcggcgtgcagctctcggcgccgcgctgggtcgcgggccgctcgctcgcggcgttccaggccgcgatcgccggcggcatcgcgatcggcgcctggggctggggtcatctcaccgactatgccggcgtcgagatcgcgttgctgaccgcggccggcctgatgctgatctcgccgttgctcggcatctggctcacgatgccgcgcgtcggcgcccgcaacgaggatgcggacatgctggccgatccggaagtgaagctgtcgctgacggggcgcagcgggccgcttgtggtcgagatcgaatatcgcgtggcgcaggagaacgcgcgtgccttccacaacgtgatgcaggacgtgcagctgtcgcgccagcgcaacggcgcctatggctggtcgatcgcccgcgacatcgccgatcccgagctgtggaccgagcgctatcattgtccgacctggttcgattacctgcgtcagcgcaatcgctccacccagtccgagcgcgcgctgcatcagcaggcgatcggtttccacatcggtcccgagcctgtccggatccggcgcatgctggagcgccctttcggttcggtgcgatggaaggacgacacgccggaccgcgcgagcgcggaggtgctgccggtggtcgcaaccgctgcggggagcagtacgtaa

SEQ ID NO: 6437 - DNA, 141 bp, BradyrhizobiumColbertium
gtgatcgtcattccggggcgcggcgtcaggcgcgagcccggaatccatttctccaaatgtatcccgctcgatggattccgggctcttgcttccgccttcgcactccgagctagggcggacaagtcgcgcgacccggactga

SEQ ID NO: 6438 - DNA, 213 bp, BradyrhizobiumColbertium
atgtcgagatttcttttcgttgtttccttgctcatgtgcgcatcgggcgcgtcagcgcagcagcccggccatgacgcttgcgcgcgtgacgtcacgcgcttctgccgcgccgtcatgaacaatggtgatggcgccgtgctcgcctgcctgaagcagcaccgcacccggctgagcaaaggctgcgacaaggtgctgacggatcacgggcagtga

SEQ ID NO: 6439 - DNA, 294 bp, BradyrhizobiumColbertium
atgaccaagtcgttcatcagcaagattcgtgacaccagcctggctctgggctttgccgccatcgtctccatcgtttcgacgagcgcgagcttcgccttctcggccgaggcgcagcagatgtgcaccggcgatgccttccgcctctgctcggcggagatccccaacatcccgaagatcacggcgtgcatgatcaagcatcgctcggatctgagcgccggctgccgcgcggtcatggacaagactctcgccaagggcgcctcgcgcaaggtcgctgacgcccaggacaagcagtaa

SEQ ID NO: 6440 - DNA, 1056 bp, BradyrhizobiumColbertium
atgcgtaatgcgttgggcctgatgctggccagtgtagttgcggcggtcgtgatcgccgccggcggctgggtttattattccgcgcgcgccgatcagggcgctcccaagacagttgccgcccgtgccgccgatccattgccggcacaggcgaagctcgccgccagggacgacgtcgaaaccactgcggccgtcgcggccaggccggcggcagccgctccggcgcccgcgcccgccccggccatgccgatgcagccgaagcaggcctgcgccaatccgaacgcgctgggcgtgtcccgcgtcgtcgagatagacacgacaggcggacccggcttcggtttcgagcatttcaagcagttcgacttcctcaccgacaaggaggtcgtgctgaccttcgacgacggtccgtggccggtcaacacgcccgcagtgctgaaggcgctcgcggatgaatgcaccaggggcctgttcttctcggtcggcaagcacgcgacttatcacccggagatcctgaagcaggtgctggcccagggccacacggtcggcacgcacacctggtcgcatgtcaatctgaacagcaagaagttgacggagcaacaggtcaaggacgaggtcgagaaaggcttcagcgcggtgaagttcgcgctcggcaccaatccggcaccgttcttccgcttcccgcagcttcagcacaatccggcgatggtggcctatttcggcacgcgcaacgtcgcgatgttctcgaccgaaatcgactccttcgacttccggaagggcgcgacgccggagaagatcgtcgaaaccgtgatgaccaggctcgacaagctcggcaagggcatcatcctgatgcacgatttccagaagaacaccggcatagccatgccgacgctgctcgcgcggctgaaggcgggcggctacaaggtcgtgcagatgaaggccaaggcgcagcttcagacgctgccggaatacgacgaggcgctgatgaaggacatgaaggtgccgacagcaggcacgaactcccgtccgatcgcgagcgtcgtgcagacgatctcgcagtaa

SEQ ID NO: 6441 - DNA, 396 bp, BradyrhizobiumColbertium
atgcgcaagatcattctggttgccgccatgctgctggcttctgcgtctgcccaggcaggcggctcccgcggtctgtccttggccgctgcgggcgaacagagctccgcaccgcagaccacgacctcgtcaacggccagtgcgacgacgcgggtcagcgaagccgcgccggccaccgaggcttcgaaatattccgatcgtccaccggcagtgtcgctctccgcgccgcccgctgcggccgcaccggcggcgaccacagccgcgccggcctccgtgccggtcgcgacgaccaagcccgctaccaagagtgcggcaagagcgcacaagccgaaacacaagcgcagctggaccgagcgccgcatcatcagcgaactgcatcgtcacggcatctattggtaa

SEQ ID NO: 6442 - DNA, 126 bp, BradyrhizobiumColbertium
atgggtgacaacctcgcgccgagcggtgttgcgcggcttccaggtcatctgctcagtggcgcggccaatgctgagcgcatcagcctgcatgaaggcccgtttggctgggtgatcgcgatcacataa

SEQ ID NO: 6443 - DNA, 73 bp, BradyrhizobiumColbertium
gccgcaatagctcagtcggtagagcacgtcattcgtaatgacggggtcgggggttcgaatccctcttgcggca

SEQ ID NO: 6444 - DNA, 1764 bp, BradyrhizobiumColbertium
atgcttcgcatcgtcctctttctcgtcctgatcgcgctggcagcggccggcgcggcctgggttgccgaccagcctggcgatctcgtcctgaccgcgggtggtttccgcatctcgacgacacttcccaggttcgtgttcctgctcgggctttttgccgcggccgtcgtgctggtctggagcattctcacgatgatctggcgcacgccggggcgtttgcgccgccgccgccaggacaagcgccaggcccgcggccgccatgccatcacccacggcctgctcgcggtcggccagggcgatcctgcgctcgcccgccgtcacaccgaggcggcgcggcggcacgcgccgaacgatccgctcgccctgctgctgcacgcgcagtcggcgcagctcgaaggcaatcgcgaggaggcgcagcgcgttttccgagtcatggccgaacgcgaggacacgcggctgctgggcctgcgcggcctgttcatcgaggcgcagcgcgcggatgacgccgtcggagcggtgatgatcgcggaagaagcaatcaagctgtcgccgtcttcgacctgggcttcgcatgcggtgctcggcttccgctgcgcgcggggcgactgggccggcgcactcgcgatcctcgattcgaatctgtccgcaggcctgatcgacaagcagacctaccgccgacagcgcggcgtgctgctcaccgcacgcgcgctggagctggagacgatggaccgggacgtcgcgcgcgagagcgcgatggaggcggtcaagctcgcgccgaccctggtgccggcggccgtgctcgcggcaaaattcgagagcgaggcgcatcaggtgcgccgtgccatgaagcggatcgaagccgcctggctcgccaatccgcatcccgatctcgcggacgcctatgcccatgtgaagctcggcgataccgcttggcaccgcttgcagcgggtggagacgctcgccgccaagacgcccgccgacaggcccggccatatcgaaggccagctcgcgatcgcacgcgctgcgatcgacgcctcggagttcgcacgcgcgcgtgaggcgctcgcaccttatctcagcgatcccacccagcgcgttgcgctgctgatggccgagctcgagcgcaccgagcatggcgacggcggccgcgcccgcgcctggaccctgcgcgcggtgcgcgcccggctcgatccggcctggacggcagacggctatgtcagtgagcgctggcgcccggtctccccggtcaccggccgcctcgatgcgttccaatggcagacgccggtcgcgagcttgccctcggacagggggaccacgatcgagtcctcggctttcgaggaagccatgctggctgccccgccgccaaagcgggtgaccgcggctcccagcgaagcctcggtggaaccggcggcgtcggtggccccagtggcggctccagccgctcaggacaattcgccccctcaggcccaagaggttgccaaggaacctgcgaaggaggagccggcgaccgcgcccgccgagccggccgatcccgctccggcgcccgccgaatcgtcgccgccagcaccaacaccggtcttccgaacccgggccgacctcgggaagccggcagcggcgccgatccaggccgtcattccgatcgtccgtgcgccggatgaccccggaatcgacgacgacgccccgaccgatgaatttacggaacaaatcggcacgccgaaggcccaggcgggcggctggcgtggattctggtcgcgctggggcgcgtga

SEQ ID NO: 6445 - DNA, 1263 bp, BradyrhizobiumColbertium
atggccgacgacaagcctgaagacgctggactggcgcccgacacgggtcgtgccaagcgcaccccgcccaccatcgacctccaggcgacggaagtctcgacccagccgcagcaggttgcgggcgagcctgaggctcagcccacaccggaacacgccgcgagcgaaccggcacaatccgggcaggccaaattcgaggagagtgagcccgtgcaggccgagcccgagcccgagcacgttgacacagagccgaagcgcgatgaggcggaagcggccgtcgcgcctgctgccgcgccgccaccgatttcgccctgggtcattgcgccgttctccggagctgccgcagcggcggtcgtgatcgcggttggctggatgctgggctggcccgcagtgcaggcgccttcggccgcgccgcaggtgagcagtgcgacgatcgatgcgctgagcgcgcgtgttgctgcggttgaggtcaaggccggcaagcccggaggcgatccggccatggcagcgcgaatcgacgcgctggagaaatccgcaagcagcttgcgcagcgacattggcaatcttcgtgcgcagtcggaaaagaccgcgagcgccctgagcgaggcgaggacagcgtcgcctgctgcagcgcctgatcttgccgcgctcaacgaccgcatcgctcagctcgagcacgccagcaagaccgagcgcgccgaacttgcgcagcagagcgagaggatcgccgaggtcaaggcgatggacgacaagccgctccgccatgtggtggcggcgtccctgctcgacgttgccgttcgccacggcgatccctatcagtcgcagttggccgcggcacggtcgctggcggccaagcccgacatgctgaagccgcttgaggcatttgcgtcttccggcatcccgacgccggcggcgctgagccgggagctcctcaatatcgtgccgaagctgtcgccgccggcggaagctccggccagcaacgccggcatcgtcgagcgtctgcaggccggcgcgtcaaaactcgtccgcatcgagcgcaccgacgccgtcggcaacgatcgcggcgccatcgttgcgcgcgtgacggcggctgcgctccgcaacgatttcgcggaagcgcggcgcgagctgaagactctgccagaggcggatcgtgcgccagcgcaggcgtggctcgacaaggccgatgcccgcgacgctgcgctcgctgcgtcccgcaaattcgccgacggtgccatgtcggatctcgtcaagcctcttcagtaa

SEQ ID NO: 6446 - DNA, 747 bp, BradyrhizobiumColbertium
atgtccattcttgtcacacggccacatcccgacaatgaggcgacagcggaaagtctgcgctcgcgagggcacgcggtgctgcttgcgccggtgctcaagttcgagcccgtcgccttccacgacgcgcgtgaggctccctacggtgccgttctcgtcacgtccgccaatgcgatccgcgccgttgcgccgcaattgccggagctcggcctcctgcagctgccgttgtttgcggttggcgagcatacagctgcggtggcgcgcgaggccggtttcgccgaggtgatcgtcgccgatggcgatgccgcttccttgcgcgacaaggtgatgcagagcgcgcgcgagaaggtgctgaagaaaaagagcacgctgctgtatctcgccggcgctgatctgtcgcgcgacctcggcggcgagctcggtgcggaggggttccgcgtggtgacgcagacgacctaccgcatggcccctgtcaagcatcttccgcgcgaggtctgcgagggctttgcgacgcatggcgtcgaggcggtgctgcactactcccggcgcagcgcgcgcgcgttcctggatgcggcgagggaggaaggcgtcgagatctcggcgctggcgatcccccattgctgcctgtccgagaccgttgcgagcgtgctgcgcgacgccggcgcatcacaggttctggtggcggcgacgccggacgaaagtgccttgttcgacaccttggagcgtgcgttgcgcacccgtttggcgtaa

SEQ ID NO: 6447 - DNA, 1074 bp, BradyrhizobiumColbertium
atgctggtgctggggatcgaaaccacctgcgacgagaccgccgcggccgtgatcgagcgcgcgggcgatggcagcggcaagatcctgtccaacatcgtgcggtcgcagatcgaggaacatgcccgcttcggcggcgtggtgccggagatcgcggcgcgcgcgcatgtcgatctgctcgacggcatcatcgatcgcgccatgcgcgaggccggcatcggattcgcccagctcaatggcgtcgcggccgccgcgggcccgggcctgatcggcggcgtcatcgtcgggctcaccaccgcgaaggcgatcgcgatggtgcacgatacaccattggtcgcggtgaaccatctcgaagcgcacgcgctgacgccgcgcctcactgaccgcatcgaatttccctattgtctgtttctcgcctccggcgggcatacccagatcgtcgcagttgccggcgtcggccaatatgtgcggctcggcaccacggtcgacgacgcgatcggcgaggctttcgacaaggtcgccaagatgctgggcctgccatatcccggcggcccgcaggtcgaacgggccgccgcaggcggcgacgccgcgcgctttgcatttccgcgaccgatgcagggacgccccgatgccaatttctcgctttcgggattgaagacggcggtccgcaccgaagcgagccggctggcagagatcacatcgcaggacatcagcgatctctgcgcgagcttccaggccgccgtgctcgactcgaccgccgaccggctgagcgtcggcctcaggattttccgcgagaagttcggtgccccgcgtgcgcttgtcgccgccggcggcgtcgccgccaatcaggcgattcgcggcgcactccatgacgtcgcgcagcaggctcagacgcaactgatcattccgccgcccgcgctctgcaccgacaacggtgcgatgatcgcctgggccggcgccgaacgcctcgcgctcggcttgtccgacacgatggacgcgcaaccgcgcgcacggtggttgctcgacgccaacgcgacggctcccgcaggctacggcaacacgcgggcgggatactag

SEQ ID NO: 6448 - DNA, 981 bp, BradyrhizobiumColbertium
atgacggcgctgcaatccgtcggggtcatcggcgcgggcgcgtggggtacggcgcttgcgacggtcgcggcgcgagccggacgaagcgtcatattgtgggcgcgcaacgccgagcatgccacgcggatggcttcaatgcgcgacaatccgcggctgccgggcgtcccgcttgcgcctgatatcgtggtgacgaacgatctggcgctcgccgcacgtgcggacatgctgctgattgcaacaccggcgcagcatttgcgcggcgccgtcaacatgctggcgtcgcatctggcaaagccggtcccgatcgtcgcctgcgccaagggtatcgagcacggcacccacaaattcatgaccgacgtgatcgccgaggccgcgccgcacgcgcagccggcgatcctgtcgggcccgagctttgccgacgacgttgcgcgcggactgccgacggcagtcaccctggccgcaagcgaggagaggctctcgagtgcactggtacaggcgctgggctcgccgaccttccgcccctaccactccacggacatccggggcgtcgagatcggcggtgcggccaagaacgtgctggcgatcgcggtcggcatcgcggtcgggcgcaagctcggcgcctccgcccaggccgccctaacgacccgcggctttgccgagctggcgcgtcttggccgcgcgctcggcgcgcgccgcgaaacgctctccggattgtccggcctcggcgatctgatcctgacctgctccagtccgcaatcgcgcaacttcgcgctcggactttcgctcggacgcggggagcagcctccggccggcaagctggccgaaggcgaattcacggcgccggtgctgatcgagctcgcagcttcgcaacgcgtcgagatgccggtatcggaagcggtcgcatcgatcctgagcggcaagagcacgatcgatgccgcaatctcggcgctgatgacgcgccccttcaagtcagaggaatga

SEQ ID NO: 6449 - DNA, 414 bp, BradyrhizobiumColbertium
atggcgtactggctggtgaaatccgaaccgtcggtgtggtcgtgggaccagcaggtggcgaagggcgccaagggcgaggcctggaccggcgtacgcaattacaccgcgcgccagaacctcgtcgccatgaagaagggcgacaaggcgttcttctatcattccaacgagggcaaggagatcgtcggcatcgccgagatcatcaaggaagcctatcccgacccgaccgacaagaccggcaagttcgtctgcgtcgacatcaaggccgacaagcccttgaagacaccggtgacgatggcggcgatcaaggccgagaagaagctcgcggacatggcgctggtgaagtattcgcgcctgtcggtgcagccggtgacggcagatgagtggaagctcgtctgcaagatgggcgggatgtag

SEQ ID NO: 6450 - DNA, 1167 bp, BradyrhizobiumColbertium
atgatggatcagcagaatctcgggacgatgcggcccgcttcagccgatcctgcggcagtcgccctcgccaaagccctgggacaatggccgaaaccgactggcttcaggcgccccagccccaaaaagaccttcgacacggcccccgtgacggtcgaagcgctcgccaaggagctcggtctgcggctcggcgaccagaacgagctgaccatccgccgtatcaagcgcggcaagggctactccttcgtgcgtccgaatggcgcgcatatccgcgatgcccgcaccatccgccgactgcactccatggcagtgccgccggcctaccgcgaggtacgctactcggccgatcccaactcgcacctgcaggccgtcggccgcgatgccgcgggccggctgcaatatcgctatcacgccgactgggagaaggtccgcgagcaacgcaaggcgcatcgcctagccaagctggtcggcgcgctgccgaaaatccggcgcaaggtctcggcgttcctgtctggtgacgagccgacgcgcgaattcgcgctctcggccgtgatcgagctgatcgcgcgcaccgcgatccgtcccggcaatgaatcctatgcccgcctcaatggcacccgcggcgccaccacgctgctcaagtccaacgtcacactggaagacgattgcttcgtgctgaccttcaaggccaagggcggcaaggcggtgcgcaaggagtgcgatgcggccaagctggtgcgcgccatcggcattctgcagggcgttcccggcaagcgcatgttccagtatcgcgacgcctacggcatcgtgcgcgccgtcaacacgacgcaggtgaatgcgttcttgcgcgagatcgccggcatcaagatctcgctgaaggatttccgcacgctgatggcctctgccgtcgtcgtggaatcgctgtcgcgaatcacgccggccaccagccagcgcggccgcaagaagcaggtgctggacgggatccgtgccgcggccgaccagctttccaacacgccggcgatctgccgcaggagctacgtgcacgacaccatcgtcaccgcgttcgaggacggcatcctcgagcgcttcgccgcgaccatgaagggccagcgctcccaggcaaggcgcgagcagcttctggcccaggtggtggcgactgcggcggtctga

SEQ ID NO: 6451 - DNA, 1947 bp, BradyrhizobiumColbertium
atgtccgagaagatctacgacgtccccgcggagtgggcgaagcgcgcctgggtcgaccaggccaagtacaaggagatgtacgctcgctcgatctcggacccgaacggtttctgggcggagcaggccgagcgcatcgactggatgaaggcgccgacgaaaatcgagaacgtctcgttcgcgcccggcaacatctcgatcaaatggttcgaggacggcgtcctcaatgtcgctcacaattgcatcgaccgccatcttcgcacgcgcggcaatcagaccgcgatcatctgggaaggcgacgatccctcgcagtccaggcacatcacctatcaggagctgcacgacgaggtctgccggatggccaacatcctgcgcacccgcaacgtcgggaagggcgaccgcgtcaccatctacctgccgatgattccggaagccgcctatgcgatgctcgcctgcgcacgcattggcgcgatccattccgtggtgttcgcgggcttctcgccggacagtcttgcccagcgcatcaacgactgccagtccaaggtgatcatcaccgcggacgaaggcctgcgcggcggaaagaaagtgccgctgaaggccaatgtcgacgcggcgctcgccaaggccgatggcgtcgactgggtcgttgtcgtcaagcgcaccggcggcaaggtcgacatgaacccgacgcgcgacctctggtaccacgaagccgcggcgatggtgacgaccgaatgcccggtcgagcacatgcacgccgaggatccgctgttcatcctctacacctcgggctcgaccggtcagcccaagggcgtgctgcacacctcgggcggctatctcgtgttcgcctcgatgacgcatcaatacgtcttcgattatcacgacggcgacatctactggtgcacagccgacgtcggctgggtcaccggccacagctatatcctgtacgggccgctggcgaacggcgcgaccacgctgatgttcgagggcgtgccgaactatccggacaactcgcggttctggaacgtcatcgacaagcacaaggtcaacatcttctacaccgcgccgaccgcgatccgcgcgctgatgcaaggcggcgatgagccggtgaagaagacctcgcgcgcgagcctgcgtctgctcggctcggtcggcgagcccatcaatccggaagcctgggaatggtatcaccgcgtcgtcggcgacggtcgctgcccgatcgtcgatacctggtggcagaccgagaccggcggcattttgatcacgccgctgccgggcgcgaccaagctgaagccgggctcggcgacacagccattcttcggcgtggtgccggagatcgtcgatgccgacggcaaggtgctggaaggcgagaccaccggcaatctctgcctggcgcggtcgtggccgggccagatgcgcacggtctatggcgaccacgcccgcttcgagcagacctatttctcgacctacaagggcaagtacttcaccggcgacggctgccgccgcgatgcggacgggtattattggatcaccggccgcgtcgacgacgtcatcaacgtctccggccatcgcatgggcaccgcagaggtcgagagcgcgctggtggcacacgagaaggtgtcggaagcggccgtggtcggcttcccccacgacatcaagggccagggcatctacgcctatgtcaccctgatggccggcgtccagccgacggaggatctgcgcaaggagctcgtgacctgggtgcgcaaggagatcggcccgatcgcttcgcccgaccagatccagttcgcgccgggcctgcccaagacccgctccggcaagatcatgcgccgcatcctgcgcaagattgctgaagacgagccgggcagccttggcgacacgtcgacgctcgcagatcccaccgtggtcgacgatctcgtcaagaaccggcagaatcggaagtcggcgtag

SEQ ID NO: 6452 - DNA, 516 bp, BradyrhizobiumColbertium
atgtcgatgaggattgcggtggcgctggccgccaccatcggggttggagtcatgatgtcgacggcggccgaggcaaggccggagctggtgggtgcacacctgcccgactattcgcccggcacgatcgtggtcaggaccagcgagcggcggctgtatctcatcctcgataacggccacgccgtccgctatccggtcggcgtcggcaaggccggcaagcaatgggccggcacgacgaagatcgacggcaagtatcgcaaccccgcctgggcgccacccgccgaggtgaagcgcgacaagccgaacatccccgacgtcattccgggcggctcgccgcgcaacccgatgggcgttgcggcgatgacgctcgccggcggcgaatatgcgatccacggcacgaacgtgccgggctcgatcggcggcttcgtctcttatggctgcatccgcatgctcaacgacgacatcacggatctctatggtcgcgtttccgtcggcacgacggtggtcgtgacgcgctga

SEQ ID NO: 6453 - DNA, 594 bp, BradyrhizobiumColbertium
atgcgttctcgcgcccggatcaatgctcgtcaatcgtcgttcggcggctccccgttcggccgccgcttctcgggcctcataccgtggatgttcgtggtcggcgtggtggcggcgatcgtgctcacctttcgtcacggaacaggctggctcctgccgcatgcggcagacgaccgggcccaggacgccgagatcatcctgcagcagatcggcaatccggatctcctccgcccggtcgacgtcatccggaccattgacggcgacacctttctagctcgtattcgtcagcgcgaggggcgcgaccccgtcgttcgcattcggctgcggggcatcgatgcacctgaactcaaggcgtcctgccagcaggagctggacaaggccgaagctgcggcccgcgcattgcgcgatctgctcggccagggcgacgtgaccattgccaatctcggcccggacaaatacggccgggttctggccgacgtggcgacccgacagactgcgagtgttgcggcggcgttgctctccggcggctttgtgcgcagctacaatggaggccatcgcgacggctggtgcgctcgccgctggcgcttctggcaataa

SEQ ID NO: 6454 - DNA, 1719 bp, BradyrhizobiumColbertium
gtgggatcattcaggtttcgcattggaaccaagctcggcatcgtgacgggtataagcgtcgtgctcgtcggcggtatgctgacgaaccagatgctcggcaaccgatcgattgccgaatccaatcgtctggtcacgatcaactatctcaacaagggtaatgcccaggcggcccagacggcgatggcgcgggcacagatcgcagctctcgaaatcggcgcggcgccctcaggcggagaggtcgacaggctcctcgagattctccgcgcccgggccggtgaagccggcacggaaatcgatgccgcgacggagcgggcaacgcggaaagtcacccaagacgcctaccgtgagacaaggaagttcgtcgatgcatatctggccagcggcatcgaactggcggcagcgcaaaaggccatcatcggcgccgctgccggaggcgccaggattgctgcggaatcggccaaggccagcatccttgcagagcgcatgcgtccagcagccctggaggtcagcaagcgcatcgacgacctggtcggcgttgccaacgaattcgccgcgcgccgcaagggcgagatgttggccgaactggatcgcgtcgccaatttcgcattgatcgtcggcatgttcgtcgtcctgacgttgatcggctccgcggtcttttccgtgttgagcatcgcccggccgatccggcgcatcggcgacgtgctcctggatctcgcccgcggcaacaaggcggtcgagattccctacacgggccgcggcgacgaagtcggcgacaacgcccgcgcagctcagaccttcaaggagaatctgatccgcatcgagcagatggaagcggagcagaaggaacagcaaaccgctgcggccgctcagcgcaaggaagagatgacccggctcgccggcgcgttcgaggctgcagtcggcggcatcatcgcctctgtatccgcagcttcgcaacaactcgaggccgcggccggcacattgtccgagacggcggaacagacccagcagctctcgggaatggtcgcggctgcctcagaggaagcatctaccaacgtcggagccgtggcgtccgccgccgaggagatgagcacatcggtcgtcgagatcggccgccaggtgcatgattccagccgtatcgccagcgatgcagtcaagcaggccgagcgaaccgacatgcggatcaacgaattgctcaaggcggcaggccgaattggcgacgtcgtcaaattgatcaccgcgatagccgagcagaccaacctcctagcgctgaacgcaacgatcgaggcggcgcgcgccggcgaatcgggccgcggctttgccgttgttgcgagcgaagtcaaagcgctggccgcgcagaccgcgcgagcgaccgaggagatcagcgcccagatcgcggggatgcaatcggcgacggaggactccgtcggcgcgatcaaggagatcggcgcgaccatcgcccgcatctcggacatctcgacgaccatcgcagccaccatcgaacagcagggtgcggcgacggccgagattgcgcgcaacgtcagcgaggccgccaagggtaccgtggaagtcgcggacaagatctcgcatgtcagtcaaggtgcgagcgccaccggcgcggcgtcgggacaagtcctcgcatcggcgcggtcgctatcgagcgagagcagcctcctgaaggtggaggtcgagaagttcctcaacacggtgcgcgcggcttga

SEQ ID NO: 6455 - DNA, 1020 bp, BradyrhizobiumColbertium
atgaatattgacgggacttcccccgattcgtgcgaacgaatcgccgatctgcttcgacaacagcccagcgccctcgacagcttgccgctttcgcccgtaggcgagttccagaccaggaccgtcacgctcgagaccttgacgcgtgaggtcaccgaatgccttgcgcagaacttccgggatcgcccggcggaagactttccgatgctttactttgcatgcggcaaggctcgggtcggctcgacggctctgagcaatctgttcggcatgacggggatgccctcatattatcaaccgctgaaggcgatcttgcgcaacgcgctcgtcgaccgcccgctgacgccctggatcgtgccctcggcgaaggacgagccgcacatcttcagcaaggaaacgatcgggccctacgtgcttgccgagagcctgttcaatccactgcagctcctggtcgaggccggctatccgcgtcaccggctgcatctcatcatgctcgatcgcgagccggcgagctcgctggcgtcgtggctcgacaagctgatctcgcgcgcgcctgcagataccttgctgcggcactatgtcgtcgccgctctcggcgcgtcccgtgtcgcgatctacgcccagcgacagggcattcccgtcactcattatgtctacgaggtcagcaaggaagcgctggcgtcgatccgggtcttgttcgaccgcctcggcctttcgagcagcttcacggagagtgccgtgacgtcatggcgggagccgggagacgcgtcagcaagcaatgcacgcgtcatcttcccgagcgaggcgaccatctacaaggtgcccaatctgcacacctccgatagcgcctatcgataccagcgccggaccacggcctcgctgggcgaagcccagctcgcggttctggagcgttgcggggtcaacgatgcctaccgcgcctcggttgcggcctgcgttcgcgatctcggcctgagcgccgcaacgtcggcacgcctgttcggcgactggtttgctgcggccgcgtga

SEQ ID NO: 6456 - DNA, 972 bp, BradyrhizobiumColbertium
gtgatcagcatgctggacattcccaggaccgccgaatccgccctccctggacgcgccggcggcaaacagcttcacgccgccagccatcttcgacgcctggaggctgaaagcatccacatcctgcgggagacggcagccgagttccgcaaacccgtcatgctgtattccgtcgggaaagactcttcggtgctgctgcatctggcgatgaaggcgtttcatcctggaaagccgccgtttccgctgctgcacgtcgataccacctggaagtttcgcgagatgatcgcgtttcgcgaccgccgcgcacgcgaactcggcctcgacctcatcatccacaccaacaacgacggattgagccagggcatcgaccccttcacccacggctcggcccgctacaccgacgtgatgaagacgcaggctctgcgacaggcgctggacctccacggcttcgacgcggcgatcggaggggcgcggcgcgacgaggagaagtcgcgcgccaaggagcgcgtgttctcgcaccggagcgcggcacatcgctgggatccgaagaaccagcgtccggagctctggggcctgtacaacaccgtgctcgcgcccggcgagagcatgcgggtgtttccgctatcgaactggaccgagctcgacgtctgggactacatcctgctcgaggacatcccgatcgttccgctctatctcgccgattcgcggcccgtagtcgagcgcgacggcgcgctgatcatggtggacgatgcccggatgccgatgcggcccggcgaagaaccgcaatggcgatccgtcaggttccgcaccctgggttgctatcctctcaccggcgcgacgagttcgacggcggcaaccctgccagagatcgtgcgggaaatgatggcgtcgcgcagctccgaacgacaggggcgcgtgatcgaccgggacagtcctgcatcgatggagcgcaagaaggcggaaggctatttctga

SEQ ID NO: 6457 - DNA, 1896 bp, BradyrhizobiumColbertium
atgtcctatcacgaggcaccgacgatcgctgtgaccgatgcgccgcggctcgggcaggacgatcggccgacgctgcgcttcgtcacctgcggcagtgtcgacgacggcaagagcacgctggtcggtcgcctgctctacgattcgaagacgctgctcgaggaccagctcgacgcgctcgcctccgagagcaagaccgccggcaccaccgggggcgatctcgatttcgcgctgctggtcgacggattgcaggccgagcgcgagcagggcatcaccatcgacgtcgcgtaccggttcttcgccacgcggctacgccgcttcatcgtcgctgatacgccggggcatgcgcaatacacgcgcaacatggcgaccggcgcctctaacgccgatctagccgtggtgctggtcgacgcgcgcaggggcgtgatcacgcagacgcggcgccatagccacatcctgtcgctactgggcatccgtcgcgtcgtgctcgccgtgaacaagatggacctgatcggattcgacggcgaccgcttctcggccatcgccgccgaatacctgacgctcgccgggcagctcgggatctccgaggtccagtgcatcccggtcgtggcacccgatggcgacaacatcgttgccgcgagcgcgcggatgccctggtacacggggccgaccgttaccgcctatctggaagccgtggacgtggccggcgacgtctcgcagcggccgttccggttgccggtgcaatgggtcaaccggccgaacgctgagtttcgcggcttctgcggacgcatcgcgagcggaacgatcgcagtcggagacgcggtacgcgcgcagccatcgggacaccagacccacgtcgcacgcattctaacgcccgccggcgaatgcaattgcgcaggggcaggcgaatccatcacgcttacgctggtcgacgagatcgacgtcagccgcggcgacgtgctgaccggcggatctgccgcgccggtctcggatcagctcgcggcgcatctcgtctggttcgacgaggaacccatggtggcgggccggcgctattcgctaaaatgcggcaccgcctcgaccggcgccgtgatcacgacgctgaagcaccggatcgccatcgacaccatggcgaaggaaggcgccaccaggctcgatgtcaacgagataggctacgttcatatcgatctcgatcgtcccctggtgttcgagtcctatcgcgatgaccgtgacatcggcagcttcattctgatcgatcctatcagccatcgcacggccgcggcaggaatgatcgacgtttcgcttcgccgcgccaccaacattcattggcagcagcgtgccgtcgacaaatcggtgagggcgcggctgaagcagcaacggccctgcgtgctgtggttcacggggctgagcggtgccggcaaatcgacgatcgccgatctcgtcgaccgacggcttgccgagctcggacgccatgcagcactgctcgacggcgacaatctccgccacggcatcaaccgcgacctcggtttttcgaacgcagaaaggattgaaaacgtccggcgcgtggccgagatcgcggcgctgttcgtcgatgccggcttgatcgcgctggtcgcgctgatctcgccgttccgcagcgagcgagagctggcacgccagcggctcgaggccggggagttcatcgagatccatgtcgcgactccgcttgccgaatgcgagcgccgcgatccgaaaggactttatcgcaaggcacgagcgggcgacttgccggcattcaccggcatcgcgcagccctacgaggcgccgccggcaccggagatcaccatcgatacgtcggaactgtcgagcgaggcggcgtgcgagcgcatcatcagctacctgcgagagcacaattacctgtag

SEQ ID NO: 6458 - DNA, 204 bp, BradyrhizobiumColbertium
atgagtgaccagcctcccgttcccgatcgcaagccactatccccagccgcccagcgcgcgctggcggaagccgaggctcgtcggcaggctgcggctgcgctggccaaggatgaggccagggcaaaggagttgcaggggccgaaagggcccgagcccacacgctatggcgactgggagcgcaagggcatcgcttccgacttctga

SEQ ID NO: 6459 - DNA, 123 bp, BradyrhizobiumColbertium
gtgccgcaagaccaggcacttcggatggaggagcgaaacgttgagatggcatgcggaagcaaggttctgagcgagcggcagttccgccgcaatgggcgcatgcctggagagcccgatctctga

SEQ ID NO: 6460 - DNA, 1314 bp, BradyrhizobiumColbertium
gtgcctggtcttgcggcacggcggatcgccgccgacatcgtcgacggcgtgctgcacaagcaccgtacgctcgacgatcagctcgacggcagcggcgcccatcccggattgaagacgctgcccgatcgcgatcgcgcgctgatgcgccgcctcgttgcgactgtgctgcgccggctcggcacgctcggccatgtgctgtcacgcctgctcgacaagggcattccctccgatgcgccgcgcgcgcagagcgcgcttctgatcggcgccgcgcagatcctctggatggacgtgccggaccacgccgcggtcgatctctccgttcgcctcgtgcagtccgaccgccgcgccgcgcgctatgccggcctcgtcaacgccgtgctgcgccgctgcgcgcgcgagggcaaggcgctgatcgatgaagtcgcgacgcaatcgcaggacctgccgccgtggctgctcgcgcgctggagcgcgcattacggcgagacgaccgcgcgagagatggcactcgcgctcggccacgagccctcgctcgatctgacgatgaagtccgaccccgcacaatgggcgagccgcctgcatggcgagacactgccgacgggaaccgtgcgcatgctgctgcacgggtcggtgaccatgctgcctggcttcgccgaaggacaatggtgggtgcaggacgccgccgcctcgctgccggcccggctgttcggcgacgtgaaaggcaagtccattgccgatctctgcgcagcgccgggcggcaagaccgcgcagctggcacatgccggcgcgcatgtcacggccgtcgaccgctcgccggcgcgagtggcacgcttgcgcgagaaccttgcgcgactgtcgctccaggccgagactgtcgtcgctgacgccgtggaatgggccgggccggccgaggccttcgacggcattctgatcgatgcgccctgcacctcgaccggtacgatccgccgtcatcccgacgtggcatggctgcggcaggaatccgatatcgccgccctggccgcgctccagcagcggctgctcagaaaatcgttgtcgctgctcaagcccggcgggacgctggtctattgcacctgctcgttggagcccgaggagggcgagcaggccgtggcggctctgctcgccgcggagcccgcgcttcggcgcgtcccgattgaggcggcgggggttgcgggcctcgacgaaatcctcagccgggacggcgatcttcgcaccctgccctgccatctgccgaacgccgatcccaagctcggcggcctcgacggatttttcgcggcccggctcgttaaatcctga

SEQ ID NO: 6461 - DNA, 1788 bp, BradyrhizobiumColbertium
ttgctgatcctctccccatcaaggcaaggcgtgtcggtcgctcaacgcagacatatctcggcgctggtcatgaaccgcttcgcgcggaacgtgctcgcgcgcgcgagcggcggttccgttgcggtgtcgcgagtctggccgggccgcaccgatcgcctcatcatcgcgccacacgatctacgcaccgcggacgcgacccgggccgccgaaatctacgccggccgcttcgttttcgccggcaagatcgtcaattgccacggccgttcgatcttcgatctcgagcccccatcggaggattgggaggttgcgctgctcggcttcggctggttgcgccatcttcgcgccgccgacacggcgctgacgcgggcgaatgcgcgcgcgttgatcgaggactggatcgccaaccccgccaacaagcgccgtcccgtcgcgcgccgtgccgacgtgctggcccgacgcgtgatctcgctgctgtcgcaggcgcccttggtgcttagcgagaccgacaacaagttctatcgccgctatctgcgtgccctggcacgcgagatccgcttcctgcgctataccatggtcgacattccggacggggtgccgaagctccaggtgctgatcgcgctgtgctacgcatccctgtgtctcgccaaccagacgcgtcacatccgcagcgcatcgaagaagctgtcagacgaattgcagcggcagatcctgcccgacggcggacacatttcccgcaacccgggcgcgctgatcgaactcttgatcgacctgctgccgctgcggcagacctttgccgcgcgcaacatcgcgccgccgccggcgctgctcaatgcgatcgaccgcatgatgccgatgctgcggttctttcggcacggcgatggcaatttcgcgctgttcaacggcatgagcgcgacatcttcggatctgctcgccacgctgctcgcctatgacgacacccacggcgtgccgatggcgaacatgccgcataccggcttccagcgcctcgacgccggccagaccacggtgatcatcgacactgggccgccgccgcccgcgggcgtcagccacgacgcccatgccggctgcctctcatttgaactgtcttccggcaccagccggatcgtcaccaattgcggcatgccgaccacgggccgcgacaattggcggcctttcgcacgcagcacggcggcgcattcgacgctgacctaccacgacacctcatcatgtcagttcgtggagatgtcggcgatgaagcggctgctccacggcgcgcccgtcaccagcggcccggtcgaggtggagagctatcgcgaggtcgtgcagaacggcacgctgctcacgacctcacacgacggctatctcgccaggttcggagcgatccatcgccgcgtgctgatgatcgccgatgacggcgcgcgcatcgacggcgaggacacgctgtcgccgccgcagggcggacgcttcaagggcgcggacgccgatttcgcgctgcgcttccatctgcatccggcggtcaaggcgagccggttgtcggacgcgcgcggcgtcatgctggtgctgccgaaccgcgacgtctggaccttcgaagcattggacgacaaggtcgatcttgaggacagcgtattcctggccggcaacgatgggccgcggcggaccgcccagatcgtgatccgtcagaatgcccgccaggccccctcgatccgctggagttttgtccgttccaccgcctcgccggccgtgaccaatgcccgccgcaacgctcgccgcgagccggaacttccgctgtaa

SEQ ID NO: 6462 - DNA, 1593 bp, BradyrhizobiumColbertium
atgactgaccatccccgccgcgtcacccgcgccctgctctccgtttccgacaagaccggcctgatcgagttcgccaaggcgcttgccgcgcaaggtgtcgagctggtctcgaccggcggcactgcaaaagcgattgccgcggccggcctcaaggtgaaggacgtctccgacctcaccggctttcccgagatgatggacggccgcgtcaagacgctgcatcccaaggtccacggcggcctgctcgccatccgcgacaacaaggagcatgcggaggcgatgaaggcgcacggcatcgcgccgatcgaccttctggtcgtcaatctctatccgttcgaagcgacggtcgagaagggcgccggcttcgaagattgcatcgagaacatcgacatcggcggtcccgcgatgatccgcgcggccgccaagaaccatgacgacgttgccgtggtggtcgaagcgcaggactatcagtccgtgctcgacgagctcgccgccaacaagggcgcgaccacgctgaaactgcgccggcgccttgccgcgaaggcctatgcccgcaccgcggcgtatgatgccgcaatctcgaactggttcagccgccagctcgagatcgacgcacccgacttccgcgccttcggcggccggctgatccagtcgttgcgctatggcgagaacccgcaccagaccgcggcgttctacacgacgcccgacaagcgtccgggcgtctccacagcacggcaggtccagggcaaggagctttcctacaacaacatcaacgacacggatgcggcctatgaatgcatcggcgagttcgacgccaagcgcaccgcggcctgcgtcatcgtcaagcatgccaacccctgcggcgtcgccgaaggatcgaacctcgtcgaggcctatcgccgggcgctggcctgcgattccacatccgcgttcggcggcatcatcgcgatgaaccgtccgctcgacgccgacaccgcgcgcgagatcaccaagatcttcaccgaagtcatcatcgcgcccgatgccagcgaggaggcgatcgccatcatcggcggcaagaagaacctccgcctgttgctcgccggcagcctgcccgatccgcgtgcgccgggcctcaccgccaagacggtggctggcggtctcctcgtgcagagccgcgacaacgccgtggtcgacgacatgaccttcaaggtcgtgacgaagcgtgcgccgacggaggccgagatgcgcgacctgaaattcgcattccgggtggccaagcacgtcaaatccaataccatcatctatgccaaggatctcgccaccgtcggcatcggcgcgggccagatgagccgggtggattcggcgcggatcgccgcgcgcaaggcgcaggatgcggccaacaagctgaagctcgccgagccgctcaccaagggatcggtcgtggcctcggacgcattcttcccgttcgccgacggcatgctcgcctgcatcgaagccggcgccaccgccgtggtgcagcccggcggctcgatgcgcgacgacgaggtgatcaaggccgccgacgagcacggcatcgccatggtgttcacgggtacgcggcacttcaggcattga

SEQ ID NO: 6463 - DNA, 1389 bp, BradyrhizobiumColbertium
gtgaccacgacgatcgttcccgacgtgcgcatggccggcgcagcgccgacctatccgccgcgtgccgccgtcgtcagctggatcttcttcgattgggcggcgcagccctatttcacgctgatcacgaccttcgtgttcgctccctatttcgccaccagcgtcgcgccaaatccggccaccggccaatcgctgtgggcctttgcaatggccgcggcaggcctttcgatcgcgctgctgtcgccggtgctcggggctatcgcggatgcatctggccgcaggaagccatggatcgcaggtttcggcgcggtattggtggtggcgtcctgcacgctatggatcggcagacccggcgatcacgccatcattccgttgctgctcaccgcggtcgcgctcgccagcgtcggagcggagttcgccacggtcttcaacaatgcgatgatgccgaccctggtgcctccggaacggatgggccggctctccggcaccggctgggccacgggctacatcggtggcatcgtcagtctgatcatcgtgctcggccttttcgcggccaatcccgagaccggtcgcacgctgctcggactctcgccattgttcgggctcgatcccgtcatgcgccagggtgaccgtgccgccgggccgttgaccggcctgtggttcatcatcttcgtcacgccgatgttcctgttcacgccggattatccggcgaaacgaccgctgggcgaagcgctgcgcgaaggtctgtccgagctgaagcaatcgatcaagcggctgccgaagcagaagtcgctcgcagcgttcctgctcgccaacatgatctacaccgatggtctggtgtcgctgttcgcgttcgggggcatctatgccgcgggtacgttcggatggcacacgatccagatcggcaccttcggcatcatgctcgcgatcgccggcgcgttcggcgcatggctcggcggcaagttggatgatcgtctcgggccgaagcgcgtcattgccggcagtctgctcgtcctgctgctggcggtggccgcgatccttctggtcgacaaggaaagtgtcctgttcgtcaaggtcgcgccgccgcaagcaggcgctcctctgttctcgagcgcggccgagcgcgcctatctcttgctgggctgcctcatcggtgcggccggcggcccgctccaggctgcctcgcgcacgctgctgatccacctcgcaccgaaggatcgcatcgcgcagtatttcggcctgttcgcgctgaccgggaaggtgacgtccttcatcggcccgctgttgatcggcacgatcacggcggtgaccgccagccagaaggccggcatggccgtgctggtggtgttcttcgttgcgggactggggctgctgatgcgggtgcggaagtag

SEQ ID NO: 6464 - DNA, 1749 bp, BradyrhizobiumColbertium
atgtcatcgtattcgacacggcggacatttttcgccttcattgccactctggcgtttggtttcgctcccgcggccgcacaggatgcgcggcagggctatgtcccgcccgcgcgcgacatggtgcgcgccgtcgccgccgagcacggcatggtggtggcgcaggagaagctgtccgcgcagatcggcgccgacatcctgcggcgcggcggcaatgcggtcgacgctgcggtcgcgaccggctttgccatggcggtgacctacccgcgcgcgggcaatatcggcggcggcggcttcatggtgatccattccgccgatcgcaacgaggacatcacgatcgactatcgcgagacggcgccggccgccgccacgccgcagatcttcctcggcgctgacggcacacccgatgctgcaaaatcacgcgattccgcgctcggcatcggcatacccggcacggtcgcgggcctcgcgctggcactggacaagtacggctcgggccggttcacgctggcacaattgctcgcgcccgccatcgcgctcgcccgcgacggcatcatcgtcaacgacgacatcgccgatacgctgccgagctggcaccggcggctggcgcgctggccttcctcggccaggatcttctcgcggccggacggcacgccgctgggcgaaggcgaccgactggtgcaagccgatctcgccgaaacactgtcggccgtcgccgcacagggaccacgcggcttctacgagggaccagtcgcggagaaactcgccaaggcggtgactgacgccggcggcatcatgacgccggccgacctcaaggcctatcagccggtgatccgcgcaccggtgcgcggcagctatcggggctatgacatcgtctcgatgcagctgccgtcgtccggcggcgtggtgctcgtcgagacgctcaatatcctcgaaggctatcagcttgccgatctgaagcagggatcggcggcatccctgcatctcttgatcgaggccatgaagcgtgcctatgccgaccgcgcgcgctatctcggcgatcccgccttcgtcaacgcaccgatcgagacgctgatcgcgaaagattatgcgtccaagctgcgcgcaggcatctcttccgaacgcgccacgccgtcgaaggaactcgtgtccgcttctgctgggccgcgcgagggcagcaacaccacacatttctccgtcgtcgatgcccgcggcaacgccgtcagcaacacctacacgctgaacttcagctacggcgtcggcctcgtcgccgatggcaccggcgtactgctcaacaacgaactcgacgatttcaccgcggcagtcggcgcctccaatgcctatggcctcatcggcttcgaggccaacctgccagggccgggaaaacggccgctctcctcgatgtctccgacgatcgtgctgaaggagggcaagccggtgctggtgacgggctcgcccggcggcagccgcatcatctcgaccgtgctccaggtgatcgtgaacgtcctcgactacaaaatggatgtcgcggccgcagtcgcagcaccacggctgcatcaccaatggctcccggacgaggtgcgcgtcgagcgcgggttccccagcgatgttctgggcgaactgaaggcgatgggtcaccacatcgtcgaaccgatggggcagacatcggccaattcgatttgcgtgacagcggagggaccgctcggcgcggccgatccgcggacgcgcggcgcggaagcggcggggcagtag

SEQ ID NO: 6465 - DNA, 1296 bp, BradyrhizobiumColbertium
atgaccacctcggatccgaaccagcgcatcgaacgtgctgagatcgaggacaccagcctgctcgccttctatcgcgacatgaacatgccggagcggcggacgttctgggcctgcgccgcgggctgggcactcgacggcatggacttcatgatctatccgctggtgatcggcaccatcatcgccctgtggaaggtcgatgcggcctcggccggccttgccggcacggtcacgctgctcgcctccgccatcggaggctggctcggcggttatctgtccgatcatatagggcgggtcaggacgctccagatcacgatcatctggttctcgttcttctcgctgatctgcgcgttcgtgcagagtttcgaccagctgctgattgcccgcgccttgctcggtctcggcttcggcggcgagtgggccgccggtgcggtgctgatgggcgaggcgatccggccgcaatatcgcggacgcgccgtcggctcggtgcaatcgggatgggcggtcggctggggcctcgccgtgctgtcgcaggcgatcctgttctcactgatgccggcggagacggcgtggcgctggatgttcgtgatcggcgcgctgccggcgctgctcgtgttctacatccgccggtcggtcactgagccccagatctcggcagagacccgcgcaagacaggctgcgagcggcgatcggccggcactctgggaaatcttctccggcccgatcctcaagaccacgatcctggcgtctctgatggccacgggctgccagggcggctactacgccgtcaccttctgggtaccgcagttcctgaccaaggagcggcatctctcgatcgtcggctcgactgggtatctggcgacgctgatcatcggctcctttatcggttatctcgtcggtgcgtggctcgccgaccggatcggacgacgcaatctgtttctgatcttctcgatcggcgcgatggcggtcgtgctgctttatacgcaactgccgctgacgaacgagattctctgggtgctcggtttcccgctcggcttcttcgcttcgggctatttctcagggatcggcgcgttcctgaccgagctctacccgacacggctgcgtggctccggccagggtttttgctataatttcggtcgtggcatcggcgcgctgtttccgttcctggtcggcgcgctatcggcgacgacgtcgctggcaaatgcgatcgcgatttttgcggtggtggcttacgccgtgttcttcatcgccgcgttcgcgctgccggagacgcgcggacgcgtgctgtacgcggattga

SEQ ID NO: 6466 - DNA, 666 bp, BradyrhizobiumColbertium
atgctgaccgttcaccacctcaacaattcccgctcgcagcgcgtgctgtggctgctcgaggagctgggcgttccttacgagatcgtgcgctatcagcgccagccggacatgcgcgcgccgaaggagctgcgcgccatccatccgctcggcaagtcgcctgtcatcaccgacaacggcaacaccattgccgagtcgggcgcgattatcgaatacatcatcgccacctacggcaatggccggctgatccccccaccgaacacgccggagcggctgcgctacacctattggctgcactatgcggaaggatccgcgatgcagccgctgctgctcaagctcctattcacgctgatgccgaagcgcgcgccggcactgctgcgtccgctggtgcgcaaggtctgcaaccaggcgctgaccgcgctggtcaatccgcagctcaagcagcacatggactattgggaaggcgagcttggcaaagccgagtggttcgccggcagcgaattcaccgcggccgacatccagatgagctttccgctggaagcagcccaagcgcgtggtgggctcgagcagggccatcccaaggcgatggcattcctggagcgaatccatgcgcggccagcctacaagcgcgcgctggagaagggcggaccgtatcaggtcgggcggtga

SEQ ID NO: 6467 - DNA, 588 bp, BradyrhizobiumColbertium
atgattccaatgcacgggacctacacagcttttgccggccagcgccggctggcctccggtacggcgggcgatgtcgcgctcgcggtcaagcgggcgacacagccgctggaccagccgatcatcatcttcgacgacggcacgggccggtcgatcgacttcgacctgcgcggcgacgatcgtgaggtgctggcgcggctggcgcagctcatgccgccggccgagacggctgaagcacccagcgagccacgcggccgcggccggccgaaactcggcgtggtcgcgcgggaggtgacgttgctgccgcggcactgggagtggctcaacgcccgacccggcggcgcctcggtcgcgctgcgcaagcttgtcgaagaggcgcggcgcgccagcggcgacaaggatcgcgagcgtcaggcgcgtgatgcggcttatcgcttcatgtcggccatggccggcgatctgccgcagttcgaggaggcctcgcgcgcgctgttcgcggacgaccggcggcgcttcaccggactgatagccgactggccggctgatatccgcgaccacatcgtcaagctcgcctacagcgaccgcgcttaa

SEQ ID NO: 6468 - DNA, 1350 bp, BradyrhizobiumColbertium
atgtccgccccgaagccgctctggaccacgttcgtccgcttcctcgcacccctgatgctgagcaacgcgctgcaatcgctgttcggcaccgtcagcaacgtctatctcggccagatgatcggcgtcgacgcgctcgccgcggtctcggccttctttccggtgatgttctttctcttcgccttcgtcatgggcctcagcaccggcgccaccgtgttgatcggccaggcctttggcgcaggcgagcacggccggatcaagatcatcgcgggcacgacgctcgcagtcggcctgctgctgtcgattccgatcgcactgattggcgggctctgcagccgtgaactgatgatggtgctcgccacgccgccggacattctcgatcaggccagcgcctatgcgaaggtcatgctgctgaccatgccgctcggcttcgtcttcctgctgatgacggcgatgattcgcggcgtcggcgatgtgctgacgccgctgctggcgctggcattgtcgactgcgatcggcctgatcctgacgccattgctgatccgcggcacgtcaggactgccggcggccggaatcatcagtccggcatgggcatcggcgatcgccaacgcggcgacgctgatcgtgctcgcgatccatctgctgcgaaggaagcacgcgctcgcaccggacgctgtcatgatgcgccatcttcggcttaacggcgccgtactgcgaaacatactcggcatcgggttgccgagcgccatcggcatgatggccatggcaatcgccgagctggtgctgctggggctcgtcaacagcttcggctcgaacgccacggccgcgtacggtgccgtcaaccaggtgatgggctacacgcagttcacggcgatgtcgatttcgatcgcggtttcgatcctcggtgcgcaggcgattggcggcggtgacagagcgcgcctcgacggcatcgtgcgcgccggtcttgcgttcaacctcgtgctgaccggcgggctggtggcgctgatctatctcgcgccgcgcgcggtgcttggcatcttcatcacggacggcgccgtcctcgatctggcaaaagggctgttgtacatcgccttgtggagctcggtgccgttcggcctggcgaccgtgttttcgggtgcgatgcgtgctggcggcgtcgccttcacgccgatgttgctgtcgatcttcgcgatcgtcgtgatcgagctgccagccgcggtcatcctgagccgcacgatcggcatcgacggcgtatgggctgcctatccgatcgtgttctgcgccatgttcgttttgcagatgggctattaccttctggtgtggcgcaagcgggcgatccgccgtctgatctga

SEQ ID NO: 6469 - DNA, 609 bp, BradyrhizobiumColbertium
ttgacccgtaccgccccgcaattcctgttcgatttcggcagtcccaacgcctatctcagtcatctggcgattccggcgatcgagcagcggatcggggtcaagttcgactatgtgccgatcctgctcggcgggatcttcaaatcgaccaataacaagtcgccggccgagacgctcgccggcatcaagaacaagcgcgagttccatcgggtcgagaccgagcgcttcatcaagcgcttccatgtccagccctatgtctggaatccgcacttcccggtcaacacgctgaacctgatgcgcacggcgatcgcggccgagctcgagggcgtgttcgagcaatacgtcgaggccgccttccatcacatgtggcgcgagcccaagaagatggacgatcctgagatcgccgcgaaggcgctggcgtcctccgggctcgacgcgcaaaagctgttcgcccgggcccaggaacccgacgtgaagggcagactgatcaagaacaccgaggaagcggtggcgcgcggcgcgttcggctcgccgaccttcttcgtcggtgacgagatgttcttcggcaaggagcagctgcgcgaggtcgaggagatggtgtcgggaaagtga

SEQ ID NO: 6470 - DNA, 924 bp, BradyrhizobiumColbertium
atgcgtatcctcgtcgtcggcgccggcgccatcggtggctattttggcggcaggctgttgcaggccggccgcgatgtcaccttcctggtccgaccacggcgcgccaacgagcttgcgagcgcaggcctcgtcatcaaaagcccgaatggcgatgtgaccctgaaaaacccaccgaccgtgcaggcggacgcgctcaaggacaagttcgacgtggtgctcttgagctgcaaggcgttcgacctcgacgacgccatcaagtcgttcgccgcggcggtcgggccgaacaccgcgatcatccccatgctcaacggcatgaggcatctcgatacgctggacgcgaggttcggttcggagcgcgtgctcggcggcctctgcgccatcgccgcaaccttgaacgagaagcgcgaggtggtgcagctgcagccgatgcagtcgatcaattacggcgagcgcgacggcaagatgtcggaccgggtgaaggcgatcgacgaggccttcaagagcggcatcactggcgccaccgcgagcgagaacatcatgcaggacatgtgggagaagtgggtgttcctctcctcgctcgcggcatccaccagcctcatgcgcgcctcggtcggcgacatccttgccgctcccggtggccgggatttcctgctcggcatgctggacgagaccagcgcggtcgccaccgcgtcgggttatccgccgggtggccctttcttcgaacgcgtgaaaggcaacctcaccgccgagggctcgccgatgacggcctcgatgttccgcgacatcaaggcaggcctgccggtcgaggccgaccacgtgatcggcgatctcattgcgcgcgccgatgccgccaaggtgcccgtgccgaagctgcgcatcgcctatacgcatctgaaggcgtatgagaggcagcgggggagctga

SEQ ID NO: 6471 - DNA, 594 bp, BradyrhizobiumColbertium
atgcgccgacaagtcctctcgcacgcaatgggcgcggttgcgctcctggcgctcggcgcattctctgcgagcggcgccgacaatgccgcgatcaaggagaaagcctccgcctgcgccggctgccacggcgcgaacggcatctcgcagacggagaacattccctcgctcgccggccagcccgatcaattcctgcagtggcagctggtgttcttccgcgccggtgcgcgcaagaacgagcagatgcagccgatcgtcgagcagatgaccaacgaggatatccgcaatttcggcgcttacttctcgcagctcacgccgccgaaaggtccggaggacaaggatccggacctgtcgaaaaagggcgcgcaggtggctgccggtcgccgctgcgcctcatgccacacggacagctatgccggcaccaagggcgtcgcccggctcgccggccagcgccaggaatatctcgtcaaggcattgcacgactacaaggccggccagcgcatcggcaacggcgtcgctgcgatggtcgatgtggcctatcgcatgagcgacgaggagatcactgccgtctcgcattatctcgctcatctgaaatag

SEQ ID NO: 6472 - DNA, 1275 bp, BradyrhizobiumColbertium
atgacatcgatgttccatcgatccgtgttggcgcttgcggccgtggccattctcgccgggaccagcgccggcaatgcgcaacagcaggacaagaaccgggcgctgaagaaatacgaatccggcaccaaggaattctggacccatccgccggacgattggtttctcggcgacgagaccgaggcgcagaagggcctcgctccgccctcgggcccgccgaccggcgcctccgacgccgagctcgccaacatcgtcaagaagatcaagctgccgtccggcttcaagatcgaggtctacgcctcgggcgtgctggcggcgcgacagatggcttggggtgacaagggcacgctgttcgtcggctcgttcggcctcggcaacgtctatgccatcaaggacaacaacggaaagaaggaggtcaagaccgtcctcaagggcctcaacatgcccaccggtctcgccttcagggacggcgcgctctacgtcatcgccgtcgacaagctgatccgctacgacaacgccgaagccaatctcgacaatctcgggcaaggcaaggtcgtctatgacgacatgccctcctatgccgcgcatggctggaaatacattgcggtcgacaaggaaggctggttcttcctgccgttcggaccgccgttcaacatcggcattccgccgaccagcgtgtcgcagatccgccgcgtcgatcccaagaccggcaacgccgaaatctgggcgcttggcgtccgcaactcggtcggcggcgacgtcgatccgcgcaccggcaagctctggttcaccgagaatgcccgcgactggatcagcgacgatctgccctcggacaagctgaacatgatcaaccggatcggcgagcatttcggctatccctattgccaccagggcaatttgcccgacgacaagtttgcgatgggccacaagtgctcggagttcacgccccccgtgctgaatctcggcgcgcacgtcgctccgctcggcatgaagttctacaccggcgatcaattccccgccgagtacaagaacaatatcctcatcgccgagcacggctcctggaatcgtcacaagtaccagggcgcgcgcatcgtgcgcgtgatcgtcgggcccgacggcaagaatcccaagcgggagatcttcgcctccggttggctcgagggtgaccagggctatctcggccggcccaacgacatcatcatcgccaaggacggctcgatcctggtcgccgacgattgggccggcgcgatctatcgcatcagctacaccaagaagtag

SEQ ID NO: 6473 - DNA, 987 bp, BradyrhizobiumColbertium
atgaccattttgatcaccggcagcgccggccacctcggggaggccatcctgcggacgctccgtgagcgcgggtcgcctgcccgcgggatcgatctaaagccctcccccttcactgatgctgtcggctccatcgtcgatcccgccttcatgcggcgccagatggacggcgtcaccgccgtcatccacaccgcgacgctgcacaagccgcatgtggcgacgcactccaagcaggactttgtcgacaccaacgtcacgggcacgctcaacctgcttgaggcggccgcggcggcgggcgtgaggagcttcgtcttcaccagcaccaccagcgcgttcggttcgcagcttcgtcccgaggcgggagaggcggccgtgtggggtaccgaggacctggcgccggtgccgaagaacatctacggcacgaccaagctgatggccgagactctctgcgagctgttctttcgcgaacgccgcttgcccgtcgtcgtgttgcggacctcgcgcttcttccccgaggaggacgacgatcctttgatgcggtcggcctacgcgctcgataacgcgcaggccaacgagctgctctatcgccggctcgatatcgcggatgcggtgagcgcgcatctgctcgccgtcgagcgcgcaccgaagatcggctttggccgctacatcgtctcggcgacgagcccgttcgagcaacgtcatctggcggcgctggcgcgcgatgcggcgagcgtcgtgcgcgagctccatccggagtgcgcgcggctctacgcggcgcgtggctggcgcctcttccccgcgatcgaccgcgtctatgtcaacgaccgcgcgcggcgcgagctcggctggcggcctgaattcgacttcgcgcatgtgctgcgcagcctgcgggatgaccgcgatttccgcagcgcactggcgcgcgaggtcggatcgaaaggctatcacgacaggctgtttgacggcgggccctaccccgtcgccccgtga

SEQ ID NO: 6474 - DNA, 420 bp, BradyrhizobiumColbertium
atgacatcgcgcgcggacaagctcggccggatggtctctctcgtgaagctccagcttcggctgtccgaatggcagctcgcgcaattgcgagagcaggagcgcagcctgcaggacgagcaggaatggctggtcggagccctgaacgatggcaccccgcccacgggatcgtcgagcgattcgatcgcgcggcgtttgaacaggaccagcgtcggcgcacgcagcgtgcgggcgcaggcctcgcagcagctcgaccaggttcgcgcggaaagccgccgcgtgaaacaactcgaggaggtcgcgaaggcggcgcttgcggacaagctgcgtgaagcggagaagcgctcgctcgaggatatggcaggcgcaaacctggtcttgagccattggacgccggcgatcgccaagggaaacaagacatga

SEQ ID NO: 6475 - DNA, 483 bp, BradyrhizobiumColbertium
atgatcgtgacagcgacaaccgacctcgttctcgatgtgctcgaagccgccgaccccgtggcgcagcgcgcggccaccgcaaagctcgatgcactgagatcctccgatgccgatttcacggtcgcgatggaggcggaggtcggcagggccagggcggcagctgccgatcaatccgcaacgaaggctgcggaagtaaggtctgacgcggtaaacggcgcgccggtgcaggtcatcaaggcgccggcctccggcgaggtttaccggaagttcgaggccttcatcctccagaccttcgtcgagacaatgttgccgaaacagtcggaggagatctttggcaagggcacggctggtggcgtctggaagtcgatgcttgcagagcagcttggcaaccagctggcgaagggcaagggctttggcatcgccaagcagctcgccgccgcacgtccggatgggccgcgcgctgcggagaaggccggatcatga

SEQ ID NO: 6476 - DNA, 513 bp, BradyrhizobiumColbertium
atgcagctacaagaaggcgcggcggccatgacgatggagcagacgctcgcggataccgaaatgacgacgacggaaggagcagcaaatgatgcgctgctccccgtgctgttgccggccgcgggcggcgagatgatggttgacgctgcggatgcggtgagatcggacgaggtgcgcggcctgctggccgcaatccgtcggctcgcgagcatcgtcgaggaggagacggtcgcgctcgcgacggggcagaaaatcaatttcgacgatttcagcgcgcgcaagagccggagcatgctcgagttcgtccgcctgatgcgggcgcggatgcatcttggtggcgaagtcgagatcaccgaggagatccagcggttgcgcgagagactcgagcggaatcgttcgattctggaaatgcactacgacgcggtgcgcgaggtcgccgccatcatcgtgaaggcgatcaaggaagccgagtcggacggcacctataccggccgcgcggcgcaggacggacaatga

SEQ ID NO: 6477 - DNA, 459 bp, BradyrhizobiumColbertium
atgatcagacttgtgctggcggggctctgggtgtgcatcctcaccgtgggcacgagctatgcggtggcctactggaaggagaatggcagcctgctgccggcgaaggacgaatatctcgacgggctgcaatatcagaagacgcgagtcctgagcgtgccaatggtcgagaacggcaacgtgcagggctacatcgtcgcacgtttcgtctataccgtggaggggcggacgatgcaccagctgacggtgccgccggagccctttgttgtcgacgaggccttccgcaggatctatgccgacgatcgcctcgatttcaggaagctcgcccgttacgatctctccatcctgacgacagccatcaagcagcgtgtcaatgagcgtatgcaggctgaaatcgtccaggacgttctggtcgaggacttcaactacgtgtccaaggaagaattccagcagaagccgtag

SEQ ID NO: 6478 - DNA, 771 bp, BradyrhizobiumColbertium
atgtttattatcgttgatgatcgcgagagcgtcgcaagcagctacgtcggagggctcgttcgcgaaggcgtatcgtccatcggcttctcctcaggagaattctgggactggctgcagtccgcgagtgaagcagatctggcggcggtggacgccttcctgctcggggattgcgatgcccgtggaagcctgccgcgggcgatgcgcaagcgctcctctgctcccatcatcgccgtgagcggccagaagatgctcaagaacacgctggagctgttcgaatcgggcgtcgacgacgtcgtgcacgtcccgatccacctgcgcgagatcctcgcccggacggccgcgatcgcgcgccgccgggtcggcgagctgccgaggccctgcgagagcaggatccaagtcttcttcaacggccgagacccggagatcgcgggccacgcgctcaccctgccccgccgcgaactgcgcattctcgaatatatggtcgccaaccacgggaagtggatcaccaagacgcagatattcaacgccgtctacggcatcttcgagtccaccttcgacgagagcgtgatcgagagccatgtcagcaagctgcgcaagaagctccgcgaccgcctcggcttcgacgcgatcgtggcccggcgttatgtcggttaccgcctcaacatcccggccggcgagaccctcgacgagcaggtgcaggagctcgacgatgtcggcatcctcttgaacagggcgcatgccgtgccggcggcatatccggcgggcaactga

SEQ ID NO: 6479 - DNA, 942 bp, BradyrhizobiumColbertium
atgtcgtccgatggacaagctcgtcccaatgcgaccgcggaggcatccgcggcgacgaagccggttgcggaggcaggcgataattcgacgcgagcgaccaagccggctgcggacgcaaggcgtgtttctgccgtggcgagcgacgaagttctcgcgaaagaggcgctcgagggattgaaacggattcgtgccaaggcacgcctcgacaagatggcgattccgaaacctgcggcggccgtgatcaagccggccgtcatcgtggcgaagccgccgccagccagtccgccgtgggtcgcgccgctcgcaaccctggcggtcgctgccatgttggtggtctgcgcctgcaccggcgtgatcgcatatctcaccacccaacccgctcagaacaatgtcacggcaaatgcggagatcagacatctgcgtgagaccgtcgcgcagctgcgcaggcaggtatcgggaatgtccgagaatctcgacggcttgcgcaccgccgtcgatcaatcgagcaaggcgacgaatgatcgcttcggcaggtttgccgagaacctggaccgtatcgagcgggtgagctcgtcttcgacggcgaagctcgataagatcgctcaggtgcaggcccagactccggcgccggcaattgtgcaagcgcagccggcgccgcagcaagggccgatgatggcctcggttgcagcgcccgaattcacgggctcggtgcctgcggccgagcgtgcgtcggcgccacgcaagacgatcaagggctggtcggttcgtcaggcctatgagggcatcgcgatcctgcaaggcccgaacggcgtcgtcgaggccgtgctggggcaacaggtgccggggcttggccgcatcgaagagatcaggagcgagaatgggcgcctggtggtggagtccagcggcggcgtcgtctattcgtcacgcaaggcgacgccctga

SEQ ID NO: 6480 - DNA, 579 bp, BradyrhizobiumColbertium
atgaatttggctcgcgaatcgatcgaactgttggagcaggccgcgcgtatcctgtggttcgaaggcaccaagcacgggttgcgcgaccgcgaatggatggcgctgcgattcctctctcgcgccaatcgcttctcgcggacgccctctgcgctcgcgagctacgtcggcaccacgcgcggcaccgcttcgttcatcatcggcgagctcgagcggctcggctatctcgagcgaaagcgctccgccacggacaagcggtcggtgacgctgagcgtgacgcagcaaggcaagaaattcctggtgcgcgatcccgtcaacgttctcgtcgaggcgatcgccgtactcgacgacgacgtcaagatccgcttccgtgacacgttccgccacgttctggaccagtcggacgccgccgagcagcggcaccacaccgatgtttgcaagcgatgcatcttcctgcgggaagatcgcatcacgacggacaacaagacgaccgtcgagttcagctgccgcctgttccgcgccccgatcgcggaggcagaggttgatctgctatgcaccagcttcgagcatcaccgccaatag

SEQ ID NO: 6481 - DNA, 888 bp, BradyrhizobiumColbertium
atgagcttcgagaccaccatgacatccgacgttgtcgggctgaccaagagcgccccggtctcgcggcgcggattcatgagtgccagcgcggccgtggccgccggctacacgcttgcggcaggtccggtacgtgcccaggtgatcacgaccgacgccaacggcctccagaccggcgacgccaagatcaaggtcggctccgaagagatgcctgcatacttcgcccggccggccggcaacaccaaggcgccggtgatcatcgtggcgatggagattttcggccttcacgaatacatccgggacgtaacgcggcgcctcgccaagctcggcgcgtttgctgttgcgccggactattatttccgcaagggcgtcgacctcaccaaggtttcggagatcaaggatctgctgccggtggtgaacgccaagcccgacgcggagctgctgtcggatctcgatgcgaccgtggcgtgggcgcaatcgcaaggcggtgatgccgccaggctcggcatcatcggtttctgccggggcggccgcacagtctgggagtacgcggcccacagcggcaccctcaaggcaggcgttgccttctatggtacgctgatcgatcccgccaatccgctgtggccgaagagcccgatgcagctcgcgcccgaaatgaaggcgccggtgctcggcctctacggcggcgccgattccggcattccggtcgcccaggtcgagcagatgaaggccgcgctcgagcagaacaagaaggcggccgaattcaggatctatcccgaagcgccgcacggtttccacgccgactaccgcggcagttaccgcaaggacgccgcggaagatgcctggaagcaggcgcaggcctggttcaggaagtatggagtcttgagctga

SEQ ID NO: 6482 - DNA, 216 bp, BradyrhizobiumColbertium
atgcgctctggcgcgcgggtgaaggacgatagtcccgtcgcttccacatcgatcgtcatgatcgcggcggctgccgcccgtcacgcgcaatgcagcgcacgtgcaccgctgctgaagtcagcgccgacggcgatcggcacgcccggaaagtgcgagggcggccgctcgggccaccctcttccatccaacatcagctcaagactccatacttcctga

SEQ ID NO: 6483 - DNA, 849 bp, BradyrhizobiumColbertium
atgcggctcttcatccttggcctcggctacagtgcccggcacttcgtccgccaacacggcggcagcttctcgcacgtcgccggcaccgtgcgcgatcccgcgcagcgggacgacctcggcggcctggaggtgcatgccttttccgacggcgcttccacccccgcgaccgttcaacaggttcgcgaggccgatgtgctattggtgtcgatcccgcccggaagctccggcgatcccgcgatcgcggcgttcggcgacgtgctccaggcggggcgccgcagggtcgtctatctctccaccatcggcgtgtacggcgatcacggcggcggctgggtcgacgagagcacaccgccgcaggccacactggagcgaacgcaaatgcggatcgcagcggagcaggcctggacggacacgacgcacggcgatgccgcgatcctgcggcttgcgggcatctacggccccggccgcaacgcgctggcgacgctgcgcgcgggaacggcgaggcgcatcatcaagcccggacaggtcttcaaccgcatccacgtcgacgacatcgcgagcgcaatcatggccgctgttcatcaccagggcggcggcatctggaacatctgcgatgacgagcccgcgccgccgcaggacgtgatcacttatgcagcgaaactgatgggcgttacaccgccgcccgaagaggcgttcgccactgccgaaatgtcagcgatggcccgcagtttctatgccagcagcgcccgcgtctccaacgcgaagttgaagcacgagcttggcgtcgcgctggcccacccgacctaccggcagggcctcgatgcgctctggcgcgcgggtgaaggacgatag

SEQ ID NO: 6484 - DNA, 810 bp, BradyrhizobiumColbertium
ttggcgaccggggcgatgatgcaggcaccgcctgcggccgcgcgatgccatgccgacgaactgatccggcgcgcggcggcgctgatcttcgacgtcgacggcaccttggccgaaaccgaggaactgcatcggcaggccttcaaccttgcctttgcccgccagggtctcgactggcattgggatcgcgccgtctacaaggacctgctgcgggtgaccggcggcaaggagcgcatgcgcgcctaccatgcatcgctgcggaccgcggcgccactggtcgacgaggacgtcgccgagcttcaccgcatcaagaccgcgcactttgccgaactcgtcaacaccggctgctgcccgttgcggccgggcgtggcgggactgctcgcagcagcaagggcgcgcggccagcggcttgcgatcgcgaccaccacctcgcacggcaacatcgatgcgctgctctcgcaggctttgggaacgcgctgggcggcggagttcgacgcggtggtcgccggcgacgatgtcaggcacaagaaaccggcgccggacgtctacctcgaagtgctggcgcggctgaagctggatgcgcccgactgcgtcgcggtcgaagattccagcaacggcctgatcgcggcctcccgcgctggcgtcccggttctgattacgcgcagcatgttcttcggagaggacgacttcaccgcggcgcgagtcgtgctggacgatctgtcggagctcggcgccgcgacacaaaaaccgaaaaacaaccccatgcacagtagatcacgcaggcgtgatcgctgcgctcagtggatgcggtga

SEQ ID NO: 6485 - DNA, 408 bp, BradyrhizobiumColbertium
atggcaaaggacagcaaggtcatcgccgccaacgcggccttctacgccgccttttcgaccggcgacttcgacgaaatgaagcggatgtgggcggatgacgacgccatttcctgcatccatcccggttggccggccatcatcgggcgcgccacggtgatcggaagctggcgtgacatcctccagaacccggagcggccgcaaatcgtctgcgccgagccgcaggccatcgtcgacggcgacagcgcgcgcgtgctgtgcatcgagatcgtcgacggcaccgctttggcggctgcgaaccatttccgccgcgtcggcgacgactggcgccttgtgcatcaccagtcgagccctatcgcgcagattgtcgagcaggccgaggacgatggagcgagtcaccgcatccactga

SEQ ID NO: 6486 - DNA, 219 bp, BradyrhizobiumColbertium
atgcggggagaggtgacgatcccgcaattccgcgaccggctggagacctatcgcgacatcacggcggcgatcttgcggcagcatcatctcgatgagcttctcgcacctgtcgcgcccgtcgccgagcagttcgggctgtcgctgccgctcggtgccaagccgcgcctgcggctctccgccggcggcggagacgctcgtctcggctggattgcatcttga

SEQ ID NO: 6487 - DNA, 939 bp, BradyrhizobiumColbertium
atgcccgagctgcgccggatgctgccttccagtaacgccctgttcgtcttcgacgcagcggcgcgcaatggcagttttacagccgcagccgcagagctgaacgtcacgcagccggcagtaagccggatgctcggtcagtttgaggagcatctcggcgttcgcctgttcgaccgcacagcgggacgcgcggtacttaccgaggaaggcgaattgctctatcgccgcgtgctcgaaggctttcgcagtatcgagaccggcctcgtcgagatcgagcggcgccgcaagggcaccgagacagtgacgctatcggtctcatcagccttcaccacgcattggttgatgccgcgcatcgacaagctgcagaagcggtttccggaggtcgatctgcgcttccagctcatctccggtgcactacgcggaccggtggagaatgtcgatctgggcatgcgctttcgcgaccgtgacgagccgtcctccggcgccacgctggtgatgaaggaggtcatgctgccgatgtgcagccccggctatctcggcgagagcgatcccaccgaaggcaacaccatcatccgcctcgcagagacgccgggagactggtccgcggattacgcatcgctcctcaccggacgccgcggggcggcgaaagcgctgagcttcaccgactatgcggtcgtggtgcaggccgcgctgctcggccaggggattgcgctcggctggctgacggtggcttcgcattggctcctgaccggcgcgctggtgcccgcctccggcacgcttaccaccacgcgccgcatctgcgaattcctgccgccgcgcaaccggccgatgcgcccgatcgccgccgagatccgcgactggatcatcgcgcagatgaaaagcgagatcgtcgcgatcgaccgtctttatccgaaactcggcgcgatggcggcgtgttattga

SEQ ID NO: 6488 - DNA, 1080 bp, BradyrhizobiumColbertium
ttggacaaacgagcggagagcgtcgagatcaggtcggccagcaagacgtatggcgccgtccgcgccctcgacgacgtttctctcaacgtcggtgccggcgagttcgtctcgctgctcggtccctccggctcgggcaagaccactctgctcggcattttgggcggcttcatcctgccatcgagcggatcgattttcttcggtggccgcgacgtcacctacatgccgccgcacaagcgcgacatcggcgtcgtgttccagaattacgcgctgtttccgcacatgagcgttggcgagaacgtcgcttttccgttgcgcgcgcgtcgcctgccgaaggcgagctggcccgacaaggtgcgcgcggccctcggcatggtcgggctcgccggctacgaggagcgcggcatcgcccagctctcgggcggccagcgtcagcgcgtggcgctggcgcgcgccgtgatcttcgagccgcgcctgatcctgatggacgagccactctccgcgctcgacaagcagttgcgcgaatccatgcagatcgagctgcgcgcgctgcaccggcgcatcggcgccaccatcatctacgtcacccatgaccagcgcgaggcgctgaccatgagcgaccgggtcgccgtgatgaaggacggccggctgatccagatcgacgaacccgagcgcctgcacgaccatccggcagattccttcgtcgcgagcttcatcggggaggcgacgatgctgcccgttcgccgtgtcgatgcggcctgcgtcgcgctgggcaatgcgctgctgcgcagcgcccgtgccattcccgatggcgatgcactgatgctcgcagtgcacggcgaaaagctcctgatcgacgatggggcgcaggatgccgcctgcaaccggctgaccggcacggtcaccgacatcgtctaccagggcgagagcctgcgcatcttcctggcgctcgctgacggcatcgcgctcagcctgcgccagccgagctatcaccaggcctacagccgtattccgccgctcggcggcagcctcacggtcacccttcaccccgaggacaccatcgtcgtgccccgggcggactga

SEQ ID NO: 6489 - DNA, 717 bp, BradyrhizobiumColbertium
atgtcgacccaagccgcgttcagcaatttcaaggttctcaccttcgacgtcgtcggtaccttgatcgatttcgagactggcgtcctcgacgcagtgcgcaagatttccggcaagacgtcggccgagctcagcgacgaccagattttcgagccgtacaagcgcggccgcgacaagcattatggccgctcgagcgaggcgatgttccacgtctatcgccatctcgccaaagagctcgggctgccggctgacgatgcatcctgcgatgtgttccagctctcggtgttgcactgggggccgttcgcggattcggtcgaggcgctgaagcgcctgcgcacgaagttccgcctggtggcgatgaccaatgccgaccgcgtcgcgctgtcctgctatgcccacgcgctcggcgatcccttcgacgatacggtgtgcgccgacgataccggtgtcgccaagccgaatccggaattcttcgcctacaacagggggcgccagtccgctttcggctacaagcagtccgacatcttgcacgtcgcgcagagccagtatcacgacatcgggatcgcgcggaagctcggctaccgggtgtgctggatcgagcgccgccagggcattgcaggcttcggcggcacgccggcagtggagacgctgaccaaaccggactttcattacccgacgttgaaggcgctggcggacgcggccgtcgggccagcggcctaa

SEQ ID NO: 6490 - DNA, 1308 bp, BradyrhizobiumColbertium
atgacacgggactggagcgagctgccatcggtcaactcgctgtgggaagccacggccgagccggcgcgtgcgtttcccgtgctgtcaggcgagcagcaggccgacgtggtgatcatcggggcgggctatacgggactctccgccgcgcaccacattgccaaagacggcctgtcgcccatcgtgctggaggccaatcgacccggctggggtgcgagcgggcgcaatggcggcgtgatcaccgcaaagtttcgcctctcgttccgtgaggtcgacgccgcacatggccgcgccatggccaagcgcatgtacgagatcgcgcatgaatcgaccgacatggtcgaggaacttgtctccgagttcggcatcacgagtgcgaacctcacgcgcaccggccaggtcaaggcggcgcacaacgagacgacgctgaagaccgcgatcagcgaggccgattggatgacgcgcgaaatgggctcggccgaggtccgcatcctcgacaagcacggtgtgcgggacgagaccggctccgacatgttcgtcggcggggtgctcaatcccggctcgggcggcatccatccgttgaattatctgcgtggtctggcaaatggcgttgcgagccgcggcgtcccgatcttccaggaatcacccgtggtgcggctgcggaaggagagcggcggtatcgttgccgagacgccgcaaggtgcagtgcgagccaagcaggcaatcatcgccaccaacagctattccgacctgaccggcgcgactgcgcagatgcagcgcacgctgatcccgttccgcagtgccatcatcgccaccgagcagttgccgcgcaatctggctggacggctgatgcccacggggcgcacctataccgagaccaagcgcatgatgcgctggttccgcatggtggacaatcgggtgatctttggtggccgcggcgccttcggcaagcaggactcgcaagccgccttcgacgccctgcgtaaggcaatggtcggcatcttcggcgatctcgccgatgtcccgctcgaatacaaatggtcgggcctcgtggcgatgacgatggactcggtgccgcatatcggccggctcgacgatcgcacgctggtctcgatgggctacaacggcgccggcgttgcgatgtcgagcctgatgggccgctatcttgccgccttcgtgcgcggcgagacgccggaggtcggcctgctcgatgtcaggcgcatgaagcccattccactctatccgctgcgcgagcccgccgtccgcatggtcgcaggctggtaccagtttctcgatgcgatcggtcagtga

SEQ ID NO: 6491 - DNA, 1059 bp, BradyrhizobiumColbertium
atgacgacgaaacggaattccggatttggttacgccttgttgggcgcttcgatcagtgcagtcgcgctcggcactgcagccgacgccgccgagcagatcaccttcgtctcgcaaggcggcgcctatcagcaggcgcagacggtggcgatcctcgatccttccgccaagaagctcggcatcaccatcaaccaggattccatccccgacgcctggcccgcgatcaagacgcaggtcggcagcggcaagccaatctgggacgtcgtggataccccgaccggctattgcctgcgcggcggcgagcagggcctgatcgagaagctcgacttctcgaagattccgaacgccgcagcgatgccggaggcgtatcgcagcccatattcggtgtcctacgaattctattccagcgtgctcgcctacagccagaagacattcccgaaggacgcgccgaacagttgggtcgatttttgggacgtgaagaaattccccggtcgccgcgcgctgcgcaatcatccgatcgcaaccctcgaagccgcgttgatggccgacggtgtcgcacccgacaagctctacccattggacgtcgaccgcgcgttcaagaagctggaggagatcaagccgcacatcacggtgtggtggacctcgggcgcgcagtcggcacagctgctcaatgacggcgaggtcgatatggagatggcctggaacggccgcgtcagcgccgtcgccaaggagggcgcgaaggtctccttcacctacaatcagggcatcttgcagagcacctcgctctgcatcctcaagggcgcacccaatctcggcacggcggtcaagttcatcaacgaggcggttgatcccgtgcaccaggccaacctgccgctccacatcgactacggcccgggcaatccgaaggcgttcgagacgggcgtgattaagcccgagcgcgccacgcaattgccgagcgagccggcgaatgcggccaagcaggcgctgatgtcctatgcctggtggtcctcgcccgccggcgaagccgccgagaagcgctgggcatcgttcatgcagaagtga

SEQ ID NO: 6492 - DNA, 858 bp, BradyrhizobiumColbertium
gtgtccgatccctcccaaaagcaccagcgccgtgagcacggcctgatgctggcgttggtgtcgccggcgctgctggtagtcctggctctgatcgtactgccggtcggctggctggcttggcagtcgatctaccatgacggcttcacgctggagaactatcgccgcgtcttcaccgaagacatctactggcgcagcttcgcgctgaccttccagatcagcctcgcggtcacactgatcgccctactgctcggctaccccttggcctatctcgccaattcgttgccgaaaggatggggcattttcatcctgtccctggtcatgctgccgttctggaccagcgtgctggtccgcgcctatgcctggctggtgctgcttcagcgcagtggcgtgatcaaccagttcctgcgccatctcgaattggtctccgagccgctcgcgctggtccacaacaccttcggcacggtggtcgccaccgtgcacatcctgttgcccttcatggttctgccgctctatgccaccatgcagaagatcccgaacgatctgatgcaggccggcgccagcctgggcgcgagcccgtcgctgacgttcctccgggtcttcttgccgctgtcgctgccgggcgtgctcgccggctgcaccatggtattcgtgctctgcctcggtttctacatcacgccggagttgctcggcggcggccgcaccgtgatggtgtcgatgctggtgagccgcaatgtcgagctctacaatcagttcggggccgcgagcgcggtcgcagtggtgctgctcctgagcgtgctcgtgatcttcttcgcggtcagccgcttcatctcgctcgatcgcgtgctgggacacaaatga

SEQ ID NO: 6493 - DNA, 750 bp, BradyrhizobiumColbertium
gtgatcagcgtgctggtgttagtctatctgattgttcccgtgctgatcatcgtgccgatctcgttctccagcgcgcgtttcctgacgttcccgccgccgtccttctcgctgcgctggtatgagcaatatttctcaagtcccgcctggatgcaggcgacgcgggtgacgctgacggtcgcattcctgaccgtcctgatcgcgacgccctgcggcgttgccgccgcctatgccgtcagccaatccaggctgcgtatcatgcgcgttatccatatggcgctgcttctgccactggtggtgccgatcatcatcaccgcggtcggcatcttcttcgtctatacccgggtcggcctggtcgcgaccctgcccggcctcgtgctggcgaatgtgatgctgggactgccttacgttgtcatctccgtgctcgcgggcctgcagagcttcgatccggcgcaggagatggtggcgcgcagcctcggcatgaaccgcctgcgcagcttcttcgcggtgacgctgccgcagatcaagtccagtgtcgtcgccggcggcatcttcgccttcatctcggcgatggacgagacgatcgtcgcgctgttcatctccggcggccagtaccagccgctgaccaagcgcatgttcaccgcgctgcgcgacgagatcgacccgaccatcgccgcgatctccaccttgatgacggccgcctcattcatgctggtgctgctggcgagcgcacgacagaagcggagtgggtga

SEQ ID NO: 6494 - DNA, 690 bp, BradyrhizobiumColbertium
atgcaaaccatcggcctgatcgggggcatgagctgggagagcaccgcgctctactacaagctcatcaatgagcgggttcgcgaccgcatgggaaagctgcattccgctccactcttgatgtattcctacgatttcgaggagatcaaacagatgcagtacggcggccgctggcaggaggcggcggccagccttgcggaggtcgcacgacgcctcgaagacgccggcgcgcgtgcgatcgtgttgtgcacgaacacgatgcataaactggcgccggagatcatatccagcgtgaccgttccgttcattcacatcggcgatgccacggcgcagcggatccgggccaggggatatcggcgggtcgggctgctcggcacgaagttcacgatggaggaagacttctacatcgaccggctgcgcgcgcacgatctcgacgtcctgattcctcccgcggacgagcgcgccgaagtgaaccgcgtcatctacgacgagctgtgcctcgggaacgtgacggcgcccgcgcgccgccgctatcaggaggtgatggcggcgctcgtcggcgcgggcgcggagtgcatcatcctcggctgcaccgagatcaccatgctggtcggcccggacgacacctcggtcgagacgttcgacaccaccgccattcacgccgagacggccgccgatttcgcgatcggatga

SEQ ID NO: 6495 - DNA, 1662 bp, BradyrhizobiumColbertium
atgaccatccgcaacgcccgcaccgggggccagatcctgatcgatcagctcgtcgcccaaggcgtcgagcgagtcacctgtgtgccgggcgagagctatctggcggccctcgatgcgctgcacgacagcccgatcgacgtggtgatctgccgcgccgagggcggagcggcgatgatggcggaggcttatggcaagctcaccgggcggcccggcgtctgcttcgtcacccgcggccccggtgccaccaatgccagccatggcgtccacatcgcgatgcaggactcgacgccgatgatcctgttcgtcggtcaggtcgataccggcatgcgcgagcgcgaggcgttccaggagctcaactacaaggccgtgttcggcaccatggcgaaatgggcggtcgagatcgatcgccccgaccgcattccggagctggtggcgcgcgctttccgcgtcgccatgcagggccgccccggtcccgtcgtgattgcgctgccggagaacatgctgaccgagacggcggcggtggcggacgccatgagggtcgagcccgcaatgagctggccggcgcctgccgatatcgagaagctcagcaccatgctcgcgggcgccaaggccccgctggtcgttctcggcggctcgcgctggaccgacgaggcgaccaagggcatcgcgcggtttgccgagcgcttcgacctgccggtcgcgacctcgttccgccgggcctcgctgatcgacgccgaccattcgcactatgccggcgatctcggcatcggaccgagcccgggcctcaaggcgcgcatcgagggcgccgacgtcatccttctcatcggcggccgcatgtcggagatgccgtcctcgtcttacacgctgctcgacattccgacgccgcgccaaaagctgatccatgtgcatccgggctccgaggagctcggccgcgtctatcagcccgcgcttgcgatccaggcgacgccggccgccttcgcggccgccgtcgagacgctgaagccttcgggcgcggtggcgtggaagggcgaggccgccaaggcgcacgccgattatctcgcctggaccgagaaggcgcgcgagctgccgggcacgttccagtacggccaggtgatgacctggttgcgcgaccgcctgccgaaggatgcgatcgtctgcaacggcgccggcaattatgcaggctggattcatcgccaccatcgcttccacagctttgccgcgcagctggcgccaacctcgggctcgatgggctatggcgtgccggcgggtgtgctggcaaaacggcaatatccggaccgcgtcgtcgtcgcctttgcgggcgatggctgcttcctgatgaacggccaggaattcgcgacggccgtgcaatatgacgcgccgctgatcgtcgtcatcatcgacaattcgcaatacggcaccatccgcatgcatcaggagcgcgactatcccggccgcgtggtcgggacccagctcaagaacccggactttgcgatgtatgcgaaagcgttcggcggtcatggcgagcgcgtcgagcgcacggaagaattcgcgccggccttcgagcgtgcgcttgcctcgggcaagccgtcgatcctccattgcatcatcgacccgcgcgcgatctcggtcggcaaggatttcacgcctgcggtgaaggcttaa

SEQ ID NO: 6496 - DNA, 1266 bp, BradyrhizobiumColbertium
atgccggccggccgccacgtcgccatcatcggagccggtgcgatcggcgtgatcagcgcgatcgaggccctgagggaggggcatcgcgtcacgctgatcgatccgggcgagcccggcggcgagcaggcggcgagctacggcaatgccggctggctgtcgtcgcattcggtcataccgccggccgagccgggcatctggaagaaggtgccgggatatctgatggatccgctcgggccgctcgcgatccgctggtcctacttgccgaaggcgttgccctggctggtcaagtatctgctgtccggctggaccgagtcacgtgtggagaagacggccttcgcgttgcgtgacctcctgaaggacgcgccgctgctgcaccggaagctcgcggaagaggccggcgtgcctgaattgatcgagcgcaacggcgtgatgcatgtgttcacctcgcgcgggaacttcgataacgatctcggctggcggctgcgcaagaaggtcggcgtcgaatggctcgagctcagcgccgacgagatgcggcagcgtgagccggatctgcatccgcgctacacgtttggcgtggtggtggaggaggccgggcgctgccgcgatcccggagcctatgttgccgcgctcgccaatcacgcgctcgccagcggcgcggtgcacgtgcgggacaaggcgaccgggctaagactctccgggaacaagctcgtcgccgtcgtcaccgagaacggcgaaatcccttgcgatgctgcggtggtcgccgccggcgcacggtcgaagcagctcaccgcctcgatcggcgatccgctgccgctggaaaccgaacgcggctatcacgtcatgatcgagaatccggaatccggcccgcgcagttcgatgatggcatccgacgccaagatggtggtgaactggaccaacaagggcctgcgtgccgccggcaccgtcgagatcgccggcctcgaagccgcgccgaactggaagcgtgccgagatcctgcgcaaccacctgctcggcatgttcccgaaactgccgaaagacattccggcctcgcgcatcaagacctggttcggccatcgcccgagcatgccggacggacgtccctgcatcggttatgcgcgggcctcccgcgacgtcgtctatgctttcggccacggccatgtcggcctggtcggctcggcccgcaccgggcgtctggtcgcccagctcgtgagcggcaaggcgccggagattccgctcggccccttcgcccccgagcgattcctctga

SEQ ID NO: 6497 - DNA, 744 bp, BradyrhizobiumColbertium
atgagcaccgcagccaatccgtcttcccgcatcgcccgtggcggcaagtccatctacggcgcgccgctcggcattctgatgctggaggcgcgctttccccgcattcccggcgacatgggcaacggcacgacctggccgtttcctgtgctgtatcgcgtggtgagcggggcctcgccggagaaggtcgtgctgaagggcgcagccggcctgctgcccgacttcatcgacgcggccaaggatctggtgcggctcggggccgaagccatcaccaccaattgcggcttcctctcgctgtttcagaaggagatcgcggcggccgtcggcgttcccgtcgcgacctcgtcgctgatgcaggtgccgtgggtgcaggcgaccttgccgccgggcaaacgcgtcggtctcgtcacggtgtctggctcgacgctctcgcccgcacatctcgaaggcgccggcgtgccgctcgacacaccgctggttggcacggagaagggcaaggagtttttccgcgtcctgatcaaggccgagaaggacgacatggacgtggcgcaagccgagcgcgacgtggtcgaggccggcaaggagctcgtcgcaaggaatccggatgtcggcgccatcgtgctcgagtgcaccaacatgccgccttatgccgccgcgcttcaggccgaggtcggattgcccgtctacgacatctattccatgatcatctggtttcacgccggactgcgcccacgaatctttgcgtga

SEQ ID NO: 6498 - DNA, 780 bp, BradyrhizobiumColbertium
atgaaactatccggcaaggtcgcggctatcaccggcgcggcgcgcggcatcggcaaggcctgcgcgatgaggtttttggaggacggcgtcaaggtcgtgatctcggatatcgatgccgagggcctcgctgcgacggccaccgaactcggacgaccggatgccttgcgcaccgtcgtcggcaatgtcgccaagcgcgctgatgtggaccagctggtcgcgactgcggtgaaggagttcggtcggctcgacatcatggtcaacaatgccggcgtcgcccgcaaccagggcattctcgacatcaccgagcaggatttcgacgagatcatcggcatcaatctgaaaggtgcgttcttcggcgtgcaggcggccgccaggcagatgattgcgcagggtggcggtggggtcatcatcaacatgtcctctgtgaacgcgctgctggcgatcccggcgctggcgacctatgcgatgtcgaagggaggcatgaagcagctgacctcggtcgccgccgttgcgctggccccgcacaacattcgtgtggtggcggtcggccccggtacgatcctgaccgacatggtggcctcgtcaatctacacctcggaggaggcgcgcaagaccgtgatgtcacgcacgccggccggccgcggcggcgagccgagcgaggtggcttcggtcgtggcgttcctggccagtgacgatgcgtcgtatatcaccggacagacgatctatccggatggcggcagattgatcctgaactacacggtgccggtgaaggacaagtag

SEQ ID NO: 6499 - DNA, 795 bp, BradyrhizobiumColbertium
atgaagagggaaagccgcggcatccagtcgatcgaggtcggcggagaattgcttcgcgccctcgcaaggagcggcgagccgatgatgctgcgcgatctcgcccgcgaggccggcatgacgccggccaaggcgcatccctatctcgccagcttctcccggatcggcctgatcgagcaggacgagaccaccggccgctacgagatcggcgcgctggcgctggagctcggcctcatcagcctgcgccgcctctccggcgtgcgcatcgcgcgtcccaagatcgcgggcctggccagccagatcggtcacgcggtctcgctcgcggtctggggcacgcacggtccgaccgtggtgcagctcgaagagccggcccaaccggtgcacatcgtgatgcgcgtcggctcggtgatggcactgctggagaccgcgacgggccgcgcctttgcggcgttcctgccggagaagacgatcagcgccgcgctcgaaagcgggctcgaccgccatggcgtcggctacaatccgaagcgcgccgtgaagggcgccaagctcaccgagatgctcgcggaggtccgcaagcacggcctcgcccgcgcgctcggcgatcccctgcccggcgtcaacgcattctcggcgccggtgttcgatcattccggccatgtcgcattggtcatcaccgcgatgggaccggaaggcaccttcgatgcccgctgggacagcccgatcgcgctcgccttgcgcgactgtgccggcggcatctcgaagcggctcggccatgggatgacggttgcggcggagtga

SEQ ID NO: 6500 - DNA, 1734 bp, BradyrhizobiumColbertium
atgaccggcaacgagcatagcggcgctgaaacttacgagtgcgatgtgctcgttgccggatcgggttgctccggcatgtcggccgcgatcaccgcgcgccatcgtgggctcggcgtcttgatcgtggagaaggagccgcgcttcggcggcaccaccgcccgctccggtggttggctctggattcccggtacctcgctggcgaaggcgtacggcatcgaggaaacgccggagcaggcccgcacttatctgcggcacgaggccggcaacaattatgacgccgcacgcgtcgatgccttcctgagcgccggccccgaggcggtggatttcttcaccaccaagaccgcgctgcgcttcgacatgccgctggtgtttccggattatcacgccgaggcacccggcggcgcgcagggcggccgctccatggtgacgcgcccgtttgacggtcgcgagctcggcgacctcgtcaagacgctcggcatgccgctgcccgagctcaccgtgttcggcatgatgctgggctccggcaaggagatcatccacttcatgcgggtgacgaagtcgctgacctcggccgcttatgtcgccaagcgcctgtcgcggcatctcatggacgtgctgcgctacggccgcggcatgacgctgaccaacggcaacgcgctcgccggacggctggcgaaatccgcgctcgacctcaagatcccgatgtggctgtccgcgccggtgcacgagctgacggtcgagaacggcgcggtgaccggcgcgatcgtttcacgtgagggacgcgacgtgcgcgtccgcgcgcgccagggcgtcgtgctcgcctgcggcggctttccgcatgatgtcgagcggcgcaagaagatgtttccgcatgcgcccaccggcaatgagcactattccccgggaccgaccggcaataccggcgacggactgcgtctggccgagcgcgccggcggtcgcatcgaggatcgcctgcccaacgctgcagcgtgggtcccggtgtcgctgaccacgcgcaaggacggatcgaaaggcgtgatgccgcatttcatcgatcgcgccaagcccggcgtgatcgcggtgatgcgcgacggccggcgctttgccaatgagggcaattcctatcacgacttcgtccaggccatgatcaaggcggcaaagcccggcgaggagatcgcggcctacctggtctgcgatcacaagacgctgcgcaaatacggcctcggctgcgtgccgcctttcccgatgccgctgggccatcacctgaagacgggctatctcatgcgcggcgatacgctcgaggcgctggcggcgaaggccggcatcgatgccaaggccttcaccgagaccgtcaggcaattcaatgccgccgccccgctcggacacgatgccgccttcggcaagggctcgaaggcctataaccgctaccagggcgatgcgctgcacgggccgaatccctgcgtcgcgccgatcgagaacggaccgttttacgccatcaagatggtgatcggcgatctcggcacctatgccggcatcgtcaccgacgagaacgcgcgggcgctcgatgccgagggccgcgtgattcccggcctctatgccgcaggcaacgacatggcgagcatcatgggcggcaattatccgggcgccggcatcacgcttgggccggcgctgacgttcggctacattgccggcagacatcttgccgacagcgctgccaagcgcaacgcggcgtaa

SEQ ID NO: 6501 - DNA, 135 bp, BradyrhizobiumColbertium
atgtatctcgccaaggtgaagaagcccgagcagtccaaggagccgtgggactatctggagatcgtcaagaccgtgaagggcgaggacgccttccgcccggtctccgaatccaaatgcccgctcctgaagaaatga

SEQ ID NO: 6502 - DNA, 1032 bp, BradyrhizobiumColbertium
atgaatgcctggtacgccgccgcctgggacgccgaagtgaaggcggcgctgctgccgcggacgatctgcggcaagcacgtcgtgatgtaccggaaggccggcggctcggtggccgctctggaggacgcctgctggcatcgcctggtgccgctgtccaagggccggctcgaaggcgacaccgtcgtctgcggctatcacggcctgaagttcaacgcgcaggggcgctgcaccttcatgccctcgcaggagaccatcaatccgtcagcctgcgtgcgcgcctatccggtggtcgaacgccaccgctacatctggctctggatgggggatcccgcgctggccgatcccgcgctggtgccggacatgcactggaatcacgatcccgcctgggcgggcgacggcaagaccatccacgtcaaatgcgattaccgcctcgtgctcgacaatctcatggacctcacccacgagaccttcgtgcacggctcttccatcggcaatgatgcggtggccgaggccccgttcgacgtcacccatggcgagaagacggtgacggtgacgcgctggatgcggaacatcgagccgccgccgttctgggccaagcagctcggcaagccggggctcgtcgaccgttggcagatcatccgcttcgaggctccgtgcacgatcgccatcgacgtcggtgtggccccggccggcagcggcgcgccggaaggcgaccgctcgcacggcgtcaacggcttcgtgctcaataccatcacgcccgagaccgagaagacctgccactatttctgggccttcgtccgcaactaccgtatcggcgagcagcgcatcaccaccgagatccgcgagggcgtctccggcatcttccgtgaggacgagctgattctggaagcacagcagcgcgcgatggacgagaatccggatcgcatcttctacaatctcaacgtcgatgccggcgcgatgtgggcgcgcaagctgatcgatcggatggtggcgaaggaaagcgccccaaagcaccttcaggccgcggagtag

SEQ ID NO: 6503 - DNA, 753 bp, BradyrhizobiumColbertium
atggccgaacgtgaggtcgaccgctccgtctcgcagaccgtgaaggcgcagcttgcgttgcgcgaccagatcctgtccggcgctttgcgtccgggcgagcgcatctccgagctgcaggcggtggagacgacaggcgcttcgcgcacgcccgtgcgcatggcgttggtgcggctggaggaagagggcctcctggaggcgatcccctccggcggcttcatggtcaaggcgttctccgagcgcgacatttccgattccatcgagctccgcggcacgctcgaaggcctggctgcgcgcttcgccgccgagcgcggcgtctccgcgcgcgagctcgagccgctgaaggaatgcctggccgcgattgacgaattgctgcggcaggtgccgatctcggtcgatgcgttctcggcctacgtcacgctgaacgcacgcttccacgccttgctcacggagctgtcgcgcagcccgccgctgatccggcagatcgaccgcgcctcggcgctgccgtttgcatccccgagcggcttcgtcatggcgcagtcggcgctgccggaggcgcagcagatcctgatcatcggtcaggagcaccatcgcgtcgtgatcgacgccatcgagaaccgcgaaggcgcgcgggccgaggcgatcatgcgcgaacatgcgcggcttgccgtgcgaaacctgcggctggcgctgcgcaaccggacccatctcgacctcttgccggcgctcgcgctgatcaagaccgcaaccgattga

SEQ ID NO: 6504 - DNA, 981 bp, BradyrhizobiumColbertium
atgcgcttcatcgaaagctggatcccggcaacgctggtctcgacccgcgatctcgcccccggcatccgcgaattcctgatccggccggatcggttcgatggtgccgcctatccggtcggcagccacatcaatgtcagcgtcaccatcgacggcctgcccgagacgcggtcctattcgctggtcggcgaagcctcgcccgccggcttcaaggtcgcggtgcgccgtgccgaggattcccgcggcggctcgcgctacatgtggtcattgcagccgggcgcgcggctcgacatcacccagcccgcttcgctgctcgcggtcgattgggctcgccccaattattgcctgatcgccggtggcatcggcatcacgcccatcctcggtgccgcgcaggcgctggcccgccgcggtgcggagctcacgctgcactacgccgtgcgctcgcgcggcgaggcggcttatctcggcgacctcgccgggatgctcggagatcgcctcgtggtccatgccggtgacgaaggaaagcggctcgatctcgatgcattgttcgcctcagtgccgcagggaacgctggccctgttctgcggcccgatgcggatgctcgacgccgcgcgccacgcctggatcggcgccggccatccgctgccagatctccgctacgagactttcggctccagcggcaccctgccgaccgaggctttccgcgtccggcttaaggattccgatgtcgagctccagattccgcgcgagcgctcgatgctcgacgtgctcaatgccagcggtcatgacgtgatgttcgactgcaggcgcggcgaatgcggcctctgtgccatcgacgtggtcgcggtcgacggcgagatcgaccatcgcgacgtcttcttcagcgatcaccagaagcagagcaaccagaagatctgcgcctgcgtctcccgcgcgcggggcaccatcgtcgtggacacgctgctgcgggcggacgcgatctaa

SEQ ID NO: 6505 - DNA, 1980 bp, BradyrhizobiumColbertium
gtgctgccaggcttgggaatgcggactcaaacgaccaactatgtcgcgcggctgttcgccggcgatctgtcggcctttggcggtcccgcaaccgacgaggccatggccgggcatctccgtgccgagcagatgtcgctggtgctgggctattcagtcggcatcatgctcgccaatgcctgcaacgccatcgtgctcgccatcgcgctgtggccgtctccggacaggatcgctgcgctgatctgggcaggcgccgtcgccggcgccgcgatcgcgttcggcctgcactcgcgtgcggtgcgccgcatcaccaaaccgcaattcgtctcgcggcgcgccatgcaccgcctggtccgcaatgccttcattctcggcgctgcctggggcatcgtcccggtcgccttcttcgccgatgcctcgaccggcggccaactcgtcatcacctgcctgtgctcgggcatgctggccggcggcgcgctcgcgttcgccacgatcccgatcgcggccattgccttcacggctccgatcttcctcggcatcgctatctgcctgggcaggaacggcgacctcgccttcctgctgatcgccttcctcgtcgtggcctacggtagcgtgctgctgcgcggcgtgttcgtcaactctttctcgttcgcgcggcgcgtgacgcggcaggtagaggctgagcgcacggtgcggcaggatcctctcacccatttgcccaaccgcgtggccttcaacgagacgctcgatgcggcgctgaagcgactggcgttatcaggtgaggagttcgcggtgctgctgctcgacctcgatcgcttcaaggaggtcaacgaccagttcggccatcccgccggggacgaattcctggttcaggtcgcaggccgcctgcaacgctgcacacgtgcggccgagcacgtcgcgcgcatcggcggcgacgagttcgcgctcgtcatggccaacctgacgcggccggaggatgcgctcgaaatcgccgaacgcctggtcgcggctttcgacgaacctttgcggatcgacgggcgccagatcgtgggagcgaccagcgtcggcatcgtgctggcgccgcgagacggcgacacgccgctcgacctcatgaagaatgccgatgccgcgctctaccgcgccaagaaggcgggacccggcacgatctgtttcttcgaggaggtcgacgacagggcatcacgcgaccgcaaggcgctgcaatcggatctcgcaggggcgatcgcgcgaaacgagctattcctggtgttccagccgttcctggatctcgacgaccatcgcatcaccggcttcgaggcgttgctgcgctggcagcatccctcgcgcgggttggtaccgcccaacgaattcatcccgatcgcagaggagaccggactgatccacgagatcggcgaatgggtcatccgccgcgcctgcgccacggtggcgctatggccggaagagatcagagtcgccgtgaacttctccgcggcgcagtttcacaacacagccatcctgcagaccatcgtgcgggcgattgccgacgccaggatcgccccgcaccggctcgagatcgagatcacggaatcgatgctgctgtccaaatacggctcggccgcatcggtcctgaatgcgctgctggagctcggcataaccgtggcgctggacgatttcggcaccggcttctcgtcgctgacctacctgcgcaagctgccgttcagccgcatcaaaatcgaccagtccttcatccgcgacatgctggcccagccggactgcgccgcaatcgtgaagtcggtggtttcgctggcgcgcgacctcgacatcggcgtggtcgccgagggcgtcgaaactgccgaccagctcgaatatctgcgccagatcggttgcgacgaggtgcagggctatctgatcagccggcccgtggcggctgatggcgtcatggcgctgctggagacgaagagggtccggatgacttacgcggcgtaa

SEQ ID NO: 6506 - DNA, 1011 bp, BradyrhizobiumColbertium
gtggaccgaccgggctggcgtgcgccgcgtcggcactggatgcgttcgaatcccgagggcctgtccatgagcgagccttcagccgatgtttcggcgacggtcgaatacacgatggacaaatggcggatggaccgggtcccctgggccatgtgggcttgcgtcgccggccttgcgatcgcgcttcacgccgagagtcgcggccagaatggagcggctctggccgccatctatctggcgctcctgggacttgcgttcgcaggctatgcactgacgaccctgatcggaaggtccggactgccattgcttcttgaattgttgatcggcgcccttgtcctggttgtcatctccggcgtcatcggtgtgatcagcctgatggccggcgggtcgagcggcagctccagctacgttggcgccatgcgcagtctctattggagccatctggtgaacccatcgctgaatgttttcggctggatgttgctctacgtgggatggggctggatcgcattctcctcttatcggcacttctatgcggatcgggcagtcgtctccttgtcttccgcgggcatccggtttcatagaccctggctcaaggggcttttcattccctggcacgacgtgcggggggtgggctaccttgagattccgtccgtctcagggccgcccttcgccaatccgcattctgcggccgtcacggtcggtctggacttctatcagcggcacgtcgcaccgaagcgcagctttttcgcgccgcccggggccgaggcgatgttctggccaaagggcgagatgatgcaggtggtgctgaacagcgccgacatgacggtcaagcccgagaattttctcgtgcctgccgaggcgcgctggaaggcgttccgagatcaacccgggccgtcaccccaacatggtggcaccatcgtctacggacgctggtcgatcgacggctctcggtggcaggccattcagtttctggcgccggtcgtcgccgtggccgtggtcatgctataccgataa

SEQ ID NO: 6507 - DNA, 366 bp, BradyrhizobiumColbertium
gtgccaagtcgggatatcgttgaagctttcgcgaaacgcctggaggccggtgatttcattggcgcgatcgaacagttctgcacgctcgacgccgtgactttcgagaacaacgctgctccaacggttggccgcgacaagctcgtcgccaaggagcgcggtgtgctggcggcctcgaaggaagtcagggcggttcgcatcgggcccagcctcatcgaaggcgatcatgtcgcgacccgctggtgcttcagcttcaccaacaccgagggcgtgacgcggacgctggaggagatcgcgtggcagacctggcgcggcgatcagatcatcgaggagcgcttcttctacgatccgaagcaactcggacgctga

SEQ ID NO: 6508 - DNA, 591 bp, BradyrhizobiumColbertium
atggcgaaacaggcggagcggcgcgccgcaacaatcgaagcgatcctggcggcggcgcgccgcctgttcgggacgcaaggcttcgccgccacgacgatggatgagatcgcgggcgccgcgggcatcgccaagggcgcggtctatcatcacttcaagaccaaggaagcggtgttcgaagccgttttcgaccaggtctcacgcgatctcgtgattgagatcgacggcgccgcgcgggccgagaaggacgtgctcgccgcaatggttgccggcacccagcattactttgccgcgaccgcaaaggggccgaccggccggatcattttgcgcgacggcccggccgtgctcggttgggagcgctggcgcgagatcgacgccaagcatttcggcggcaagctgccgcgcgcactttccatcgccatggaatccggcctggtcgccaagcagccggtcgagccgctggcgcgactgctgctcggcgcggtcacggaagccgcggtcgcctgcgctggacgcgctgacatcgcaagggcaggcacggaatacgcccgtgcgttcaagtcgctggtcgaggcgctgcgcgtcaccgcatga

SEQ ID NO: 6509 - DNA, 1626 bp, BradyrhizobiumColbertium
atgaacgcaaattcctcgctcgcaccgtcagatcccgaattcgactacatcatcgtcggtgccggctccgccggctgcgtgctcgccaaccgactgtcggcgaacggcaagcacagcgtgttgctgctcgaggcgggcccgaaggattcgaacatctggattcacgtcccgctcggctacggcaagctcttcaaggagaagaccgtcaactggatgtaccagaccgagcccgagcccgagctgaagggccggcaggtcttccagccgcgcggcaagacgctgggcggatcgagctcgatcaacgggctgctctatgtccgcggccagcacgaggactacgaccgctggcgccagctcggcaataccggctggggctatgacgacgtgctgccctatttcaagaaagccgagaaccagtcgcgcggtgcggatcaatatcatggcacgggcggtcccctgccggtgtccaacatgatcgtgaccgatccgttgtcgaaagccttcatcgatgcagcggtcgagaccggtctgccctacaaccctgacttcaacggtgcgacgcaggaaggcgtcggtctgttccagaccacgacgcgcaatggacggcgtgcgtcgacggcggtcgcctatctcggacccgcgaagtcacgcagcaatctcaagatcgaaacctcggcacacgcccagcgtctgttgttcgaagggcgccgcgccgtcggcgtcgaatttcggcaaggcgcagcattgcgccgcgcccgcgcacgcaaggaagtcgtgctttccagcggggcctacaactcgccgcaattgcttcagctttccggcgtcggccccggcgacctcctgcgcaagcacggcatcgatgtggtgctggacgcgccgggcgttggtaacgacctgcaggatcacatgcaggttcgcatcgtgatgcgctgctcgcagaagatcaccctcaacgacacggtcaatcatccgcttcgccgcaccatggccggggcgcgctatgcactgtttcggaagggctggctgacgatcgcggccggcaccgccggcgcattcttcaagaccagctcacggctggcttcgcccgacatccaggtgcacttccttccgttctcgaccgacaagatgggcgagaagctgcacgatttctccggcttcacggcttcggtctgccagctccggcccgaaagtcgcggttccctccgcatcaagagtgccgaccccgccgtgcccccggagatccgcatcaactacatgtcgaccgagaccgatcgcaccacaaacgtcgagggcatcaagatcttgcgcaagatcctgaacgcgccggcgctgaaaccgttcgtggtcagcgagtacgaccccggcgagaaggtatccacagatgccgagatattggattattgtcgcgagcgcggcagcaccatctaccatccgacctcgacctgtcgtatgggcaatgacgcgctcgcggtggtcgatcagcggctgaaggtgagggggctcgacggtcttcgtgtcgtcgatggctcgatcatgccggacctcgtgtcggggaacaccaatgcgccgatcatcatgatcgccgagaaggcctccgacatgatattggaggatgcgggctga

SEQ ID NO: 6510 - DNA, 981 bp, BradyrhizobiumColbertium
ttgcctactcgatttcggatcggcacccgcaagagcgcgatggcgctggcacagacggaagaaatcgcacgccgcctgaccgccgcggtgcccggtctcgacgtcgagatcgtcaagttcgacaccacgggcgatctcgaccagaccagcaagctgttgtcgcatggcggcaagggcggggccttcgtggcgcagatccgcgcggccgtggtttcaggcgagctgcaggcagccatgcattcgctcaaggacatgccgggtaacgaggatacgccgggcctcgtcatcggcgccaccttgtcgcgcgatccgccgagcgacgcgctggtgctgcgcgagggcgtgacgctggaggcgctgcgccagtcccgcggcaagggcctcaagatcggcaccaacgcggtgcgccgggcggcctatgcgcggcggttgtttcccgaggtcgagatcatccacttccgcggcgccgccgatacgcgcgtgcgcaagctcgacaatggcgagaagcagcggctgccggacggcggcgcggtgggaccggcggatgcgctgatcatggcgcgttcgggcctcgatcgcgtcggtctggcgaaccgcatagcctacgaattcaccgcgacggagatgctgccggcggcagggcagggcatcgtcgcggtcgaatgcgcggcgcaggactggcagacgcgaaagatcctgtcagcgatcgacgatcccgccgcgcacgcctcggccgacgctgagcgcgaggtgctgtgggtgctgaacggccactgcaattcgccggtggccggcttctcgaccatctcaggtgatcacatgtcgctcaccgcgtccgtgctcgacctctccggcaacacgatcatcgaagtctcgcgtgccggccctgccaatcgtccgcgcgagctcggccgtgcggtgggattggacctgctggcgaagggggcggcggagattatcgagcgcagcaggcctcgctga

SEQ ID NO: 6511 - DNA, 1035 bp, BradyrhizobiumColbertium
gtgccccaatctgcgatcaagcccttcatcgacgtgctctccggccaccgacaagccgtcccgcccgtgtggatgatgcgccaggccgggcgctaccttccggaatatcgcgaggtgcgcgccaaggcaggcggcttcctcgatctctgcttcaacccggagctggcagccgaggtgacgctgcaaccgatccgcaggttcggcttcaatgcggcgatcatcttctccgacatcctggtgatcccccatgcgctcggccgctcggtgcggttcgaggtgggcgagggcccgcggctcgagccgctcgacgatcctgccaaggtcgccacgctggcctcgcgcgcggatttcagcaagctcgcgccggtcttcgaggcgctcaagatcgtgcgcggcgcgctcgatcccgacgtcgcgctgatcggtttctgcggcgcgccctggacggtggcgacctacatggtcgcgggccacggcaccccggaccaggcgccggcccggatgatggcctatcgccatcctgaagctttctcggcgatcatcgacgtgctggtcgacaactcgatcgaatatctgctggcgcagctcgcggccggagccgacgccttgcagatcttcgacacctgggccggcgtattgcctccagccgaattcgcgcgctggtcggtcgagccgacgcggcgcatcgtcgagggcgtacgcgcgaaggtaccggatgcgaagatcatcggcttcccgcgcggtgccgccgcgcagctaccagcctatgtcgaggcaacccgcgtcagcgccgtcagcatcgactggaccgcggagccgggcttcatccgcgatcatgtgcaaagcaaggtcgccgtgcagggcaatctcgatccgctggtgctgattgcaggcggtaccgcgctcgatcgcgccgtcgacgatgtgctggcaaatttcgcgcaagggcggctgatcttcaatcttggccacggcatccagccggagacgccgatcgcccatgtcgagcagatgatcaagcgcgtgcggggctga

SEQ ID NO: 6512 - DNA, 228 bp, BradyrhizobiumColbertium
atggaggagatcatggctgagacattcaatcccgcgccgcacgacaagctcgccgacgacccgcacgaggcgctcgccgctgatcggcaatccaagctcgacgccgggctgaaggatacgttcccggcttcggatcccgtcagcgccgcgcagccgacgccctcgaaggcagatgcagatgccgaccagccctcgctctgggacaaagttaaggcgatcttcagctag

SEQ ID NO: 6513 - DNA, 1926 bp, BradyrhizobiumColbertium
atgatcggagatctctgccgcatgaccgccgtcaccacacgacccggatggagccgcttggcgctgcgcgcggccgcgttcgtcgtgctcacctgcgccgccatcttgggcgtgagcggctggcgtgaatggagcgcccgcgacactgtgctcaggagcgccgagacggagttggcgaacgtcgcgcgttcactgacccagcatgccgaggatagcctcgatctcctggattccggcgtcgtcggcgcggtcagccggctggagatcgatggcactgggcccatcacgatcgcgaagctcggcactgtcctggaagcgcgcagaaaggcgattccgcgtgtccacagcctcgccgtcatcgatgatcagggcaactggctgacctcgcccggcacgatcggcgcgacgctcagcgacgatgcattcttccgtcagcatcagctttccccgaaacgagagccctatgtcggccgccccgtgaagagcctgctcgatggcgaatgggtggtcactctgtcgcgtcgcttcaacaagcaggacggcagcttcggcggcgtggtgctcgcgaccatcagctccagatatctctcgcagttctacgagcagttcgagatcggccgcaacagctcgattgcgctgacacatggcgacggcgtgatcatcgcgcgcgatcccagcaacgaaaaatttgtgggacgcagcgttgcagacaccgcgctgttccgcgacgccagcctgcagcggccaagcggcgcctatcatttcgaatcgccgctggatggcgctcagcgtgtcagctttttctggcgcagcagccgttatccagtcgtcctgctggccacgctggacaaggaggagctgctcgcgccttggcgagccgacgcaatctcccgcatgctctatgcgctcgctctggtgatgctgatcgcagtcatcggcggcgtgctggtgtggcagttgcatcggggccagcgcatggccgccgccctgggcgagaaggaagcgcacttccgcctgctcgccgaaggctccagcgacatggtgacacgcatcggcctcgatgagcggctgcgctatgtctcgccctcgtcggtgcgcgtcgtcgggtggcgccccgatcagctgatcggcaccccggctcttgcgggtatcaacccagacgatctgccggaggtccaggcgatcgtcggcgcgttgaagcgtgacgagagggaggaggcgcgtctcacctatcgcaacgcgcaccggcagaacggcgaagtgtggctcgaatcgaccatgcgcgtgacgcgaaagagcaacggcaacgtcgatggcgtggtcgcgatctcgcgcgacatcaccgaacagaaaaagctggagaccaagctggagacgctcgcgatcgaggatagcctcaccggcctggccaaccgccgccgcttcgacgagcggctgcaggaggagtgggcgcgcgcctatcgcgaccgctccagcctcgccttgctgatgatcgacgtcgaccacttcaaagcctacaacgacgaatacggccatcccgccggcgacgcctgcctgcgcctggtcgcaaggatcatcgcggccgagacgcagcgcgccggtgatctggctgcccgctatggcggcgaggaattcgccatgctgctgccgaacaccgatgccgccggctgcgccagggtcggcgagcggatccgaagcgccattcacggcgccggccttgttcacagcaccaatccggcggccggatgcgtcaccgcctccgtcggcggtgcggcgtgccggccggtgctggagcgcacggcgggcgtgggctcgctgcttgaagctgcagaccgggcgctctacgccgccaaggacgcgggccgcaaccgcctggtgatgtccgacgaggtcacgaccctgctgccgaaggtatcgggccaataa

SEQ ID NO: 6514 - DNA, 219 bp, BradyrhizobiumColbertium
gtgacgaatgagatcaagacgctgagcgagcgcatcgacgcgctggagacgcgcctcgcctaccaggacgacacgatcgagacgttgaaccagaccatcacggcgcaatggaagcagatcgatacgctgacgcggcaggtcgcgcagttcaacgagcggctccaggaggcggaggcaaatgcgcccgggcctgccaacgagcctcctccgcattactga

SEQ ID NO: 6515 - DNA, 798 bp, BradyrhizobiumColbertium
atgtctgaccccagttcgaccatcaaggtcgcggccttctaccagttcgccgccctcccggactaccgcgagctgcgggagccgctgcgcgccttctgcgccggcctcgggctgaaaggcagcgtgctgctggcgcaggaaggcatcaacggcacggtcgctgggctttcggaggcgatcgacacgctcgcacatgagctcgcacacggcagcctattcggaggccggctcgacaatctcgaattgaagttctcgaccgccgcggggatgccgttcggccggctcaaggtgcggctgaagaaggagatcgtcacgctgggcgacgagacggccgatccgacccgccaggtcggcacctatgtcgatgctgccgagtggaacactctgatcgcggcgcccgacacactgctgctcgacacccgcaacgcctttgaggtggcgatggggacgttcgagggcgcggtcgaccccggcatcaagagctttggcgagttcaaggacttcgccgcagccaggctcgatccggccaagcatcgcaggatcgctatgttctgcaccggcggcattcgctgcgagaaggcaagcgcacacctgctcgcgcgcggctttgccgaggtctaccacctcaagggcggcatcctgaagtatctggaagaggtgccggaggcgcagagccgctggcgcggcgaatgtttcgtgttcgacgagcgcgtggcgctcggccacggtttgcgagaacttggctcacgaggacgggacttgtgcgagcaagacatggggcccggccgtgacgaatga

SEQ ID NO: 6516 - DNA, 117 bp, BradyrhizobiumColbertium
ttgctctcttggccgtcggcgccggtggcgcgcctctcgaaaaaccgcatctacatgacacattccggcccggcggggcaatgctggcatgccacgaaaatggctgccatccgctga

SEQ ID NO: 6517 - DNA, 1587 bp, BradyrhizobiumColbertium
atgagaaacttccattttcccggcaggtccacggtccatgccaccaatgcgatggtggcgacctcgcacccgcaagcctcgcttgccgccatcgaggtgctgcgcgagggcggcaccgcggtggacgcggcggttgccggctcggccctgcttggcgtgatcgagccgcaatcgaccggcatcggcggcgattgttttgcgctggtccagccgcgcggcgagggcaagatcatcgcctataacggatccggccgcgcgccgaaggcggcgaatgccgactggtatctcgagcgcaagatcaattccgtgccgctcacctcggcgcatgccgtctcgatccccggcgtggtcgatgccttcgccaccgtcttgcgcgatcacggcaagttcggcttcgatcgcctgctccagcccgcgatcaaagcggcggaggagggctatgtcgtcgccccgcgcatcgccttcgactggaagaaccagttcgagaaactgaaggccggcaccaataccgtgcgttacctgctgccgggcggcaagccgccggtcgccggcgatgtcatccgccaggctgagctcggcaagaccctgcgggccatcgccaaggacggccgcgacgccttctacaagggcgccatcgcggaggacatggtcgagaccctgcgcggcatcggcggcctgcacacgctcgacgatttcgccgcgcatacgaccgagacgacgacgccgatcggcaccatgtacaagggctatgatgtctggcagtgcccgccgaacggaccgggcctcaccatgctgctgatgctcaacatcctgtcgcggttcgacctgaccaaatacgccccgctcagcgtcgagcgcttccatctcgaggccgaggctgcgcgcatcgcctacatgcatcgcgagttgcacgtcgccgatcccgagcacatgcagatcgaggtcgccaagattttggccaaggaattctgcgacgagcacatcgccaagatccggatggacggcatgctcgacctgccgaatgtcgcgccgccgatgaatccttcgaccatctacatcacggtcgtggacaaggatcgcaacgtctgctcgttcatcaactcgatcgcgcactccttcggctcggccatcgtctccaacaagaccggtgtcttgttccagaaccgcgccggcggcttccgcattcagcccggccatcccaactgcatcgccggcggcaagcgcccgctgcatacgatcatgccgagcctgctcacccagggcggccgctccgtgatgccgttcgcggtgatgggcgggcagtaccagccggtcggccagacccgcgtgatcaccaatatcctagattatggctgcgacgtgcaggaggcgatcgacatgccgcgcggcctgcactacgagggccagtatcaactcgaggacagcgtgccggcggcaatcgtcgatggtctgaagaagctcggccacaagaccaccagtgtggtcagcccgctcggcggcgcccaggcgatctggatcgattgggacaagggcacgctcaccggtggctccgatccgcgcaaggacggctgcgcgctcggctattga

SEQ ID NO: 6518 - DNA, 615 bp, BradyrhizobiumColbertium
atgcccgacaaaccaggttccagaacatcagcattcgatcggcgcgccttcctggccggtgctgccggaagtgcgttggtcccgatgaccgcgcgtgcggccgcgcaggaggcgaatgcgcccgccgcgcaggatccatcgctgcccgtcgaagtcacgctgcgggtgaacggcaaggacaatcgcctgagcatcgacgcgcgcaccacggtgctcgatgcattgcgtgaacatctcaagctcaccggcagcaagaagggctgcgaccacggccagtgtggcgcctgtaccgtgctgatcgacgatcggcgcgtcgtgtcgtgcctgacgctggcgcttgcggccgaagggcaggagatcacgacgatcgaggggcttgccaccgacgaccgcctgcatccgatgcagcaggccttcatcgacaacgacgccttccagtgcggctattgcacgccgggccagattatgtccgccgtcgcctgcgtcaaggaaggccatgccaacagcgaggccgagattcgcgaatacatgagcggcaacatctgccgctgcgccgcttatccgaacatcgtggccgccgtgaagcaggccgcgcccgagatcgtgaaaggctag

SEQ ID NO: 6519 - DNA, 978 bp, BradyrhizobiumColbertium
atggccgtgcaggcgctcggcgccgccgcggcggcgaacaatccggtgaccaaggcacttgtgcagccgctcgccggcggcacgacgctgatcgacctgatgaagctggacgtgatgcggccggccgcgatcgtcgacatcaatccgctcgcgcgcggctggtcagcgatcgagccgaagagcgacggcctgcgcctcggcgcgctggcgaagatgtcggatgttgccgcccacgccgagatcgagcgaaactatccggtgatcgcggattcgctgaagctcgccgccagcgcccagctgcgcaacatggcaacgctcggcggcaacgtgatgcagcgaacgcgctgcagctatttccgcgacgtctcctatgaaaattgcaacaagcgcagtcccggctccggctgtgccgcaatggacggcgtcaatcgcatgcatgccgtgctcggcgtctccgaccagtgcatcgcgacctatcctggcgattttgcccaggcgctgatcgctctcgatgccatggccgagatcaccggcaaggccgggacgcgcagcatgccgttcgcccagctgcacaaggcaccgggcagcacgcctgatatcgagaccacgcttcagcccggcgagctgatttcggccttctcgatccagggccggtggccgcggtcggtatatctaaaggcgcgcgaccggcaatcctacgagttcgcgctgtcctcggcggcggtcgcgctcgacgttcaggatggcgcgatcagggacgcgcgcgtcgcgctcggcggcgtggccacggtgccttggcgggcgcgcgaggcggaagcactgttgaaggggcaggagttcgatgaagcgctggcccggcgcgccgccgatgccgctttcgccgaggccaaggggcggcggcacaacagcttcaagatcgcgctcggcaagcgcgtggtggcacgtgcgcttcagcaggccgtaacgatggagatctga

SEQ ID NO: 6520 - DNA, 2292 bp, BradyrhizobiumColbertium
atgaccgctgcagctcccgggcccaaggcgaatatgggaagacccgtgccgcgctatgatgcggccgcaaaagtcacggggcgggcgacctatgcctccgacatgccgctggacaatccggcctacgccttcctggtcaccagcgccatcgccaagggccgcatcgaccgcttcgacctcgacgatgccaggcgagtccgcggagtgatcgagatcgttacgcatgagaatgcgccgaagctgaaggactcgaagttgttcagcaatggtggctatgccggtactacgatccagccgctgaaatcggccgaaattgcgcatgacggccagatcatcgctgtgatcgtcgccgaaaggtacgaggcggcgcgcgaggccgccaaccgcgtcaaggtcagctatacggtcagctcgccgagcgcgactttcgattcgcccggtgcaacgaccgcggccgcgaagggacagaacgcgcagttcaaggaggacccgaaggtcggcgatttcgccaaggcgttcgaggaggccgaggtcaagctgactgccgcctacgacacgccggcgcagcaccacaatccgatggagctttttacgaccagctgcgcctggatgggcgacaacctcgtgatctacgaaggaagtcagtatgtctatggcctgaagaacggcgtcgccgagcaactcggcatcgacgtcgacaaggtgcgggtggtcaatccctatgtcggcggcgggttcggctcgcggggctcgatgacgccgcgtacccccatcatcgccgccattgccaaacgtctgaaccgcccgatcaagcttgtcccgacccgcgaccagggttttacaatcacgacgtaccgcgccgagacgcgacacgagatcaggctcggcgcgagccgtgacggcaggctggtggccttgaggcatgcggggtccgaggtctcctcgcgcccggacgcctattgcgtcggtgggaccaaaacgacgacgcgactctatgcgtgcccgaatgtcgacagcctggtgtcgatcgtgcgtgccgatcgcaacacgcccggattcatgcgctcgcccccggaggtgccgtacctgttcgcgctcgagagcgccttggacgagctcgccgtgaagcttgacatggatcccatcgagcttcgccgcatcaacgatgccaccaacgagccgatcgatggcaagccttacacctcgcgatcgctcatggcgtgtttcgatgaagccgccaaggcgttcggctggtcgcagcgctcgccgcagccgaaatcgatgtccgacggcgactggctgattggctacggctgcgccgccacctgctatccgacgcagatggcgccatgtgccgcacgcgtgcgcttgcagcgcgacggccgtacccgcgtcgagatcgccggccacgagatcggcaccggggcctatacaattatagcccagacggcggccgagcggctcggcgtgccgctcgaaaaggtcgcggtcttcataggggacagcgacctgccgcctgcgccggtcgccggcggctccaactcgacggccagcacctgctcggcagtgatgatggtgtgcgatcagatccggcagcgtctgctcaaggcggtgatgccgagcgacagcctcgccgacaaggccaaggagaccgtcggcatcagtcctgcaccctcgactcaggctgcgaagagcgaccgccctctcgatatcgagaaggccttcgatgcgctcggcgtcggcatcgtcgaggagtatggcgagtggaagccggacggcgcgccgatggactcgttcacggccatgcaccgcggacagccgcggttcgtcggcggtcatcaaatgaaggacaagatcgcctacgccttcggcgctgagttcgtcgaggtccgcatcaaccgtttcacgcacgagatccgctgccctcgccttgtcggcgctttcgctgcgggccgcatcatgaatccgcgcacggcgcgcagccagctcatgggcggcctgatctggggcatgtcttcggcgctgctggaggccaccgagatcgacgaacgctatgcgcgctacgtcaacgacaatctcgccgattacctcgtgcctgtgaacgccgacgtccccggcgtcgaggtcatcatgctttccgagcaggacgaccacatcaacccggcgggcgcaaagggcctcggcgagctcggcaatgtcggcaccaatgcggcgatctgcaacgcgatctatcacgccaccggccagcgtatccgcaggctgccggtacggctggaaaatatcgaagtctag

SEQ ID NO: 6521 - DNA, 465 bp, BradyrhizobiumColbertium
atgcagcgttttcagcgcgtgctcctcgctatcatgtcggcactcgcgatcaccgtgatcgcaggcgtaaccgatttcgtttccaccccggcctcggcccagaccgcaggaaagatcatgaccacagcttcaggcttgcagatcatcgactcgaccgtcggcaccggtgcctcgccgcagcccggccagatctgcgtgatgcactataccggctggctctatgagaacgggcagaagggcaagaaattcgactcctccgtcgatcgcaaggagccgttcgaattcccgatcggcaagggccgcgtcattgccggttgggacgaaggcgttgcctcgatgaaggtcggcggcaagcgcacgctgatcattccgccgcagctcggctacggcgctcgcggcgccggcggcgtgatcccgccgaacgcgacgctgatgttcgacgtggaattgctcgcggtgaagtga

SEQ ID NO: 6522 - DNA, 246 bp, BradyrhizobiumColbertium
atgcgagcaaaatggaaggagagtttcatgggtagcacgaccgacaagatcaagggcaccgccaacgaagccattggcaacgccaagcagggcatcggcgaagccacgggctccgatcgcatgaaaggcgaaggcgtggtccaggaggccaagggcaagggccagcaggccatgggcgacgccaaggacgccgggaaggaagcgatggaccgcgccgctgcggccgccaagcgtgcgaccgagtag

SEQ ID NO: 6523 - DNA, 444 bp, BradyrhizobiumColbertium
gtgcgcgtcattcccggtaaccagctcgacaccaacgtgccgtcgacggcaggcatggaccgcgccgccgccatcaacttcgcacgcgtcggcgcgcagaaactgtgggctggcacggtcagcatcaagccggatgcgaagaccggcgcacatcatcacggccatctcgaaagcgtcatctatgtggtgaagggaaaggcgcggatgcgctggggcgagagcctgcagttcaccgccgaagccggccccggcgacttcatcttcgtcccgccctatgtgccgcaccaggagatcaacgccagcccggacgaggtgctggagtgcgttctggtgcgcagcgacggcgaggcggtggcgatcaacctcgacatcgagccggtcgagaaacccgagaccgtgctgtggatcgacccggtgcaccgggatcccaacgagaagaagtga

SEQ ID NO: 6524 - DNA, 429 bp, BradyrhizobiumColbertium
atgcccaagatgatcttcgtcaacctgccggtgaccgacctcaagcgcgcgaccgccttctacgaggcggtcggcgcggtcaagaatccgcaattttgcgacgagaccgcaagctgcatggtcttttccgagaccatctacgccatgctgctgacgcacgacaaatttcgccaattcacgccgaagccgatcgcggacgccaggacctcgaatcaggtgctgctctgcctgtctgctgacagccgcagcgatgtcgacgacatcattgtcaaggccgcggccgcgggcggagtagcagatccaagcccgaaggacgaatacagcttcatgtacggccgtagtttcgaggacccggacggccatatgtggggagtgaactggatgaatctcgcggccgcccccctgcagcccgacttggcgaacgtctga

SEQ ID NO: 6525 - DNA, 489 bp, BradyrhizobiumColbertium
atgtccaagctcgtgccctgcatgtggttcgacggcgatgccgaagaggccgcaaaattctacgtctcgctggtcccgaattcggagatcacgcacgttcagcacaacgtttcggacggcccctccggcaaggaaggctcggttctcgtcgtcgaattcacgatagccgggcagcccctggtggcgctcaatggcggcatgaaaatggagtacacccacgcgatctcgctgatgatccattgcgacgaccaggcccaggtcgacagcgtctggaacgcgttcctcgcccatggcgccaaggaagaacaatgcggctggctcagggatcgctggggcgtggcctggcaggtggtcccgacagtaatgttcgaattcctgtcgagcccggacaaggcagcggccgcgcgcgcaatgcaggccatgatgaagatggtgaagctcgacgtggacgtgctgcgtcgggccttcgagggcaagtcggcggcgtga

SEQ ID NO: 6526 - DNA, 1167 bp, BradyrhizobiumColbertium
gtgcggacgctgacgatggcaaagttgaacgtccggcgcctcatccttgccgttgcactgaccgcaactgcggcctttgcgcttgccacgctcgatgcccgcccggcggctgcgcaggaatcggagtgcgggtccgagtgcgaaccaaatcccactccgtccccaacctattctccgtcaccgtctccgtcacctactccgactccctccccgtcaccgagcccctatccggcgccttcaccgagcccgtatcctccgccgtcaggaccgaccggcgccgattcgagcggcaattcgatcggcgggcttgccaatcagcgtttcaaccagatgatcaccaaccgggtgcttggcacggtgctgctcggcgtcaacgagcagatcaattgcggcgactgcgtcagcgcgttcggctcggccggctcgttctcggccggcgtccacggccgcaaggcgctcaccaacaatctgtcactgctcgccggcatcgcctacacgcactacgatgggggcggctacaagatcaccagcgcaccgatcggcgctttcgcactgcgctacgacttcaccgattggggctcgtcgcgcccgttcttcgacgtcggcgcaatcctgacgccgtgggagaaggcacgttacacgcgcagctatgacaccagtctcggcccggtgagcgtaaccagttcgaccaatgcctccaattatgccgtctacggccgcgccggctggatcagccgcctgtcgccgcgcgacgaggtcgcagcctcgatcgaagtctggcagctctggcaacgcgtctccggctacagcgacagcgccgtggcattcaatccgttcgatgccagcatcgctgatggcaccgaccgcaccagcctcgtcaagatcggcgggcagtggacgcatctgttcggcagcaacatcgagaccaacatcaatggcgggtgggtgcagtcattcgccagccacagcggaatcgtcgcgaccgtgatcgggaacggcacggtggtgccgaccatgggcaaccagggctggttcgaatatggcggccgccttggcttccgcgtgcagaagggctggatcgtggatctcttcgccaacggcacgctcggtccacagccggtcggtaacaccattcatggcggcgtggggttgcggatcaattactag

SEQ ID NO: 6527 - DNA, 702 bp, BradyrhizobiumColbertium
atgaatttgcgtttttggcttttctccatcctgtcgtcggccgcattgtgcacagcgtctgctgcaccggcgcagacacgcgtcggccaggccgtcgtgattcagaacgaagtggtgcgcgtcgccgcaaccacgacgccgatcaacgtcggcgacagcatgctgcgcgatgagaccgtacgcaccggtgccgacagcgcggcacgtttcgtgatggccgacagcaccaacctgtcgctcgggccgagtgccacgctgaagctcgatcgtaccgtcttcaacgacgagcacagctatcgcgacgtcgcaatccgcatgaccaccggcgcattccgctttgtcactggcaactccgacaaggccgcctacaagatcaccacgccgctcgcgaccatcggcgtgcgcggcaccacgctcgacattctctcgcagcgcggacgctccgtggtcgtgcttcaggacggcgcagccagcgtctgtacgagaagcggccaatgcgtgcagctcacccagcccggcgagaccgcggtcatcacctcgaccggcggcaaggtcagcatcaccaaatccaacacgccgccctggacctttgccgccaactgcgccgcgagtgcggggctgtgcgcggtcaaccagtacgccgacgcctcgccgaccatcacgcccgccgtccaggacgacggcatgctgtgcggacgctga

SEQ ID NO: 6528 - DNA, 1263 bp, BradyrhizobiumColbertium
ttgtcgcggagcgcagtaatcgctgtcgcgattttcctgatcgcgcatctggcgctgctgatcggcctcaccacgccggagaagttcgtcttcgacgaggtgcattatgtgccggcggcgcggcagatgctggcgcctgtgatgtcgcagccgatgctcaacccgatgcatccgccgctagccaaggagctgatggcggcatccatcgcggccttcggcgacaacgcgctcggctggcgttatcccgcgacgttgttcggtgcactggcgatcgtcgcgatctatctgtgcggcctcgcgctgttctcggcacgagggcccgcgatcgcggccgcgctgatcgccggtctcaaccagatgctgtacgtgcaggcacgcatcgccatgctcgacatttttgcgctcggcttcggcctgctggcgaccgccgccttcatgcatggctttcgacgagagcggccgcagacgatgtttgccgcggcaggcgctctgttcggacttgctgcggcgtgcaaatggagcggcttgtttccgcttggcgtctgcatcgtcattgtcgcggtgatccgcctgatgcagggctggcgcacgctgttcgcggacgcgaggccggacgattggtatcggcccgagctgtggcgcggcttgaagctgcatcatctcgcgctctgcttcgcgatcctgccggcgctgacgtatcttgcagcgttcgttccgctcaatggattgtcgctgccggatttgttcgaggcgcagcggcgcatctttgtcgacaacacgacgaccgcgatcgccggccacacctatatgagttcatggccatcctggccgctgctcgcgcgcccggtctggttcctgttcgacaagaccgcagaggacaacgtcgctgccatcgtcttcctcggcaatccgctggtgctttggccggcgctgctcgcgctcatcatcgtgctgcgggatttcatcgtcgcgcgccgctgggacgcgttcctgatcgcagcattctatttcggcccctggcttgcctgggccttgctgccgcgcacgctgggcttcatctattactatctgccggccgcgacggcggcctccctcgccctcgtctacgtgctgcgccggcacggaatgccgcgctggctgctgtgggcctatgtcggcgtcgctgcggctggctttgcagtcatgctgccgatttccgcagccttcatcggcgcgtcgatgaagagcttcaaccggctgatgctgttccagagctggatatga

SEQ ID NO: 6529 - DNA, 642 bp, BradyrhizobiumColbertium
atgacccgttttgataagttctttggactgaaggcgatgactctgacagccgcgctgtcgatgacggcgagcctggccatggctggcgacaacaacgtctccaccgacaagatcctggatgccctgaagcccaaaccggcgacccgcggcctgtccgtgggcccgcagaccgatacgaccgtgcaggccaaggaggcaacattcctgaacaccgtgcgcaaccgaccgacccgatcgttgtcgatgggcgagcgggagcagatcgccgagctcgcggcgaccaagccgaagatcgatctggagatccagttcgactacaactcggctgacatcgccaagacctcgatggcctcggtgcaggcgctcggcaaggccctgtccgatccggcactcaagggctcgaccttcgtggtcgccggccacaccgacgccaccggcggcgaagagtacaatcagggcctctccgagaggcgcgccgacaccatcaagaagtacctggtgcagaactacggcctcaacggcaacgatctggtcaccgtcggttacggcgagaccaagctgaaggatgccgccaacggcgcagacgcggtcaaccgccgcgtccaggtcgtgaacatggagaccaagaccgcgtccaagtga

SEQ ID NO: 6530 - DNA, 252 bp, BradyrhizobiumColbertium
gtgttcgtgagctcgatgccgatctacgtcggggcggcgatgatcgcagtggcgatcctgctgtccacgctgatcacgggcctgacctcccgctatgtcgggctgggggcgcccaacgaggaaaatatgtggctggtcgatcgtctcaccggcgaggtctatcgctgccagtccgagggacgcggcaaggcctcctgtgagcctgatgttgcgaccggcagcgtcgaggagcgcccaaaagccgcacgctga

SEQ ID NO: 6531 - DNA, 246 bp, BradyrhizobiumColbertium
atgaagaccctattgctcgcgacggcattcgtggcactcgctctgactcccgcatcggctgccaagatggcgtgcaccagtgcaaacatggcaaagctcgttgccgggatgggtggcgaagacacgccgggcaaggtcgcagcgaggaagtcgatggcctcggccaattccgacatgagcaaacgcaacatgcgcggcgcctgcaagcactacatgaacgccgagaaggcgatggcgatgaagtag

SEQ ID NO: 6532 - DNA, 1161 bp, BradyrhizobiumColbertium
atgtcccgcacgcccaaaccgcttccgctcacaaccacacaggctcggcagatctggctgcatgcccagcgactggacgagcgaatcccttttggtgaaggcgcgcaggccgtcgcggacgcggtcgcgcatctcggctatgtgcagatcgacacgatcaacgtcatcgagcgctgccatcaccatatcctgttcagccggatcccggcctaccgacgcgccgatcttcgccaagcccagagcgtcgacaaaagcgtgttcgaatactggacccatgcgctgtcctacgtgccggcgagcgacttccgcttcttcctgccggcgatgcgcgagcaccggcgcgaggggcacaaatggttcgcttcggtgaagccggcggacacgcgcaaggtgatgcggctggtgcgcggcggtccgctgacgatccgcgacatcgacgacgatgtgctcgtcgagaaggagcatttgtggcagagccgcaagccctcgaagcgcgccttgcagcttgccttctataccggcgccgtcaccatcagcgagcgacagggcatgctcaagacctatgagctgatgacgcggcatttcggctgggacaagctgccgaagccggcatcggcaagggagacgaccgcctatctgctcgaccgcgcgctgcgctcgcagggcgtggtcagcctcgattcgatctgttatctcgacgcaccgagcaagaaaccggtcgcgcgcctgatcgcgtcgcgcgtccgccgcggcgagctcgtgcctgttacggtcgagggagccggcaagcaggagcattggggcccgcccgctgcgctggagccgcatgaggtgccgtccgatctcgtccacatcctctcgccgttcgatccgctgatcattcagcgcaagcgcaccaatttgatcttcggctacaatcatctgttcgaagcctatgtgccgaaggccaagcgcaagctcggctacttcgcgctgcccgtgctggtcggcgacgagatcgtagctgcgctcgacctcaagaccgaccggcagaacaagaagctgttgatgcagaaatggacgtgggtcggcgagggcaggaagacgggacggcgcaaggagctgaagcgtgtgatcgaggacgagctcgatcgtttcgagcgatttcaattggcagagtga

SEQ ID NO: 6533 - DNA, 429 bp, BradyrhizobiumColbertium
atgcgcgtagcgcagccggatagacctgtcgcgctgctccggagatcgctggtccgcgccatccttgcgctcgcagtgatcgtctgcgggctcagcttgcgctggtacggtttcccgctcggcctgcccgccttcatcgtgaagtacggcggctcgctgttgtgggcgacgatggtgttcttgctggtcggggtgttgctgccgcggctgacgggaagcggtcttgcggcgatcgcagccgccatcgccatcgccgtcgagttctcccggctggttcacacgccatggctcgatgcattcaggctcagcacggccggcgcgctgctgctcgggcgcatcttctcgctatggaatctggtggcctacgcgatcgggattctcttcggaatcttcatcgatcggctcgttgcgaagcgtcgggcgagctag

SEQ ID NO: 6534 - DNA, 1341 bp, BradyrhizobiumColbertium
atgagccaaaccacttacgccggttccgccggcggtgccaagaacgccaacaagagcgacatcgagacctcgaccatccgtgcgatctcctggcgcctgattccattcctggttctggcctacttcttctcctatcttgaccgcgtcaatcttggcttcgccgcgctgaccatgaatgcggatctgaagttcacgccactgatcttctcctggggcgccggcatcttcttcatcggctatttcatcttcgaggtgccgagcaacctggctcttgagaagttcggcgcgagccgctggatcgcccgcatcatggtgagctggggcatcatctccgctctgatggccatggtcagcggtgtcaccagcttctatgtcctgcgcttcctgctcggcgtcgccgaggccggcttcttccccggcatcattctctatctcacctattggtatccggccgaatatcgcgcccgcttcctcgcagctttcgccattgcggtgccggtctcgaccgtgatcggggcgccgatctcgggcctcttgctcgggcttgacggcatgatggggctgaagggctggcagtggctgttcatcatcgagggcatcccgtccgtgctgctcggcatcgtcacctggttctatctcaccgacaagccggagaaggcggactggctttcggccgagcagaaggcgtggctcaaggccaagctcgactcggaaatcgcggccaagcaggcggtgaagcatttctcgctcggtgaagcgctgtcttcgccgaaggtgatcgcgctcagcctgatctatttcggcttcgtcggcgcgctctatggcatgcagttctggctgccgcagatcgtcaaggcgttcggcctcaccaacgcgcagaccggcttcgtcacggcgattccctatctgttcggcaccatcgccatgatcttgtgggcgcggcattcggatgcgacgcgcgagcgcgtgatgcatgtcggcgcgcccttgctgctcaccgcggttgcgctcggcatctcttcatatctcgcgaatccgacgctcacgatggtggcgctgacggtggccgcgatcggcgtgttctgctgcttcggcgtgttctggaccctgccgaccgcctggctgtccggcacggccgcggccggcgggatcgccctgatcaactcgatcggcaatctcgccggcttcggcggaccgtacctgatcggctgggtcaaggaagccactggccagacctcgacgggcctgctggtgctcgcggtgctgcccctgatcgccggcctcctggtcttcgtcggcggccacgacagcaagcacgagttcgctggccacgggcggtag

SEQ ID NO: 6535 - DNA, 1107 bp, BradyrhizobiumColbertium
atgttcgtcaggtcggttttatcgagctattccaggctgttggcgggagtgtcgctcgccctgatggccgctgtgctgaccgggtgcaatgataccgtcgccgagaaggctgagccgccgcgtccggttctggtggcgaccgcgaattataatgccgaaacgccggagcgcagctttgtcggcaccatcaggccgcgcatcgagagcgatctcggcttccgcgtcgccggcaaggtcgccaaacgcctggtcgaggtcggccagaccgttgaagtcggccagccgctcgcgaccctcgatgaggtcgacctgaagctgcaggctgagcaggccgtcgccgagcagaccgccgccaccggcgttctggcccaggctgctgcagccgagcagcgtgccaaggatctgaaggccaagggttggaccaccgatgcgcagctggattcaagccgcgctgccgccgatgaagcccgtgcgcgcctcaatcgggccgagcgctcggtcgagttgaccaagaattccctttcctacgcgacgctcgctgccgacgcccgcggcgtcgtcaccgcaacgctgatcgagcccggccaggtggttgccgcgggccaggcttcgatccgtgtcgcccgctttgccgaaaaggaagcggtcgtcgcgatccctgagacgctggtcggacgcgccaagtcgggcgtcgccagcgtcactctttggtccgagccgaacaagaagtatgcggcgaagctgcgcgagatcgcgcctgccgccgatccggccacccgcacctatctggcgaagttctcgctgcccgaggcggacgacaaggtctcgctcggcatgacggcgaccttgacgctgtcggatgccgcgaccgagcgggtcgcgagactgccgctgtcggcgctgttcaacgaaggcggcaagccctccttctacgtcgtcgacgacaatgggaacgtctcgctgaagccggtcatggtgaagtcctatgaaagcaaggacgtcgtcatcaccggcggcgtggaagagggcgccaagatcgtcgcactcggcgttcagaagctcgatcccggtcagcgggtgcggatcgtgtcgtcgttgtctttctaa

SEQ ID NO: 6536 - DNA, 198 bp, BradyrhizobiumColbertium
ttgcaaaaacgacagccgctctgttcaaaccgtcatcgcgaggcagcgaagcaacccagggggctgggcaggttctggatcgcttcgccgcttcagccccagcatttgcgctcgggccgaaactcgccttgcaaggacggaacttactcttcacgtcattccgggcgccccgcagggcgggcccggaatgacgggtag

SEQ ID NO: 6537 - DNA, 3138 bp, BradyrhizobiumColbertium
atgaagcgcttcaacctttcggcctgggccgtgagccatcagacgctggttctctttctgatgatcgtgctcggtgccgccggcttcttctcctatcagaagctcggccgcgccgaggatccgttcttcacggtgaaggtggtcaacgtctccgtgatttggccgggcgcgaccgcgcaggagatgcagacccaggtcgccgatcccatcgagaagaagatccaggagctgccctatttcgagaaggtgcagacttattccaagcccgccttcaccgcgctccaggtcaccttccgcgacaacacgccgccgaaggacgtgccttatctcttttatctcctgcgcaagaagctggtcgacgtgcagggccagttgcctgcggggattctgggtcccgtcgtcaacgacgagttctccgacgtcgattccatcctgtacatgatgaccggggacggcgccgactatgcccagctcaaaaaggtgtcggaaggattccgtcagcgactgctgaaggtgccgggcgtgaccaaggtcgacgtctacggcaatcaggacgagcgcatcttcgtcgagttcagccatgccaagcttgccacgctcggcatcacgccgcaggcgctgttcgattcgctcgccaagcagaacaacgtgaccccggccggtacggtcgagacctcctcgcagcgcgtgccgctgcgcgtcaccggcgcgctcgacggcgccaaggccgtggccgagacgccggtcgagagcaacggccgcgtgttccgcctcggcgacatcgccaccgtcactcacggctacgtcgatccgcccagcttcgtcgtgcggcaggaaggcaagccggcgatcggcatcggcgtcgtcactgccaagggcgccaacatcctcgatctcggcaaggaggtcgagaaggcgacggccgacttcatgaaggccgtgccgcagggcatcgatgtcaagctgatcgccgaccagcccaaggtggtcgagcacgccgtcggcgagttcgtgcgctccttcatggaggcgctcgtcatcgtgctgttcgtctcgttcctggcgcttggttggcgcaccggcatcgtggttgcgctgtcggtgccgctcgtgctcggtatcgtcttcatcgtcatgaacgcgatgtcgctcgacctgcatcgcatcacgctcggcgcgctgatcatagcgctcggcctgctcgtcgacgacgccatcatcgcggtcgagatgatggtggtgaagatggagcagggctgggaccgcatgcgcgcggcgtcctttgcctgggaatcgactgcgtttccgatgctcacgggaacgctggtgacggccgctggcttcctccccatcggcttcgccaattcagcggtcggcgaatatgccggcagcatcttctggatcgtggcgatcgcgctggtcgcgtcctggttcgtggcggtgatcttcaccccctatatcggcgtcaagctgttgcccgacatgaaggcgcatcacaaccacgatccgcatgcggtctacgagacccgcatgtatcggggcctgcgcgccatcgtgcgatggtgcgtcaaccatcgcatcaccgtggtggtggcgaccgtcggcgtcttcgtggcctcgatcgtcggcttcggccaggtccagcagcagttcttcccgctgtcggagcgacccgagctgttcttccagctccgcctgcccgagggcaccgctttcaacgtcaccgagaaggcggtgaagaaggccgagacgctgctgaaggacgacaaggacatcgagacctacacgtcctatgtcggccagggctcgccgcgcttctggctcggcctcaatccgcaactgccgaacgaggccttcgccgagatcgtgatcgtcgccaagggcgtcgaggcacgcgagcgcatcaaggccaagatcgagaatgcggtcgccgatggcatgctgacagaggcgcgcgttcgcgtcgaccgcttcaatttcggcccgccggtgggcttccccgtgcagttccgtgtgatcggcccggatgccaacaaggtgcgcgaaatcgcctaccaggtccgcgacgtcatgcgccagaacaagagcgtcaaggacgtccagctcgactggaacgaacagtcgccctacctcaagctcgtcgtcgaccaggaccgcgcccgcgccatgggcctgactcctcaggacgtctcgcaggcgctggcgatgctgatctcgggttcgcaggtcacgaccgtgcgggacggcatcgagaaggtcggcgtggtggcccgtgcgatcccgtccgagcgcctcgacctcggcggcgtcggcgatctcaccatcacatcgcgcaacggggtggccgtgccgctgcagcagatcgccaggatcgagtatgcccacgaagagccgatcatgtggcggcgcaaccgcgacatggcgatcaccgtgcgctccgacgtcgtcgacggcgtgcaggcgcccgatgtcaccaaccagatcacgccgaagctgaagccgatcatggatcacctcgagccggcctaccggatcgagccgggcggcgcgttcgaggaatccgccaagggcaatgcctcgatcttcatcctcttcccggtgatggtcatggtgatgctgacgctgctgatgatccagctgcagagcttctcgcgcctgatcctggtgttcctgaccgcgccgctcggcatcgtcggcgcctcgcttggcctcaacgtcgccaacgcgccgttcggtttcgttgcgctgctcgggctgatcgcgctcgccggcatgatcatgcgcaacacggtcatcctggtcgaccagatcgagaccgacgtctcgcacggcctgacccggcgcgaggcgatcgtggaggccacggtccgccgcgcccgtccggtggtgttgacggcgctggccgccattctcgccatgatcccgctgactcgctcggccttctggggcccgatggcgatcaccatcatgggcggcctgttcgtcgcgaccttcctcacgctgttgtccctgccgggcctctatgcgctgtggttcaggaagagcctggacgaggctggttcagtcgaacagcctgccgcgtcgcagcatggcagcgatgaacatccggcaattccgcttgctgaagcggctgaataa

SEQ ID NO: 6538 - DNA, 600 bp, BradyrhizobiumColbertium
atgacactggttgcggaacatatcgaaggcgacacccgggaccgtattctcgaggtggccgagcggctgttccgccagatcggctaccagaagaccacggtcggcgatatcgccaaggagctccggatgagccccgccaacgtctatcgcttcttcgaatcgaagaaggcgatccatcaggcggtggcacgctcgctgatgggcgaggtcgagcttgaggcccagcggatcgtcgcaaagcccgggccggtcagggagcgctttcgcgagttgctcaccaccatccaccgcatgaacaccgagcgctatgtcggtgacaacaagctgcacgagatggtcgagatcgcgatgcaggaggattggcaggtctgcgtcaatcatatggagtgtatcgccggcgtcgtcggccaaatgatcgcgcaaggcgtcgcctccggcgagtttgaggcgcccgacctgcaactggctgcgctctgctcgtgcaccgcgatgatgcgcttcttccacccccagatgatcgcccagtgcgccaccaagcccggcccgaccatcgaccagatgatcgatttcgtcatcaccggtctgtcgccgcgccactga

SEQ ID NO: 6539 - DNA, 132 bp, BradyrhizobiumColbertium
gtggcgggcaaggacggatcaacaaaccccgtcattgcgagcgcagcgaagccaatccaggctgttcctaaggagggattctggattgcttcgctgcgctcgcaatgcgagtacggagaagcaagcgcgtga

SEQ ID NO: 6540 - DNA, 624 bp, BradyrhizobiumColbertium
gtgaccgataaagacctgtatttctacgagccctccaagggccacggcctgaagcacgatcccttcaacgccatcatcgcgccgcggccgatcggctggatctcctcccgcgacgccaagggccacgtcaatctggcgccctacagcttcttcaatgcgttctgctacgtgccgcccatcatcggcttctcctccaccaactggaaggacacggtctcgaatatggagcagaccagggagttcgtctggaatctcacgaccatggatctggccaagcacatgaacgcgaccgccgcgcatgtcgctcctgaggtcgacgagttcaagctcgcggggctcaccgcggtgcccggcaagctcgtcaacgtgccgcgcgtcggcgagagccccgtcgctttcgagtgcaaggtgtccgacatcgtccgcctcaagggcgccgacggtaagcaggccgacgcctggctgacgctcggcgaggtcgtcgccgtctacatcgacaaggcgctgatcaaggacggcgtctaccagaccgccgcggcccgccccatcgtccgcgccggccgccgcggcgactatttcgagatcaagccggaaaacatgttcgagatgatccggccggattag

SEQ ID NO: 6541 - DNA, 2268 bp, BradyrhizobiumColbertium
atgagcttccgccgcgacaccgtcacaaagccgattttttcctgggcgcgcggcgtgctgccgtcgatgtccgacaccgagcgcgaggcgctggaggcgggtgacgtctggtgggacgccgatctcttcaccggcaacccggattggtcgaagctgctgaaggtgccgcaggccgtgctgacggacgaggagcgggccttcctcaatggtcccgtcgacgagctctgcgccatgctcgacgagtggaagatcttctgggaatggcgcgacctgccgccggacgtctggcatttcgtcaagcgcgagaagttcttcggcatgatcattccgaaggagttcggcggcctcggcttctcgccttacgcgcattcggaagtggtgcgcaagatttcgacccgctcgatcgccgcggccgtcaccgtgatggtgccgaactcgctcggtcccggcgagctcctgatgcgcttcggcacgaaagagcagcagcagcgctggctgccgcgcctcgccgacggccgcgatatcccctgcttcggcctcaccagccccgaagccggctccgacgccgcctcgatggtcgacaccggcatcatctgcaagggtgagttcgagggccgcgaagtcgtgggcctcaggctcaactggcacaagcgctacatcacgctcggcccggtcgcgacgctgcttggtcttgccttcaaggcatatgatccggatcacctcgtggggagccaggacgaactcggcatcaccgtggcgctgatcccgaccaatctgccgggcgtcgagatcggccaacgccatctgccgtcgatgcaggtgttccagaacggcccgaattggggccgcgatgtcttcattccgctcgactacgtcatcggcggcaaggagcgcctcgggcagggctggaagatgctgatgacggcgctcgccgccggccgcggcgtctcgctgccgtcgctctctgccgcgggcgcagcctatgccgcgcggaccaccggcgcctacgcccgcatccgcgagcagttcgggatctccatctccaagttcgaaggcgtcgaggagccgctggcgcgcatcgttgcgaccgcgtaccagctcgatgcggcacggcggctgacctgcgcagcgctgaatgccggcattcatcccgccgtcatctcaggcatcatgaagctgcatgcgacggagcggatgcgcattgcgatcgatgacgccatggacatccatggcggcaaggccgtgatcgacggtccgcaaaactatctcggcaatctccatcgcgccgtgccggtcggcatcacggtcgaaggcgccaacatcctgacccgcaacctcatcgtgttcgggcagggagccattcgcgcgcatccttatctgctcgacgagatgaacgcgcttgccgataccgatcgcgagcgcggcctcggcgccttcgacaaggcgttctggaagcatgtcggccacagcttccagacgctgttccgggccttcggccgcagctggacctttggcgccttcgcaccggcgccggatgcgggcgacgccacgccattctaccgccagctctcgcgctactccgcagcctttgcgctctgcgccgacatggcgctgctgacgctcggcggcgcgctcaagcgcaaggagatgctgtcggcgcgcttcggcgacatcctctcagagctgtatctgctctcggcggcgctgaagcgctggcaggacgagggcaggcaaaaggaagattttgccgctctggaatggtgcatggcgacgggcttcaaaaccatcgagaaccggtttgccgaaatcctcgccaacctgcccaaccgcttcgtcgcagctgtcctcaagttcgtggtccagccgttcggtgcacgcgtgctcggcccctccgaccgggtcgtgcaccaatgcgcgagcctcgtgctcgagccgtccgcagcgcgcgagcgcctcacgccggatctggcttatgtcgacgacgacggcggctttgcccgtctcgagcgcgcgttcgagctggtcgcaagcaccgacgccgtcgccaggcgcatgcgcgccgcgcatgtccgcgactggaagcaagcggttgccaagggcgtgatcacgcaggccgaaggcgagcagctcgccgcggcccgcgaagccgtgaggggcgtgatcgaggtcgacgatttcgcgcctgaggcgctgtcgccgatttacaagaaaaccggcgacgtgcatcagttcttccaggaactcggagagcagagggcggcgagctga

SEQ ID NO: 6542 - DNA, 1284 bp, BradyrhizobiumColbertium
atggcacgaccggtattcatcgtcgacggcagcaggacgccgttcctgaaggcgcgctcggggcccgggccgttcacgccggtcgatctcgccgtgcagtgcggccggccgcttctggcgcgccagccgtttgcgcccgatagcttcgaccaggtcatcctcggctgcgtcaacgtggtcgcggacgagatgaaccccgcccgagtcgccgcgcttcgactcggcatgggcgaggacatggtcgccttcaccgtgcagatcaattgcggctccgggatgcagtcgatcgacaccgcctatcgctacatccgtgagggccatgccgatatgatcctcgccggcggcaccgaggcactgagccatgcgccgctggtctggcccaattcgggcgtgcgctggtttgcgggtctcgccaccgccagaggcatggccgccaagctcgcggctgcgttcaagttgcggccccgcgatctcaagccggtcatcggcctcgagcgcgggctgaccgatcccgtcaccgagctgaacatggggcagacggccgaggtcgttggtcatctcttcggcatcacgcggacgcagtccgatgcctatgccgccgagagccatcgccggctcgcgcatgcgcaaagcgccgggtttctcaagggcgaagtcgaaaccgcgttctcccgcgacggcaagttcttcgaccatgacgacggcgtgcggccggattcgacggtcgagtcactcgcaaagctccggccggtgttcgagcgtccctggggacaggtcaccgccggcaattcctcgcagatcaccgacggcgcctcgtgggtgatcctcgcctcggacgcggcggtcgcaaagcacaagctgacgccgaaggctgcgatcgtcgacagccactgggctgcgctcgatcccagcatcatggggctcggtccggtgatgtcggcgacgccgctgcttcagcgcaacgacctcaccatcaaggacgtcgagacctgggagctgaacgaggcttttgccacgcaggtgctcggctgtctcgccgcctggaacgacgacaaattctgccgcgagatcctcggtctcgacggcgcggccggccagatcgagcgtgagaggctgaatgtcgacggcggcgccatctcgctcggtcatcccgtcggcacctcgggcaaccgtatcgtgctgcatctcgtcaacgcaatgaaccggctcggcacgcgacgtggcgtcgccactgaatgcatcggcggcggtctcggcggcgcgatgctgatcgaggcggtgtga

SEQ ID NO: 6543 - DNA, 2097 bp, BradyrhizobiumColbertium
atggattccaagatcatgaccgcgctcggggatcgcgtgctggagctgggaccccagcctgctgcggaaagtccgtacaagcacttcaagctgacgcgcgatgccgacggcgtcgcctggctgctatttgatcgcgccgatgcaagcgccaacacgctctcctcagaggtgatggaggaattcgacgccgtgctcgccgcgatcgagaacgagcgtcccgcgggcctggtgatccgatcggcaaagccgtccgggttcatcgcgggcgcggacgtcaacgaattccgcggtgtgtccgaccccggtgtggtggagacgcgcatccgcgccgcgcacgccgtggtcgagcatctggaggccttgaggctaccgacggtcgcggtcatccacggcttctgcctcggcggcgggctcgaggttgcgctggcctgtcaggcgcgcatcgccatcgacggcgcgcggttcggcttcccggaagtgatgctcggcctgcatcccggtctcggcggcaccgcgcgctttacaacgctcgtcaattccacgcagtcgatgtctctgatgttgaccggccgcaccatcgatgcgcgacgggccaaatcgctcggcctcgtggatgccgtgacccaggagcgccacgtccgcggcgcggtgaaggatgcgctgttcggacgcctggagcgggcaaagccaggtctgttcacgcgcgccgccaatctcgggctggtccgcggcctgctcgccaagcgcatgcgggcggaggccgcgaaggctgcctcccgcgagcattaccccgccccttatgcgctgatcgatctctgggaggctcatggcggcagcaaggccgccatgctgaaggcggagcaggcgtccttcgccaagctgatggtgacgccgaccgcgcagaatttgatccgcgtcttcttcctccgtgagcaaatgaagagggccgccggcggcggcaatgccatcaagcatgtccatgtcatcggtgccggcgccatgggcggcgacatcgcagcctggtgtgcggggcaggggctgcgggtctccctcgccgacatgaaggcggagccgatcgcgggcgccgtgaagcgggccgccgagctctatggcaagatcatccgcaagcgcacggacgtgcgcgacgcgctcgatcgtctcatccccgacatggacggggagggcgtgcggaatgccgatctcatcatcgaggcggtgccggaaaggctggagctgaagcaaaaggtctatgccacgctcgagccccggatgaagcctgacgcgatcctcgccaccaacacgtccagcataccgttgcaggatctgcgtatgacgctggcgcggccggagcggctggtcggattgcacttcttcaatccggtgtcgcggctgcaactggtcgaagtcgtcagccatgacggcaacgatccgcaaattctgaagcaggcgctcgccttcgtcggtgcgatcgaccgactgccgctcgccgtgaagagctcgccgggcttcctcgtcaaccgcgcgctgacgccttacatgctggaagcgatggtgatgctggacgagaaggtcgaccagcggttgatcgacgccgcggccgagcagttcggcatgccgatggggccgatcgagctcgccgatcaggtcggtctcgacatctgcctcgacgtcggcgacatgctgcgcaccaagttcggcgatctcctcccgccgaccccggcctggctgcgcgagaaggtcgccaagggcgagcttggccgcaagaccggcaagggcttctacacctggaaggatggcaaggcggagaaggcgccgctcgcagagaccggtccgcgagtcacggaccagatgatcgatcgcctggtgctgccgatgtccaacgtctgcgtcgcagcgcttcgtgaaggcatcgtggacgatgccgacgcggtcgacggcgccatgatcttcggcactggctatgcgccgttccgcggcggcccgctgaactatgcgcgcacgcgcggcgcggaaaatgtcctgtctaccctgcgcgcgctggccgaacgattcggcgagcgcttcgcgcccgatcctggctgggacagcttcaagtga

SEQ ID NO: 6544 - DNA, 411 bp, BradyrhizobiumColbertium
atgagcgagcacgctacgaccgggccgagcggcgacctctgcatccgcacgctggcgatgccggccgacaccaacgccaacggcgatatcttcggcggctggctgttgagccagatggacgtcggaggcggcgtgttcgcctcgaaggccgcgcggtcgcgcaccgtgaccgtcgcgatcgaggcgatgaatttccgcaaggcggtctatgtcggcgatctcgtctcggtctatgccaatctcgtgcgtgtcgggcgcacttcgctgaccgtgcatctcgaggcatgggcgttgcgtcgcaaggagcttcatccgttcctcgtcaccgacggtaatttcacttacgtctccatcgacgatcacggccgcccgcaggcgatccagcgcaacgatccgccgatcgcgacgtaa

SEQ ID NO: 6545 - DNA, 192 bp, BradyrhizobiumColbertium
atgccggacagctacatcatcgaagtcaattcgcagaccgcaggtatcgtcgttcgctctcaagggggctactgcttcttcgcctcgtcccaccgcttcaaccgcctcgagggccagctcttccgcaacgcccgcgaggccgagcgggccgcgcgcaagttggtgaacggtgacgtgaaggaggcggcgtaa

SEQ ID NO: 6546 - DNA, 558 bp, BradyrhizobiumColbertium
atggcttcgatcgcgcaacgacgcatgcgcatccctgctcacgcgacactcgacaagtccgcgggcgactgcaacactccggccaagaccaaaaaggaggaaacgatgacgatcaacagacgtgatctggcgctctccactttcgccgtctctgcgcttgcgttcgccacgccagcacgcgctgcgtcggcggacgaggaagccgtggcaaggaaggtcgaggccttccgccttgcccagatcgcggcggacccgaaggcgctcggcgcgctctgcgcggacgagctgagctacagccattccagcggcaaggtcgaggacaaggcgaccttcatcactaacgcgaccgacggcaagtccaagttcctgtcgatcgaatacaaggacccgaccatcaaggtggtcggaccagccgcgatcgtgcgcttccactggctgggtgagcaggagatggcggccgatgggaaaaaagtgtcgaccaaccttcacatcctgatgaactggcagaagcagggcgacgagtggaagctgctgtcgcgcgccgcgacaaagctgtga

SEQ ID NO: 6547 - DNA, 687 bp, BradyrhizobiumColbertium
atgatcgaggccagccacgatgcgagggggagggcgctgctgttcgacatcgacggcacgctcgccgataccgatccattgcacttgaaggctttcaaccaggtgctcggtcctcatggccatgtcttcgatcacgcgcgcttctccagagagctgcagggcttcgccaatgtcgccatcggcgagcgtttcttgccgcatgaagcgccggaacggcgcgccctgatcctcgatgagaaggaagaggtcttccgaacgctggtggccgggcagattgcaccgctgccaggtctgatggcgctgctcgatcgtgccgacagcgccggcattcccatggtggccgtgaccaacgcgccgcgtctcaatgccgagctgctgctcgccggcctcggcatcacgcatcgcttcaaggccatcgtgatcggcgccgagctgccgcacggcaagccgcatccgctgccctatcaggaagggttgcgtttcgtcggcgcgaggccggaaacctcgatcgcattcgaggattcccgcaccggcgtgcagtccgctgcggcagccggcatcccgaccatcggcatccgcaccagcctcagccatgctgacctgattgcagcaggcgccgtcacgtccgccggcgccttcgacgatccggcgctgctcacgcgtcttgccgacgccatggcctggtga

SEQ ID NO: 6548 - DNA, 849 bp, BradyrhizobiumColbertium
gtgaccggactgacccatcgccaagccgaaatcctcaacattgcgcgcgcctccggccgcgtcatggtcgaggagctcgcgcgtcgcttcgaagtctcggcgcagaccatccgcaaggatctcaatgacctctgcgaacggaggtcgctgacccgcatccacggcggcgccatcatcgcctcgggcgtggaaaacctcgcctatgaggcgcgccgcttcgtcgccgccgacgagaagaaggcgatcggcgcggcggccgcttcgctgatcccgaacggctgctcgctgttcatcaacatcggcaccacgaccgaggaggtcgcgagcgcgctgacctcgcacgaggatctgctcgtcatcaccaacaatctcaacgtcgcgatgttgctttatcgccatccccgcatcgaggtggtggtcgcgggcggcacggtacggcgtgccgatggcgcggtggtcggctcgactgcgacgcagctgatcggccagttcaaggtcgactatgccatcatcggcgcgtccgccatcgacgaggagggcgcgctgctcgacttcgactatcgcgaggtgcaggtggcgcaggccatcatcgccaacgcccgcagcgtcatgctggtggccgattcgacgaaactccgccgcagcgcgccggtgcgcatcgcccacatcacccagatccagaccttcgtcaccgaccaggaactgcccgagcgtctcgccaccatctgccacagcaagggcatcgaagtggtggaggcgttgccgaaagggttgggcgagaatgatgagccccaggccgatgcgcaggacgccgcgcctgaggcagcgccggtggtgcggctgcgatag

SEQ ID NO: 6549 - DNA, 1551 bp, BradyrhizobiumColbertium
atgcgtcttttggagcgtattttcgatctcgccatcatcggaggcggtgttaacggctgcggcatcgcgcgcgacgcggtgggccggggcaacacggttttcctgtgcgaaatgaatgatctggcgagcgggacgtcgtcctggtcgaccaagctggtgcatggcggcctgcgctacctcgaatattacgagtttcggctggttcgcgaggcgctgatcgagcgcgaggttctctggggcatcgcgccccatatcatccgccccctgcgtttcgttttgccgcaccatgccggcctgcgtccggcctggctgctgcgcctcggcctcttcctctatgaccacatcggcggccgtcatttgctgccggccacgcgctcggtcgatcttcggcgcgacgaggtcggcaagccgctgatacccaatcgctacgcccgcgcgttcgaatattccgactgcttcgtcgatgacgcccggctcgtcgtgctcaacgcgcgcgatgccgccgacaagggcgccgagatccgcacgcgcacccgcgccaccgagatacgccagtccgacgggttgtggactgtcggcatggtcaacacgctgaccggtgagcgctcgcagatccaggcgcgcgcgctggtcaatgccggcggtccctgggttgaggacgtgctcggccgcggcgccggcgtcaacgccaaggcaaaagtccgcctggtgcagggctcacatatcgtcgtgagaaaactctacgaccacgaccgcgcctacatgttccagaacgccgacggccgcatcattttcgtcatcccgtatcaggacgacttcacgctgatcggcacgaccgaccgcgactatgacggcgatccggccaaggtgaaggcaacggccgaggagatccagtatctctgcgccgcggcgagcgaatatctcgccaagccggtgaggccggaggacgtggtctggacctattccggcgtgcgtccgctctatgacgacggtgccagcgaagccaaggccgccacgcgtgactacgtgttcgagctcgacacgcccggcggcgtaccgctgctgtcgatctatggcggcaagatcacgacctatcgcaggctcgccgaggaggcgctggagcggctcgcgccctatctccgcagcgcgaaagcgcgggagggctggaccggaaaatggccgttgcccggcggcgacatgaacgtgtccgatatcgacgggctgatcgccgagctccagcgcggctatccgttcctcggccacgagcatgcgcgacgtcttgcccgcgcctatggcacacgggcgatcaagctgctcggcgatgcgaaatcggccgccgatctcggcctggccttcggtgcgacactgaccgagcgcgaggtccgctacctcatggccaatgaatgggccgtcaccgccgaggacgtggtctggcgccggtccaagctcggcctgcgactatctgccgacgagattgcggcgcttgacgactgggtcaggacccacgccgtgcagcaaagtcccctgctggaagcaggaggacgctcatga

SEQ ID NO: 6550 - DNA, 1080 bp, BradyrhizobiumColbertium
atgacggtgacactcgatcacgtgacccggaccgtcgagggtgtcccgcatatccgcgacgtctcgctgacgctcgagagcggaaccctcaacgtgctgctcggcccgacattgtcgggcaagacctcgatcatgcggctgctcgcaggcctcgacaagccgaccacgggcaaggtggtggtcaacggcaaggacgtcaccggtgcggacgtgcgccagcgttcggtcgccatggtctatcagcagttcatcaactacccctcgctgacggtctacgagaacatcgcctcgcccctgcgcgtgcagcgcaagccgcgcgatgagatcgaggcgcgcgtcgccgaggcggccaagctgctgcggctcgaaccgttcctgaggcgcacgccgctccagctttccggcggccagcagcagcgcaccgcgatcgcgcgtgcgctggtcaagggcgccgacctcgtgctgctcgatgagccgctcgccaatctcgactacaagctgcgcgaagagctgcgcgccgaattgccgcgcatcttcgaggcctccggcgcgatcttcgtctatgccaccaccgagccgaccgaagcacttctgctcggcggcaacacggtctgcatgtgggagggccaggcgctgcagatcggcgagacgacaaacgtgtaccgccgtccacagaccttgcgcgtcgcgcaggtgttctccgatccgccgctcaacctcgtcggcatcgagaagaagaacgggcaggtcgcctatgcaggcggcacggcttcttcgccggcctcaggtctttacgcgggcctcgccgatggcgcctatcgcgtgggcttccgcgcccaccagctcgggctcgccaatggccagaccgaccgccacgccttccacgccacggtgacggtgaccgagatcaccggttcggagagcttcgtgcacttgacccgcgacggatcgaactgggtggcggtgctgcacggcgtgcacgagttcgagcccggccagacgctcgatgccgtgctcgatcccaatgatgtttttgtcttcgatgcggccgaccgtctggtcgccgctccaggctcgtaa

SEQ ID NO: 6551 - DNA, 1086 bp, BradyrhizobiumColbertium
atggcccgcattgacctcgtcgatctcgcgcactcctacggcggtaatgatgccgcgccggaaagctttgcgctcaagcccgttaccatgacctggcgccagggcggcgcctacgcgctgctcggcccgagcggctgcggcaagaccacgctgctcaacgtcatctccggcatcatcacgccatcgcgcgggaagatcctgttcgacggcgtggacatcacgccgctgtcaacccagaagcgcaacatcgcccaggtgttccagtttccggtgatctacgacaccatgacggtcggccagaacctggcgtttccgctgaagaaccgcggcgtgccgaaggccgagatcgacaagcgcgtcgccgagatcggccgcctgctcgacctcgaaccctacctccatcgcaaggcgacgcggctcacggccgatgccaagcagaagatctcgctcggccgcggcctggtccgctccgacgtcgccgccgtgctgttcgacgagccgctgactgtgatcgatcccgagctgaaatggcagctccgctccaagctgaaggcgctgcatcgcgagctcgacctcacgatgatctacgtcacgcacgaccagaccgaggcgctgaccttcgccgataccgtcgtggtcatgcatgacggccgcgtcgtgcagagcggcacgccggccgagctgttcgacaagccggctcacaccttcgtcggctacttcatcggctcgcccggcatgaacatcctgccggcgcaggtgaggggacgcgaggcgcgtatcggcggccacgtcatcgcgctcaaccgcgcctacgacaatctgcctgcgggcgccaaaatcgagatcggggtccgtcccgaattcgtcgaggccgtcgcgccggcgccgggcctgctcacggcgaagatcgagcgcatcgacgatctcggccgcatccgtttcgctcggacgcgtctgggcgacgccaaactggcggcgcgggcccctagcggcttcaccagcgcggacggcacggccgggctgaaactcgatccgtcgcacgttcacgtctatgccgacagccttctggtggagggagccgcctga

SEQ ID NO: 6552 - DNA, 903 bp, BradyrhizobiumColbertium
atggacaagaccgtcaaccaaaaggcctggttcctggtgctgccggtgttcctggtcgtcgccttctcggcggtgctgccgctgatgacggtggtgaactattcgatgcaagacaccttcgggaacaaccagttcttctggaacggcgtcggctggttcaaggagctgctcgatccctcgaccgatctcggcggccgcttcctggcttcgctcgggcgcaacctgttcttctcgcttgtgatcctcgcaatcgaggtgccgctcggcatcgtcgtcgcgctgtcgatgccgcgcgagggctggaccgtcgcggcctgcctcgtgatcctggcgctgccgctgctgattccgtggaacgtggtcggcacgatctggcagatcttcggccggccggacatcggcctgctgggctatgccctcaacgccattggtctcgactacaattacgtctccaacgacgtcgacgcctgggtcaccgtcatcgtgatggacgtctggcactggaccagcctcgttgcgctgctgtgttacgccggcctgaagtcgattcccgaagcctattaccaggccgcccagatcgatggcgcttcgcgctgggccgtgttcaaggcgatccagctgccgaaaatgaaccgcgtgctcctgatcgcggtgctgctgcgcttcatggacagcttcatgatctacaccgagccgttcgtcgtcaccggcggcgggccgggcaactccaccaccttcgtgtcgatcgagctggtcaagatcgcgctcggccagttcgacctcggcaaggccgcggcgctgtcgctggtctacaacctcatcatcctgatcgtctgctggatcttctacaccgtgatgaccaatgccggcgccgagcgcgccgtgaaggaaggagccgcgtga

SEQ ID NO: 6553 - DNA, 807 bp, BradyrhizobiumColbertium
atgcattcgatccccggccgccgcctcatcatggggctattcctggttttcctgctgctgccgatctactggctcgtcaacatgagcttcaagaccaacagcgagatcgtctcgacgatgacgctgtggccgcacaccccgacgctccagcactacaagcgcatcttcacggacgagagctggtattccggctacatcaactcgctgacatatgtggtcctcaacaccatcatctcgatctcggtggcgttgccggcggcttacgccttctcgcgctatcgcttcctcggcgacaagcacctgttcttctggctcctgtcgaaccgcatggcgccggcggcggtctacgcattgccgttcttcaacctctattcggcgatcggcctgttcgatacgccctgggccgtcgcgctcgcgcactgcatcttcaacgtcccgctggcggtgtggatcctggaaggcttcgtctccggcgtgccgcgcgaaatcgacgagaccgccttcctcgacggctattcctttccgcgcttcttcatcaagatcctggtgccgctgatcgcgagcgggatcggcgtcgccgccttcttctgcttcatgttctcctgggtcgagctcttgctcgcgcgcacgctgacctcggtgcatgcaaagccgatcgcagcgatcatgacgcgcaccgtgtcggcggccggcatggactggggcctgctcgcggccgccggcgtgctcaccatcatcccgggtgcgctggtgatctggttcgtccgcaactacatcgcgcgcggcttcgcgctcggtcgcgtctga

SEQ ID NO: 6554 - DNA, 330 bp, BradyrhizobiumColbertium
atggaatccatcgcatggatggcctggacgctgccgaccgcgatcttcttcgccgcgctcgcctgcacgctcgccgtgatgacctggctcgcagcggtctatcccgaggccgagcgggtcggcgtgctgcgcatcccgaccacgcgcggcgatcgcctgttcatctcgctgatcgcggccgccgtcatccacctggtgtggatcggcctcgtcggcaccgaccccatcgccacgctcccgatcggcgaggagggcttggaaatctcgagcctgtggctcgcaagtggaatttcgctgctgacggccgtgctcattttccgcacggtctga

SEQ ID NO: 6555 - DNA, 1767 bp, BradyrhizobiumColbertium
ttgaccaagagcagttttctgaccatgtcgagcgctgccgcgattgttgcggtttcgttcgccctctcggctccggtgcgcgccgccgacgaggccacgatccagaagtggatcgcggaattccagccctcgactctgtcgaaggaagaccagaagaaggagctggagtggttcgccaaggccgccgagcccttcaaggggatggagatcaacgtcgtctcggagaccatcaccacccacgaatacgaggcgcagaccctcgccaaggcgttctcggagctgaccggcatcaagctcaagcatgacctcatccaggaaggtgacgtcgtcgagaagctgcagacgcagatgcagtcgggcaagaacgtctatgacggttggatcaacgattccgacctgatcggcacccacttccgctacggccagaccatcgcgctgtcggattacatgaccggcgagggcaaggacgtcaccaatccgatgctcgacgtcaacgacttcatcggcaagtcgttcggcacgggtccggacggcaagctctatcagctgccggaccagcagttcgccaacctatactggttccgctacgactggttcaccaacccagactacaaggccaagttcaaggccaagtatggctacgagctcggcgtgcccgtgaactggtccgcctatgaagatatcgccgagttcttcaccaacgacatcaaggagatcaacggcgtcaaggtctacggccatatggactatggcaagaaggacccctcgctgggctggcgtttcaccgacgcatggctgtcgatggccggcaacggcgacaagggtatcccgaacggcctgccggtcgacgaatggggcatccgcatggaaggctgtcgtccggtcggctcctccgtcgagcgcggcggcgacaccaacgggccggcggcggtctactcgatcaccaaatacctcgattggatgaaaaagtacgcgcctccgcaggcccagggcatgaccttctccgagtccggtccggtgccggcgcagggcaacatcgcccagcagatgttctggtacaccgccttcaccgccgacatggtgaagccgggcatcgccgtgatgaacgccgacggtacgccgaaatggcgtatggctccctcgccgcacggcgcttactggaaggaaggcatgaaactcggctaccaggacgcgggctcgctcacgctcctgaagtccactccgccggatcgccgcaaggcggcatggctgtatctccagttcatcgtctccaagtcggtgtcgctgaagaagagccatgtcggtctcaccttcgtccgtgaatccgacatctgggacaagtcgttcaccgaacgtgcgccgaagctcggcggcctggtcgagttctaccgctcgcctgcccgcgtgcagtggaccccgaccggcaacaacgtgccggactatccaaagctcgcccagctctggtggcagaacatcggcgatgcgtcgtccggtgcgaagacgccgcagcaggcgatggatgcgctggccgctgcccaggactccgtgatggagcgtctggagaagtccggcgtgcagggcgcctgcggtccgaagctgcacaagaaggagaagcccgagtactggttcgcgaaggccgagaaggacggcaccatcgcgccccagcgcaagctcgccaacgagaagccgaagggcgagacggtcgattacgacacgctgatcaagtcgtggccggcgcagcctccgaagcgcgccgaagcgaagtga

SEQ ID NO: 6556 - DNA, 1101 bp, BradyrhizobiumColbertium
atgagccgcccgaccaaattgttcgaaacctacaagctcggcccgatcacgctggccaatcgcctggtgatggcgccgctgacgcgcaaccgcgccgtaccaggcaccttcgtgcccggcccgctcgcggccgattattatggccagcgcgcctccgcgggtctcctgatcacagaagcaagccaggtctcgcagcagggccagggctaccaggacacgcccggcatctacagcaaggaccaggtcgccggctggcgcaaggtcaccgacaaggtgcatggacgcggcggcaagatcttcatccagctctggcatgtcggccgcatctcgcatgtcgatctccaagccaatggagcagccccggttgcaccgagcgcaatccgcgccaagggcaagacgtttgtgaacggcggctttgccgatgtctccgaaccacgcgcgctcgagctttccgagattccagggatcatcgacgacttcaagcgcgccacgaagaacgcgctggaggccggcttcgacggcgtcgagatccacggcgccaacggctatctgctcgaccagttcgccaaggacggcgccaacaagcgcacggatgcctatggcggctcgatcgagaaccgcgcgcgtctgatgctcgaagtgtccaaggccgtcgccgccgaggccggcgccgaccgcaccggcatccgcatctcgcccgtgacgccggccaacgacatttccgacagcaacccgcagccgctgttcgagcacattgtcgacggcctcagcgcgctgaagctggtctatctccacgtcgtcgaaggcgccaccggcggcccgcgcgacttcgcgccgttcgattatgcatccttgcgcaagcgcttctcgggcgcctacgtcgccaacaacggctatgatttcgatctcgccaccaagatcctggacgctaacgcggccgacctcatcgccttcggcaagccgttcatctccaaccccgatctcgtcgagcggctgaagcagggcgcgcctctgaacgaatgggacaagaccacgttctacggcggcggcgccaagggttataccgactatccgacgctggcggccgaaccggcggagtga

SEQ ID NO: 6557 - DNA, 504 bp, BradyrhizobiumColbertium
atgtccttctacgacgccgtcgtccccgcgtacttgcaaatgctgaacagcgtgaccgggctgctcaccaaagccgaggcgcattgcgcggccaagaagatcgaccccggcgtcttgctcggtgcacgcctcttcccggacatgctgccgctgtcgagacaggtccagctcgtcagcgatttcgccgccaagggctgcgcccggctcacgcacagcgaggtgccctcgaccctcgataccgagacgaccttcgcggagctgaagcaacgcctggccaagaccatcgactatgtgaagtcgttcaagcccgagcagttcgaaggggctgaagccagagacgtcaccttcccgtccggccccaacaagaccaccaccatgaagggccagcaattcctgagttcgttctcgctgccgaacttctatttccacgccgcgactgcccacggcattttgcgccataacggcgtcgagatcggcaagcgcgatttcatgggcgcgaactga

SEQ ID NO: 6558 - DNA, 1299 bp, BradyrhizobiumColbertium
atgctcctgacccgatttgcgatcgcggccaccgctcttttcgccctctccgctcccgcctccgcccagctcgctccgcctgccaagactgccgcgcccagacccaccgcggccctgccccgtgccgcctcatgccacaacggggcgagcttcgaccgcttcctggccgacgtgaagcaacaggccgtggccgccggcgtgtcgcagcggacaatcgcggaggcttcgccgtatctcgtctacgaccagggcatcgtcaatcgcgaccgcggccaacgcgtgttcggccagctcttcaccgaatttgccggccgcatggccgcgccctaccgcatgcagaacgggcagcagcacatcaagcaatacgccgccgcgttcgcgcgcgccgagaaggaatatggcgtgccgccggcggtgatcgcagccttctggggcctggagagcgatttcggcgccaacatgggcaatctgccgacgctgaaatcgctggtatcgctcgcctatgattgccgccgttcggagatgttcgtgggcgagaccatcgccgcgctgaagatcatcgaccgcggcgatctgcatcccgacgagatgatcggctcctgggccggcgagctcgggcagacgcagttcctgcccgtgcactacgtgaactacgctgtcgactatgacggcgacgggcggcgcgacctgttgcggtcgccagccgatgtgatcggatccaccgcgaactacattgccaatggcttgaagtggcgccgcggcgaaccctggctggaagagataagggggccgccgaccctgccgtgggagaagaccgatctgacagtgcgcgagccgcgctcgacatgggcgcagctgggcgtcacctatcccgacgggcggcccctgccgaacgacaatctcgcggcctccgtgctgctgccgatgggacgaaatggtcccgccttcctggcctatgcgaatttcgcggcctataccgagtggaacaactcgctgatctactcgaccacggcgggctatctcgcctcgcgcattgccggtgccgcgccgatgcgcaagccggcgcagccggtggcgcagctgccgttcagcgagatcaaggaattgcagcagctcctggtgcgcgccggacacaatgtcggcaaggtcgacggcattctaggtcagcagagccgcacggcggtgaaggcgatgcagatcaagttcggcctgcccgccgattcctggccgaccgccgagttgctcgcccgcatgcgcggcagcacggcgcaggcgcagccggcggcgactatccgctga

SEQ ID NO: 6559 - DNA, 948 bp, BradyrhizobiumColbertium
atgaactattttcgtaccgcaatgctgctcgcaggccttaccgccctgttcatgggcgtcggctacctgatcggcggcgcctccggcgccatgatcgcgctcgtcgttgccgccgcgaccaatctcttcacctactggaactccgaccgcatggtgctgtcgatgtacggcgcccatgaggtcgaccgttcgaccgcaccggagctggtcgggctcgtcgcggagcttgcgggccgcgccggcttgccgatgccgcgcgtgttcgtgatggacgaggtccagcccaacgcgttcgcgaccggccgtaaccccgagaacgccgcagtcgccgtcaccaccggcctgatgaaccagctgagccgcgaggagcttgccggggtgatcgcgcacgagctcgcccacatcaagaaccacgacacgctgctgatgacgatcaccgcgaccatcgcgggcgcgatctccatgctcgcgcagttcgggatgttcttcggcggcaaccgcgagaacaacaatggtctcggcatcgtcggctcgatcctgatgatgatcctcgctccgctcggcgccatgctggtgcagatggcgatcagccgcacccgcgaatatgccgcggataatctcggtgcgcgcatcgtgggacagccgatgtggctggcttccgcgctggtgaggatcgagggcgcggcacatcaggtgccgaactacgaggcggagcgaaatccagcgaccgcgcacatgttcatcatcaatccgctgtcgggccatggtgtggacaaccttttcgccacccatccttcgacgcagaaccgtgttgccgccctccagcaactcgcggccgagctcggcgcgcgggcgatgccatcggtcggcgccaacgagaactatccgccgcgcagcccttggggccgctcctcctcgcgcggtccttcgcgaggtccttggggctga

SEQ ID NO: 6560 - DNA, 699 bp, BradyrhizobiumColbertium
gtgaccaattcttcgaaaggggatgcgcggccggacctctgccggtcgccgtcgaagatgacccgagctgccgtactatttctgatcgttctttgcgtgctcgccggcctgtccacgcacatggtcgtcaattgcggcgacgaggacgatcccgacatctgctcggccgtgatcggtttctcgccgctccgcggctcgctgattgccttcgcctatgaggggcgtggacggatcgcgctgcgccacggcgacttcaagcgtgcgattgccgatttcgacgaagcgatccatctcaatccgaaccgcggctcgctctatcgcgaccgggcgctggcgcgccgtctgaacggcgatctggagcttgcgattgcagactacgacgaggcgatcgcgcacgatcccaagcgcgccgcaccctatcaccagcgcggtctcgcgctcgccgccatgggcgacctcgaccgcgccatcctgagctacagcaccgctgtccgcctcgatccttccgatgcgcaggcccgtctcgaccggggccttgcgttcctcgcccgcggccaggccgatgatgcccgcgccgacttcgaagccgcgctggcgctgcccgcgggcaaagagagcggcatgcgcgatcttgcgcgcgccaagctcgccgagctggccagcgccgagccgacgcaggttgccacgccacgacggtga

SEQ ID NO: 6561 - DNA, 354 bp, BradyrhizobiumColbertium
atggcggacgccgacctggatgtcgtgatccggcaactggccagacagctgcatacgggcctgatgacccgcgccaaggagcggcgggatcgcttgaacggccttgcggccaaggccaagggcaaggagaccggcgaacgcttcaagatgatggccaaggccacgatggagcaggccaccaccgccgccaagcgcctccagatgtccgccgacaacgtcgccgacagctacgcgcggtcgatgcgcctggctgccagcgcgccggttgcggtaaaggcagagaagaaggccaaggaagacaagccggcgaagaaggctgccaaggcgaaggcgaaagccaagaaggcgaagtag

SEQ ID NO: 6562 - DNA, 801 bp, BradyrhizobiumColbertium
atgcgcattgcgttgctgctgaccgcaaccatcgtcggcgcgttcttcgccggtccgtctcatgccgggtcgctggatgctgacgcagtgcagacgttgccgcccggcttccagagctaccgcggctacatgttcgacctgtcggagaactccgaccgcaaggatgtcgacaagctcaccgacaatctgaagcagcagatcgacgtcgtggaatccgccggcctgtcgccgcgcgtcctgcgcttcttccgcaccgtgcccatcatcgcgagcgagctcgcctgcctcgacgaaggtgccgcgacggcctgctacggccgcgtcgctcccaacgtcgagcgccgcgtgccgcggacgctaacggtgtgggaccacgacaagcagcgctggaccaatccgaacgccgtcgacctcgctgtggattcgggccttggcgtgatcatgctgcggccggacatgatgcgttacgagaaggaggccgtgctgctgcacgagctcctccacgcctatcacgcacgcctcctgccggacggctacgccaacaagggcgtgatagcctattacgcgctggccaagtccaaggacatgctgcccaaggaatcctatgcgctgaagaatcccatggagttcttcgccgtgaccgcgagcatcttcctggccggaaagagcgaattccacgatccgaaatcgcgcgaggcgctcaaggagaagatgccggactactacaaatacctggtcggcgtattcggcttcgacccggccccggcagcgtcgaacggaccggtggcctcgctgaaatga

SEQ ID NO: 6563 - DNA, 234 bp, BradyrhizobiumColbertium
atgaagatcatcacaacctttgcctgctccgccttgatcgccgtcgtggcgcttgccggctccgcgcagctcaaaccggcgaccgccggcagtttcgactggctcggcaatgaaaactacgtgcgttgcctgaaatatgtcagcgcgctcgccaaaagcgcagccggccttgaccggggacgacgggcctgcaatcgcgcgcattatcccggtcgtccaggctacgactattga

SEQ ID NO: 6564 - DNA, 1446 bp, BradyrhizobiumColbertium
atgcccgccgcttccggcaagaagctcttcgtcggcccgcgcttccgacgcatccggcagcaattggggctgtcccagacccagatcgccgagggactcgggatctcgcccagctatgtcaacctgatcgagcgcaaccagcgccccgtgaccgcgcaaattctgctgcggctggccgagagctacgacctcgatctgcgcgacctcgccaccgccgacgaggatcggttcttcgccgagctcaacgagatcttctcggatcccctgttccgccagatcgacgttcccaagcaggagctgcgcgacctcgccgagctctgccccggggtcacccatgcgctgcaacggctctatgcggcctataccgaggcgcgccagggcgagacgctggcggcggcgcagatggccgaccgcgacgtcggcacgcgctacgaggccaatccggtcgagcgtgtgcgcgagctgatcgaggccaaccgcaactactttccggagctggagcaggccgcggagaacctacgcgatgaactgaacgtgccggcggaggggctctacgcggcgctggccgcgcgcctgcgcgagaaacattcgatccagacccgcatcatgcccgtggacgtgatgcgcgaaacgctgcggcgtttcgaccgccaccgccgccagcttctgatctcggagctggtcgacccgcccggccgcgcgttccagctcgccttccagctggggttaggcgaatgcgcgcaagccctggagaccatcatcggccgcgcgggtccactcgacgatgcgccgcgtcgcctgttccgcatcacgctcggcaactactttgcggcggcggtgatgatgccctatcccgcctttctcgccgctgccgaagcgctcaattacgacatccacgtgctggcgcagcgcttcaattccggcttcgagcaggtctgccaccgcctcaccacgctgcagcggccgaacgcgcgcggcattccgttcttcctgttgcgcgtcgacaatgcgggcaacgtctccaagcgcttctcctccggcaccttcccgttctcgaaattcggcggcacctgtccgctctggaacgtgcactcgaccttcgacaccccggaccgcctgctcaagcaggtgatcgagctccccgacggcacgcgctacttctcgatcgcgcagatggtgcgccgtcccgttgcgccgcacccgctgccgcagccccggttcgccatcggcctcggctgcgagatccgccacgccgcacgcctgacctatgccaccggcatggacctggagaaggccgagggcacgccgatcggcgtcaactgccgcctctgcgagcgcgaaaactgcgcccagcgcgccgaaccgccgatcacgcgcacgctgatcctggacgagacgacgcggcgggtctcgagcttcgccttttcgaacgcacgagagctgtga

SEQ ID NO: 6565 - DNA, 126 bp, BradyrhizobiumColbertium
gtgcctgatcctttcgctgacgatggcatggccatcgacattcttgacagtgcattgcgatatgcgtgtcagaagctaaacgcgaaaacggaaacttcgtatagatggcttgtttcttattggtga

SEQ ID NO: 6566 - DNA, 1632 bp, BradyrhizobiumColbertium
atgaactaccagccccgcggcatcagcaccctccagggcccgtcttcgtacctggacgaggtcaaggcggctcaggcgctcatcgagacccagccgacctggaacggggtgacggccgaggccgtcgcccgcatgcgcctgcagaaccgattcaagaccggcctcgacgtcgcccgctacaccgcggcggtgatgcgcgccgacatggccgcctatgacaacgaccccaccaagtacacgcagtcgcttggctgctggcacggcttcatcgcccagcagaagctgatctcggtcaagaagcacttcggcaagaccgaccgcacctacctctatctctccggctggatgatcgcggcgctgcgctccgagttcggtccgctgcccgaccagtcgatgcacgagaagacctcggtgccggcgctgatccaggagctctacaccttcctgcggcaggccgatgcgcgcgagctgaacgacatcttccgcctgctcgacaaggcgcgcaaggaaggcgacaagacgcgtgagaaggagctgatcgagaagatcgacaacttccagacccatgtcgtgcccgtcatcgccgacatcgacgcgggcttcggcaatgccgaggcgacctatctgcttgccaagaagatgatcgaagcaggcgcctgcgcgctgcagatcgagaaccaggtctcggacgagaagcagtgcggtcaccaggacggcaaggtcaccgtgccgcatgacgtcttcctcgcgaagatccgcgcctgccgccacgccttcctcgagctcggcgtcgaagacggcgtcgtcgtgacccgcaccgactcgctcggcgccggcctgacgcagcagatcgccgtcagccacaagcccggcgacatcggcgaccagtacaacagcttcctggattgcgaggaagtcacgccggagaacgcccgcaacggcgacgtcatcatcaaccgcaacggcaagatgatgcgtccgaagcggctgccctccaacctctaccagttccgtcccggcaccggtgcggaccgctgcgtgctcgattgcatcacctcgctccagaacggcgccgacctgctctggatcgagaccgagaagccgcatatcgagcagatcgccagcatggtcgaccgcatccgcaaggtggttccgaacgccaagctcgcctacaacaactcgccgtcgttcaactggacgctcaacttccgttggcaggtctacgacgcctggaaggaggcgggcaaggatgtcagcaagtacaaccgtgccgatctgatgaaggcggaatatgacgagacgccgctggcgcaggaggccgacgagcgcatccgcactttccaggcggattcggccaagcgtgccggcatcttccaccacctgatcacgttgccgacctaccacacggcggcgctgtcgacggacaacctggcacgcgagtatttcggcgagcagggcatgctcggctatgtcaagaacgtccagcgcgccgagatccgtcagggcatcgcctgcgtgaagcatcagaacatggccggctccgacatcggcgacgaccacaaggagtacttcgcgggcgaagcggccctcaaggcgggcggcgtccacaacacgatgaaccagttcggctaa

SEQ ID NO: 6567 - DNA, 213 bp, BradyrhizobiumColbertium
atgaccaaaggcagcaatttctgggtgatcggcggcgagttcggttcgatgaacttccacaagctcgtggaaggctcggcccaggtcaaaggtccgttcaagacccgcaaggaagccgaggactgctggcgcgaggtgtcggaagagagccgccacaaggccggcgtccgcttctcgatcgtggaagagccgcagcgcgccccggcagcctga

SEQ ID NO: 6568 - DNA, 552 bp, BradyrhizobiumColbertium
atgtcagagcccgagaccagcgggattcccggccagccgcgcccggtgcggctgcgtgatgcgctgctgcgcgcgcggatcgaggctgctgaccggaccggcgtcgttgtcgatctcagggatgccgaggtggcgcggctcgagatcctcaacgatgcgctcgatcccctgttcgcgcaggtgcctgatcagatcgacctgttcgaccgcgggatcagccagggcgatacgccgagactctggatcgacgtcgtcgcccacatcgtgatggggcgcgacaagcggatgtaccgcttcgtccaggacactcgcttcggccgcatcgtgctcgccgaatcgcacgacaccgccgtgatcgtcgaggccgtcacggactacgtcgcgcgccgcatggtcgagcgcgaacgtgcgatggtggtcacgcccgcaccgcaagcaccggtcgccgagccgccgcgccgctcgcgcttctggccgttcgtgttcgggtttgtgctcggtgcggccgcgctgttcggcgtcgctctgcttgcggtcttgcggaactggtga

SEQ ID NO: 6569 - DNA, 885 bp, BradyrhizobiumColbertium
atggctcccttcacgctcgcccatctctccgacccgcatctagcgcccttgccgaagccgcggctgatcgagctcgcgggcaagcgcgcgctcggctacgtcaactggacgcgcaaccgccacaaataccagcgccgcgaggttctcgacgcgctcgtcgccgacatgaaggcgcaggcgcccgaccacattgcagtgacgggcgacctcgtcaatctggcgctggaggcggaattcgcgccggccctggcctggctcgaaagcgtcggcccgccggaccgcgtgaccgcgattcccggcaatcacgacgcctatgtcagcgcgacgcgtcatcgcttcggcgagacgttcctggcctacatcgccgcagatgcgcctggcgctgcggcttttccggccgtacgccggcgcggtccgctggcgctgatcagcctgtccacggcggtgccgaccctgccgctgatggcgacgggtacgctggggcgcgatcagctcgccgctctcgcagaggtgctcgaacggctcgcgaaagaggacgtcttccgcgtgctgctggtgcatcatccgctgaaatccgacgcacgccagaagcggatgacggacgcgccggaattgctggcgctgttgaagcgccacggcgtcgagctggtcctgcacgggcatgaccacgttcattcgacgatatgggtcgaaggccccaacggcaatattcccgtgctcggcgtgccctcggcttccgcgctcgcacacggacgctatccggcggcggcgtacaatctgttaaccatcgagaaggacaatgccggctggcgctgcgagcagacggtgcggagcctcggggcggggtttcaggtcgggcagatcaagcatgtaaggttgatctag

SEQ ID NO: 6570 - DNA, 492 bp, BradyrhizobiumColbertium
atgggtgaacgtctgaaccgggtccgacggaaagccgagccgctgctgcggcgagtcttccacgcgtatttcctggtggtccgcggcatgacgctcggcgtccgtgccgtggtgctggatgccgacaaccgggtcttcctggtcaggcacagctacgtcagcggctggtacctgccgggcggcggcgtcgatttcggcgagaccatggaagaggcattgcgacgcgaactcaaggaggagggcgatatcgatcttaccggcgaggcggtcctgcatggcatcttcctcaacagccacgtctcccgccgcgaccacgtcgcggtctacgtggtcaggcagttcaggcaggatcgcctgcccgggcccaaccgcgagatcgtcgagtgcgggttcttcgacaacaccgcattgcccgaggggaccacgcccggcacgcgcctgcggcttgccgaagtgctcgatggccggcccccgattgcgacgtggcgctga

SEQ ID NO: 6571 - DNA, 1152 bp, BradyrhizobiumColbertium
atgaagactgccaaactcgccttcggcctgatctgtcttgcgatcctcgccagcaacatcgccacgatgtctcgctggagtgaggcgcgcggggtctatgacgacatctgctatctccggcaggcgcacctattccagcgcgtaggtctcggtgggctcaacaccaatgccgccctggatgacgatcgctatttcgaaggcaagctgaagcagatcgcgttcgccgagtggcgggacccgatccgctggccgtgccacaacccgatgccgaacggcaagatcgtgatgcaatacccgccgggcaccggattcctgctggcgctgtttcccgaaggcaaccaggtggtgccgctctacatcgcggcgagcctgatcgtatgcggtcttgcgctagcgggcatcgccatggcgcgcacgctgtcttcggtcgccggtgcgggtctgttcggcgcgcttgccgtctatctcatgatcaatccggccaaggcgagctattccatcgcgccgacgatggcggtgtgcgccgtcgcaggctgtctgacggcgttgtggctgaccagggacaagcgcaacgtgctgctgattgcgctgattggcctgctgctaggcgcgtccgtcaatttcaggctgccgaatgcgctgctcgtggccggctacgtcatctatctcggcgttgcgttcctgcgggtgcggacgctgtcagccttcgcgcaggggctcggcttcggcctcgctgtcctcctcggcatggccccgaccctgatcgcgcaggcgatcaatgccggcagcccgctggccacgacctatggcagtgccgacgtggtcgcgccagccttcgatcttgccgtgctcggccagtatctgcgcgacatgcaattcgtgctgatcgtgctcgcgatcggctccacggcctggctgttgcgcgtagggaaggggagcgtacggcaggtggccctggtcgtcgccggcaatctcacggtcaacctcgtcttcttcctgagtcacccggtcttcacgccctattacatcgtgccgatcgcgatgctgtccctgtggagcgcctcgttcgcctggctgattcagccggggcaggcatcgcaggctgtgccgttcgggcgcgagccgacgggcctcggagcgacgtcgcgatga

SEQ ID NO: 6572 - DNA, 936 bp, BradyrhizobiumColbertium
atgacctcaacgcaactccgcatcgccgtgctggtgccctgctacaacgaggaggcgacggttgcggccgtcgttgccggcttccgcaaggcgctgccatcggcggagatctacgtctacgacaacaactcgcgcgaccggaccgccgcggtcgcgcgcgaagccggcgcgatcgtgcgcagcgagggacggcagggcaagggccacgtcgtgcgccgcatgttcgcggacgtcgaggccgacgtctatgtgctggtcgacggcgatgccacctacgatgcgccgagcgcaccacgcatgatcgacaggctgctcgatgatcatctcgacatggtggtcggccttcgcatcgatcaggtccagtccgcctaccggttcggccaccgtgccggaaaccgcatgctgaccggattcctgtcctcgaccttcggtcacgccttcaaggacatcctgtccgggtaccgggtgttctcgcgccgcttcgtcaaatccttccccgtgctctccgatggtttcgaaatcgagactgagctcgcggtctatgcgctggaattgtcgctgccggtcgccgagctcgagacgccttactacgctcgtcctgaaggctcgttctcgaagctcaacacctggcgcgacggctttcgcatcctcggcaccatgctgaagctctaccgttcggagcggccgttgcgcttcttcacggcgatcggaatcctgctggccctggcctcggtgattctcgcaatccccatcgtgatcaccttcatcgaaaccggcctcgtcccgcgcctgccgactgccgtgctgtcgatgggcctgatgatcatggccctgctgtcggcatcgtcggggctcgtgctggacaccgtcacgcgcgggcggcgggagatgaagatgctcgcctacctgtcccaaccggcagcgaaaagcaactga

SEQ ID NO: 6573 - DNA, 555 bp, BradyrhizobiumColbertium
atggaccgcggtgcgttcaggtgctatcccgcaatcgacatgaacgatctctcactgaccatccttcccgaagccgccggagacgctcaggccatcgagcggctgcacgaacgtaccttcggtccgggccgcttcgtgctgagcgcctaccggattcgcgagcacgtcgatcatctgctcgaactctccttcaccgcccgcatcgcgaccctgctggtgggctccgtcaggcaattgccgatcctgatcggcgacacgcccgcactgctgctcgggccgctcaccgtcgagccgccgttccgcggccgcggggtcggtcgtctcctgatggagcgggccttgaacgacgccaggttgaaaggtcatcggctggtgctgctcgtcggtgacgagccttattacggccgtatcggattcaagcaggtcgaaaaaggccgcgtcaccatgccgggcccggtcgacgccgcccgcatcctggtcttcgagctcgtcgacggcgcctttgagggcgtgtcgggacgagtggggcctgactggagcaaggcgcggagataa

SEQ ID NO: 6574 - DNA, 354 bp, BradyrhizobiumColbertium
atggcaaagcaccgcatctacaccaccagcttcgcgagcgtgtatccgctttacattgcgaaggcggagaagaaaggacgcaccaaggcggaggtggatgagatcatctcctggttgaccggttacgatcggagccagctggaagcacaacttgccaagcggaccgatttcgaaaccttctttgctcaggccccgcgcgccaatcctgcgcgcaccctcatcaccggtgtggtttgcggcgtccgcgtcgagaccgtcgcagagccgacgatgcgtgagattcgctacctggacaagctgatcgacgaactggcgcgcggcaaggcgatggacaagatcctgcgggaggcctga

SEQ ID NO: 6575 - DNA, 735 bp, BradyrhizobiumColbertium
atggaagccgtcacaccagcaaagcgccgcctatttctgtttggcacgctggccgccgtcgcggccccagccgttttcacccgacgggccttcgcagaagagaagggcatcggcgagaaactgaaggaggcggtcacaggcaaaacgggcaaggaagtcactccgcccgaggatctcatgcgcgagcacggcgtgctcgatcgagtgttgctggtctacgaagcgggggtccgcaaatacgcgtcgaacgaggacttcgatcccgccctgatcacccggtcagccgagatcatccgcgacttcatcaacaactaccatgagaagacggaggagaagcacctctttccgcgcttcaggaccgccgggaaaatggtcgcactggtggataccctggaacgccagcacgaggcgggccggaagctgaccgagaccatcatcaggctggcaccgaccagcaggagcagcggcgccgaccgtacgcggctggtcgacacgatccagtcgttcatcaccatgtaccgtccacacgccgcccgtgaggacacagacctcttcccgaagctgaaggatctggtctcggcccatgaatacgacgccatggccgaggacttcgagaagaccgagcacgacctgtttggagaggatggcttcgagaagatggctgcccgtgtcgctcagttggagcagcagatgggtatccacgagctcaaccaatacactccgcaggggcgctga

SEQ ID NO: 6576 - DNA, 120 bp, BradyrhizobiumColbertium
atggtggatgggccttgccggcttccatgtgcgctcctgagcgcctcgaagccgccatgcctccatcagccgctggagtctgcctcgcagcttggagcgatccggcctggcgatgcatag

SEQ ID NO: 6577 - DNA, 2382 bp, BradyrhizobiumColbertium
atgtcatttcaattgcgacgcgcccagcgtctcggcggagcaagcctgctcctgctcggtgccgccgccacgccggtcttcgctcaagatccggcccaggacaaatcatcgacggagatcccggccgtgaccgtcacggcgccgagcccgatcgtgcgcagagcggtggtgccctcccgcaacgcagggcgcggcggcacgcggaccgcgcgggtgcgcagccgcgagcaagcggctgaaccagcgccggcagccccggtgcctgccgcacctcagcaaggcgtgctgccgatcgtgaccgatcagttcgcgaccgtcaccgtggtgccgaacgaggaaattcggcgcaacggcggcggcacgctcggcgatctcctgttctcgaagcccggcatcaccggctccgaaatcgcacgcggcgcatccagccgcccgatcattcgcggcctcgacaccaaccgtgtcggcatcgtcgagaacggaacaggcagcaatggcgcgtccgatctcggcgaggatcacttcgtgccgattgatccgctggcaaccaaccaggtcgaggtcatccgcggaccggcgacgctgcgctacggctccaccgcgatcggcggcgtggtcagcgcaacgaacaatcgaattccggatgccttgccgtcctgcacggcaccctttccgacttacggactcccgaccaaggcgccgctggcgaacatgggatcaccgggctgcatcaccgcggaaacacggacggcggtgacgtctgtcgatcgcggggtcgaaggtgccatgctgctcgacgccggcggcggtaactttgccgtccatgccgatgcctttggccgcaaggccggcgattacaacatcccgagctacccgttcttgaccgacccgacgctgccgttcaacggacgccagccgaattcggcatcgcagggctacggcgggtctgtcggcggctcctacatcttcgatggcggctatgttggcgcggcgatcacgcagcacaacgcgctctatcatattcctggtatcgagggcagcgagttcctcacgcggatcgacggacggcaaacaaaattcacgacaaaaggtgaatatcggccggacgctgcggcgatcgatgcgatacggttctgggcgggggccaccgactataaacacgatgaggtcgggctcgccgacgctgcagatctcacctccctcggcgtgagacaaaccttcaccagcaaggaacaggaaggccgcgtcgaggtgcagcttgcgccgttcgacgtccgctttgctgcgctgaccactgccgtgggcgttcaggcgtcgcaccagaagctgaccgcgccgagtccagacgatccgggcagcccgatcaacggactgttcgatccgaacaagaacacaaaggtcgccgggtacatcttcaacgagttcaagttcagcgaagctgccaaggctcagatcgccgggcgcgtcgagagcgcaaggttgagcggcacggcgccagccttcgtccccgatgtgttcgacctcgccgtcgatccggccgcgatcggccccgcaacggcggtcaaccgcaacttcacgcccgtgagcgggagcatcggcttgatccacgaccttccttgggatctggtcgcgagcatcaccggtcaatatgtcgagcgtgcgccgaaaccggcggaattgttttcgcgcggcggccacgatgccaccatcacattcgacataggcaatcccaatctcggcatcgagacggccaagtcggtcgaggcgggactgcgacgggcggtagggccgcttcgcttcgaaatcaccggctactacaccaagttcaacggatttatctaccggcgcctgaccggcaacacgtgcgaggacggcgtttgccagcttggcgcggggctcgaactgaatcaggcgatctattcgcagcgcgacgcgacatttcgtggcggcgaattccagttccagtacgacgtgatgccggtctggaacgggatctggggcatcgagggtcaatacgacatcgtgcgcgcgaccttcgacgacggcaccaacgtgccacgcattccgccccagcggctgggcggtggtgtgtactatcgcgacgccgactggtttgcccggatcaacctgctgcacgcgttcgcgcaaaacgacatcgcacctatcgcggagacgccgacgcccggctacaacctgctaagggccgaggtcagctacaggacgaagctccatcaaagctggttcggcgcgcgcgagatgcatgtgggcttggtcggcaacaacctactgaacgagaacatccgcaatgccgtctccttcaacaaggaccaggtgctgttgccaggcatcggagtcagggcgttcgcgaatttcaagttctag

SEQ ID NO: 6578 - DNA, 417 bp, BradyrhizobiumColbertium
atgaagtggttccggtcgaatatcaggcacggcgcccggctcgcgttgttcgcgatgctggtgcagctcgcgctgacgttcggccacagccattggttcgcgcaggccgcgcccctcgctcaatcctcgctgcatcaggccgagggcggcaaggacagcggcaagagccttgcgtccatcgacagcgtcgcggtccagaagcaatcgccctcggggcccgaccgcgaccaccacggcgaggacaattgcggtatctgcgccatcatcgcgatggccggtgctgtcgtatcgtcaacgccgcccgtgctgctgctaccgcaggccatcgatctgctccgccgcaccacggacgccgaattcatccatctgaggtcggccggcacggcattccagccccgcgcccctcccgcctcctga

SEQ ID NO: 6579 - DNA, 2064 bp, BradyrhizobiumColbertium
atgaattacggcatcgcgttcacgccgcttgttcccgccatcgttctgtggctcgcgttcgccgcgatcgtcgtcatcgccatcgtgctgctggcggcgcgtgcgcgcggcgccgcggtgcgcgtggctgcgctcgcgctgatcctgctggcgctcgccaatccctccttcacccgcgaggaccgcgatcccctcacttcggtcgcggccgtcgtcgtcgacaagagcccgagccagaatttcggcagccgcaaccgcgaggccgcagctgcgcaggaaggactggtcgacagcctgaagaagatcaagggactcgaggtccgcgtcgtcgatgccggccaggccgacggcgagaccgacggcaccaagctgttcggcgccctcgcctcggccttgtcggacgtgccggtcgaccgtgtcgccggcgccttcctgatcaccgacggccgcgtccatgacattcccgcgaacgccaccgcgctcggcttccaggcgccggtgcacgcgctggtcaccggccagaaggacgagcgcgaccgccgcatcgcgatcacggcggcgccgcgcttcggcatcgtcgggcagacccagacaatctcctatcgcctcgacgaccagggcgtctcgggtgagcgcgccagggtcacgatccgccgcgacggcgaggtcatcaacgagcgcaccctatcaagtggccaggccgcaagcgtcgacgtcgacatcaagcacgccggcccgaacatcgtcgagatcgaggcttcgccgctggagcgagaattgacgccggtgaacaaccgcgccgtcgtcgccatcgacggcgtgcgcgacaagctgcgcgtgctgctggtctccggcgagccgcattcgggcgagcgcacctggcgcaatctcttgaaatccgacgccagcgtcgacctcgtgcacttcaccattttgcggccgccggagaagcaggacggcacgccgatcaacgaattgtcgctgatcgcgtttccgacccgcgaattgttccagcagaagatcaacgaattccagctgatcatcttcgaccgctacgcccgccagggcgtgctgccgatcgcctatttcgacaacatcgcgcgctatgtgcgcggcggcggcgccgtgctggtgtccgccggtcccgactacgcctccaacaccagcatctggcgcacgccgctggattcggtgctgccggcagagccggtcggcgtgaccgaaaagccgttctatgcgcatctgtccgacgtcggcaaacgccatcccgtcacgcgcgggctggagggctcgggatccgagccgccgcgctggagtcgattcttccgcacggtcgacacgcgcaacgcggtcaatccgcctgtcatgaccggcgtggacggcaagccgctgctgttcctgtcgcgcttcggggagggacgcgtcgcgctcctgctgtccgaccacatctggctgtgggcgcgcggctatgaaggcggcggcccgcatctcgacctgctcaggcggacatcgcactggctgatgaagcagcctgatctggacgaggaggcgctgcgcctgcaggtgcagggcaaggacttggtcgtggtgcgccagaccatggcggacagcgtccagccggtgagcgtgacctcaccgtctggcgtgtcgcaggatttgacgctctcgcccggcgatcccggcgagtggcgcgccagcctgccggcgaacgagctcggcctttggcaggcgaccgacggcacgctgaaagcgctgatcaatgtcggcccgaccaatccgaaggagttttcggaagtcacctccacggtcgataccttgagaccgctggcgcaggcaaccggcggcaacgccgtgcgcgtggccgacggctccagcgtcgagctgccgcgtatcctgccggtgcgttcggccagcgtctttgccggcgacggctggatgggggtgcggatgcgcgacgccagtgtcgtgaagggcgtcggcgtgttgccgatcttctccggcctgatcggcctgttgctgctgctcggcgctttcgccgccacctgggtccgcgaggggcgctag

SEQ ID NO: 6580 - DNA, 2817 bp, BradyrhizobiumColbertium
atgatgggattgccgctcgccttcactcaaccgctgctgctgatcggtctcgtgagcctaccggtgctgtggtggctgctccgcgtgatgccgccgcggccgcggcgcatcgagtttccgccgacgcggctgttgttcgacatcacgccgcgggaggaaacgccctcacggacgccgtggtggctgaccgcgctgcgcctgctcgccgccgcgctggtgatcttcgccgccgccggcccgatctggaatccgcaaaccggcgcggccggcagcaaggcgccgctgatgatcatgttcgacgacggctggagcgccgcttcgcattgggacatcaggatcaggaccgccgacgagctgatcgcaaatgccgacaatgacggccgcgccatcgcgctggtgccgctgtccgagccgaaccgcgacatcaccctcatgccggcgggcgcagcgcgcgtcgcgctgcggcaactcgcgccgaagccgtactcgatcgaccgcgtcgagacgctgactgcggtcgaccgtttcctcaaggtcaccggcgactgcgagatcgcctggctgtcggacggcgtcgacaccggccgcggcgaggacttcgtgcagggcctcggcaagaccatcggcgatcgcagcctgaccgtgttcgaaggcggcacctcctccccgctggccctggtcgcagccgagaacgccgcggcgaagatgacggtgaaggtgctgcgcaccgacagcggcatcgcggtcggcaccgtgcgcgcactcgaccagaaggccgcgccgatcggcgaagcccgctattcgttcggaccgcaggacaaggagaccgaagcggcgttcgatctgccggtcgagctgcgcaacgacatcacccggctcgagatctcgggcgagcgctccgccggcgccgtgcagctgctcgacaagcgctggcgccgccgcgccatcggcatcgtctcgggttcgaccagcgaaaccgcacagccgctgctggcgccgaccttctatctcacccgcgcgctggcgccattcgccgacgtgcggctcgccgacaagggctcgccgcagcagggcatcacgcaatttctggaccagaagctgccgatgatcatcctcgccgatgtcggaaccatatcgcccgagctccgcgagcgtctcaatgcctgggtcgaccagggcggcatcctggtgcggttcgcaggcccccggctggcgcaggccgaagacgatctcgtgccggtcaagctgcgcaagggcggccgcacgctcggcggcagcctgacctgggagaagccgcagcatctcgcctctttcgcgggcgagggcccgttcgcaggcatcgccgtcccgaaggacgtcaccgtgagccggcaggtgctggccgagcccgacgcggttctcgccaccaggagctgggcctcgctcgaagacggcacgccgctggtgaccggcgagcatcgcggcaagggcctcgtcagcctgttccatgtcagcgccgacatgcgctggtcggaccttccgatgtcgggcaccttcgtcgaaatgctgcggcgggtcgtcgacatgtccggctacacgtccaagcccggcgccggggttgccggcgaagcgagtgccgagacggtggccccgctgcacattctcgacggcttcggcgccttcggtccgccgccggcgacagcaaagccgctgcccgcggattatcgcgaccgcgccacccccgatcatccgcccggcttctacggtccggcagaaggaccgctcgccgtgaacacgcttgccgccgccgaccgcatcgccgctttgaacaccgcgagcctgcgcgcccggcacgcgacctacaccaatgcggagccgcgcgacttacgcggctggctgctgtcgacggcgcttgcgctgttcctgatcgacgccatcatcgtcgcgctgctcggcggcggcctcgccgcgctgctgaggcgccgcgccgcgcccgcaacgatcgtgctcgccctggcgctggcaggcctgatatcgtttgcgccgacggcggcacgtgccgacagcgcagcggacgagttcgcgatgaaggcagtgtcgcagacccgtctcgcctatgtcgtgacgggcaatgccgacgtcgattccatcgtcaaggcgggaatgaacgggctcacgctgttcctcgcccagcgcaccgcgctggaggccggcgatcccatcggcatcgatcctgcacgggacgaactcgccttcttcccgctgatctattggccgatcgtgcctggcgcgccgaagccgccgcaggacgccatcaacaagatcgacgcctacatgaagcagggcggcaccgtgctgttcgatacccgcgacgcgatcgaggcaccgcctggcgcgaacggcgcgtcgcaaacgccgggcatgcagacgctgcgcgacattctttcctcgctcgacgtgcccgggctcgagccggtgccgcgcgagcacgtgctgaccaagacgttctatctgctgcgcgacttcccgggccgcttcaccgccggccagacctgggtcgagacgctgccgcgcgaagacgacgacgaggacagcgcgcagcggcctgcgcgcggcggcgacggcgtctcgccgatcatcatcacctcgaacgatcttgccggcgcctgggcggtgcggcccgacgggcaggccatgctgccggtgaccggcgatgatccccgccagcgcgaattcgcctaccgcgccggcgccaacatcgtgatgtacacgctgaccggcaactacaaggccgaccaggtgcacgctccggcgctgatcgaacggctggggcaatag

SEQ ID NO: 6581 - DNA, 948 bp, BradyrhizobiumColbertium
ttgatggcagcagagaacgggcacgcggcgaaggagacactggcgatccgacgtgccgatggcgaaagccgcacgctcgccgcttcgctgccgcgcctggtgctcgaggctcgccgcatcgcggccaacgtgattcacggtttgcacggaaggcggcgcgccggctccggcgagaatttctggcagtaccgccgcttcgtctcgggcgagccgtcgcagaatgtcgattggcgccgatcggcgcgcgacgaccatctctatgtccgcgagcttgaatgggaagcctcccacacggtctggatctggccggatcgctcgccctcgatggcgttcgcctccaggaccgcgcgcgagtccaagctcgaacggacgctgatcgtcgccttcgcgctggccgagctgctcgtcgccggcggcgagcgcgtcggcatccccgggctgatggcgccgacggcaagccgcagcgtcatcgacaggatggcgcaggccatgctgcatgacggtgccgaccggctgagcctgccgccgtccttcgtgccggcggcgctggccgagatcgtcgtgctgtcggatttctggtcgccgatcgccgagatcaggacgacgctcgcagggctctccggcacgggcgcgcatggcgcgctggtgcaggtggtcgatcccgccgaagagtcgttcccctattcgggccgcgtcgaattcgtcgagccggaaggcttcggcgtcattaccgcgggccgcgccgagagctgggcgcaggattacaccgcgcgcctcgcgctgcaccgcgaccagatccgcgccgagaccaacaagctcgactggctgttcacgacccacgcgaccgaccgctcggccgcggagctgctgctgttcctgcatgccggcatgcaggtcagcaagtcgggcgcccgcaccacgacgatcaaggcggggccggccgcatga

SEQ ID NO: 6582 - DNA, 999 bp, BradyrhizobiumColbertium
atggcggagagtgtcgagaaactcgaggacgggatcgtccgttcggccgagcaggtgtcgagccagattcgcgcggcgaaggacgcgatcgcctccgtcatcttcggccaggatcgcgtgatcgagaatacgctcgtcacgatcctctccggcggccacgcgctcttgatcggcgtgccgggtctcgccaagaccaagctggtcgagacgctcggcgtcacgctcggtctcgatgccaagcgcatccagttcacgcccgacttgatgccgtcggacattctcggcgccgaagtgctggatgagagcaccgcgggcaagcgcgccttccgcttcatttcaggaccggtgttcgcgcagctgttgatggcggacgagatcaaccgcgccagcccgcgcacgcagtcggcgctcttgcaggcgatgcaggagcagcacatcacggttgccggtgctcgccatgatttgccgaagccgttccacgtgctcgcgacgcagaacccgctggagcaggaaggcacctacccgctgcccgaagcccagctcgaccgtttcctcatggagatcgacgtcgactatcccgatcgcgacgccgagcgccgcatcctgttcgagaccaccggcgtcgaggagacgctggccaaaggcgcgatgagccccgatgcactgatcaccgcccagcggctgatccgccgcctgccggtcggggattccgtcgttgaggcgatcctgtcgctggtgcgctcggcccgcccgggtccggacgcgggtgaagccggcaaattcattgcgtggggcccgggtccgcgcgccagtcaatccctgatgctggccgtgcgcgcgcgcgcgctgatcgacgggcgcctcgcaccgtctatcgacgacgtgctcgaccttgccgagcccgtgctgaagcaccgcatggccctgacgttccaggcgcgcgccgaaggccgcaccattccggacgtgatccggcaattgaagacacggatcggttga

SEQ ID NO: 6583 - DNA, 612 bp, BradyrhizobiumColbertium
atggcgaaccaagggcagagcgccgatcgcggtctcgaggggctgacggctgccgccaagagcgctgccgatgccgaaggcgccacgaagggcctgcctccggtgcatctgtggaatccgccgttttgcggcgatctcgacatccgaatcgcctccgatggtacttggttctatctggggacgccaatcgggcgtcccgctttggtgcggctgttctcgaccatattgaagcgcgagggcgacaagcatttcctggtcacgccggtcgagaaggtcggcatccgcgtcgatgacgcgccgttcatggcggtcgagatgcagaaacaggacgagggcgattgtcgcgtgctgcggttccgcaccaatgtcgacgactgggtcacctgcgacgccgaacaccggctccgcttcgagcaggccagggatggcggcctgacgccatatctgcatgtccgcgccgacctatgggccaaggttacaagggcgctctattacgatctggttgacatgggcgaggagcgggtggtcgatggccagccgatgttcggtgtcgaatcggccggcgagttcttcgtcatggccgatgctgagcaggtgagggccgcgctttga

SEQ ID NO: 6584 - DNA, 678 bp, BradyrhizobiumColbertium
ttgaacatgaacaagcctatcctgacgaacgagcccgtcgcgatgggagctgcggatttcttcgcccgctcgaaggcgaagcttggcttcgacgtgccgccgggcctttacgatcccaacatcatccctgcctcgggcgatcccggcaccgacaagatgctcgagatcatcgcgcgggagcagccggtgcgccccgcagcggtgctgatcgcggtggtcgaccatcccgagccgaccatcctgctgacgcagcgctcggcgcatctcaacgaccatgccggtcagatcgcctttcccggcggcaagatcgacgcgaccgattcctcgccgctcgatgccgcgctgcgcgaggccgaggaggaggtcgggctgtcccgagagttcgtggagccgctcggctatctcgatctctacggcaccgcctttggctttcgcatcctgccgacggtggccagggtgcggccaggcttcgagctcgccatcaaccattccgaggtcgatgacgccttcgaggtgccgctatcctttctcatgaacccggtgaaccaccaggtgcacagcaaggaattccgtggcctggagcgatcctattacgcgatgcccttcgccgaacgctacatctggggggcgacggccggaatgctgcgtgtgctctatgagcggatctattcatcatga

SEQ ID NO: 6585 - DNA, 264 bp, BradyrhizobiumColbertium
atgatccggacgattctgaccgagatcggaatcttcctcattccctttgccgtctatgcgctgtttctggctgctgcgcgctccggcgtgttcgcgcggtcgtcctggccggtcaccgtcgttgcgcgcctcgctctggtcgcgatcgtgctggtgattgcggggctgatcggcctcgcgcatttctccggcgcgccgccggattcgacctacgttcccgcccatatcgagaacggcaagctcgtgccgggcgcagaaaagtag

SEQ ID NO: 6586 - DNA, 1155 bp, BradyrhizobiumColbertium
gtgggtggtgccgtgcgcaacgcgctgctcggcctcctgcctggtgacatcgacatcgcgaccacggcgctgccggacgaggtgatgcggcgcgccaaggccgccggcatcaagggcgtgccgaccggcatcgaccatggcaccgtcacgctcgtgatcgacgggcatccctatgaagtcacgacgctgcgccaggataccgagaccttcggccgcaaggccaaggttgcgttcggccgcgactgggtgaaggacgccgagcggcgcgacttcaccatgaacggcctctcggccgatgcgcacggtgtcgtctacgactatgtcggcggcatcgccgatgcccaagcgcgccgcgtgcgcttcatcggcgatcccgaccagcgcatcgccgaggattacttgcgcatcctgcgcttcttccgcatccacgccgccttcggtgccggcgagcccgaccgcgacggctatctcgcctgcatccggggacgcgcgggcctggccaacctgtcggccgagcgggtgcgcatggagatgctgaaattgctggtggccggcggtgcagctgcggccgtcctcgccatggccgagggcggattgctgcagccgctggtcggcggcgtcgcctatacgagtcccttcgcggcgatgatcgcgaccgagcgcgcgctcggccttgctccaaacagcacgcgacgtctcgccgcgctctcggtcgccgtcaccgaggacgccaagcgcgtcgccgtgcgcttgcggctctccaacgccgagaccaaggcgctggattcgatgggccatcgctggtggcgcctcgccaccaaggacgaggccaatgcacggcggctgctctaccggctcggcgtggagcgctatcgcgatcgcgtgctgctggcctgggcgaggaacggcggcgacgtgcattcgccgcgctggcgctcgctcgccgagctgccgcagcgctggaccgcgccgaaatttccgttgaaggccgccgatttcatcgcgcgcggcatgacggaagggcccgggctcggacacgtgctgacgctcgccgaggacgcctggctcgccgcggattttcccctggacgaggctgcgctcgcttcgatcgccgaccaggctgcggcccgcgtcggccgcgatgagaaaacctag

SEQ ID NO: 6587 - DNA, 957 bp, BradyrhizobiumColbertium
atggatacgctgagcagcatgcgtgtcttcgtgcgggtggttgagctcggcggattcaacgcggcggcccgcgcctgcgcgatgtcagccgcaatggtggccaagcatgtcggtcatctcgaggagcgcaccggagcccggcttctcgacagaaccacgcgctcggtccgaccgactccggaggggcagctctacctcgagaaggtgctcgcaatcctcgaagccgtcgacgaggcggagggcaccgtcggagcggagaaacggctggcgcgcgggacgctccgcgtgacggcgccggtcgaactgggccaggaccacctcgcgccgctgctcgtcgatttcatgtcgcggcatcccgggatcgccgtcgtcgccgacctgacgaaccgcccggtggatctcgtgcaagaaggcttcgacatggcgatccgggtcgcaccgtcgctcgacaccgcgctgatcggacgcaagctcgcgacaacccactttcgcgtcgtggcaagcgcggaattcctggccaggcacggcgtgcccgagacgcccgagattctcgcagccctgcccgcgctgaccttctcgcagcccgcgcctcgtctggactggtcctggcgccggcgtgagatgcacggcagggtcaggatgaccgcccggctcgcctcgacgagcgccgatacgttgcgcaaggcggccgttgcgggccttggcgtctcctggcttccgtcatttgtctgcggcaaggacatcgaggcgggcctgctggtcccgatcctggaggattgcgactggggcagcctcggcgttcatgtcctctacccgcatcggcgtttctcgccgagccggcttcgtctctttatcgactttcttgcagagagactgggtgacgatccctcgggtgacccgtgggcgccacggatggaggagcgccgcatcatgctcgcgggaagccggttggcctag

SEQ ID NO: 6588 - DNA, 303 bp, BradyrhizobiumColbertium
atgacgacattgctgcaattcgacttcgcgtttgatgggccgtggggagaagatctccagatcgcctgccgcgatcttgcggacgacatcgcggcccagcccgggctcatctggaagctctggggcgagaaccgcgacgccggccgcgcggcaggcatctacctgttcgaaacgccggcagctgccgctgcgtatgtcgccaaacatcggccccgtctcgccgcccttggcgtgaccgaccccgccatttcgtccttcagcctcaacctgccgctgtctcgcatgacgcgggcgccattctga

SEQ ID NO: 6589 - DNA, 288 bp, BradyrhizobiumColbertium
atgtacacgaccattgccgaagtcgagatcgaggatctcgcgcgctttctgtccgtctttgcaacggatggccgcaacaagcgggaggcgcatggaagcctcggcgccgaggtgctgttcgcatcggatggctcggaccgggtgatcgtcctgatcgactggcgggacgaagcggcctgcgacgcctttcgatccgatgcctcggtgccgccgaccatggccaatggcggcgccaagggccggccgcgattcacacccgtcatcagggcgggccggttcgtcgcatga

SEQ ID NO: 6590 - DNA, 1707 bp, BradyrhizobiumColbertium
gtgatggtccgcaagttgacggcatgtgcaatcgttgcgacgggcatgtgtttcgccggcgtgacaaacgctgaggcgcagcagccggacttcaacgcgcctgacctgatccttgtcaatggaaaggttctgacgctggacgaacgatcgaccgtcacggaggccgtcgccgttgcagatggaaagatcctcgcaaccggaaccagtgcttcgatgaggtcgcttgccggcgcccgcacccgcgtgatcgatgtgtctggcaagaccgtcattcctggattgatcgatacccacgctcacttcaaggcggctgggctgggcgactatgtcgtaggcctgggccgggccaggaccgtcgcggaagcgctcgaggccatcaagtcattcgttgcgaagaggaagccgggcgagtggatcgtgggcggcgcgtggcatccgccgtcccagcttgccgagaaacgttatctgacgaggcaggagatcgacagcgttgctcccaacaacccggtctatcttcgcaccgtcgggcatttctccatggcgaacaccatggctctacaattggtcggcgtcgacaagtccaccgcggatccgagtggtggaaagttcgagcgcgacgcggccggtgacttcacaggcctgctcgtggaatcggcgatcgatcgggtcgagaaggccgtgccgccctggacggaggctgacgaaatacggcaattcaccatcgcccagggcgtgctgaacagcttcggtatcacgagcgcggtcgaaggagcgacggaggcacgcgacatccgcacgctgcagaagctcgtcgcatccgggaaagcgaccctgcgcaccggcgtgatgtttcgaccggagccacctgccgatctgaccgcatgggaagcgatcatggcgggcaatggggcctcctcggggtttggcaacgattggctcaagtttgccggcatcaagatcttctacgacggcggcatgactctgaagacggcgctcatgcgcgacgtgtatcccgattcacatgacaactaccatggcattgcgcagcagacgccggagcggctgaagcagctcgtctccatctgcaaccgttatgactggcgtgtcggcgttcacgtggtgggtgaccttggtatcgaccatgtgctcgatgcgttcgagtcggcagacaaggaaaaatcgatccgcgaccgtcgcttcgtcctcattcacgccagcctgatccggccggaacagatggagcgtgcgcaaagacttggagtccgtatcgatttccagaacgccttcatgtgggacaaagccgcgaccgtcgagcgatttctcgggcgagcgaccgctgaccgcgccgtaccgaccaggacgatgatcgagaaaatgggaatcgatagcctcggcgccggcacggactttcccgtaaacccgatcaaccccttcctcaacatgtatgtcatggtgaccaggaaggatcccaacggaaacgcctacggcgcggcagaggccataacgcgcgagcaggccctgcgcctctacagcagcgcggcttcgcgctcaacgttcgacgaagcgcgtaaggggaccatcgagcccggaaagctcgcggacatcgtggtgctctccgcggactacacggccgtgcccgaggaccagatcaaggacatcaaggcggacctgacgatcgccggcggcaaagtcgtctttcagcgctga

SEQ ID NO: 6591 - DNA, 132 bp, BradyrhizobiumColbertium
atgccgcgcgaggtccgcacgctgggcgttgacccgaacagcgccgcaacgtcgacgcttgccgaacaggagttcggcgttaaccaacgccaacggttccggtctgcgcgcgatcgcttcgaagtttcttaa

SEQ ID NO: 6592 - DNA, 861 bp, BradyrhizobiumColbertium
atgggcaagcgcgccaaacgtggaaaggcagagccgctcgccctgccaatggtcgcgagagtcgcaattggcgctgtggccgtcgccgcgttgggctacggtttgctgtctcgcccggcgggcgtgcagccgatgcgcaaaccgtccgcgccgcaagccatggcttcgtcaactccggtttatgtggcagcaccagttcgtgcatcagcgccagctccggctccagtcgcgcccccggcgccgccggcggaaccaccgaaagctgccgacggtcccgaagctcttgtccggcaggtggtggattatgccagccgccagccgccgggcaccgtgatcatcgataccaagaacacattcctgtacttcgtcctgaacgacacgcaggcgttgcgctacggcatcggtgttggccgcgaaggtttcacatggtcgggtgagcagaccgtggcccgcaaggcagaatggccggattggcgcccgcccgacgagatggtctcgcgtcaaccttacctgccgcggttcatggcaggcggtcccggcaacccgctcggcgctcgtgcgatgtacctgggcgaaaccgaatatcgaattcacggcaccaacaagcccgatacgatcggcaagcgggtgtcgtccggctgtattcggctgaccaatgaagacgtcgtcgatctctatgaccgcgtgaaggtcggcgcgaaggtgatcgtgcttccggcaaccgcttcccgccggccatcccagggagcgccgtccgatgctgcctcgcggtcgccggacccggcatcgccgtcgaaccgcccttcggcaaccaacgcgcagatgctgtcatccggaccgaagattgccgaggtccggtaa

SEQ ID NO: 6593 - DNA, 204 bp, BradyrhizobiumColbertium
atggatctgaaagccggcgatgtcgtgatgctgaagtccggcggccagccgctgaccgtcgcggaggtcaagcaggacgaagtgctgtgcctgtggatgggcatggagggcgatttgttccgcgagacgctgccactcgccgtgctcgttcaggtcgaggaagacgacgaggaggaggaagacgaggaggaggacggggactag

SEQ ID NO: 6594 - DNA, 846 bp, BradyrhizobiumColbertium
gtgacgacgatgaagcccgcatcaaagccgctgccgcgcgccatgctgatcgacatggacgacaccatcctgtcggcctatggccgtcccgagatcgcctggaatacgatcacggccgaattcgccgacgaactggcgccgctgccgccgccgatggtcgccacggcggtgctggcattcgcgcgaaacttctgggcgagcgcggaagccgcatggcggctgaggctcgccgaggcgcgccacctcaccgtcaagggcggctttgccgcgcttgcggcggccggccatcgcgccctgcccgacgacctcgccgtccgtctcgccgaccgcttcacggcctatcgcgaggaggagatgttcgtcttccccggcgcgcatgatgcgatcgaccggttcaaggcgctcggcatcaggctggcgctggtcaccaacggcgccgcggacatgcagcgcgccaaggtcgagcgcttcgagctggcgcaccgcttcgaccatatccagatcgaaggcgagcacggcttcggcaagcccgaggagcgcgcctatctgcacgccatggacgcgcttggcgtcagcgccgaggacacctggatgatcggcgacaatctggaatgggaagtcgtgacgccgcagcgcctcggcatctattcgatctggatggacgtccatggcgacggcctgcccgaaggctcgaccgtcaagccagatcggatcatccgctcgctcggcgagctgctgccggaccaggcgcagccggaccccaaacaaaaaactgaaaacaaccccatgcacagtagccggccgccgcaagatcaggggcctacggattatacgaagcggctttga

SEQ ID NO: 6595 - DNA, 888 bp, BradyrhizobiumColbertium
atgaacccgaacttgatggacgatcgcaaggcccgcgcccgcgcctggttcgaacgcttgcgcgacgacatctgcgcaagcttcgagcggctcgaggacgacgcacccgaagcgctctatcccggcgaggcgggccgcttcaagcgcacgccctggcagcgcaccgaccacagcggcacgccgggtggcggcggggtgatgtcgatgatgcatggccggctgttcgagaaggtcggcgtgcactgctcgaccgtgcacggcgaattcgcacctgaatttcgcgctcagatccccggcgctgcggaggatccaaagttctgggcctcgggcatctcgctgatcgcgcacatgcgcaatccgaacgtgcccgccgtgcacatgaacacgcgtttcgtcgtcaccaccaaggcatggttcggcggcggcgccgacctcacaccggtgctggaccgcaggcggacacaggacgatcccgacaccatctcgttccacgccgcaatgaagcaggcctgtgcgcagccgaacggcgttgccgactacgacaagtacaagaaatggtgcgacgagtatttctatctgccgcaccgcaaggagccgcgcggcatcggcggcatcttctacgactggcacgacagcggtgactgggacgccgacctcgtcttcacccaggacgtcggccgcgccttcctgaagatctatcctgagatcgtgcggcgcaatttcgcgagcgcctggaccgcggtggatcgcgaggagcaattgatacggcgcgggcgctatgtcgagttcaacctgctgtacgaccgcggcaccatctttgggctcaagaccggcggcaatgtggattcgatcctgtcgtcgatgccgccggaggtaaagtggccgtga

SEQ ID NO: 6596 - DNA, 675 bp, BradyrhizobiumColbertium
atgaaggccccgaggcctgaccaggagatcgaggagagaggcttgagttacgcggtcaaggaaatcttcctgaccctgcaaggcgaaggcgcccatgccgggcgcgcgtcggtgttctgccgcttcgcaggctgcaatctctggagcgggcgcgaggccgaccgcgcggacgccgtctgcaggttctgcgacacggatttcgtggggaccgacggcactctcggcggccgctacgcctcggcgtcggaactcgccgacaccatcgccgggcaatggcgtgccacggctgccaaccgctacgtggtgctcaccggcggcgagccgctgctgcaagtcgacgccgcgctgatcgacgcgctccacgccagaggcttcgagatcggcgtcgagaccaacggcacgatcgcggccccggaagggctcgactggatctgcgtcagccccaagggcggcagcgaattggtcctgcgcgaaggccacgagctgaagctggtctatccccagccgctcgccgcgcccgagacgttcgagcatctcgccttcgagcgcttctcgctgcagccgatggacgggcccgaggtggccgagaacaccgcgcgggcgatcgagtactgcctgcatcatccgcaatggcggctcagcgtgcagacacacaaatcgctgggcatcagatag

SEQ ID NO: 6597 - DNA, 468 bp, BradyrhizobiumColbertium
atgcagatcgcgcttttccaacccgacatcgctcagaacaccggcacgattctcaggctttgcgcctgcttgggcctggccgcccatatcatcgaacctgcgggcttccccgtatccgaccgcctgttccgccgggcgggaatggattacctcgaccatgtcagcctcacccgccacgactcctggacgaaattcgaggaatggcgtgcggcacgaagctaccggctgctgctgttcaccaccaaggcggccaccgactaccgcgattttcattaccagacgtcggacatcctgctattcgggcgcgagagcgccggcgtcaccgacgcggtgatcgaggccgcggatgcgcggctggtgatcccgatcaaggcggggctgcggtcgctcaacgtggccatgaccgcggcgatggccgccggcgaggcgctgcgccagatccggaaccatgaaggccccgaggcctga

SEQ ID NO: 6598 - DNA, 417 bp, BradyrhizobiumColbertium
atgaatcctgacgcctcgaccattgccgcaggtgcgccgatcgaggtcgatctcagcccgatcgccgagggccaggacatcaaggtgttctggcgcggcaagccgatctacatcagccaccgcaccaagaagcagatcgacgaggcgcgcgccgtcaacgtggcgagcctgcccgatccgcaggccgatgatgcccgcgtcaaatccggtcacgagcagtggctggtcgtcatcggcatctgcacccatctgggctgcatcccgatcgctcatgaaggcagctacgacggcttcttctgcccctgccatggttcggtgtacgatacgtccggccgcatccgccagggccctgcacccacgaacctggtcgtgccgccgtaccagttcgtttccgacaccaaaatccagatcggctga

SEQ ID NO: 6599 - DNA, 2073 bp, BradyrhizobiumColbertium
atgagcggaccatccgactaccagccgagcaatccggccctgcaatggatcgagcggcgcctgccgatctttggtctcatccattcctccttcgtcgcctaccccaccccgcgcaacctgaactattggtggaccttcggcgccatcctttccttcatgctggcgatccagatcctgaccggcgtggtcctggcgatgcactacacgccgaacgccgatctcgccttcaagtcggtcgagctgatcgtccgcgacgtgaactacggctggctgctgcgcaacatgcacgcggtcggcgcctcgatgttcttcgtcgccgtctacgtccatatgttccgcggcctttactacgggtcgtacaaggagccgcgcgaggtgctgtggatcctcggcgtcatcatctacctgctgatgatggcgaccggcttcatgggctacgtgctgccgtggggccagatgagcttctggggcgccaccgtcatcaccaacctgttctccgccgtgccctatgtcggcgagagcatcgtgacgctgctgtggggcggctatgcggtcggcaatcccacgctgaaccgcttcttctcgctgcactatctgttgccgttcgtgatcgcgggcgtcgtcgtgctccacgtctgggcgctgcacgtcgcaggccagaacaatcctgatggcgtcgagccgaagacggaaaaggacaccgttccgttcacgccgcatgccaccatcaaggacatgttcggcgtcgcttgcttcatgctgctgtatgcctggttcatcttctacatgccgaactatctcggcgacgccgacaattacattccggcgaacccgggcgtgacgccgccgcacatcgtgccggaatggtactacctgccgttctacgcgatcctgcgctcgatcccggacaagctcgcgggcgtcatcgcgatgttcggcgcgatcatcatcctgtgcttcctgccctggctcgacagcgccaagaccaagtcgtcgaagtaccgtccgctggccaagcagttcttctggatcttcgtcgcggtctgcatcctgcttggttatctcggcgcacagccgccggagggcatctacgtcattgccggccggatcctgacgttctgctacttcgcatacttcctcatcgtcctgccgctgctcgcgcgcatcgaaaagccgcggccggtgccgaactcgatctcggatgcagttctggccaagaccgggagcaggtcgacgccgatggtgtcgacggcgatcgtgctggcgctcgccggttcgttgttcgcgggctcggtcgacagcgcgaaagcgtccgaaggcggcgacaagcctccgggcaacaaatggtcgttcgcgggcccgttcggtacgttcgatcgcggcgcgctgcagcgcggcttgaaggtctacaaggaggtttgcgccagctgccacggcctctcctatgtcgcattccgcaacctcgccgagcccggcggacccggctattcggtcgcgcaagccgcggcgttcgcgtccgagtacaaggtcaaggacggtccgaacgatgcgggtgacatgttcgagcgggccggccgggcggcggactatttcccctcgccatttccgaacgagcaggctgcgcgtgcggcgaacggtggtgcagcgccgcccgacctgtccctgatcaccaaggcgcgctcttacaagcgcggcttcccttggttcatcttcgacgccttcacccagtaccaggaacaggggcctgactatgtcgccgcgctgctccaggggtatgaggacaaggtgccggagggcgttaccatcccggagggctcctattacaacaagtacttcccgggccacgccatcaagatgccgaagccgatcagcgacggccaggtgacctatgacgacggctcgccgacgacggtcgcgcagtacgccaaggacgtcaccacgttcctgatgtggaccgctgagccgcacatggaagcgcgcaagcgcctgggcttccaggtgttcgcgttcctgatcatcttcgtcggcctgatgtacttcaccaagaagaaggtctgggccagctcccactga

SEQ ID NO: 6600 - DNA, 690 bp, BradyrhizobiumColbertium
atgggaaccgccattaccttcaagcgcccggacggccaggacgcctcgggctatctcgccaatgccgcgcgcggcaattcgccgggcgtggtcgtgatccaggaatggtggggcctttcggaccagatcaagggcctgtgtgatcgcttcgcgctcgccggcttcgacgcgctggcgcccgatctctacaagggcaaggtggtgccgtatcacgacacggacagcgccaacaaggagatgaactcgctcgacttcatggacgctaccacgcagacagtgcgcggtgccgcgcaatatctgtcgcgcaatggcgccaaggtcgggctgacaggcttctgtctgggcggtgccgtgaccatcatcggcgcgaccaagatcccggagctcgcagccggcgtcgtgttctacggcatcccgccggagcaggcggccaggcccgccgacgtcaagatcccgctccaggcccacttcgccaacaaggacgattggtgcacgccggagctggtcaacgggttcgagaaggccatgaaggccgccggcaagtcgctcgaactgttccgctatgacgccgagcacgccttcgtcaacgagcagcgccaggccgtgcacgaccgcgaagccgccgagctcgcttggggcagggcgatcaagtttttcgccaatcatctcgacggcaacagagcggcttga

SEQ ID NO: 6601 - DNA, 2118 bp, BradyrhizobiumColbertium
gtgacgcgcgcgggcctcgcgatcacgcgcgtggccgagcagttcaccgggggcgccaaccggctcgacgatctcgtgagcctgctcgaccgccgccgcggcgtggtgttgtcctcgggaacgaccgtacccggccggtacgaaagcttcgacctcggtttctccgacccgccgctcaagctggaaaccgtcggcttcgacttcaagctggaagcgctgaacgagcgcgggcaggtgctgatcgccttcctcgccgatgtgctgcgcgagccctgcgtggtgatctccgagaagacggccacgcgccttgccggccacattatccgcggcgacgccccggtcgaggaggaccagcgcacgcggcgcgccagcgtgatgtctctggtgcgcgacatcatcgcggccttctccgccaacgacgacgcgctgctcggcctgttcggcgccttcgcctacgacctcgtcttccagatcgaggatctcgtgcagaaacgcccgcgcgaggccgaccagcgcgacatcgtgctctacgtccccgaccgcctgctggcctatgaccgcgccaccggccgcggcgttgtactcgcttacgatttcgcctggaaggacaggtccacccaagggctgccgcgcgagaccgcggacagcccgtacctgaagacgccgcgtcagggctttgccgatcacggccccggcgaataccaggccacggtcgagactgcgcgcgcggccttcgcccgcggcgatctgttcgaagcggtgcctggacagctctttgccgagccctgcgaccgctcaccggcagaagtcttccagcggctctgcgtcatcaacccctcgccctatggcgctctgatgaatctcggcgagggcgaatttctcgtctcggcctcgccggagatgttcgtgcgctcggacggtcgccgggtcgagacctgcccgatctcgggcacgattgcgcgcggcagcgatgcgatcggcgacgccgaacagatccgccagctcctcaactcggagaaggacgagttcgagctcaacatgtgcaccgacgttgaccgcaacgacaaggcacgcgtctgcgtgcccggcaccatcaaggtgctggcacggcggcagatcgagacctactcgaagctcttccacaccgtcgatcacgtcgagggcatgctgcgccccggcttcgacgcgctcgatgccttcctcacccatgcctgggcggtgaccgtgacaggcgcgccgaagctctgggcgatgcaatttgtcgaggatcacgagcgctcgccgcggcggtggtatgcgggggcgatcggcgccgtcaatttcgacggcagcatcaacaccggcctcaccatccgcaccatccgcatgaaggatggcctcgccgaagtgcgtgtcggcgccacctgcctcttcgattcagatccggccgcggaagaccgcgagtgccaggtcaaggccgccgcgctgttccaggcgctgcgcggcgatccgccgaagccgctgtcgaccttcgcacccgacgcgaccggttcaggcaagcaggtgctgctgatcgatcatgacgacagcttcgtgcacatgctcgccgactatttccgccaggtcggcgccagtgtcaccgtggtccgatatgtgcatgcgctcgacatgctcaagcggaagaactgggatttgctggtgctgtcgcccggtcccggcaggccggaggactttgcgatcaagaagaccatcgatgcggcgctggagaagaagctgccggtcttcggcgtttgcctcggcgtgcaggcgatcggcgaatatttcggcggcgagctcggccagctcacccatccggcccatggccggccctcgcgggtgcaggtgcgcggcggccgcctgatgcgcaacctgccgaacgagatcgtcatcggccgctatcactccctctttgtcgagcgcggcagcatgccggaagtgcttgatgtcacggccagcaccgaggacggcgtcgccatggcgctcgagcacaagaccctgccggtcgccggcgtgcaatttcatccggagtcgctgatgtcgctcgggaatgaggtgggacttcgtattgtcgagaatgcgttccggctggacgcgcgttga

SEQ ID NO: 6602 - DNA, 540 bp, BradyrhizobiumColbertium
atgacctttgaccacgacctgaaggcgagcatccgcaccatcccggactatccgaagccgggcatcatgttccgcgacatcaccacgttgcttgcggacgcgcgggcgttccgtcgtgcggtcgacgagctcgtcaatccctgggccggcaacaagatcgacaaggttgccggcatagaggcccgcggctttatcctgggcggtgcggtggcgcaccagctctcgggcggtttcgtgccgatccgcaagaagggcaagctgccgcacaccacggtccgcattgcctattcgctggaatacggcatcgacgagatggagatgcatgtcgatgcgattcagcccggcgagcgcgtgatcctggtcgacgacctcatcgctaccggcggcacggcggaaggcgccgtgaaactgctgcgccagatcggggccaacgtggtcgccgcctgcttcatcatcgacctgcccgatctcggcggcgcggccaagctgcgcgccatggacgtgccggtgcgcacgctgatgacgttcgaggggcactga

SEQ ID NO: 6603 - DNA, 333 bp, BradyrhizobiumColbertium
gtgagcatcgaccggaaagcagccatcgccgcctacaaggagcggaagaccgttgcgggcatcttcgtcgtccgctgcccggcctcaagcgagacctgggtcggccaagcgccgaacctcgaaacgatccagaaccgcatctggttctcgctgcgccagggcagccacacctgccgcagccttcagaccgcctggaacacgcacggcgaggcgggcctgacgttcggcgaatgcgagcggctggaggatgaggagagcgcctatgtcaggaatgcgctcctgaaggagcgcatgctgcactggcgggccgagctgaaggccgagatgatctga

SEQ ID NO: 6604 - DNA, 669 bp, BradyrhizobiumColbertium
atgcccgcgacgcccgtctacatcatctgctcgccccgcccgcaggtcggcaagaccttgctggcgcggcttctcgttgaattcctgctgctcaagaacggcaacgtcgcggccttcgacgtcaatctgaaggagccgtcgctgctcgattacctgccgaaggtgaccgagaccgccgacgtgatcgacacctttggcaagatgcagctgatggaccgcgtcatcctcgatgacggcgttgccaaggtgatcgacctcggcttccacgccttcgacgagttcttcaagatgactgaggagatcggccttctcaaggaggcggcgcgccgccacgtcgcgccacagatcctgttcgtcgccgacaccgaccgcgcctccgcccgtgctcatgggatgctgcgcgagcagatcccgcgaatgaacctgatcacggtggacaacgaatatgtcgtgcgcggcgagctgccgcccgcaatggccagcggacggctgttccgcctgcccgcgctgcccggcttcctcaagacctatatcgaccggctgaacttctccttcaccggctacctgcgccaggagaaggactcctcgaccgagctgcaccaatggattcggcgcaactatctcgccttccgcgagctcgagctcagcctgatcctgcagcggtcctag

SEQ ID NO: 6605 - DNA, 753 bp, BradyrhizobiumColbertium
atggcaaagccggcagtggttgtggtgggcgcggacaagggcggggtcggcaagaccacggtgtcgcgcaccctgctcgattatttctcagctaacaacgttccgacgcgcgccttcgacaccgagtcgccgcgcggaactctgaagcgcttccaccccgacatcaccgagatcgtcgacatgacgaccacggccgaccagatgaagattttcgacacgctcaatgcggtgagcccgtcggtgaccgtcatcgacgtccgcgccggcctgctctctccggccctggcatcgctgcgcgacatcggcttcctcgatgccgccaaggccggccagatcacgtttgccgtgttccacatcctcggcccctcgatcgcctcgctggaggagatcgcggagactgcgggcttcatgaccggcgcgaaatatttcctggtgaagaacttcatcaacgacacccagttcttccagtgggaccaggcgacctacaactcgtatttccatcgcatcaaggacgcgaccgagctgaccatccccaagctcaacgagatggcctacgagcaggtcgaggtgtcctcggtcccgttcctgaaattcgtcgccaacaagggcatcaacgacgaggccgcgaactattccttcgtgctgcgcggctatgtccgacactggctggccaatgtctggagcgagttcgaccgcatccgtctgaccgacatcgtcggctccaagccggtgagccgcaacagcgaaaaatag

SEQ ID NO: 6606 - DNA, 1209 bp, BradyrhizobiumColbertium
atggccgcgtatggtctctacacgcacatcgcctcgaacaagtttcgttcgatgctgctgctcgccggcttgttcgcgcttgtctacgtgctggtctatgccggcgccctggtggccgaggtcgtcattaacggcaacgggacggtcgcgtattatctgagccgcgccttttccgacctgctcaaggccgcgcctttcgcgaccattgcggcgatcgcctggatcgcgatcgcctatttctttcaccagtcgatgatcgatgccgtgaccggcggccacggcgtcacccgacaggaagagccgcggctctacaacctgctcgaaaatctctgcatctcgcgcggcatcaccatgccgaagctgaagatcatggagagcccggcgctgaacgcgttcgcgaccggcctcaacccgcggcaatattccatcaccgtcaccaccggtctcctcgatgcgctggacgacaaggagatcgaggcggtgctgggccacgagctgactcacatcaagaacggcgacgtacagctcatggtggtcgccgtcatcatcgcgggcgtggtcggcttcttcggtgaattgttcttccgcctgttcacgaatttcagctggagctccggatccggcggctcatggtcctcgggctcttcgtcgcgctcgtcctcgtcgtcgagcgacagcaagagctccggcggcggcgcggtgatcgtgatcatcgtcgcgatcgtgctgatcgtcgtggcctggctgctgtcccaggtggtcaagctcgcgctctcacggtcgcgcgaatatctcgccgacgccggctcggtcgagctgacgaaggaccctgacgccatgatctcggcgctgcgcaagatcgagaatcgcggcgaactgcccggcgcgacgtcagccgtgatggagctctgcgtggacaatccgcgcgagggcttcgccgatctgttcgcgacccacccgtccgtgcagtcccgggtcgacgcactggtcaagtttgccggtggccatgatcccggtccgctgccggaccccaccgaagagatgaaccagcccgaggcggaacagcccgaggaggacgccccgccggcgctaccgcatgggccatggagcgacgccggcagcccggctggtccgttgccgcccgtctccgcaccaagcccctcgggagcccccgcgggcaacccgatggggccttggggccaccattga

SEQ ID NO: 6607 - DNA, 561 bp, BradyrhizobiumColbertium
atgtcgaccggctggatcgttctcggcgtcctcgtcgttctcgcgctgttcgccttcagcgcctacaatcgcctggtggcgctgagccagcgcgtcggccaagcctttgccgacatcgacgtgcagctcaagcaacgccacgacctgatcccgaacttggtcgagaccgtgaaaggctatgcctcgcacgagcgcggcacgctcgacgacgtcatcaaggcccgcaattcggcgatgtcggcgcagggacccgcgcaggtctccgcagccgagaaccagctctccggcgcgctgggccggctgatcgcgctttcggaggcttatcccgacctcaaggccaacgccaatttccagcagctcgcatccgagctctccgacctcgagaacaagatcgcggccagccgccgtttcttcaacaacgcggttcaggaatacaacaccggcattcagcagctgcctgcggccctgttcgccgggatgttcggcttcacaaaaaaggacttcttcgatctcggcgccagccgtaccgaggtcgagacggtgccgcaggtaaagttctga

SEQ ID NO: 6608 - DNA, 984 bp, BradyrhizobiumColbertium
ttgtcgatgatcgcccccgccctccccgccgagttgaaggctgccctcgatcgcaagcttgagggcttctcgcggagcgacgctgcgcagcggtcgcagaaaatctcgaccacctatcgcgctggtggcggctccggcacgatcaagtcggaagccgatgccctcgcctatgcactcgcgcgcatgccggcaacctatgccgcggtggctgcgagcctcaatgcgctggcggagatagtgctcgatctcgccccggagacgctgctcgacgtcggcgcgggcccaggcaccgcgagctgggctgccgcggaagcatttccatcgctacacgacttcaccctgctcgacgccaacgccacgctgagccgcctggggcttgatctggcccgcgacagctcgcgcctcgcggagtgccgctatgtgccgggtgatgccagcggtaacctcgccgaggtctcacaggccgatctcgtcatcgccagctacgtcatgggcgagctcagcgaggccgatcagcgcaagctcacagatgccatgtgggccaaggcgcgccacgcgctggtcgtgatcgagcccggcacgcccgccggctatgcccgcctccttgccctgcgccagcaactgatcgcagcaggcgcgcacgtcgccgcgccctgcccgcacgaaaggccctgcccgctcaacgcgcccgattggtgccatttctcgcagcgcctgccgcgctcccaggcgcatcgccagatcaaaggggccgatgtgcccttcgaggacgagcgcttcatctacgtcgccctgatccgtacgccgcctgcaagtcgcgccgcgcgcgtgctggcgccgcccgatgtgggcaaggccgggatcgccgcgaagctctgcacggagacgggcgtggagctcgcgaaggtgccccgccgcgacaaggccgcctatgcaagtgcccggcgctggcgctggggcgatgccgtcattgccgaaagttaa

SEQ ID NO: 6609 - DNA, 3465 bp, BradyrhizobiumColbertium
atgaaaatcacccgcctgcgccttcacggcttcaagtccttcgttgagcccacggacttcgtcatcgagcccggcctgaccggcgtggtcggtcccaacggatgcggcaagtccaatctcgtcgaagcgctgcgctgggcgatgggtgagacctcgtacaagtcgctgcgcgcggccgacatggacgcggtgatcttcgccggctccggcaaccgtccggcgcgcaaccacgccgaagtgacgatgacgatcgacaatgccgatcgcaccgcgccggcggcggtgaacgacagccagatccttgaaatctcccgccgcatcgagcgcgaggccggctcggtctatcgcatcaacggccgcgacgtgcgcgcccgcgacgtgcagatcctgtttgccgatgccgccaccggcgcgcgttcgccggccctcgtccaccagggcaagatcggcgagatcatccaggccaagcccgagcagcgccgccgcgtgctggaagacgccgccggcgtcgccggcctgcatgcccgccgccacgaggccgagttgcggctcaaggccgccgaaaccaacctcacccgcgtcgaggacgtgatcggccagctctccggccagatggaaggcctgaagaagcaggcccgccaggcggtgcgctatcgcgaggtcgcggccaaggtccgcaaggccgaggccacgctgtatcatctgcgctggatcggcgcgcatgccgacgtcaacgaatccgctcagacccacgacctcgcggtgcgcgaaatggccgagcgcacccagcaccaggccgaagccgcccgcatccaggccatccgcgccgcagaaatgccggcgctgcgcgatgccgaagcgcgcgccgcggcggggctccagcgcctgaccaatgcgcgcgagcagctcgaccgcgaggaagagcgcgccaaggagcgcgtcgccgagctcgagcgccgcctcgcccagttcgagggtgacatctcgcgggcccagcagcagaccatggacgccgacgtcgcgctgcagcggctcgacaccgaggacgccgagctgaaggaagagatcaagtcgcgcgtcgagaagcgctcgggcgtcgacgagcgcgttgccgaagccgaggcggtgctgaccgagaccgagcagcagttcgccgaactcaccaccgcgctcgctgacctcacggcgaagcgcaaccagctcgaagccaacgtccgcacccatcgcgacaagctcgcccggctcgaccaggagatcgcgaacgtcgcagcggaagagcagaagctcgctgaggcgactggcggctttggcgatctcgacgagctgaccgctctggtcgagaccgcggaagagacgctggcagcttccgaagccgcggcgcaagcgagcgaagcagcgcacgttgccgcccgccagaccctggaatcctcgcgctcgccgctggtcgaagccgacaagcgcgtacagcggctcgagaccgaggcgcgcaccatctccaagatcgtcaacggcgagaccaagaatctttggccgccgattatcgacggcatcaccgtcgacaagggctttgaaaaggccatcggcgccgcgctcggcgacgatctcgatgcaccgatcgatccgtcggcgccgatgcgctggaccaatgtcggccacacggaaggcgatccggaactgcccgagggcgccgtgccgctcgccaaccacgtgcaggcgccggccgaactggcgcgccgcctcgcccagatcggcgtggtgccgcgtgagcgcggtgccgagctggtctcgcagctcaagacgggccagcggctggtctcgcccgagggcgacgtctggcgctgggacggcttcgttgccgccgcccacgcccccaccggcgcggcccgccgcctggccgagcgcgcccgcctcgtcgacatcgagaacgagctggagcaggcccgcatcgacgcgcagatcaagcgccaggcgctggaaaacgccgagtccgagctgcagatggccgccagcaccgaaggcgccagccgcgaagcctggcgcgccgcgcagcgcgagctcaacgtcgcgcgcgagcgccatgccaatgccgagcgcgagatcagccgccacgccgcgcgcaaggcgacgctgtcggaagcacacagccgtctcgccgccgaccgcgccgaagccgaagccgcctacgaatacgcccaggcgggcatcggggagctgccgtcgagcgaggacacggagacccgtctcgccgccgtgcgcagcgacatcgagggccatcgtcgcatggcggcccaggtccgcgccgaggcgcaggcgctggcgcgcgaagccgagctcgccgatcgccgcgtgcaggcgatcctcgccgagcgcaccgaatggcagaaccgcaaggagagcgcggcctcccacatcgacaccatccaggcccgcatcgccgaactcacgatcgagcgcagcgaactggaaaacgcgccggccgtgtttgccgaaaagcgcagcgcgcttatcaccgagatcgagtacgccgagaacgaccgtcgcatggccgctgacgcgctcgccaccgcggaaagcgcgatggcggagaccgatcgcgtcgcgaagctgacgctcgaggcgctctccagcgcccgtgaggccaccgcccgcgccgaggagcgcatggaaggcgctcgccgccggctcgaggatatcgagcgcgagatccgcgacatgctggaagtcgagccgcaggccgtcgccggcctcgccgagatcgagcccggcgcggagctgccgccgctgcacgatatcgaggaagacctcgaaaagatgcgccgcgaccgcgagcgcctcggcgcggtgaacctgcgcgccgaggaagagctgcgcgaggtcgagacccagcacaacggtctcgtcaccgagcgggacgacctggtcgaagccatcaagcggctgcgccagggcatccagagcctcaacaaggaagcgcgcgagcggctcctgacctcgttcgaggtcgtcaacaaccacttcaagcgcctgttcgtcgagctgttcggcggcggcgaggccgcgctgcacctgatcgagagcgacgacccgctcgaggccggtctcgagatcatcgccaagccgcccggcaagaagccgcagacgttgtcgctgctctcgggcggtgagcaggccctgaccgcgatggcactgatcttcgcggtgttcctcaccaatccctcgccgatctgcgtgctggacgaagtcgacgcaccgctcgacgaccacaacgtcgagcgctactgcaacctgctgcacgaaatgacgggctcgaccgacacgcgcttcatcatcatcacgcacaacccgatcacgatggcgcggatgaaccgtctgttcggcgtcaccatggccgagcgcggcgtgtcgcagctggtgtcggtgagcctcgccgaggcggtggacatcctcgaccagaacgtggcgtga

SEQ ID NO: 6610 - DNA, 657 bp, BradyrhizobiumColbertium
ttgatcatcccccgccgcgccttcaccacgatgctgtcgctgaccgggctcgccgcgttcgccgggctctcgccactgcgtctcatctcggaggccatggcgcaatcggccgcggatgtcgccaagccggtgtcgctgccggacatggcgctcggcccgaacgatgccgccgtcaccatcaccgaatacgcctcgatgacctgcccgcattgcgcgaccttcaacgagcaggtgttcccgaagatcaagaaggaatacatcgacaccgggaaggtgcgttacattttccgcgagttcccgctcgacatcaaagccgcggccggttcgatgctgtcgcgctgcattgccaatggcgacgcgccgaaatatttcgaggtcaccgacatgctgttccgccagcagaacgactgggtgatgaagaacaccaccgagacactgacgcggatcggcaagcaggccggcctcacccagcagcaggtcgaggcctgcctgaaggaccaggcgctgctcgacaagatcgccgccgaccagaaatacgccagcgacgtgttgaaggtggactccacgccgacgttcttcatcaacggcgagaagatcaagggcgagacctcgttcgaggaattcgccaagaggatcaatccgctgctcaagagctga

SEQ ID NO: 6611 - DNA, 492 bp, BradyrhizobiumColbertium
atgtccaaattccccgccaaacccggccccatcagcgccaagccgctcggcaccttgctcgacgacgtcttcgccgaagcctatgccaagcagggttttgccgcgcgcgagctggtgacccggtgggcgcagatcgccgggcccgagatcgcggcccatgccgagccgctgaagatgcaatggccgcgaccggtggagggccagccgcaggagcctgcaaccctggtgctgcgggtcgagggcccgatggcgctggagatccagcactctgcggacgtcatcctccagcgggtcaatcgcttcttcggctggagcgcggttggcaagctcgccttccgccaagcccccctgtcgcggccccaggcccgaaagcgtcccggtccccccgatcccaaggccgtggcgaaggcggcggagaacctgaccgacatcgaggatgacgacctgaagacggcgctggcgcggcttggggcggccatcaagcgaaattga

SEQ ID NO: 6612 - DNA, 1119 bp, BradyrhizobiumColbertium
atgcatctcaaatcggcccgcaaggcgaaatcggaacccgtcccatcgaaacgttcggctcgtccggtcgcgctcctgcaatggtacgatcgccatcggcgccggctgccctggcgcgccgcgccgggggagacctcggacccataccgtgtctggctctcggagatcatgctccagcaaaccacggtgaaggcggtcggaccctatttcgaaaaattcgtcgcgcgctggccggacgtcacggcgcttggccgggcatcactcgatgacgtgctgcggatgtgggccgggctcggctattactcgcgtgcccgcaatctccatgcctgcgcggtgtccgtgacgcgcgagcacggcggcagctttcccgacaccgaggaagctctgcgcgcgctgccggggatcgggccgtatacggcggctgcgattgcggcgattgcgttcgaccgccgcaccatgccggtcgacggcaatatcgaacgggtggtgtcgcggctctttgcagtcgaggaagaactgccgcaggccaaaccgcttatccagcgattggcggcaacgctgctggcggacagtcgcgccggcgacagcgcgcaggcgttgatggatttgggtgcctcgatctgcacgccgaagaagccggcctgctcgctgtgtccgctcaacgaggactgcacggcgcgtgcgcaaggcacccaggaaactttcccacgcaaggcgccgaagaagagcggagcgttgcgtcgcggcgccgctttcgtcgtcacgcgtggcaacgagctgctcgtccgttcaaggcccgaaaagggcctgctcggcggcatgaccgaagtgcccggctcggactggatcgccggccaggacgacgcggcggcgaagctgcaggcgcccgagctgaaggggctgtcgcgctggcagcgcaaggtgggtgtggtcacccacgtcttcacgcatttcccgctggaactggtggtctacaccgcgaaggcggaggcgcgcgcccgtgcgccggcgggcatgcgctgggtgccaatcgcgaccctggccggtgaggcgctgccgaacgtcatgcgcaaggtcatcgcgcacgggctcgagctttcccgagacccatcgtcctga

SEQ ID NO: 6613 - DNA, 423 bp, BradyrhizobiumColbertium
atggtcaagaccgcgctcgacaattttccaagaccgccctgcgccgagctgctgggctggcggttgctcgacgcccgcccgcaggagggctggatcaagctcggcttcgagggcaagccgcagttctgcaacccagccggattcattcagggcggcatgctctcggccatgcttgacgacaccatgggcccggcggtgctcgtgctgagcgagggccgtctctacaccaccaccatcagcatgaccgtgaactttctcagcccggcaaagcccggtccgatcgttggcgaagccaaggtgacgcagctcggcaagaccatcgccttcgtcgaaggcaagctgatggccgaagacggcaccgtgctggcgacggccagtgcgagcgagcggctgctggaagcggcgagggtggtgggaaagtaa

SEQ ID NO: 6614 - DNA, 1281 bp, BradyrhizobiumColbertium
atgacggtactcatcgccggtggcggcatcggcgggctgacgcttgcgcttagcctgcatcaaatcggcattcccgtgaaagtgttcgagagtgtcgcggaattgaagccgcttggcgtcggcataaacgtgctgccgcatgcggtgcgcgagctgatcgagctcggtctgatggacaagctcgacgccaacggtgtgcggaccagcgagctcgcctatttctccaagcacggcaagccgatctggcgcgagccgcgcgggctggaggccggctacaaatggccgcaattctcgatccatcgcggcatcctccagcagatcctgctcgacacggcggtcgaacggctcggccgggagaacatcctcaccagccaccatctgaccggctggaccgagacggcgggtggtgtgcgcgccgaatttgtggacaaggcgacgggcaaggctgcaggaatttacgacggcgcgatcctgatcgccgccgacgggatccattccgccgtgcgcgaaaagctctatccgggcgaaggcccgccgatctggaacggccgcatcctgtggcgcggcgtgacgccggcgaaagccttcctcagcggccgcaccatgatcatggcgggacacgagatcctgaaattcgtctgctatccgatcagcaagtcgccggatgccgctggcaattatcagatcaactgggtcgccgagcgacatatgcccccgacctatcagtggcggcgcgaggactacaaccgcacagcgcggctggaagagttcttgccctggttcgaaggctggacgttcgactggctcgacgtgcccggcctgatcaggaactgcccgcgcgcctatgaatatcccctggtcgaccgcgatccggtgtcgcaatggacgttcggccgcgtcacgctgatgggcgacgccgcacatccgatgtatccgatcggttcgaacggcgcctcgcaggcgatcctcgatgcccgcgtcatcacccgcgagattctcgcgcatggaccgacgcaagccgcgctgctcgcctacgaggccgagcggcggcccgcgaccaccgatctcgtgctgctcaaccgcaagaacggccccgagcaggtgatgcagctcgtcgaggagcgcgcgcccgacggctttgcagtcgtcaccgacgtgctgtcgcaacaggagctggaagacatcgccgccaactacaagcgcgtcgcgggtttccaggtggaagcgctgaatgcaaagccgccgatcgtgagcaaggatacgaagcgggtggtggcctaa

SEQ ID NO: 6615 - DNA, 621 bp, BradyrhizobiumColbertium
atgctcaagctctactacgccaccggcacctgcgcgctcgccacctacatctcgctggaagaggccggcgccgactacacggccgagcggctgagcttcaaggacaaccagcagaacagtccggactatctcgccatcaacccgaaaggtcgcgtcccggccctggtgaccgatcgcggcgtcctgaccgagacgccggcgatgctggcctacatcgcgcaaatgttccccaaggcgaagctcgcgccgctcgacgaccccttcgattttgccgaggtgcagtcgttcaactcctacctttgctcgaccgtccacatcaatcacgcccacaagatgcgcggcgcgcgctgggcgacgcaggagagctcgttcgccgacatgaaggagatggtcccgaagaccatggcagcatgcttcaacctcatcgagcagaagatgttcaaagggccctgggtgatgggcgatcagttcacggtctgcgatccctatctctacacgctgtccaactggctcgaaggcgacagcgtcgacatcaatgcgacgccgaagatcgccgatcatttcaagcgcatgtcggatcggccagcggtgagcaaggtgatggcggcgcagaaggcgtag

SEQ ID NO: 6616 - DNA, 1011 bp, BradyrhizobiumColbertium
atggcggcatctccgtgtggtgacatcgcaaagaacatcgctgctcgaccggcattcttcaaatcgatagaagatatgatatgtattcacttcatgaatttgaattcgcttgacctgaatctgctgaccgcgctcgacgcattgttgcgcgaggccaatgtcagccgcgcggcgttacggctcggactgtcgcagccggcagcgagccacgcgctccagcgcctgcgcgacatttttggcgatccgctcttggtgcgcaccggcgcgcgcatggagctgactccacgggggttggcgctgcgcgtgccgctggcccagacgctcgaccaggtgcgcggactgttcgtgcctgatgaattcgacgccgcgcgcagcgagcggcacttccgcctgatgatgcccgatctcgccgtcgagctgttgatgccgcccttgatggcgaaggtgacccgcgctgcacccaacgtccgcatcgacgtggtgccgtggcggggacccgcgatttttcatgccgagtttgcccgcaccatcgatctcgtgatctcgatcggcaacgccttcaagggctttcaccgccaattgctctataccgacagcgacgcgctggccgtgcggcgcggccatcccgtcgccggcaagctgaaacagcgggaggcgttcttggccgcgcgccatgtcggcgtcatcatccgcggcaatagtgaggacctgatcgacacatggctgcgagccaagaatgtcgagcgacacatcgcgctggtggtgtcaggctatctcgaagcgttgcacgtcgccgctcgcaccgatcttgttgccttcgtgccacgccggctgatcgccgcgctgtcgaagcaactcggccttacgacggtgacgccgccgctcgacccagggatcgacgagcagttcatgttctacccgacgcgggcgcagatggacccgggctcgatctggctgcggcgactgatgctggagacgggacgagagctgggcaagcaaagggcttcgtaa

SEQ ID NO: 6617 - DNA, 444 bp, BradyrhizobiumColbertium
atgaatgctgccgccaacaagaagctgatgcaggatatctttgccgccgccgccgatcccgatccggccgcgcgcgaccgggccctgttcaccgccagtcttgccgaggacgctaagtggatcgtgaccgggcaatattcctggtcgcgcaccttctcgggcaaggaggccatcctcaaggatctgcacggatatgtgcgcacgcgcctgcgcgaccgaacccgcaccgtggctcaccgcttcatcgccgatggcgatatcgtcgtggtggaagccaagggcgacaacgtcacgcccgagggcgtgcgctacgacaatgactactgcctggtgtttcgcctcgaggacggcaggatcaaggagatccgcgagtactgcgactcgatcctgacggagcaggcgctcggtccgttcccgcaatcgtccatgggggccgcgcgctga

SEQ ID NO: 6618 - DNA, 150 bp, BradyrhizobiumColbertium
atgaatttcccgaagacgcagattgccgcgggcgacgcgcgcccggagacaaaaaaacgccggcggaacgcaaaggttccgccggtgctcgcctgcgaacaggccagagatcccgggtccggcgctctatttccgtcgaacgctttttga

SEQ ID NO: 6619 - DNA, 552 bp, BradyrhizobiumColbertium
gtgggccacagcttctccggactccgcgaacgactgagggaagcaacgtcggctgcgcaccgcgacctcgacgcgcagctttccgggttcgatctcacgagccctgcgggctatcgcctctttcttcaagccagcgccgccgcgctgcttccgctcgaggccgcgctcgttgcggccggagtcgagcggatctttccggactggctcgaacggtcgcgcagcgccgcgatcgttgccgatctttggtgccttggcagcagcgtgccccgaacggtgcctgttccgccgctgacacgtagcggtgtgctgggcaccatgtatgtgctggagggctcccggctcggtgcgaaattcctgctgaagtcggtcacagacgcggctgatccgcgcctgagcggggcgaccgggtatctcggtcacggcgccggcaaacggctatggcagagctttctgacgaagctcgcaactgaagagcctcgcgacggggacgaggtgatcgtggcggcgcgcactgccttcgccgcattcgagcgggcggcggagcgggcatga

SEQ ID NO: 6620 - DNA, 2547 bp, BradyrhizobiumColbertium
atgaacgaagcggtcaatctcaccaattgcgatcgcgagccgatccacattcctggcagcgtgcagcccttcggcttccttttggctgtgctctcggatttcacgatctgcatggcctcggagaacgtcggcagctttcttggaggcgacgtcgcgggcctgatccagcggccgttatcgaccgtcatctccgaagctgccgtcgaaaacattcgcggccgcgtcgaccatttgagcgggccggatgccaccgaacgactgttcggaatcgagctccaggccggcaagccgctttacgatctctcgattcatttctccggtgtctacctgatcatcgaagcggagccgagcgtccacgagaccggcgtcaattccggcgagctcgttcgcttgatgctcgagcgaatccgcaagacgcgcggcatgacggatcttgcgcgggaggcggctcgccagctcaaggtgctgaccggtttcgaccgggtcatggtttatcagttccatcccgacggctcgggcgaggtgatcgccgagaccgcggaggccgggctcgaatccttcctcggcctgcgctatcccgcatccgatattccgaggcaggcacgggcgctctaccagcgcaactggttgcgcatcatcgccgatatcaatgccgggccagcgacgctgatgtcgacggccacgcacaacgcggggctgctcgacctttcgatgagcgtgctgcgctcggtgtcgccaatccatatcgaatatctgcgcaacatgggtgttgccgcttcgatgtcggtgtcgatcctgcgcgacggcaagctgtggggtctgtttgcctgccatcattattcgccgcgttatatttcgttcgacaaacgcaccgcctccgagctgttcggacagatgttctcgtggattgtggaggggcgcgagcgcgagagcgacgtcgcttatgaagcccgcgctcaccaggttcaggagcggttgatcgagatcgcggcctcgcacgagcacagccggcgcgcgatcgtcgatttcctcggcgactatcgcaggatggtcgatagcgacggcgtggctgtctggtcggacaacaatatcgcgctccaaggcgagacgccgaccgaggacgaggtgaaggacctcgtcgccttcgtcaaccggacttcgcccgggcggatcttcgccaccgccgagatcgccaaggtctatgccgccgggcaggccttccgggaccgcgcggcgggctttctcgccatcccgatctcgcgcacgccgcgggactgcctgatcttcttccggcgagaggtgacgcggtcggtcaaatgggccggcgatcccaataaagtttatgatgaggggccgaacgggccgcgactgacgccgcgcaagagcttcgagctctggcaggagacggtggcggggcagtcgaagccgtggtcggccgccgacatccgcatcgccgagagcctgcgcgtcaccctcctggaagtgatcctgcaactgtccgacctcgccgcgcgcgagcgccgcggggcgcaggagcgccaggaactgatgatcgcggagctcaaccatcgcgtccgcaacattctgagcctcgtccgcgcgctggtggcgcagagcaaggatacggcaaccagcgtggaagaattcgccagcgtgctcggcggccgcatccaagcgctggcgcgcgcccacgaccagatcacaaacctgaactgggccccggtcgcgctccgcaccctggtcgagtccgaggccggcgcctatctcggcgcccgcgcggaacgggtgaagatgggcggcccggacgttgcgctcgatcccaaggcctttgcaacgctggcgcttgtcgtgcacgagatgatgaccaattccgccaaatatggcgcgcttgccgattccaccggaagcgtcgaggtggtctggcgcctcgatccgtcctcgagcctcgtcatcgagtggaaggagagcggcggtccgccggtgcagccgccgtcgcgacgcggcttcgggaccacgatcatcgagcgatcggtgccgttcgatctcaagggcgatgccgaaatccgcttcgatctcctgggcgtgcaggcaaagttcgtcatcccgccaaacttcgtcgaattggtaccgtccatcgcaggagccgccatgcgcgtcgaggaacagcaatccgcccggcccaggatttccgacaccgcgctgatcgtcgaggacaatctgatcatcgcgatggcggctgaggtcatcctgctcgatctcggggcccgccatgtcgacaccgccgcaagcgtcgaccaggcactgcggtcgatcgaacgctcgcgaccgagctttgccctgctcgatctcaacctcggcagcgagagcagcatcaaggtggctcataagctgaaggagatcggggtgcccttcatcttcgcgacagggtacggcgagcgcgcgccgattccggagcagctggcgtcggcgccggtggttcagaagccctacacgctggaagtggtggagaacgcgctcggcaaactgcagcaggcgaacgcccaataa

SEQ ID NO: 6621 - DNA, 2010 bp, BradyrhizobiumColbertium
atgccgaaattgcgtttgcggatcaggggacgcctgtacgcaggcttcatggccctggtggtggtcggtctggtgatggcagttgttgccgtctggaatttgcagggcgtgcaggatcaggtcgcaagacaatccgcgctctcggacagcacggcgagagtgctggaaatatcagcccatttgcaggcgatccagcgggccaacctgcgctacgtctacgatgccagtgagcccgcgatgaaagaggcgcaagagcgggaaaccgcggcgaccgagctgttgcgggtcagcgcgaagggggcgctctcggaggaacggcgagcgctctacaacggcctcatcgacgacatcgccaaaatgagacgcctgcgtgacaatctcggcgacgccgtcaacgagaccagaacgggcaaggcgaggctgctgccgagtggggaggagctggccgccaagaccggcaagctcgtcgacgtggcgcgcgccgccgtggatgaagatacggcggccctcgttgccgatctcgaatcgagaatcctgctcgtgaggatcgcgaactggcgttttctggcgctccgcgataccaagggcccagcgaccttcagggcgagcgtcgacagggcagcgcaacggctcgcggcacttgaaaagagcccgcaggcggtggagctgcgagctgcgctggcgccggtgaagacctcgctcggaatctacaaatcggccttcgaagccacgtccgcagcgatgcttcaggccgacgagatctaccacaagagcctcgcgcctctcatcgcggacagcatcggcaaactcaaggttgcggagacgacgctaaagaaagactaccaggaatcgcggacgaacgccgacgccgtgatcgccggcacgaccaccgttcaggagatcgccggtggcctcgcaatcctgttcggcggcatcgtcgccttcctgatcgcccgcagcatcgtcggtcccctgacctcgatgacgcaagcgatgggacggcttgccggcggcaatctcgaagtcgagattcccggccgcggcagggccgacgaaatcggcgacatggccaaggcgattcaggtgttcaaggacaacatgatcgacaccgaacgcatgcgcgccgagcaggccgagctcgaggcgggccaggccgagaaccgcaagaaggatatggccagacttgccgatcagttcgagcaggcggtcggcgagatcgtcaacacggtgtcatcggcctcgagcgagctggaggcctccgcaggcactttgaccacgactgccgcgcgcgctcaggacctctcgacggaggttgccagcgcgtcgcaggaggcttccgccaatgtgcaggcggtcgcctcggcgaccgaggagctgtcctcatcggtctccgagattgcgcgccaggtgcaggagtccgcccgcatcgccaccgaggccgtcggtcaggcgagccggaccaacgagcgcgtcggcgcgctctcgaaggccgccgcgcggatcggtgacgtggttgagctgatcagcaccattgccggccagaccaacttgctggcgctgaacgctacgatcgaggccgcgcgtgcgggcgaggccggccgcggctttgcggtggtcgcctccgaggtcaaggcgctcgccgagcagacggcgaaggcgaccggcgagatcgcgcagcagatctccggcatccaggccgcgaccgaggaatcggtcggctcgatcagggagatcagcgtcaccatcgagcggctatcggagatttcgtccgcggtcgcagccgccgtggagcagcagggtgctgcgacgcaggagatctcacgcaacgtccagcaggcggccgacggcacgcagagggtatcgtccaacatcggcgacgtgcagcgcggcgcttcggaaaccggatcggcctcatcgcaggtgttgtcggcagcgcgttcgctctcggccgacagcaaccggctgaagcaggaagtggccaagttcctgaactcggtccacgccgcctga

SEQ ID NO: 6622 - DNA, 681 bp, BradyrhizobiumColbertium
atgctcaagttctatttcaacggatcgccgaatccgaccaaggtcgcgctgtttctggaagaagcgggacttccgtaccaaccggtcaaggtcgatacccgcaagggcgagcagttcgcgccggactatctgaagatcaatccgaacgggaaggtgccggccatcgacgacaacggcaccatcgtgttcgattccaacgccatcctgctctatctcgccgagaagaccggcaaattcctgccctcgaaccgcgccgaattgctgtcatggctgatgttcgtggccaccggcgtggggccgtattcgggccaagccgtgcacttcaagcacttcgcgccgaaggaccagaaccacgactacgcgcataaccgctatcagtacgagaccgatcgccattacaagattctcgacgatcatctcaagggccgccgctacatggtcggtgaggactattcgatcgtcgacatggcgctgtggggctgggcgcggatggtgccgttcaagctcggcgacgacgcgttcgcgcgctaccccaacgtgaagcggctggtcgacgagatctcggcgcgcccggcggcagcgcgtgcggtcgcgctgaaggacaagttcaccttcaaggccgagatggacgatgaggcgcgcgccaacatgttcaagcacttgacaacaaaggtcgcctga

SEQ ID NO: 6623 - DNA, 1035 bp, BradyrhizobiumColbertium
atgtcgaagcttcaggcaggtagcgtcgatctggtgttcgcagatccgccctacaatctccagctcaagggcgatctcaagcgccccgacgaatcccatgtcgatgccgtcaatgacgactgggacaagttcgattcgtttgccgcctatgacgatttcacccgggcctggctgctggccgcccgccgcgcgatgaagccgtcggcgacgatctgggtgatcggctcctatcacaacatctttcgcgtcggcgcgatcatgcaggacctcggcttctggctcctgaacgacatcgtctggcgcaagaccaacccgatgccgaacttccgcggccgccgcttcaccaacgcgcacgagaccatgatctgggccgcgcgtgacgagaaggcaaaaggctacacgttcaactacgaggcgctgaaggcggccaacgaggacgtccaggcgcggtccgactggctgatcccgctctgcaccggcgaggagcgactcaagggcgccgacggcaagaaagtgcatccgacgcagaagccggaaggcctgctcgcgcgcgtgctgctgtcctcgtccaagcccggcgatctcgtcatcgatcccttcaacggtaccggcaccaccggcgccgtcgcaaagcgcctcggccgctcctatatcggcttcgagcgcgacaagacctatgcgaaggctgcggaagcgcgcatcgccaaggtcgagccgctaccggaagagagccttgccccgttcatgaccgcgcgcgaagcaccgcgggtggcgttctcggagctgatcgagcgcggcatgatcatgcccggcacgaagctgttcgacgccaagaagaagctgggcgcgctggtgcgcgccgacggcgccatcatgctgggcgacaaggtcggctcgatccaccgcatcggcgccgtggcgcaaggcgcacaagcctgcaacggctggaccttctggcacgtcgagaccaagaagggcctcaggctgatcgacgagctgcgcgccgagatccgcgcgggtatgggcgcggaataa

SEQ ID NO: 6624 - DNA, 942 bp, BradyrhizobiumColbertium
atgcgctacgatgacttccgccgcagcgacgacatcgaggatcgtcgcgacgaaggtggcggctttggcggcggcggaggaggcggcttcggcctgccgatgggcggcggcgggctcggcatcggcaccatcatcatcctcggcctggtcggttacgccttcggtatcgatccgcggatcctgatcggcggcgccgagattctgaccggcggcggccatgcgccgagctatcagaccgatcgtcaggcgtcctcgggcaagcgcggcgcgccgaccgacgagatgggcagcatgatctccggaatcctcggcgaactcgacgatcgctggagcgagatcttcaaggccaacggacagtcctacaccggtccgaagatcgtgctgttccgcaacgccaccaatggcggccgctgcggcatggcacagtcggcaatggggccgttctactgtccgcccgaccggaccatcttcctcgacacggccttcttccgcgaagtcgagacgcgctttcgcggctgctccggcaagtcggcgtgcaatttcaccaccgcctacatcatcgcgcatgaagtcggccatcacatccagaacctgctcggcatcattccgcgcgtaacgcggctgcaacagcaggtcggctcgaaggccgaggccaacgcgctccaggtgaaggtcgaattgcaggccgactgcctgtccggcgtctgggtcaaccgcgaggcgaagaaacgtccgaacttcctggagcccggcgacatcgaggccgcgctgaccacggcgagcgcgatcggcgatgatacgctgcagcgccaggcgacgggccgcgtcgtgccggattccttcacccacggctcggcggcgcaacgcaagcaatggttcatgaccggctaccagcagggcacggtccaggcctgcaacacgttcggcccgggagcgttgtag

SEQ ID NO: 6625 - DNA, 564 bp, BradyrhizobiumColbertium
atggcttccatcgacgcgacaaaacagttcatcccgctcaacatcgcggtgctcaccgtatccgacacgcgcgcgctcgccgacgacaagtccggccagacgctggtcgaccgcctcaccgcggccggccatcatctcgccgcgcgcgagatcgtcacggacgacgtcgaggcgatccgggccgtgatccgccgctggattgccgatggcggaatcgacgtcgtcatcaccaccggcggcaccggttttaccggacgcgacgtcacgccggaggcgatcgagccgctgttcgagaagcgcatggatggtttctcgatcgcgttccacatgctgagtcatgccaagatcgggacgtcgacgatccagagccgcgccaccgcgggcgtcgcgggcgcaacctacatcttctgtctgcctggctcgccgggcgcctgccgcgatggttgggacggcatcctcgcagcccagctcgattaccgcacgcggccctgcaatttcgtggagatcatgccgcggctggacgagcatttgcgccggccgaaggcgcaaggcgcgacggtgtaa

SEQ ID NO: 6626 - DNA, 954 bp, BradyrhizobiumColbertium
atgacatcccagctatcagatccggcggccgaacaggtcgcaaacgcgcagatcgcagccgtccgcgccttcaaccgcttctatacccgcaagctcggcgtgctcgaccagcacctcggcaagagtcccttttcgctcagcgaggcgcgcgtgctctacgaactggcgcagcgcgaagagcttgcagcaaaggagatcggaaacgagcttggtctcgaccccggctatctcagccgcatcgttcagggcttcgacgagaagggactgatttcgcggaaaccgctcgccacggatcgcaggcaataccagctcagccttaccgccaagggccgccaggcctttgccaagctgaacctcaactcgcagaacgaggtcgcagcaatgctggctcgggtctcgcccggcgatgcgacgcggctcacgcaggccatggcaaccatcgaggacgtgctggagcaacgtcaaagcaggcccgcggctttcatgctgcgcagccaccgcgtcggcgacatgggctgggtcatctcccggcaggcgatcgcctacgcggaggactacaactgggacatcagctacgaggcactggttgccgagatctgcgcgcagttcatcaagaactacgatgccgcgcgcgagcattgctggatcgcggaagcgggcggcgagccgatcggctcgatcttcctggtcaaggccaccgacgagaccgccaagctgcgcctgttgcaggtggagaagaaagcacggggactcggcgtcggtcgcgcgctggtcgagcaatgcatccagggcgcccgcgagcggggctacaacaagatgacgctgtggacgcaaagcgtcctggttgccgcacggggcatctatcagagcgcggggttcaagctcgtcgcctccgaaccgcaccatagttttgggcaagacttgatcggggagacctgggaaatggacctgtga

SEQ ID NO: 6627 - DNA, 567 bp, BradyrhizobiumColbertium
atgctgagcgtcatcattccgaccgacggtgtcgagcagacggcggtagcaaccctggccgcgctggtccccggcgcggctgcgggtgtcatccgcgaggtccttctggtcgacggtgcgcgcaacggcgtcatcgagcgcgttgccgacgtcgccggctgccgcttcatcggctacgaggggtcctcccaaggcgctgcgctcgctgccggcgcgctccaggcccgatcgccgtggctgatgttcctgccggccggcgccgtgctggaaaccggctggatcgaagaaaccacccaattcatccaggccgtcgccacgagcggccgggatcgggcggcagtgttccgctatgcccgttccccgtacgctgataccgcaatgcgcgacattctctggggcgtactgcgcaagctggtcggtccgctcggcgatcaggggcttttgatcgcgcgtgaccattacgaccgcatcggcggctatccgcccccgcccgccattccgaggcacggctgctccggcggctcggccggtcgtcccggaccatgctgcgcagccggatcgtcatga

SEQ ID NO: 6628 - DNA, 840 bp, BradyrhizobiumColbertium
atgaacgccgatcagcttgccgcaggcacggcgccgacgtcgccgaaggaggccgcgccgaccttgcggatccgggcgctgatgctgggcgaccgcatcaatgcgtcgggcctggaaatcggcacgctcgtgtcctcgacgccggctgcctttcgcgtccatggcggtcttgccgtgatctttcgctacggcgtcgtcgtgctgattgggctgcttccgtccgaggagaaggtccttatcgacaatctgaagccgcgcgtgaccggagagctcagcccgtacgaggaggagatcgcgcaggcgcagctctgcaacgacgaagccgcagaggcgatccagccgggagggccgatctgccttgccaaattctccgacgaccggctgctgctggttgcggatgcgctcgccaagagcacgtcgctggcgcgcgacgagcggcgcgtcgccgcggtcttcgacgtgatcgagccgtttgcacgggagctcgccgagcatggccgcacgccgcaacggcgcaagggcatcctgcaattgatcggcaacgcgctgctggtgcagcagcgcgtcgccggccgcgtcgccatcgccgagaagcccgacgtgctctgggagaagcccgagctcgaccggctctattcgcgtctggaggacgagtatgaattgaaggagcgcctcgacacgctcgagcgcaagctctccgcggtgtcggagaccgccaacgcgctgaccgacatcatcgacacccagcgctcgctccgcctggagatcgccgtcgtggtgctgatcctgatcgaggtcgcgatggggacttttcagctcctgaccggccgcggtcactag

SEQ ID NO: 6629 - DNA, 1608 bp, BradyrhizobiumColbertium
atgcatatcgtgcgcatcggcgctgacgccgccgaattgcggcctgccgaagagatcggcgccaaggccgccaatctggcccgcatggcagcgctcggcctgccagtgccgcctgccttcgtgctcccggtcaagctctgcgccgagatcatcgccggccaggcgcatgccacgcggcacctgcgcgatggcttgaaggagggaatatcgttcctggagagcgccaccggaaagcgtttcggagaccgccgacggccgctcctggtgtcggtgcgctcgggagcggcgcgatccatgccgggcatgctcgacaccgttctcaatgtcggctgcacggtcgacgccgtgcacggcctgatccgggcgaccggccggccgcggctcgcctgggattgccggcgccgcttcctggagagctttggcgagacagtgctcgagctcgaccaggccagctttgccgcatgcatctcggagctcgtcgcagccgaacacgtcgacagcgaccgcgagctcgacagcgaagcgctcgagcggctcgccagccgcgagcaggcgctggtcgaggatcgcgccgatggcctgctggatgatgcgttcacgcaattggaggccgcagctcaggcagtctatcgctcctggatgagcgagcgtgcgctgacttatcgaagcctccagcatctcgaagcgctcgagggcaccgcggtgaccgtgcaggcgatggtgttcggcaacggcggtcttgcctccggcgcgggcgtggccttctcccgcgatccgtcgaccggcgcgccgcgcccgatgatcgacctcgtgctcgatgcgcagggcgaagacgtcgtttccgggagacgcgcgcctgatgctgccgaggcgatcaagcgcgagctgccgaagctcgaatcggagcttggcgacatcctgaggcgactcgagcacgcattcgtcgatgtccaggacgtcgagttcaccgtcgagaacggcaggctctggatcctccagacccgggcggccaagcgcacgccacgggccgccgtcaggatcgcgatcgacctcgtgcatgaaggcttgatctcgaaggcggaggcattgcagcggattgctgggatcgacctcgcctcgctcacagaaaccagattggttgctccgggcaggcccgcgacgaccggcatcggcgcctcgggcggcatcggcaccgggcgtgcggcgttctcgtcggaatgcgcccagcgcctttcggcggggggcgagccggtcatcctgctgcgtcccgacaccagcactgccgatgtcgcaggcttcgcgcttgctgccggcatcgtcacatcggtcggtgcacgtacctcgcatgcggccctggtggcgcgacaaatgggcaagccctgcgtggtcggctgccgtgatctgaagatcgatcccatcgcgaagcgggcccagctcggcaatctctcacttgccgaaggcgagtggatcacgatcgaaggcgacgccggagagctctatctcggacgctgcgagacgatccggacacggcccgaggccgcgcttgccgagattgcggcgtggcaggcgcaagccggccagcatgacaggcgcgccgccacgccttga

SEQ ID NO: 6630 - DNA, 1929 bp, BradyrhizobiumColbertium
atgaaaacccacatcatcgaagagctcggacaaggcggcatcctgctgcccgcgctggtggcggaagggctggccgccaacgaccgcatcaaggtgcggatgagcgcgttgcaggcggcggccctgcatgcgcaggagcccggccggcctgcgaatgaccttggtgtcgaaagtcagactgcaggcatcgctcccgcggccatcgcggcgctgatcggcggcgcccatctgatcggacaaggccggctcgcggctcccgatcttgcgaagatgatgcaggagattgcggacgatgccgcggccatgatccgcgccgtcagcgccggcgcggcaagcgaaggcgagagggcacaggcgcggctcgaggcgatccgcgcagccggtctgctccatgcgagcggcgagatcgagctctcgcgcatcgcacgcctgaccggcgtcggcgacgcaggcggtgacagcctgcatcgtctcgtgatggatctgcacaagcagctcaacaggcttgccgcaagctgctcggaagaagcgctcgacggcgcccatgtcttcggcctgcacagcgaggaccggccggcggtcgcagctttcatgaagggcctgaacgcgacgcgaggtctcaagttcgatcatcccggtctcgacaccatggctacacgcgccggcggccggctgctcatccagaacgatatcggcaccacggacgcccacgtcgtcgtgatcgcggtgaagaagaacgcggtcaccgtcacctacaccgatgtgcatctggcgcgggcgaagttcttcatctcgctgttcgacgcattcgaggcgacgtggagcgggctcgatcgtcacaccgcagcgggccttggcgacgacaattccttctatctcgtcaccgggcagtatcagccggaccacgctgccgatcgcaacgaattcctcgcggcgctgggtgccgcactggtctttctgatcgactggaacaaggcgcgcaagctgctcaggacctgggttgccaaggacgacgcggcacgcatcctggaatgggcggcgcgtcagcggatcggccatcgcggctttcttgaactcggcggcaacgatctgctgggatctgccgtccgaaacgccgcccccacgcggatcggcttcggcgagcggctcgatcaggcgctcggccgcaccgccgcaatcgattttctgaaggcatcgttgcgagcctcaaccgaggcattgcttgcgggccgatcggtcaggacggtgcgcgaccagatcgaagccgatctgatgcggcacctggatcgcgtcgacggcgcactgctggcggcggtgctgcgtcagatcggcctcgcccatgatctcgtcgccgccatctcacgtcacattgccgcgctgcaagccggtcagcccgccgacggcaagctgctgacgcaacgctgcggcatgatcgagcagaaggcggacagaatcgcgatcgagagtcgcaacgaagtcgatcgcctcaatgcccgcccgctgatcggccaattgatcgatcgcgtcgaggaggctgtcgacgagctggagcaggccgcattcatcgcgtcgctgatgccggaaacgactgatccggccctgctggcatcgctggtcgagctttgcgcagtggccgcgaccgcaaccgacgtggccgcgagcggcgtcgccgctgcgatcgacgtgccggaaggtcggcgcgccgattccgaagacgcgctctccgctgtgacccgcctcatcgacgccgaacacgccgccgacagccgcgaacgcgcgacgaccgcactggtcttctgcggcggcttcgacgtcgcgacctcgctgtcggtgatcgagctcgcccgcgccgtcgagcgcgccaccgatcgcttcgccgcgtttggccacctgctccgccgtcacatcatgatcgatctcgcagcttga

SEQ ID NO: 6631 - DNA, 1191 bp, BradyrhizobiumColbertium
atgtcggacacggtcctcgtcctcaactcgggatcgtcgagcatcaagttcggcctgttcgatgtctcgggaaccgagcctgccctgctttgcaaggggcttctcgacgagcacgacgcaaaaccccggctcgtggtgaagggccccgcggacgaagacctgttcgagacccggagggaggtttcggacgccgatggcggccatctgttcgccgaagtgctcgccttcatcgaggaccgcttcggcaaacgcagcctccgcgccgtcggtcaccgcatcgtccatggggggcccgactattcgggcccgctgatcctgacggacggcatcaccgcaaagctcgaggggctgacgccgctggcgccgctgcaccagccgcgctgccttgcgccggtccgcacgctcggagcgatccggcccgggctgacgcagatcgcgtgtttcgacaccgccttccatcacggcctggcacccccggcgcgccgcttcgccattccaaggcgcttcgaggcgcgtggcgtcaggcgttatggctttcacggcctctcattcgaatatgtcgcgggccggctcgccgagatcgcgccggaactcttcgcaaagcgcacggtgatcgcccatctcggcaacggcgccagcctctgcgcgttgcgcgacggccgcagcgtcgacaccacgatgggactgacgccgctcgatggcctcgtgatggggactcgctgcggcacgatcgatccgggcgtgctgctctatctgcagcagcatgagaacatgtcggtcgaggagatccagcgcctgctctatcacgagtctggccttttcggcgtttccggcatctcggcggacatgcgtacgctgctcgcgagcggcgaggttgcggcgcgggatgcggtcgatctcttcaccttccgggcggcgcagcaggtcgcgatgatggcgaccacgctcggcggcctggactgcctggtcttcactggcggcatcggcgagcatgccagggaaattcgcggcgcaatcagcgagcgcctcgcctggatgggcgtgcgcatcgatgttgcggcaaatgatgctgcgcgcgagcgcatcgacggcagcggcagcaacgtcgatgtcttcgtcattcccaccaacgaagagatgacgatcgcgcgccattgcgccgctctgatccgtgaacgtcgtgtcacgtga

SEQ ID NO: 6632 - DNA, 2415 bp, BradyrhizobiumColbertium
atgacaattcaacgaaaagcggccgccgcgaccggcgacctcgatctgctcgatcgctattggcgcgccgccaactacctctccgtcgggcaaatctacctgctcgacaatccgctgctgcgcgagccactacggcccgaacacatcaagccgcgtctgctcggccattggggcacgacgcctggcctgaacttcatctatgcccatctcaatcgcgtcatctgcgcgctggatctcaacgtcatctacgtctgcggtcccggccatggcggccccggcatggttgccaacacctatctggaaggcagctacagcgagatttatcccgacgtcgcgcgcgatgcggacggaatgcgcaagctgttcaggcagttctccttccccggaggcatcccgagtcatgcggcgccggaaacgcccggctcgatccatgagggcggcgagctcggttacgcgctggtgcacgcctatggcgcggcgttcgacaatcccgacttgatcgtcgcctgcgtcgttggcgacggcgaggccgagaccggcccgctggccgcgtcctggcattcgaacaagttcctgagcccggcccatgacggcgcggtgctgcctatcctgcatctcaacggctacaagatcgcaaatcccaccgtcctgggacggatgcccgacagcgagatccgtgatctcttccgcggtttcggccatgagccgctattcgtcgaaggcgacgaccccaaattgatgcaccaggccatggccgatgcgctcgacgtcgcgttcgtcagcatccgctcgatccagcagcatgcgcgggacggacgcagaagcgtcgagcggccgcgctggccgatgatcgtgctgcgcagcccgaagggctggaccggtccgaaggaggtggacggcaagaaggtcgaagggttttggcgcgcgcatcaggtgcccgtttcagcgtgccgcgagaacccggcgcatctgaagatcctcgaggactggatgcgcagctaccagcccgaagagctgttcgatgccagcggagcgctcattcccgagcttcaagcgctcgcgcccgaaggtgtcaggcgcatgggcgccaatccacatgccaatggtggcctgctcaagaaagagctgaagctgccggactttcgcagcttcgccgtggacgttccacagcccggcgaagtcattgcggaagcaacgcgcgaacttggcaaattcctgtgcgaggtgatccgcctcaacgcgaaggagcgcaacttccgcatcatgggaccggacgagacggcgtcaaaccggctggacgccgtattcgaagccaccgaacgcgtctggatggagccgaccgagccctacgacgtgcacctcgcccaggacgggcgcgtgatggaggtgttgagcgagcatctctgccagggttggctcgagggctatctcctcacgggacggcacggcttcttctcctgctacgaggctttcatccacatcgtggattccatgttcaaccagcacgccaaatggctcaaggtgacgcgggatctgccgtggcgacgcccgatcgcctcgctcaattatctcctgacctcgcatgtctggcgccaggaccataacggcttcagccaccaggatcccggcttcgtcgatctggtcgccaacaagaaggccgatatcgtccgcatctactttccgcccgacgccaacacgctgctatggatcgccgatcactgcctgcgtacctacaaccgcatcaacgtgatcgtcgccggcaagcagccggcgccgcagtggctctcgatgcaggacgctgcgacccattgcgctgccggcatcggcatctggggctgggccggaacggaagacggacagggtgagcccgacgtggtcatggcctgcgccggcgacgtgccgacgttggagacgctcgccgccgtcgacctcctgcgcaaggcgctgccggacctgaagattcgcgtcgtcaacgtcgtcgacctgatgactctgcagccaagggagcaacacccgcacggcctctccgatcgcgacttcgacggcctgttcacgcgcgaaaagccggtgattttcgcctatcacggctacccctacctgatccaccggctgacctatagccgcaccaaccatgccggcatgcatgtgcgcggctttgccgaggaaggcaccacgacgacgccgttcgacatggtcgtgctcaacgagctggaccgctaccatttggcgatcgaggcgatcgaacgcgtgccggggcttgcgaccaaagccgcgcgggtgaagcaacagttccgcgacaagctgatcgagcactcccgctatgttcgcgagcatggcgaggacatgcccgagatccgcgactgggtgtggcaaaacagtgccggcggcaacacgccggccgaagccggcgactag

SEQ ID NO: 6633 - DNA, 1185 bp, BradyrhizobiumColbertium
atggcgtgctatcttggcttcatgagtccagcatcctctcatgctctcaagcacccgccggtcacggcgccctccgagccggcgggtgcgccttcagatttcccggagcttggcgtcgccatcgaccgcgtgcgccggcgagggcggggcgcccagtccaacgtcagcggccgctacgagcccgaggcccgcgtcgccttcgatgacggctggcagagcctggaacagctgccgcccttcaagaccacggtcgccatcgacacctcacgcaaggtgatcacccgcaacgactcgcccgacatcggcttcgaccgctccatcaatccctatcgcggctgcgagcacggctgcgtctattgcttcgcgcggccgactcacgcctacctcggcctgtcgccagggctggacttcgaatccaagctgttcgccaagcccgaggcgccggcgctgctcgaaaaggagctcgccgcgtcaggctatgagccgcggatgatcgcaatcggcaccaacaccgatccgtaccagccgatcgagcgcgagcgaaagatcatgcgcggcatcctcgaggtgctggaacgcgccggccatccggtcggcatcgtcaccaaatcagccctggtggtgcgcgacatcgacattctcgcgcggatggccaagcgcaatctggccaaggtcgcaatctccgtgacctcgctcgatccgaagctggcgcgcaccatggagccgcgggcctcgacaccatcaaagcggctcgaggcattgaagcagctctcggaggccggcattccgacgaccgtgatggttgcgcccgtgattcccgcgctgaatgattcggagatcgagcggatcctcgatgctgcggcccacgccggcgtcaaggaagccgcctatgtgctgcttcggctgccgctcgaggtccgcgatctcttccgcgaatggctgatggcgaactatccggaccgctatcgtcacgtcttcacgctgatccgcgacatgcgtggcggacgcgactacgatgcgaaatggggcgagcggatgaagggcaccggaccgatggcttggaccatcggccgccgttttgagatcgcctgcgaaaggctcggcctcaacaagcggcgctcgaagctgacgacggatcatttcgcgcggccgaagcggaacggcgatcagctcagcctgttttga

SEQ ID NO: 6634 - DNA, 456 bp, BradyrhizobiumColbertium
atggttaaggagctcgccgtgcctgtgccgcggctgaccgtcatcacgctgggtgtgagcgacatccgcgccagcatcgccttttacgacgcgctcggcttctcacgccggctgaaggtaacgggggaggcggtcgcattctacgataccggtggggcggtgctcgccttgtatccgtgggatcagctcgcggcagacgcgaccttgccggaccagccgcggccggcggcctttcgtggcgtgacgctcgcatggaactgccggacgcgggaggaggtcgatgcggtgttggcctttgccctcaggaagggggcctccttgctgaaagccgcgcacgagacccactacggcggctattccggctattttgccgatcccgacgcacatgcctgggaagtggtggtcgcgccgggcatcgaggtgggcgacgaccggcgtgtgcatctggcggagtag

SEQ ID NO: 6635 - DNA, 873 bp, BradyrhizobiumColbertium
atgattcgggacaagtccgccaggaacccagccaaagacgcgcccaagaaggaggctgcggggaaggttgcgcctgcgaaggcggccaagacgcctgcggccaagacctctacgggcaaggctccgaagcttgctgttggcaagagagggatcatcgccattgctccccccagcttccggcgtgagcgcgcgctgatcaagcgcggcatctggccggtcgcggggtgcgacgaggccggtcgcggaccgcttgccggccccgtggtggcggcggcggtgattatcgatcccgaccgcatcccgcgcggcatcgacgattccaagcggctgaccgccggggagcgcgagaagctgttcgacaagatctgcgccagcgcgcaggtgtcggtcgccgtcgcctcgcccgcccggatcgaccgcgacaatattctgcgtgcctcgctgtgggcgctgaagcgcgcggtggtcgcactgcccgagccgccgaggcacgtcttcgtcgacggccgcgaccggctcgacaccgaatgcgactgcgaggccgtgatcggcggcgatggtatcgtgctgtcgatcgcagcggcgtccatcatcgccaaggtcacccgcgaccggctgatgtgcgcgctggcgcaggactgccccggctacggtttcgagcagcacaagggctacgccgtgcccgagcatctcgacgctctcgatcgtctcggcccctccattcaccaccgcagcttcttcgcccccgtcgccgccgcccgcgccaagcacatgccgtggaccgtcgagccggtgcaggatctgttctcggtggtcgatgcagaggtgcaggtggaggcgagcgtcgagattgacgcggctgccagcctctag

SEQ ID NO: 6636 - DNA, 1509 bp, BradyrhizobiumColbertium
atgcggtttacctccctggtcatcgagctcattcgcgcccggccgcggctgatcgtctggatcgccgtgctgctgcaggccgcgatgtggctgtttgtggcgctggtgttctatcgcagcccgcccggcaacctcgcgaccctcctggccttcggcagggaataccaggtcggcaccgatctcggcccgccgctgccggtctggctcgctgacatcgcctatcgcgccgccggcggccacatgttcggcgtctatgtgctcgcccagctctgcgagatcgcggccttcatcgcactctatcatctctcacgcgccgtggtcggttcgcagcaggcggtgctcgccgtgctgctgaccatgacggtgctggccttctcctcgcctgcgctcgacttcggccctttggtgctggcgcggccgctctgggcgctgttgctgctgcactcctggcagatcatcggtcaacgtcgcggcaatgcctggttcgcctggtcgatcgaagcggggctgttgctgctgaccacacctgcggcgatctttctcctcctgctgatcgtcgtcttcgcgctctcgaccgccgggggccgccgaacgctgcgcgggctcgatccgctgtttgcgctgatcgttgtcgcggtgctggcactgccctatgcggtgtggctggtgcgtgccgagacattgaccatgccggcactgccgcaagtatcggagctaaaagcccgcgcgctgcacgcggcctggctgttgggcgggctggcgctcggggcggccgccatcccggcgctgaccttcctcaacaccggcctgttcgccggcaagggcgaggagccgccgatcatctaccgcccgccggtcgagccgcttgcgcgcagcttcgtcttttacttcgcgctggctacgccgctcggagccgtgctgatctcgagcctgctaggaatcgacgccgtcgtcggcgggcccggtgtcgtgctgatcatgtccggacttgccgtggtcgttacggccggagatctcatcgccatgcgccgcacacggatgctgcgcacggtatggactgcggccgtcgtggcgcccgccgccggcatggtgctcgccgtcctgttcttgccctggacgggcgccaacgagattgcgacctcgatgccagcgcgggcgatctcggacttcttcgatgagagctttgcccgccgcaccaaccatcgcctgcgcgccgtcgccggcgaaacccagcttgccagcctgatcgcgctgcattccggccggccgcacctcttcatcgacgccgaccctgcgcgcacgccgtggatgaatcagaccaaattcagcgagaccggcggcgtcgtggtctggcgcgcttccgacaccgccggcacgccgccgccggacattctcaaacgattcccggacatcgtgccggaagtgccgcgcgccttcgaatggctggtcaccggccgccagcagctgctgcgcatcggctgggccatcgtgcggccgaaggggacgtag

SEQ ID NO: 6637 - DNA, 816 bp, BradyrhizobiumColbertium
atgatccccgagcccgcacccaccgtccgagagcttctcgccttctatctggaggccggggtcgactgcgcgctcgcggaggaaccgatcgaccgcctggcggaattggacgtcccgccaccggctccacgtgcggcacctccggtcgaagcgccgcggccggtcgtcgcgcccgcagtgatgcggggcgaagctgcccctgcacccgatgtcgcgatcgcgtccgctcgcgaggccgcgcgcactgcgccgacactggaggcgttgcgcgagctgatgcagggctttgaaggctgtgcgctgaagcacacggcgacgcggctggtgttcgccgacggcaatccgcaggcgcgcatcatgttcgtcggcgaagctccggggcgcgacgaggatatcgaagggctccccttcgtcggacgtagcggcaagctgctcgacctcatgatcggcgcgatcgggctaaaccgcaccaccgcctacatcgccaacgtcattccgtggcggccgcccggcaaccgcacgccgacgccgcaggagacgcaaatctgcctgcccttcatcaagcgccacatcgagctcgtgaaccccgacgtgctggtgacactcggcaatccctcgacgcagacgctgctcggaacgcgcgagggcatcatgcgcacccgcggtcgttggttcgactatgacacaggtggccgcaccatccgcgcgctgccgacgttccacccggcgtatctgttgcgctcgccatcgtacaagcggctcgcctggcaggatctgcgcgcgatcgcgaaggtgctggcccaaggggccgtgtaa

SEQ ID NO: 6638 - DNA, 1662 bp, BradyrhizobiumColbertium
atgagcatcgaagaacttcccccgcgcgaatccatggaattcgacgtcgtcatcgtcggcgccggcccctcgggtctgtcggccgcgatccggctgaagcagctcaatgccgatctcaacgtcgtcgtggtggagaagggctccgaggtcggcgcgcacattctctcgggcgccgtgatcgatccggccgggctcgacaagctgatcccggactggcgagaggattcggactgtccgctcaagactgaggtgaaggacgaccgcttctactggatgacggctggcggtgcgatcaagctgccgaacttcatgatgccgccgctgatgaacaatcatcactgctacatcggctcgctcggcaatgtctgccgctggctggcgcgcagggccgaggcgctgggggttgagatctatcccggctttgccgccgccgaggtgctctatgacgaggagggcaaggtcaagggcatcgccaccggcgacatgggcgtcggccgcgacggcaagccgaaggactccttcacccgcggcatggaattgctcggcaagtatacgctgttcgccgaaggcgcccgcggaagcctgaccaagcagctcatcaacaagtttgcgctcgatgccaagagcgagccgccgaagttcggcatcggcctcaaggaggtctggcagatcgatcccgccaagcaccagaagggaatgatccagcattccttcggctggccgctcgatatgaagacgggcggcggctcgttcctctatcactacgacgacaatctcgtcgccgtcggcttcgtcgtgcatctcaactacgacgatccctatctctcgccgttcgacgagtttcagcgcttcaagacccatccctcgatccgcggcaccttcgaaggcgccaagcggctcgcttacggcgcccgcgcaatcaccgagggcggctatcagtcggtgccgaagctcagcttccctggcggtgcgctgatcggctgcgcggccggcttcgtcaatgtgccgcgcatcaagggtgtgcacaatgcaatgggcaccggcatgctcgccgcggaacacgtcgccagtgcgctcgcggccgagcgcgccaacgacgaagtcgtcgagtacgagaatgcgtggcgttcgtcctccgtgggcaaggatctgttcctggtccgcaacgtcaagccgctgtggtcgaagttcggcaccgtgctcggcgtcgcgctcggcggcttcgacatgtggtgcaacacgctgttcggcgcttcgctgttcggcacgcagtcccatctcaagcatgatcgcgccacgctcgatccggccaagcagcacgcgcccaagaactacccgaagcccgacggcaagatcaccttcgacaagctgtcctcggtgttcctgtccaacaccaatcacgaggaggaccagccggtccatctgaaggtcgccgacatgaacctccagaagacctcggagcacgacgtctacgccgggccctcgaaccgctattgcccggccggcgtctatgagtggatcgaggaagggtccggcccgcgcttccagatcaacgcccagaattgcgtccactgcaaaacctgcgacgtgaaggaccccaacggcaacattacctgggttcccccggagggcggcgggggtccgaattacgaggcgatgtaa

SEQ ID NO: 6639 - DNA, 1797 bp, BradyrhizobiumColbertium
atgttttcaaatcgtttcaaccgctggactgttgccgccatcgctctcatgggcaccgcgatcgcgacgctccccggcgcgggcctggcgcagacgccggatcatccggagaatacggcggcacagtttccgacacgaaacgatctgaagtcgctcacgggcgccggcagctatctcgccgcccgccatgccagcgtcgagcgcgatgccgcctcggccgccgcattctaccgctcggcgctgcgcaccgatccgaagaacaatgaattgctcgaccgtgccttcatctcttcggtcgccgacggcgacatcgaggaggcggtcaagctggccgaacgcatcctcaccatcgacaggaccaaccgcgtcgcgcgtctcgtcgtcggcgtgcatgatctcaagctgaagaagtacgcggccgcgcagaccaacatcaaccagtcgatccgcggcccgatcaccgatcttgtcgccacgctgctgtccggctgggccgcttatggtgcgggcgatgccaagggtggtgtcgccaccatcgacaagctggcaggaccggaatggtatccgctgttcaaggacctccatgccggcatgatcctggagctctcgggcaaggagaaggatgccggcacccggttcgagcgcgcctacaagctcgacgactcaatgctgcgcgtgaccgaggcctatgcgcgctggctatcgcgccacaaggaatccgccgcggccaccgccgtctatcaggccttcgacaagaagctcgcgcgccatcctttgatccaggaaggcctgcgcgagaccaaggccggcaaaaagatgccgccgctggtcgattccgcgcaggcgggcgcggccgaagcgctctacgggatcggcgctacgctgacccgccgcggcggcgaggatctggcgctggtttatcttcagctctcgctctacctgcagccaacccacccgctggcgctgctctcgctcgccgatctctatgaatcggtgaagcggccgaagatggcgatcaaggtctatgagcgcgtgccggcgacctcgccgctcaagcgcaatgcacagatccagctcgccatcgatctcgattccgccgaccgcaccgaagaggcgatcaagatcctcaaaggtgtcacgtcggaggatcccaaggatctcgaagccatcatggcgctcggcaacatcgagcgtggccgcaagaggttcggcgactgcggcgcgacctattcgctgggaatcgacgtgctgccgcccggcaacgacaaggccaacagcgtctggtattattatcgcggtatctgccaggagcgatccaagcagtgggccaaggccgaagccgacatgaaaaaggcgctggagctccagcccgaccaaccccacgtcctcaactatctcggctattcctggatcgaccagggcatcaacctcgacgaaggcatgaagatgatcaagcgcgccgtcgagcagcgtcccgacgacggctacatcgttgactctctcggctgggcttattaccgcatcggcaactacgaggaagcggtgaagaacctcgagcgcgcgatcgatctcaagcccgaggatcccaccatcaacgaccatctcggcgatgcctattggcgcgtcggccgaaccctggaagccaagttccagtggtcgcatgcccgcgatctcaagcctgagccggaagaactgccgaagatcgaggccaagatcgccaatggtctccccgacgacaattcgaactcttcggccgcgcaggcggagaagaagaaggacgacggcaagggcggttga

SEQ ID NO: 6640 - DNA, 885 bp, BradyrhizobiumColbertium
atgccggcgttgactgaagaggggcgcgcgaaggtcaatctcagccttcgcgtcgtgggccgtcgcgccgacggctatcatgatctcgaaagcgtggttgcttttgccgactgtgccgaccggctcaccctggagccgggcggcgagttgaagctcaacacgaccgggccgctggctgcggcttgcggcgataacgccgacaatctcgtgcttaaggccgccaggcttctggccgaggccgtgcccaatctgaagctgggcgccttcacgctcgacaaggtgctgcccgttgccgccgggatcggtggcggctcggccgatgctgccgcggcgctgcgcctcctggcccgcctcaacggtttgtcgctcgatgatccccgcgttcagaaggttgcgctcgcgaccggtgcggacgtgccggtttgccttctctcgcgcgcctgcgacatgaccggcgttggcgagcagctgttgccgctcgcgctgcccagcatgccctgtgtcatggtcaatccgcgcgtgccggttgcgaccaaggacgtgtttcaggccctcggcctgcgcaacggcgaactcctggtcggcgtcaccgacgtcatccgcgcgccggcctggccggaggagggcgcttcaattgccgattgggtcgaagttctcgaaacggtcgccaatgacctggaagcgcccgccatgcgcatcgagccggtgatcggcgaggtgctggaggctctgcgcggctctgccggcgtcaagctcacccgcatgtccggttccggcgcaacgtgttttgcaatctatggctcttcggccgacgcgcatgccgctgcggaaaagatccggcgcgatcactccggctggtgggtgcatgcggggacgttgagctga

SEQ ID NO: 6641 - DNA, 879 bp, BradyrhizobiumColbertium
atggctagcgccccgcaaagccgcttctatgaatcgcacggcctgcggctgcattatgccgactggggcaacgagagtgcaccacctctgatcctggtccatggcgggcgcgatcattgccggagctgggatcatatcgcccgatcgttgcagccgaatttccacgtgctcgcacccgacctgcgcggccacggcgattccgattggactaggggcggcagctacgcgctgacggagtatgtctacgatctcgcccagctcgtccgtcatatcgcagcacctcaaatcaccctcatcggtcattcgatgggcggcatggtcagcctgatcttgtcaggatcattccccgagctggtctccaagctgatcgtcctcgacggcgtgaccatgctgccggacgctcggaagccgccggcgcatgagcgtattggcaaatgggtgacccagctcgacaagctgcatgaccgcatcccgcgccgctactcgacgatcgaggacgccgccgcacagatgatgcttcacaacaaacggctgtcccgtgaccttgccctgcatctcgcagcccacggcacgcggcagaacgaggacggcacctacagctggaagttcgatccgtaccagcgcgcctccgcgccgcaccggctttggccggacgatcacatcgagctctggtcacgcatcgcctgcccgacgctgctgctcaatgccggcgagagttttctggcgggcgcgaaggggacaagcctggagcgctatttccaagatgcgcgcatcgagaccatcgccggggccgggcattggctgcagcatgacaagccgcacgaggtgttgggcgagatccgggacttcctcaagctcgatgagagcagcgcgggctag

SEQ ID NO: 6642 - DNA, 633 bp, BradyrhizobiumColbertium
atgatcgaaacgaatttctggctgttcctggccacagcctgtctcattgccgccgttcccggtcctggcatcttctacgtcgcggcacgaaccctgtccgagggacgcgccagcggcttcgcgtcaaccgcaggcaccgctctgggcgggctggttcatgtggtggcgggcagccttggcatctccgcgatcatcctggccagcgcggaactgttcgccgccgtgaaattcgttggggcgctgtatctggtctggctcggcatcaggacgtttcgcagcgccggccgtgggctgtcgttcgaaggcgagcccgtcggagacaagcgcgcgttccgcgacggcgtgctcgtcgaggcgttgaatccgaagaccgcggcgttcttcctcgccttcattccgcaatttctcgatcccgcgggaactaacccggcgctgcagttcattatgcttggcacgatctcggtgacgctgaacacgctcgcagacgtcgtggtggtagcgatggcctccgcgacacgtacgcagctgatcggaaggccgcatctgatgcggcgcctcacgcaaggctccggcgtcttcatcgctggcctcggcctctcgctcgcactggcgcggcggccggccaatggctag

SEQ ID NO: 6643 - DNA, 1263 bp, BradyrhizobiumColbertium
atgcgtcgtatcgtcgtgacgggaatgggagctgtgtcgccgctcggctgcggtgtcgaattgtcctggcgacggctcctcgccggtcaaagcgggctgcgcccgctgcccgaatgggcgcaggcactgcccgcgcgcatcgcggggctcgtgccagacagggccgatgacaccaagggcggcttcgacccggcacaggcggccgcgccgaaagaccagcgcaagatggaccgcttcatcctgttcgcgctgcttgccaccgcagaggcggtcgcgcaggccggatggacgccgctggacgcggcggcgctggagcggaccgcgacgatcatcgcctccggcgtcggcgggttcccggcgatcgcggaagcggtgcgcatcaccgaacagcgcggcgcgcgccggctttcgccattcacgatcccctcgttcctcgccaatctcgccgccggccaggtctcgatcaaatacggctacaagggagcgctgggtacgccggtcaccgcttgtgccgccggcgtgcaggcgatcggcgatgccgcgcgcatgatccgcgccggcgaagccgatgtcgcgatctgcggcggcgccgaggcctgcctcgacatcgtcagcctcggcggctttgccgcggcccgcgcgctgtcgagcggctttaacgacgaacccgaacgcgcctcgcgcccgttcgatcgcgaccgcgacggctttgtgatgggcgaaggcgccggcatcctggtgatcgaggagctcgagcatgcgctggcgcgtggtgctacaccggtcgccgagctcgtcggctacggcacgacggcggatgcctatcatatgacctcgggcccgcccgatggcgagggcgcccgccgcgccatggagatcgcgcttcgacaagcgaagcttgcgcccgcggatgtgcagcacctgaacgcacatgcgacctcgactcaagccggcgacgagagcgagcttggcgcgatcggcgcgctgttcggacgtactcggagcatcgctgtcagcgcgaccaaatcggccaccggccatctgctcggcgccgccggaggcctggaggcgatcttcaccattctcgctttgcgcgaccagatcgcgccgccaacgctcaatctcgagaaccccgacgcgggcgcggacggtatcgacatcgtcgccggcacggcgcggccgatgccgatggagcatgccatctccaatgggttcggcttcggcggcgtgaacgccagcgtgatcttccgccggatgggctaa

SEQ ID NO: 6644 - DNA, 516 bp, BradyrhizobiumColbertium
atgcagcccaaatcgccctccatccaggaatgtcccgtcggccgcgccgtggagacggtcggcgaatggtggagcatcctgatcctgcgcgatgcgatgcagggcgctaccaaattcgacgagttctcgcaaagcctcggcatcgcgccgaacatcctgtcgcggcgccttgcgcatctcactgagagcggcatgttcacgcgccgccgctatcaggaccgaccgccgcgctatgaatatgtgctgaccgacaaggcgcgggacttctttcccgtgatcgcggcgttgctggcctggggcaacaagcatctcgcccgtaaaggcaaatccatcctgctggcgaaccggagtgacgctcgcccggtcgatccggtcgtggtcaatgccggcgacatgcagccgatcactctcgccaatgcagtcgtcatcgcaggcccccgggccagccgcaagatgcgcgcgcggctcgcttcgctcaaggccatgaacccggccgtcgtgccggctggagactga

SEQ ID NO: 6645 - DNA, 132 bp, BradyrhizobiumColbertium
ttgcgctccggcatctcaggtgacggtgtcgggctgataccgctgctcccgcccagtcattgcgagcgcagcgaagccatccagaatcccgccgcggcaacaggctggattgcttcgctgcgctcgcaatga

SEQ ID NO: 6646 - DNA, 1008 bp, BradyrhizobiumColbertium
gtggccgtcatcgtacctttcgaagctcccggcgcgtcgatcgaagagctggttgcccttgtcgctcctgacatggagcgcgtcaacgccacgatcctgtcgcggaccggttcggacgtcaccatgatcccggaagtcgccaaccatctgatctcctccggaggcaagcggctgcggccgatgctgaccctcgccatggccaacctcgccggctacaccggcgacggccatatcaagctcgccgcttccgtggagttcatgcataccgccaccctgctccacgacgacgtcgtcgacgagagcgagatgcgccgcggcaagctgtcggcgcgcatgctctggggcaacgaggcgagcgtgctggtcggcgacttcctgctcggccaggcatttcgcatgatggtcgaggtcggatcgctacgcgcgctcgacatcctctccgcagccgccgccacgatcgccgagggcgaggtgatgcagcttgccgccgccaaaaacaccgcgaccaccgaggacgaatatctcgccgtgatccgcggcaagaccgctgaactgttcgccgccgcctgcgaggtcggccccgtcatcgccaaccgcccgaaggcggagcagaccgcctgccgctcggtcggcatgaatctcggcatcgccttccagctcgtggacgacgtgctcgactacgggggcaagagcgccaagctcggcaagaacaccggcgacgatttccgcgagggcaagatcaccctgccggtcgtgctcgccttccgccgcggcaacgacaccgagcgcgcgttctggatccgcgcgctggagcgaggcgagatcggcgataccgatcttgaccacgccatcggactcatgaacaagcaccgcgcgctcgaggacacgctgagccgcgcccagcattacggcgccatggcggtggacgcgctggcgctgttcccgtcctcgccgatgaagagcgcgctggagcaggtcgtggcgttctgtttggccaggtcgcattag

SEQ ID NO: 6647 - DNA, 228 bp, BradyrhizobiumColbertium
ttgcgtgaactggttcggaccaacgacatggtgctggtgtcggcgatcggcgcgctgctcgacggcgccaacatccatcacctggtgctggaccagaacatgagcatcatcgagggttcgctcggcatcttgccgcggcggatcctggttcatgaggacgatgtcctggaggcaagggagctcctcaccgaggccggcctcagccacgaattgcgcggcgatgattga

SEQ ID NO: 6648 - DNA, 828 bp, BradyrhizobiumColbertium
atgattgaggccgcggacatgaccgaggatgcttttctcggcgggcaattgcggctcaggcagaagcggtccggccatcgcgccgggcacgatgccatcctgcttgcggcggccaccgacgcccgggcgggggaccgcgtggtcgatctcggcgccggcgtcggcacggccggattggcgctggcccggcgcgccgcagggatcaggctgagcctcgtcgagatcgatccggagctggcggagcttgcgcgcggcaacgcgctggcaaacgggattgccgccgagacgatcgtgctcgacgtcacggcagatgcgcaggccttcgcggcaaatggtctcgcgcccgacagcgtcgatgcagtgttgatgaatccgcccttcaacgatccggcgcggcatcgcggctcgcccgatcaggcgcgccacgccgctcatgtggcgacggaggacactctgcatgcgtgggtgcacgcagcgcgtcgagtcctgcgctcgaacggtgtgctgacgctgatctggcgggcagatggactggcggacgtgctggccgcgctgtcacgcggcttcggcagcctctcgatcctgccggtccacggcgaggcggaacggccggccatccgagtgctggtgcgtgcggtgaagggcggccgtgcgccgacgcgtctgctgccgggcctgatgctgaatgacgcgtcgcgttcgtccggaagcgaggtgacggagattttggaagggagagcggccttgccgctggtggaacctcgagggcttaccggggaagcgattccggctgttgctcctgcggggaggtcaggcggatcgccatga

SEQ ID NO: 6649 - DNA, 909 bp, BradyrhizobiumColbertium
atggccgagcaattgaacgatcgtgagagttccggcctggccgacagactcatgcaatatctgccggcccgctttcgaccgggcacggcggtggtcccggtggtgcggctgtcgggcgtgatcggcgccgtgacaccgctgcgccccggtctgacgcttgcgggcatcgccaaagtgctggagcgcgcgttttcgtatcgacacgccaaggcggtggcgctcgtgatcaattctccaggcggctcgccggtgcagtcgcgccagatttatctgcgcatcaagcaactcgcagcggagaagaagctgccggtgctcgtcttcgtggaggacgtcgcggcctcgggcggttacatgatcgcctgtgccggcgatgagatcatctgcgatccctcatcgatcctcggctcgatcggcgtggtcggcggcagttttggttttcaggaggcgatcaggcggctcggcatcgagcggcgtctctacacatcaggcgagcacaaggcgatgctcgatccgttcctcccggagaatcccgacgacgtcgccaggttgaaagcgatccagcgcgagatccatcagatcttcattgcgctggtgaaggagagccgcggcgcacggctgaagggagcggacgagacgctgttcaccggagaatactgggccggcgatagcgccatcgcgctgggcctcgcagacggtatcggcgatctccgctcaactcttcgtgcccgctatggcgagaaggttctcactcccgtgatcgcgcaaccgaccgggctgctctccggcttcttgggccggaaatcgcctggcgcggggcagctttcagccctggagtcgatcgccggcctgccggacgagctgatctcggcagtcgagacgcgcgcgatctgggcaaaattcgggttctag

SEQ ID NO: 6650 - DNA, 192 bp, BradyrhizobiumColbertium
atgccgccgttcgtcgctttcgcgggcgtgctgggcgggcttgccgtggtccgttgggcctacaagaccgccatgaagatcaaccaggagctggatgagatgcgcctgtcgcgcgtcaccgaggccgctcccatgggggatatcaagacactgaagcgagaccccgtgtcgggggcctaccggccgggttag

SEQ ID NO: 6651 - DNA, 936 bp, BradyrhizobiumColbertium
atggacgcctcattgcccgcccatatgcgcccggaacgctcgttccagggcttcatcctcgcgctccagcggttctgggccgagcagggctgcgtgatcctgcagccctacgacatggagatgggtgcgggcaccttccatccggcgaccacgctgcgtgcgctcgggcccaaaccctggaacgccgcctatgttcagccctcgcggcggcccaaggacggccgctacggcgagaacccgaaccggatgcagcactactaccaattccaggtcatcatgaagccgtcgccgccgaatcttcaggagctatacctgaagtcgctggccgcgatcggcatcgattccgccgtgcacgacatccgcttcgtcgaggatgactgggagagcccgacgctgggtgcgtggggcctcggctgggagtgctggtgcgacggtatggaggtttctcagttcacctatttccagcaggtcgccggcttcgaatgcgcaccggtcgcgggcgagctcacctatggtctcgagcgcctcgcgatgtatgtgcagggcgtcgaccgcgtctatgatctcaacttcaacggccgcgacggggaccagaaggtcacctatggtgacgtcttcctgcaggccgagcaggaatattcgcggcacaatttcgaagtcgcggataccgcgatgctgttcgaacagttcaagatggcggaagcggcctgccggaaatatctcgatgcgggctggaaagatgggaagcgcgaggcgcatctgatggcgctgccggcctacgaccagtgcatcaaggcgagccatgtcttcaacctgctcgatgcgcgcggcgtgatctccgtgaccgagcggcaaagctacattcttcgcgtgcgcgaattggcaaaagcctgcggcgaggcctggatccatactgaagcgggcggagcggcctga

SEQ ID NO: 6652 - DNA, 2100 bp, BradyrhizobiumColbertium
atgcccgatcttttgcttgaactgttctcggaagaaatccccgcgcgcatgcaaggcagggcggccgacgatctgcgccgcatggtcaccgacaagctcgtcgccgaaggcctcgtctatgaaggcgcgaaggccttcgcgacgccgcgccgccttgcgctcaccgtgcacggcatccccgcgcgccagccggacctcaagaccgaacgccgcggacccaaggtcggcgcgcccgatgcagccgtgcagggatttttgaaagcgaccggtttgaagtcgctggacgaagccaagatccagcgcgaccccaagggtgatttctacatcggattgatcgagaagccgggccgcgacgcgatcgacgtgctcgcggagatccttcccgtgatcattcgcaccttcccctggccgaaatcgatgcgctggggcgcgcgctcgggcaagccgggctcgctgaactgggtgcgtccgctgcacgcgatcacggcgaccttcgggctcgagaccgaagagcccgatgtcgtgaagttcgaggtcgacggcattgaagccggccagacaacttatggccaccgcttcctggcgccggcgcccatctctgtgcgccgcttcgaggactacgaagccaagctgctcgacgccaaggtcgtgctcgatcccgaaaggcgcaaggacgcgatcctcaccgacgccaagcagctcgcgttcgcgcaagggttcgaactggtggaagaccagaacctgctggacgaggttgccggcctcgtcgaatggccggtcgtgctgatgggctcgttcgaagaagaattcctggcgacgccggcggaagtgatccgcgccaccatccgcaacaaccagaagtgcttcgtggtgcgcgatcccaagacgggcaagctcgccaacaagttcatcctggtcgccaacatcgaggccaccgatggtggcaagaccatcgtcgccggcaacgagcgcgtcatccgcgcgcggctgagcgatgcgaagttcttctacgagaccgacctgaagaccaagctcgaggagcggctgccgaagttcgagcagatcgtgttccacgagaagctcggcacgcaggcggagcgcatcaagcgcatcgagcgactcgcggccgagatcgcgccgctggtcggcgccgatgtcgccaaggcggtacgtgccgcgcatctggcgaaggcggatctgctgacggaagtcgtcggcgaattccccgaggtgcaggggctgatgggcaagtactacgcgttggcgcaaggcgaggaggcttccatcgcggtcgcctgcgaggagcattacaagccgcaaggtcctgccgatcgcgtgccgaccgatccgatcagcgtcgcggtcgcgcttgcggacaagctcgacacgctggtcggcttctgggcgatcgacgagaagccgacgggcagcaaggatccgtatgcactgcggagagcggcgctcggtgtgatcaggctgattgccgagaacgacttgcgtctgtcgctcctgaagatcgcaacctccgcgcttgccggcctgtcggtgaaggcggccgaagcgcagaagctcccgagcgacctcctcgctttcttcgccgaccggctcaaggtccagcttcgcgagcagggtgcccgtcacgatctcgtcgatgccgtgtttgcgctcggcggccaggatgatctcctgatgatcgtccgccgggtcgaagcgcttggcaagttcctcgagaccgacgacggcaagaacctgctcgccggcaccaagcgcgccagcaacatcctctcgatcgaggagaagaaggacaagcgcacgttcgatggcgcgccggatgctgcgctttacagccttgtcgaggagaaggcgctggcgcaggcgatcggcgaggtgaaggcggaagccagcgctgccgtcgcccgggaagacttcgccgtcgcgatgagcgcgatggcaaagctgcgcccgcccgtcgatgcattcttcgacaaagttcgcgtcaacgacgacgatgcaagggtgcgcgagaaccggctgaagctgctgaacgaaatccgcagcgccacgcgtgcggtggcggacttctcgaagattcaggattga

SEQ ID NO: 6653 - DNA, 354 bp, BradyrhizobiumColbertium
atgcggaacaggattcttgctcttgcagcgctcgcggccgcgatcggctcgccccttgccgcgcaggcgcaaagcggtgtcacggtcggacgcgcacctgcgtcggtcgacagcgcggtgacgattgcggccgaacagcggccggcattccgtgaatatgtcgtgcaacagcgtgtgccgcccttcagcattccggatcgcgtcgtggtcggcaccaccttacccgaggcgggcgtcacttattatgacgtgccgcaacgtttcggggccaccacctatcgctacaccgtcgtgaacggcgagaccgtgctggtcgaaccgcgctcgcgccgcatcgtcgaggtggtggactga

SEQ ID NO: 6654 - DNA, 156 bp, BradyrhizobiumColbertium
atgcacatcaccgtcgcccacatttcgccgatcctgtcgttgattgcgggcgtgctcatcctgatcatgccgcggctgctcaacctcatcgtcgcgatcttcctcatcgtcaacggcgcgatcgggctcgggctcctgaagtggctccgcttctag

SEQ ID NO: 6655 - DNA, 2928 bp, BradyrhizobiumColbertium
atggccaaagccgcctcgaagcccaagaaaatgccagcgaaatcaaagtcctctgccgtcgcaaaagccgcgccgccggcccgcaagacgctggccaaaagcgcgccgaagccggtcgccaaagccgctggaaagccggcagcgaagcccaccgcaaaggccgcgaccaagccggctctgccaaaggccgccgcgaagcccgcaccgaagaaagctgcgcctgccaaggcggcgccagcagcggcaaaggctggcaaatgggtgttcacgttcggcgacggcaaggccgagggccgctcggaaatgcgcgacctgctcggcggcaagggagccaatctggccgagatggccaatctcggtttgcctgtgcctcccgggttcaccatcccgacctcggtctgcacctatttttacgaacacgacaagacctatccgaaggagctgaagccgcaggttgagaaggcgctggactatgtcggcaagttgaccggcaaggtgttcggcgacaccaggaacccgctgctcgtctccgtgcgctccggtgcccgtgcctcgatgccgggcatgatggacaccgtgctcaatctcggcctcaacgaccagaccgtggaagcgctggccgagctgtcgggcgaccgccgcttcgcctatgacagttatcgccgcttcatcacgatgtactcggacgtggtgctcggcttcgagcatcatcatttcgaggaaatcctcgacaccttcaaggacagccagggctacacgctcgacaccgatctgtcggccgacgactgggtcgaactggtcggcaagtacaaggatgcggtggcgcgcgagaccggcaaggagtttccgcaggatccgcacgaccagctctggggcgcgatcggcgcggtgttctcatcctggatgaacgcgcgcgcggtgacctatcgcaagctgcacgacattccggaatcctggggcaccgctgttaacgtgcaggccatggtgttcggcaacatgggcgagacctcggccaccggcgtcgccttcacgcgcaacccctcgaccggcgagagcaagctctacggcgagttcctgatcaacgcgcagggcgaggacgtggttgcgggcatccgcacgccgcaggacatcactgaggaagcgcggagggaatcgggctccgacaaggcctcgatggaatcggcgatgccggaggcattcaaggagctgacgcgaatctacacgctgctcgagaagcactaccgcgacatgcaggacatggagttcacggtcgagcagggtaagctctggatgctccagacccgcggcggaaagcgcaccgccaaggcggcgctgcgtatcgcggtcgaactcgccaacgaaggcctgatctcgaagaaggaagcggtcacccgcatcgatccggcttcgctcgaccagctcctgcatccgaccatcgatcccaacgccaagcgtgacgtgatcgcgaccggccttccggcttcaccgggcgcggcctccggcgagatcgtgttctcctcggacgaggccgccaagctccagggcgacgggcgcaaggtcattctggtccgcatcgagaccagcccggaagacatccacggcatgcatgccgccgaaggcattctgaccacccgcggcggaatgacctcgcatgcggcggtggtcgcgcgcggcatgggcaagccctgcgtctccggctgcggcaccatccgcgtcgattacggacgcggcaccatgagcatcggctcgcgcaccttcaagaccggcgacgtgatcaccatcgacggctcgctcggccaggtgctcgccggccgcatgccgatgatcgagccggagctgtccggcgagttcggtacgctgatgaactgggccgaccaggtccgcaagatcggcgtgcgcgtcaacggcgatacacccgatgacgcgcgcactgcgatcaagttcggcgccgagggcataggcctctgccgcaccgagcacatgttcttcgaggagacgcgcatccgcaccgtgcgcgagatgatcctctccgaggacgagcagtcgcgccgggccgcgctcgcaaagctgctgccgatgcagcgcgccgacttcgtcgagctgttcgagatcatgaagggtctgcccgtcacgatccgtctgctcgacccgccgctgcacgagttcctgccccacacccacgccgaggtcgaggaagtggcgcgcgccatgaacaccgacccgcggcgcctggccgatcgcgcccgcgagctctcggagttcaacccgatgctcggcttccgcggctgccgcatcgcgatcgcctaccccgagatcgcggagatgcaggcccgcgcgatcttcgaagccgcggtcgaggccgagaagcgtaccggcagggccgtcggcctcgaggtgatggtgccgctgatcgcgaccaaggcggagctcgatctcgtgaaggcgaggatcgattccaccgcccaggcagtgatgcgcgagaccaacaccaagctggcctatcaggtcggcaccatgatcgagctgccgcgcgcctgcctgctcgcgggcgagatcgcagagtcggccgagttcttctcgttcggtaccaacgacctgacgcagaccacctacggcatcagccgcgacgacgcggcgagcttcctcggcccctacgtggcgaagggcatcctttcggtcgatcctttcatctccctggatcaggaaggtgtcggcgagctcgtcaagatcggcgtcgcgcgcggccgcaagactcgtgcctcgctcaaggtcggcatctgcggcgagcacggcggcgaccccgcctccgtcgccttctgccaccacatcggcctcaactacgtgtcctgctcgccctaccgggtgccgatcgcccgcctcgccgccgcgcaagccgccctcggcaaggcgatcgcaagccaggcgtag

SEQ ID NO: 6656 - DNA, 264 bp, BradyrhizobiumColbertium
ttgacgcgagaggggcggggcgaacccccgcctctctcattttacgcggcgctctttcctgcgagggcccttgcgacgaaccaatccagactgcctcagcggaaaggctctggattgcttcgctgcgctcgcaatgacgagtttgcggcacgtactcgatgcacactccttcatcgcccggcttgccgcggcgatgcggtatgccgagacgacgccgatgaatggagaagcggcgcaccggatgcccgctttctcagcgcatga

SEQ ID NO: 6657 - DNA, 1449 bp, BradyrhizobiumColbertium
atgtcagtgttgcgtaaccatccgaagggcgcgcggttcgcgtccttcggcatcggtctctgcatcttcgcattgatgccgagagagaccggctatcaggacattgcctcgctgctggcgcgccaacccggcgtcgccgagcgctggcagaagcaggtgttctccgccgcgtcctcgatccagctcgccacctacagttttgcccgccccatcggcacgtcggttccgcagagcgcgatggttcgtctcgcaagcatcgatggccgcgacgtcacgggtgcgatcagtcgcaatcctgcgcttcaggcgccgccgcgctatcaggcttccgactttcccaccgtcgatcgctcccttaagggtgatcgcctcgcaatcgtcacgcctacgcaggctccggagacggtcgcaccggctgtggctccggcgcaggaagatcccgcgacatcgaacagctcggtgttcggcgccaagaccgccgcattgcctcacccgatgtcgccggagtccgcggccgcactcgatcccgagctccaggaagccctgcgcgcgccgccgctgccgcaatattccaattcgccgcaggccagcgatgctgcgcgcacgctcgcgaccgcaccgctggagacgttgaagggcgcctccgttccgcctgcaccggcgcccgatcccttcagcgtcaagacctcgaccctgttcttcgccagctcctcgctcggcggcaatcccgagaccatggagagctggcagccgggcgccgagccgctgatcgtgatgcccgaccccgacatgaaggtgaccgccgcgctgactccgccgacggcggacatcgccaggaacatcgacagcggcgagagcgtggccgcgaaaggcgaggtcaacggcgacaaccagcgcgctaggtcgcccgcggagcggctcgggctcgacgacaagtcgcgcgccaaatcggaaaaatgtctcgccgaagccgtctatttcgaagcgcgcggcgaggcggtacgcggccagatcgcggtggcgcaggtcgtgatgaaccgcgtattctccggaaaatatccggaaaccgtgtgcggagcggtctatcagaacaagcaccgccatctcgcctgccagttcaccttcgcctgcgacaagaacccggacgtgatccgcgaacccgagatgtgggagcgtgccaagaggatcgcgagggccatgctcgatggccagatctggctgcccgaggtcggcaagtccacgcactatcatgcctattgggtgcgaccctcctgggttgccgagatgaagaagttgtacaagaccggcgttcacaccttctatcggccgcgcaattggggcgacggcagcgaggaaccgagctggggcacccaggcacagaccgccgcgctatccgccgaactcgtgcaggaagccaggagctccgcagagctgggcgaacggcggtag

SEQ ID NO: 6658 - DNA, 879 bp, BradyrhizobiumColbertium
atgatcagcccaacctcactgctttatcccgacgcctttctctcttcgctcgcgatcgagacggccgttgaccgcgcgctcgacgaggacctcggccgcgccggcgacatcacctcgcttgcgacgatcccggaaacgacgagcgcgcaagcggtcctggtggcgcgccagtccggcgtgattgccggattgccgctggcgctcgcgactttgcagaagctgtcgcccgagatcgaggtgcgcgcacaggtccgcgatgccgcgcgggtcgctcgcggacagcatgtgctgacgatctcgggccccgcgcgctccattctcaccgccgagcggaccgcgctgaacttcgtcggccgcctgtcgggcgtcgcgacgctcacggcggactatgtcgcgcgcatcgaaggcaccgggatgcgcatctgctgcacacggaaaacaacgccgggattgcgcgcgctggaaaaatacgcggtgcgctgcggcggcggattcaatcaccgcttcgggctcgatgatgcgatcctgatcaaggacaaccacatcgcggtcgccggcggcatccgtccggtgctggaacgcgcccgtgcccatgcgggccacctcgtcaagatcgagatcgaggtcgatacgctggtgcagctgcgcgaagtgctcgacagcgggatggccgacgcggtgctgctcgacaacatggacctggcgacgttgcgcgaggcggtcaggatcaacgagggccgccttgagctggaggcatccggcggcgtcacgctggactcgatcgccgccattgccgcgaccggtgtcgactacgcatcggcgggcgcattgacgcattccgccccgaacttcgactgtgcgttggacatcgaggcttga

SEQ ID NO: 6659 - DNA, 1605 bp, BradyrhizobiumColbertium
atgcaacacgacatccacgacctcgctcgcaccgacgacgtcgtcatcgtcggcggcggccttgccgggctgttctgcgcgctgaagctcgcgccgcggccggtgacgttgatctcggcggcaccgcttgggcagggcgcatcgtccgcatgggcgcaaggcggcatcgccgcggccgtggccgaaggcgatacgccggaggcacatgccgccgacaccgtggcggtcggcggcggcctcgttgatgaagccgtcgcgctcgggatcgcgcgcgaggcgctaccgcgcatccatgatcttctcgcctttggcgtgccgttcgatcgcgatctcgacggcaggcttgcggccggacgggaagctgcgcattcggcgcgtcgcatcgttcatgtgcgcggcgatggcgccggcgccgcgatcattgcggccttgagcgatgccgtacgtcgcacaccctcgatccgcctgatggaaggcttcgtcgccgaagcactgctgacagcggacggcgcggtctccggacttcaattgcggaaggccggcaatcccgctgcacggcagatcgtgctcgccgcgcgcgcggtcgtgcttgcaactggcggcatcgggcatctctatgccgtcacgaccaatccggtcgaggcaagcggctccggccttgcgatcgcggcgcgcgccggggcggtgatcgccgacccggaattcgtacagttccacccgacggccatcatggtgggcggcgatccggcaccgctcgctaccgaagcgttgcgcggcgaaggggcaacgctgatcaacggcaaaggtgaacgcttcatgctgtcgcgccatccgctggccgagcttgcgccgcgtgacatcgtggcccgcggggtgttcgccgaaatcgcggccggccgcggcgccttcctcgatgcgcggcaggcgctgggcgcgcgcttcgcgacgaagtttccgaccgtgcatgcaagctgcaccgccgccggcatcgatccggcaacgcagccgattccgatcgcgccggctgcgcattaccacatgggcggcatcgccgtggacgcgcgcggccgcagctcgatcgacgggctctgggccgccggcgaagtatcctcgaccggcgcgcatggcgccaaccggctcgcctccaactccctgctcgaagccgtggtttatgccgcgcgcgttgccgacgacatcgccggccgcacaatgtcctcgactgcccgcccacccgatccggtcgtgacggcgcgaggcggcgcggcggacagcgcagccgtgaagcggctgcgcacgatgatgagcgcgcatgtcggcgtgatccgcgacggtgacggccttgccgaagccgtgcgccgcttcgccgcgatcgagcgtgaggccggcgacatcgttctccgcatcatggcgacttcggccctgctggtcgccaccgcggcctggacgcgacgcgagagccgcggtgcgcatttccgttccgatcatccggctgagacgcccgggcccgggcggagaacgatgacgaccctttccgccatgcgcgatgtcgcgcacagcctggacgaccgcccgctgccacgcattgcgcaatccatgatcgcctga

SEQ ID NO: 6660 - DNA, 1107 bp, BradyrhizobiumColbertium
atgccgatcaccggaatttacggccccgacgatttcaccgaccgaccccaggcccagcgcaactcctcccccggcaccgtagcggtgcccgcgggaccggaatggccgatcccctcactggaatggacgtcggagatcgaacgggccaccgcgccgctctatgaccgcgtgaagcacgtgatcccgccgatcgaatggccgctgatggcaccggcgatccacgcgatcaacgagctgaagcgcgcgcggggggcggtcatcctcgcccacaattaccaagccccggagatcttccactgtgtggccgatattggcggcgactcgctccagctcgcggtcgaagccaccaaggtgaaggctgacatcatcgtccagtgcggggtgcacttcatggcggagacctcaaagctgctcaatccgcacaagaccgtcttgatccccgattcgcgcgcgggctgctcgctcgccgccagcatcaccggcgcggacgtgcggctgctccgcgaaaaattccccggcgtgcccatcgttgcctatgtcaacacctccgcggaggtgaaggccgaggtcgacatctgctgcacctcgtcgaacgccgtgcaggtggtcgagagcctcaattcaccgagcgtgatcttcctgccagaccgctacctcgcgacctatgtggcgtcgaagacggatgtgaacatcatcgcctggaaaggcgcctgcgaggtgcatgagcggttcacgggcgaggagctgcggagctttcgcgaggccgatccgtcggtccagatcatcgcgcatccggagtgcccgccggatgtgctcgcggaagccgacttcaccggttcgaccgcacacatgatcaactgggtgcgcgcgaagaggccacggcgtctcgtcatgatcaccgaatgctcgatggccgacaatgtccgggccgagctgcctgatgtggagatgctccgcctttgcaacctctgcccgcacatgaagcgcatcacgctcgccaacattctggagagcctgctgacgctccgcgaggaggtgtcgatcgatcccgcgctcgcggatcgcgcgcgacgttcggtcgagcgcatgatcaatctgaggaattga

SEQ ID NO: 6661 - DNA, 1254 bp, BradyrhizobiumColbertium
atgtcgacacagatcggcgaactcgctccggcctcgcgttcctccaactggcgtaccccggccgtcatcattctgtgcggctgtgcgatcggcatgctcggcttcggcccgcgctcggcgctcggctttttcgtgcagccgatgagtcacgaattcagctggggccgcgatgtgttcggcctcgcgattgccgtgcagaatctcttgtgggggctgggccagccgttcgcaggcgcggtcgccgatcgcttcggcctcttccgggtgatgtgcgtcggcgcgctgctttatgccggcggcctgctgctgatgcgctactccacgaccccgctgtcgctcgacatcggcgccggcgtcatgatcggttttgggctcgccggctgttcgttcaatctggtgttgtcggcgttcagcaagctgttgccgcctgagaagcgcggccttgcgctcggcgccggcaccgcagcaggctccttcgggcagttcctgttcgcgcccatcggcgttgcgctcatcgacaatttcggctggcagcaggcgttgtccgtgttcggcttcctgatgctgctgatcatcccgctgtcgctggcgctctcgacaccgccggtcgcagaatcagcaaaggcgacggccgctgatgagcagaccttcaccagggcgctggccgaagccttcggccatcgctcctacgtgctgctcgtgctcggcttcttcacctgcggcttccaactcgccttcatcaccgtgcatctgcccgcgtttctggtcgatcgcggcatctccgcgcaaaccggcggctgggtgattgcggcgatcggcctcttcaacatcatcggctcgctcagcgtcggctatctccagaaccatctgcccaagcgctatatcctctccaccatctatttcacccgcgcgctggcgacgctggcctttatctcgttcccgatcacgccgttctcggcgatcgcattcggcgcgatttccggcctgacctggctgtcgacggtgccgccgacctcggcgctggtggcgctgatgttcggcacgcgctggcttgcgacgctctatggctttgccttcgtcagccaccaggtcggcggctttctcggcgtctggcttggaggcatcgtgttcgagcgcttcggttcctatacgccgatttggtggctctcgatcctgttcggcgtgctttccgcgctgatcaatcttccgattgtggagaaacccgtcgagcgagcggttgcacagccggcctga

SEQ ID NO: 6662 - DNA, 987 bp, BradyrhizobiumColbertium
gtggccacattcaaggcaatccggatcgacaaggcggacaagggcaccaccgcgcagctcacgcagttcgatgaagccgagctgatggacggcgacgtcaccgtccgggtcgaatggtcgacgctgaactacaaggacggccttgcgctgaccggcaaggcgccggtggtgcgccgcttcccgatgatcgccggcatcgacttcgccggcacagtcgaagcctcatcgcatccgcagtggaaggcaggggacaaggtggtctgcaccggctggggtatgggcgagacccatctcggcgcctatgccgagaaggcgcgggtgaagggcgactggctggtcgccctgccgcaaggcctgtcggcgcgcgacgccatggcgatcggcaccgccggcttcactgcaatgctcgcggtgctggccctcgagaaacacggcatctcgccgaagagcggtccagtcgtggtgacgggtgctgcgggcggcgtcggctcggtcgcgatcgccgtgctcgccaagcttggctatcacgtcatcgcttcgaccggccgggcctccgaggccgactacctgaagcagctgggagcagccgagatcatcgaccgcagcgaattgtcggcaccggcaaaacctctcgccaaggagcgctgggccggcggtgtcgacagcgtcggctcgaccacgctcgcgaatctgctctcgatgacgaagtacggcggagcgattgcggcctgcggtctggccgccggcatggacctgccgtcctcggtggcgccgtttattttgcgaggagtgtgccttctcggcatcgactccgtgatgtgcccgattgagcccagaaaggccgcctggcagcgcctggcatccgatctggatcgaacaaagctcgttgaaattactaaggaaataccgttgtctgaggtttcggattggggcgcgaaaatcctggccggggaggtccgcggccgcatcgtggtaaaaattgtctaa

SEQ ID NO: 6663 - DNA, 588 bp, BradyrhizobiumColbertium
atgcttgcgcgtattgtgttgggggctgtcacggcggcagcaacgtttgcgccggccattgctggaagcatgaacgccgacgaggcgcgccgcttcgtggccggcaaggtgttcgcctttacctgcttcgatggcacccgcggtgcaggccgcattctcgacgatctcggcgccgccggcgccgtgcagttctcgggcgcaggaccggtcaaacatctccggctgcccggcaacacgctccagatccgcggccagaacgtctgcgcctcgatcaagggcattccgttcgagccctgtttcaacctggaaaagaccgatgatcgcagcttccgcggctcggtatccggcatgggcttcgcctattgcgacttccgccaccagggcggcaaccagatgctgatggcgcgtgcaacggcgcgcccgcgctcgccgcggaattcggatcgcaccggttcggtcggcccggccaacaccgaagtcgccgcgcgtgtcgaaaccccgcgtgtcgagagtagccggctcgagccggtgaagccggagcccgcgaagaccgaggccccgctggagctgcgtcgctcgactcagtga

SEQ ID NO: 6664 - DNA, 246 bp, BradyrhizobiumColbertium
atgtcgctgtatttcttccgtatcagcaccggccgctattccggcgccgccgatcagccctacgaattcgaggatcgcgcagccgcctggaccgagatgacggaggtctgcgccaacctgctcggcagcatcgcgcgcggcctgaagccgaacgccgagtggtgcatggagctgatcgacgagaacaagaacccggtctttcgcgtcaccctcatcggcgagaccgtcggatgcaaagcttcctag

SEQ ID NO: 6665 - DNA, 1737 bp, BradyrhizobiumColbertium
atgttcagcctcttacagaatttgcagatcgggaccaagctggcgatcgcttcggctctcggcgtgctcctggtcggagccatgatcgcaagccagacgcttggcaatgcgagcatccgcgaaaccagccaaagcgcacttgcccagcagcagatcgcacgcgacgctgtgaaggccgaggcaacagttcgcggcatgcagcttgcggtacgagacattcgtctcgccaacagcccggccgatatccagaaagccacccagaacctgggcgagcagcagaaatcgaccagttttctggtcgatgagatgctgaagctttctcacgagatggagaaccgggctccgatcgagaaactcagatcgctggccgcgaactacgaaaaggctgcgcagcagatcgcgcgcgtccgcggcgaagctgtggccgcgagcggtgccgacggcgccacgcgcgctgcaaagctcaacgaagacgccatccgcatggcacgcgagattactctgccgattgccggcgagctcgacgtggtgatcggccagatcgccgaccacgcgagacataaatccgaggagaagaatgccttggccgcggcgcaaatgagatcaagcgagcaacttgcgatcctggtcggcgccttcgctgcgctcgtgctcgtctgctcctggctgatgtcgttcctgaccgtcgcgcggccgatccgcgcgctcaccgtggcgatggataagcttgccggcggcgatttctcggtggtgctgcccggtctcggccgcaaggacgaggtcggcggcgtcgccgcggcagtcgaaaagttcaagctcgtgtccgagcagaaggcgcgcgaggaggccgaagccaagatcaggcaagaccagattgcggctgcgcaacgcaaggccgagatgcacaagctcgccgacagcttcgaagccgcgatcggtgaaatcgtcgataccgtatcctcggccgcgaccgaactggaggcatctgcgtcgaccctgacgtcgactgcggcgcgtggacaggagcttaccacgatggttgctgccgcctccgaggaagcctccaccaacgtgcaatcggtggcatcggcgaccgaggagctgtcttcgtccatcaccgagatcagccggcaggtgcaggagtccgcccgcgtcgcgggcgatgcggtgagccaggcccgcaccacgaccgaccgtgtcggcgacctttccgccgccgcagcgcggatcggcgacgtggtcgagctgatcaacaccatcgccggccagaccaatcttcttgcgctcaatgcaaccatcgaggccgcgcgcgccggcgaggcgggacgcggctttgccgtggtcgcctcggaggtcaaggcgcttgcggagcagaccgcgaaggcgaccggcgagatcgggcagcagatcgccagcatccagaccgcgaccgatcattcggtcggcgcgatcaaggacatcagccataccatcgagaagctgtcggagatctcctcgaccatcgcagccgcggtggaagagcagggcgccgctacccaggaaatttcgcgcaacgtgcagcaggcggcggcaggcacgcatcaggtgtcgtccaacatcaccgatgttcagcacggcgctagcgagactggctcggcgtctgcgcaggtgttggcggcggcgcaatcgctgtccggcgacagtcagcgcctcaagctcgaggtcggcaaatttctctccaccgtgcgcgccgcctga

SEQ ID NO: 6666 - DNA, 240 bp, BradyrhizobiumColbertium
atgggcattgatgttctgcatcgtgccgatcgccatcacgccgacaccggcgagggagagcacgaggaccgacagcacggtcagcagcttgaaaacgatcgacaacttcgacatcacgataaccccggtagcaccagcaacgcgcaaatcacctgcgccgcaatcgtcgcggcggacgacagggcgggggtcattccaacgatgctggctggttcttatcccgtgagattgcgcctataa

SEQ ID NO: 6667 - DNA, 330 bp, BradyrhizobiumColbertium
gtgtccggcatccaggccgcgacgcaggaatcggtcagcgccatccaggagatcggcggcaccatcgagcggctgtccgaggtgtcctcggccatcgcggccgccgtcgaggagcagggcgcggcgacgcaggagatttcgcgcaacgtgcagcaagcctcggtcggcacgcaggaggtgtcgtccaacatcaccaacgtgcagcgcggcgcgatcgagaccggctctgcctcggccgaagtgctgtcggcagcgaagtcgcttgcgaccgacagcactcgcctgaaggtggaagtcgcgcagttcctggaatcggttcgcgcgacctaa

SEQ ID NO: 6668 - DNA, 2388 bp, BradyrhizobiumColbertium
gtgccggcgcccgcacccggcttcgaggagcggctcggcacccgctgggtcgtttggatcggcggccttgcgcttgcgctcggtggcttcttcatggtgcgctattcgatcgaggccggccttctcggtcccggcgtgcgcgtattcctcagcggcctgttcgcactggcgctgctcggtgccggcgaatggacgcggcgcaaggagagcatctcgagcctccaggcgttgccgatcgccaacatccctgcaatcctcaccgcggccggcacggcggtggccttcgcgaccatctatgccgcctatgcgctgtacgaattcctcgtgcccgcgacggccttcgtgctgctcggcctggtcgcgctcggcacgctcgccgcagcgctgctgcatggccccgcgctcgccgggctcggcgtcgtaggcgccttcgtgacgcctatcctcgtctccagcggcaagccagactattgggcactctatgtttatcttgcgatcgtgacagcggcgagcttcggccttgcccgtatccggctgtggcgctggctcgcggtgaccaccatcgtcttcgccgtgctgtggaccttcccgggtctcgacgccgccgaattgcaggtcgcgccgcacgccttccatgtcatcgccggcttcctgctcgccgcgctgctggtcgtctgcggcttcatgttcgggcccggcatcgacgatggcgagatcgagccggtctcgtcgagcgcgctcggcgcttatctgttcggcgcgatgctgatcgtgctctcgagcggacacgccgatctcgcgttgcttgccttcacgctgctggtcgccggaacgctgttcgtcgcctggcgcgcgccggcggccaccggcgcccttggcgcggccgccgcgaccgtcttcatcgtgttcgccgaatgggcggtgcgcgccaatcccgatatgctggtgctgccgggcggcgccatgcccggcatcgggccgaccgcgaccggcagcgcggtgacgctgcatctggtgatggccgcgatcttcgcggcaggcttcggcatcgcgggtttcctcgcgcaaggccgctcgaattcggcaatcatcccggtggtgtggtcggcaacggcagttgcgatgccgatcgcaattctggtcgcgctctacgcacgcatcgctcatctcgaccgctcgatcccgttcgcgatcgtcgcggtgctgcttgccgccgccttcggcgcagcgaccgaagcgctcgcgcgccgcgagacccgaccaggcatcgcgatctccacggccctgttcgcgaccggcacgctcggcgcaatggcgctggcgctgaccttcgcgctggataagggttggctgacgatcgcgctggcgctgatgtcgctcggcaccgcctggatctcgatgcagcggccgattccgttcctgcgctggctcgccgctatcttggccgggctcgtcaccgcgcgcatcgcctatgatccgcgcatcgtcggcgacgccgtcggcaccacgccgattttcaactggctcttgtggggctacggcgtgccggccgcatcgttctgggctgcgagcatcttcctgcgccgccgtgccgacgatgcgccgctacgcatggtcgagaccgccgcgatcctgttcaccgccctgctcgcgttcatggagattcggcactttgcggcgggcggccgcatgaccgtgcccccctccctgctcgagttcgcgctgcaggtctgcatcacactcgcgatggcgatcgggctggagcggttgcggctgcgcagccacagcatcgtgcataatgtcggcgcggtggtgctgacggcgatcggcgggctgatcagcgtgttcggcctcctgatcatggagaatcccctgctgtggcgcatcgacgtcggcggcgccgtgttcaatctgctgctgctgggctacgcgctgccggcggtactgatgctgctgctgtcgtatgctgtcgtcggcgagcgcggcaaggtctacgccaacactattgcggctggcgcgctcgtgttcgcgctcgcttatgtcacgctggagatccgccgcttctatcacggtccgatcctgtccaccggaccgacgacgggcgcggaacaatacacctattcgatcggctggctcgccttcggcgttgcgctgctcggcgtcggcatcctcgtcaattcggagcgtgcgcggctggcctcggccgctgtgatcgcactgacgatcctgaaggccttcgtgatcgacatgtcgacgctgacaggcgtctaccgcgcgctctcattcatgtgcctcggcgtcgtgctggtcgcgatcggctggctgtaccagcgcatcctgttccggcggcaggccgcaccgccaccggctgcgcaaacgggcacatag

SEQ ID NO: 6669 - DNA, 840 bp, BradyrhizobiumColbertium
atggtagaccgctcaaccgaacctctgccggaaaacgcgcctggcgcagacaagccgacacaactcggcatccaatcggtagaggttgctggcgatctaattcacgcactgatccaggccgatgggccgctcaaattggccgatctggcgcagagggcaggcatgccctctgccaaagcgcaccgatatctcgtcagtttgatgcgcgtcggattggcgcggcaggatgcggcgacgtctcgatacgacctcggacctgtagctttccagcttgggctcaaggggttcagtcgcttcgagccgttgcaagtggctgaagcgacgctgcacacacttgtcgatcaggtcggcgagacagcggcgctagccgtctggggcgaaaagggccctacgatgatcaaggtcgtcgaggcccggcatgacctggcgagtaccatggcgccgtcgcaccactgcccgctgacctattccgcgacggggctcttgttttgtgcctacgaagacccggttcgtacggccaccgcaatcgagcgcgagttggaccagaaccgacggtcgggccgtctcaacgtaccgaaagaacgggcgtctctggctggaatgatgcgtgaaatcaaggagcgcggttattcttgcctgtcagacggcggtggtgacggcttcggcgccgtaagtgcaccggtgttcgatatcaccggcaagttgatcatggccctgacagtgtttggtcgctcaacacgcgtcgacgcgaaaccaaatggagcacttggaaaactcgtcgccgataccgcagccgaactatcggcctcgctcggataccacggcgcgcacgggcgttag

SEQ ID NO: 6670 - DNA, 771 bp, BradyrhizobiumColbertium
atgcacgacggatccatttctggcctgctggccggcgatgtcgctgtcgtcacgggggcggcgcagggcattggagccgctatcgcccgcggacttgccacatccggagcctcagtaatcgtcgtcgatcgatacgccgagggtgcctgcgcaacggccaacgcgatcaaggctgtgggcggacacgccgaagggtatgggctcgatgttgcggaccgtgctgcgtgctttgcttttgcaaccactgcaagggaggtgttcggtgatgtggctgtgctgatcaataatgcagggatcacgcgccgcaccgcacccgacgaccctgaatttctcaaccacctcgacgcgcagattgccgtcaatctgaacggcactgccaacatgacgatagctctgctgccgcagctgcggcgcaccaagggacgcgtcgtcaatgtcggctcgattgcttccttcgtcgcctatcggaattcggccagctacgccgccaccaagggcgctgtcattcagctgaccaaggcgctggcggccgatctggcagcggacggggtacgcgtcaacgggattgcaccaggtgtcattgccacgcctatgaccgaagggacgcgcgctaatcccgaggtgatggcccggtttctgaatcatacgccgatggggcgcgtaggcgagcccgaagagctcgtggggccgacgctatttcttgcctcacgcatgtcctcctacgtgaccggtgtcatgctacctgtcgagggtgggtatcttacttcatga

SEQ ID NO: 6671 - DNA, 1728 bp, BradyrhizobiumColbertium
atggttgcctcttccaagcacgcgattccaaatgaaacccagcattgcgatgtgttggtcgccggctccggcgcaagcggcatggttgccgccatcgttgccgcgaagaaggggctgaaggttatcgttgccgaaaaggaagcggtgttcggtggcacaacagcgttatcgggcggctatctctgggtgccgaacaatccggtgagcatcgaagctggggtcaaggacagcaaggacgcggcgctcgcgtatatgaagcacgaatcgggcaaccactacgacgctgcgagggtcgatgcatttctcgacgcaggtcccgagatggttgccttcatgcatgcgtatacgcaggtgcggttcgaagcggctcccgcattctcggattaccatccggatgcgccgggtggcacgccgggcggtcgctcgatactgacgcaacctgtcagtgcgacaattctcggatcggatattgacaagctgcgaccgccgcggcctgagctaacgctctatggcctcgcaatcggctctggtaaagagctttggcacttctatcgcgccacgcagcggctggaatccttcctctacgtcgccaaacgtttggtcaaattcgggttcgaccgctccgtgcggggccggtcgatgctgttgaccaacggcaatgcgctggccgcgcgactgtttcggtcggcgtgcgaactcggcgtgccgatctggctcgacagcccggtgagaacgctcatccgaaacgacagaggccatgtcgtcggtgcggaagtgctgacaccaaaaggcaggcgccgtgtgctggcgaacaagggcgtcgtactggcctgtggcggctttccgtttgattttgccaggcggcagaccctctacaatcactgcgccggtgagagcgagcattggtcggcggcgagtcctggaaacactggagacggcgtacgtctgggcgagtcggttggcggcgaggtcgtcaaggattatcccaacgcgggtgcctgggctccgaccagccttgtgccgcgcaaggatggtaccaagggcccgttcccccacttcatcgaccgcggcaagccgggcgtcatcgctgtctcgcgagccggacgccgcttcgtcaacgaagccaacagctatcatgatttcgtgcagggcatggaatgtgcgtgcccttcggaccaaccggcggaggcattcctgatcgccgatcaccgcaccatccgcaaatacggtcttggccatgtgaaaccggcgccgctacctcttcaaccttcgatccgctccggctacctgatgcgcggcaacactcttgccgagcttgcatcagtggcgggcattgaacgaaacgctttcgaggaaacggtcgcccgctggaacgcggacgttccgactggcacggatactgccttcggcaaaggctcgaccgcctacaaccgttttcacggcgatccagaggtcaagccgaacccgtgcctcgcgccgatcgcgaccggtccattctacgctgtgcgggtcgtccccggcgatatcggcactttcgcaggcctcaaaaccgacgaacacgcgcgtgtgatcggccctgacaatacgccgctcaaggggctttatgccgtcggcaatgacatggcgagcgtgcttggcgggaattattccggcggcggcatcacgctcggaccgggcatgacctttggttacatcgcgggcctccatgcggccagcgaacgcaactga

SEQ ID NO: 6672 - DNA, 1119 bp, BradyrhizobiumColbertium
atggccgtcgctttattgggagcagcgcaggcccaggataaggaaatccgcattggtgcgttgatcgcagcctcggggccaacggccttcatcggcgcatcacagaagaacgccttcgagatgctcgtcgaacagatcaatgcgcgcggcggcatggccggtaacaagatcaggccgttcctctacgacaccgaaggcaacggcacaatcgcggcccagcagttccgccgcctaatagattcagacaaggtgcatgttgtggtcggcccctcgacgaccggcgaaagcctggcgatccgcgcggtcgcaaacgaaaacaaggtgccgctcgtcagcttcgcaggcgcggaagcggttgttgtgcccccaaccccttacgtcttcaagactccaccgaccgaccgcatcgttgccgagcacctgatttctttcatgaaggtcaagggcgccacctccgtcggcatcctgtcctccgccgatggttttgggcaggccggtgccgcagtcgtcaaagaggtagccagccaactcggactgaaggtcaacgcagcggaagagttcggcccacgcgataccgacatgacgccgcagatcctcaagattcggtcgagtggcgccgatgcgatgctgatctggagcgtcaaccccggtccgaccatcatactcaagaacgcggcggccattggctacaacaagccgatctacaacagctatggtgctgcctcgccgcagctgatcgagcaggccggcgcggcagcggagaagtcttacgtatcgtccatgcgtctgctcgcgcccgagagccttgccgcaaacgatccgatgcgcccagtggtgaccaaactcgcggccgattacaaggagaagttcaaagccgacgccacgaccttcatcgggcatccctcggacgcgatgctgctcatcgaggaagcgctgaaaaaggctggcgggtccccggatcgcgagaagctggcggaagccatgcgcagtggcatttccttccccggcgccaacgggatgtttcgcttcactgacgccaaccacaacggcctcgaccgggagtcgcagtcgatggtgatgctgcaggttcaaggcggcaagttcgtcaccgtgaagtga

SEQ ID NO: 6673 - DNA, 882 bp, BradyrhizobiumColbertium
atggataccctgctgcaaatcctgatcacgggcctcgtcgtcggctgcatttacggcatggcggcacttggtttcaccattgtgtacaatgctaccaaactgatcaatttcgccaacggcgaattcctgatgctcggcggcgttcttcttgcctgcgcggcgcaggccgccaaactgccgatgtcgctggcgctcctgctcgctgtagcgggtgcggcgcttaccggctggctgatgcagcgctgcattctcgatatggcgatggcgcgcagttccgatccgttgacgctggtgatgctgaccatcggcgtggcgctcgccttgcgcggggcagccgcgctcgccttcgggcgtgaaatcacgttcgtgccggaattcgggcttttgccgctggtgttgataggcaacgtctacattccgagccaaggcctctggatcatcttcgtcctggcgctgaccagcaccgttttgtggtacatgttctcgaaaaccatgttcggcaaggcaatgcgcgccgcgagtcaagaaccgagggccgccgccctttgcggcatcgagccgaagcgcgccgccgccatcgccatgaccttggcgggtgcgctcggtggtttggccggcgcgatgctcgccccgatatccgcagcgttctacgaaaacggcatcttccttggtctcaagggcttcgcggcggctgtcgccggcgggctgggcaaccccatcggagctattgtcggtggactgttgatcggcgttgttgagagcctgtccgccggatacgtcgcctccggcttcaaggatgccgtcggttttatccttctcattctcgttctaatccttaggccgcagggcctcgtcggtcgcgccatcgttacacgggtctga

SEQ ID NO: 6674 - DNA, 966 bp, BradyrhizobiumColbertium
atgaccacttcgacatcgaattccaacctccggcatgacgcggttatcctcgcaggccttgctgtggttcttacgctcgcagaactagcgctgaccagccagttccatcgctcgattctgatcctgtcgatgatccacgctatcgcggccattggccttacgttgctgctgggctacgcagggcaggtctcgctcggccaaggcgccttcatgggcattggcgcttatgcggcggcctttgccctgcagaagctggcgctgccagcgcccgtggcgctggtggctgcggtgctattgccggggctgctcggcttcttgatcgcccgaccgatcctgcgcctgtcgggccacaatctcgcgctgggcacattggcgctcggcgccgtgtttttcgtcgtggcggcgcaatggcgcagcgttaccggtggcctcgaccccggtatcgtcgatctgccgagtctggcgatcgcgggtttcagccacgagcgtatactctacattctggcgggcatctcgttgctgtcggcgatcgccgtcgccgtatcactcgtagacgggcggttcgggcgcggcctgatggtgctaagaacatccgaactcgttgccgcttgcatgggcgtcgatacggttcgggccaagtctatggtcttcgccatcgccgccgctttgtccggcctgtctggcgctcttctggcgctttatctacgctcattcaacgccagcgccttcggtgtcgggctctccatcgagcttttgatgatggtcatcctcgggtcgctttcgaccgtctggggcgcgatcttcggcgccttcgccatcatagtcctgcccaacctactcgaaggcttcgatcacgccaaacacctaatctatggtcttgtcatggtaggcatcatgatgttcgctccccggggtcttggagaaacgttgttccgccttgtcacccgcaagagaagcgtcgcatga

SEQ ID NO: 6675 - DNA, 783 bp, BradyrhizobiumColbertium
atgagcagcacgcctctggcttcgatcaagggcctgtcgaagcgattcggcggcattgcggccgtgtctgacgtgtcgttcgacctggtcgccggggaagtcacggcgctgataggtccgaatggcgcaggcaagaccacgctgatcaatctcgttacgggtgttctcgcctgcgacggtggcacaatcagcctcgaaggagaggacatcaccgctcggccgacgcatcagcgcggcacggccggcatcgcgcgaacgtatcagaccccgcagatagcgcatggcatgagtgttctgaccaacgtaatggcgggcgcttaccggttcggccagcatggcctgttgagttccgtgttccgaccctgggtggtcatgaaagaaaatgacgaaatggctgctcgcgccgcgcagtgtcttacgcgtgcgggcgtcgccgagcagtggtggcagcgtctggcgacggatctgccctatgggcttcagcgccgcgtcgaaatcgcccgctcattggcgcaagatcccaagctgctgttgctggacgagcccgccgcgggcctcaatccaagcgaaacggcggacctgtcgcgtctgctttctgagatcgccgcagatggccgcgccgtcctgcttgtcgaacacgacatgggcatggtgatgtcgatttcctcgcatatcgttgtggtgaatttcggtcgcaagcttgcagagggtacgccgaaagacatcgcatcgaacaaggacgtgattgctgcctacctcggcgcggatgaggcggtggcctga

SEQ ID NO: 6676 - DNA, 726 bp, BradyrhizobiumColbertium
atgaccgagcttctctctattgccgatttgaaggctggctacggcccggtcgaagtgcttcacggcatttccatcgccattcgaaaaggtgaaatcttctccatcgtcggcgccaacggcgccgggaaatcgacgcttctcaatacgatttcaggcttcaacccgatccgctccggcgccatcgtgtttgacggacgaccgattgctggaaccgctccagcaatgatcgcgcgcgctggcctacgtcatgtgccggaaggacgacgcgtttttgccgagatgacggtggaagaaaacctgtctctcggcggctatggccagccgcatgctgaagtcgccgatcggatcgaccggatttacgagctgtttccgcgcctcgtagagcggcggacgcaggcggcgggcactatgtccggcggcgagcagcagatgttggccattggcagggccctggcggctaaaccaagggtgctgatgcttgatgagccatcgatggggctcgcacctcaggtcgttgctgaaatattccgcctgatcttgcgcatgcgacacgaattgggacttgggatacttctggttgagcaaaatgccaaagcagcgctgcgtatcgcagaccgcgcctgcgtgctgtctctggggcagatcactctgcgcggcgcaggcgcagatctcttgaatgatccgagtgtcgtcgaggcgtttcttggggggaacgcggctacttga

SEQ ID NO: 6677 - DNA, 1080 bp, BradyrhizobiumColbertium
atggaaacccaccgcatctccgagtcaggaccggatcgcgaactgcttggatcgctgcgtgctcttacaggactggatacccccgcaaccatagagcgtttcgagaccgagtatccgaatgcaactttctgggcgacgttcggtcaatccgaagcctcgggcttggcgatgctttcgccgtaccgcgaccgtccgaaatccgcgggccggccgctgttttggcgcagcatcgcggtcgtcgatggcgatgaccgcgcgaatccggccggcgaaatcatcgacttcgtgaacggacaaatcgctcgctacaaacggccgaagcacgttgtgttggtcgataaacttccgaggactgcgggggcgacctcgatcgggctgctgttaaatcagcgcacggcagacgtagcggtaaaggtaacccgccacgacgggctgcctcatccgaccgcggcagagaggcgccgaataccatcgcgccattcccgctgtagccgcgcgcagagttctgcgaccggaatgatgtcgttgacgccgccgactccctgtcccgcggtccagatatccttccacagtttcgggctgatctcgcgcgcgacgttgaagctgctgtggtccttcgggttgtcgtacgggcggttcagcgtctgggcgagaaagctggcgccggccacccgcaccggcacagacggcaatgatcccgtcggcgttggcgtcgagcgccttcttggcatgcttcatcgtggtcgcgtcgtggaacaccagcccgccataggtatgtatggcgtcggtcagttctcgcgtaattccgagggtcgtgatgacgatgggaatttcatgacggatggccgcggcgaagtctgccgcgtgccgaggattggtggagtgaacgacgaattgcgcaccaaagggcgcgcaatgttgcccggcgagccggccgcgtatgtcggccagccacgcttcgaaaccgtccgtcgtgcgctggttgagcaccggaaaggtgccgatcacgccagcttgacaggtctcaacgaccagatccggtcccgagaaacatcggcgctgccatcaccggaattttga

SEQ ID NO: 6678 - DNA, 774 bp, BradyrhizobiumColbertium
atggagcttcatggcaagattgccgtagtgacgggtgccgcttctggactggggcttgcgacctgcaaggtgctcgccgcggccggcgtgcgtatcgccggtttcgatcgcgacgagaaaaaattgcaggcactaaagtcgaacctcggcgatgcgtgcctggcgcgcgtcgtcgatgtcgccgaagagagcagcgtgaaagacgggatcgcggcggtcgtcgccgcgttcggcggcgttcatgtcgcagtgaattgcgcgggggtcgccgatgccgccaagaccgtatcaaaaggcgagccgttcccgatcgcgacgtggaacaaggtgatcgcgatcaacctgaccggtaccttcaatgtcatcagattcgctgcgctcgcgatgaccaggaacacccctgacgccgagggtggcgagcgcggcgtcatcgtcaacacggcatcgggcgctgcatcccaagggcaggtcggtcaagcggcctacagcgccagcaaggcgggcgtaatcggcctgacgcttccagttgcccgcgacttggcgccacacggtatccgcatagtctcgatcgcgccggggctgttcgataccgcaatggtcgcaggcattccggacaatgtctctcagtcgatcgtcgatcgcatgatcctgtatccgaaccggatgggacaaccgcgggaatttgcccggctggtgcaacatatcgtcgagaactcgtacctgaacgcgaccacgctcgatctggatgcaggcgcccgcatgcagtcgcgttga

SEQ ID NO: 6679 - DNA, 1221 bp, BradyrhizobiumColbertium
gtgggcgtgggcatgacgccgtttggccgcatgctcgacaaggacatcaagacgatgacgaaggaggcggtcaacgcagcgctcgcggatgccggcctcgcgaccacggcattggaagccgcctacttcgccaacgcgtcgcaaggacacatggaaaagcagcacatggtgcgcggtcagatcgcgttgcggtcgatggggatcgggcagatcccggtcgtcaacatcgagaacgcgtgcgcgagcggcagctcggcgctgaacctggccgtcaccttcctgaaagcaggcgacggagacgtcgcgcttgcggttggtgccgagaagatgttctcgagggatcgcgagcttatgttcgggtcattcgacagcgcctgggacatcagccgcaaggacgaaatcggcgagcggctcatgaagcttggcgaaggcatcgatccgccgcccggcacaacgtccgacaagccctacagcgtattcatggatgtttatgcggcgttctcccgctttcacatggcgcgtttcggaacgacgcagcgccagatcgccgcagtcgcggcgaagaatcaccgacactccgttgaaaatccgctgtcacagtttcgtacgccctattccattgacgaggtgctgagcgcgccgccgatcacttatccgttgacgctgccgatgtgttcgccggtatcggacggcgccgcggcggttgtggtgacaactgcagcgggactgaagcgctatggcatcgatcggtcgcgcgcgatccgggtgctggcatccgtggtccagaccggcagcgaccgtgacccttcggacgtcgaaaaccattgcaccgcacgcgccgccaggcgcgcttacgaaaaggcgggcgtcggtccgggcgatatctcagttgccgaagtgcatgatgccaccgccatgggcgagatcatccagatcgaaaatctcggcctgtgcgcctttggcgacggcggcgccatcagcgaacgcggcgaaaccgccatcggcgggcgcgtcccggtcaatccgtcgggagggctggagtcgaaggggcatccggtcggcgccaccggcctcgcgcaggtccacgaacttgtcgcgcaactgcgtcatgaggccggggcccgccaggtcgacggcgcgcggatcgcgatcgccgaaaatggcggcggactgcacggtatcgaagaagcggtggcgtgcgtgaccatcctgagcaaatag

SEQ ID NO: 6680 - DNA, 1116 bp, BradyrhizobiumColbertium
atgttgcagctcgagggtattcgtattgtcagcctggctgagcaatatcccgggccctacgcgacgcttctgatggccgatcttggggccgacgtcatcctcgtcgagcgtccgggcatcggagatcccgcgcggcagtttccggcgttccacgccgcgctcaatcgcaacaagcgctcggtggcgctcgatctcaaggcggacggcgacaagcagcggttccgggatctcgtcgcttctgccgacgtcctgctggaagggtttcggcccggcaccatgcagcggctggggctgggttatgaggcgatggcctcgatcaatccccgtttggtctatgcgtcgatctccggcttcggacagaccggcccctaccgcgaccgacccgcccatgatctctcctaccaggctctcgccggattcctgcacgcccaggccgcaacgcgttcgacgcagcttccgagcgatatcgcggttggcgacctttcatcggggatgtttgcggcgctcggcgtgcttgcggcgctgctggcgcgcgcgcgcatgggaaagggggcgtatatcgacgtgtcgatgaccgacgggctggtatcgtggatgtcggtcatggttggcccggcgatgaacggcgagccgctcgccgacatcgcggcagagcccgcttatggtctgttcgaatgccaggacggcaagctgctgtcgctgtcgatcgcgcatgaggactggttctggcggccgctttgcacgctgatcggcatggaggacgtagctgatctgaaacgcgcgcaacgaacccgacgggaagtcgaactggttgcgcgcatcggcaaggccatcgccgccgcgccacgcggccaatgggccgacaagcttgacgccgcgggaatcccctggggtcccgtcagcgcaattgacgaagtcgcggccgacccgcacttcatcgaacgggggctgttcggcgaggtggccgacagcgatggcaggcgtcgccgctatgtcgcgcaacccttgattattgacggccaccatccgggaccgacgcggggcgtgcctggcctcggcgaacacacggaggaagtgctgtccgaactgtcgctaagggcacagaatataacctga

SEQ ID NO: 6681 - DNA, 807 bp, BradyrhizobiumColbertium
gtgacgacgtctgaaaagatcaagccggagcaaagcgttctggtcgaagttcgtgccgatgcggtatggatcacgctcaatcggccgacggcgctcaacgcgattacgcccgacatggtggcgggaattaccgccgctctaacgcatgccgatgatccggcgatcaaggccgtggtgctgatgggcaccgggcgtgccttttgcgccggagccgatttgaaatacgtcaatagcgcgacgcagggcgatgcacccgccgcgacgcggttcctcgacgccgtcctcgacatgatggcacgactggagacctgtccgcggccggtcatcgccgcagtcaatgggttggccctagcgggcggcctggagttggtgctgtgctgcgatctggttatcgcagcgcggtcagcgaagcttggtgacgcgcatgccaatttcggtctgctgccgggcggcggcagttcggtgcggctgcctcgaaaaatcggtccgacccgtgcgaaatatctgctgtttactggcgatttcgtgcccgccgacgatctggttgcctgcggtctcgtcaacgaggtcgtcgatgacgccgaactgacggcggcggtcgagcgcttggccgccaagctcgggtccaagagctcgctggtgctccgccgcatgaaggcgctggtcgccgacggtctcgaacaaccaaaggaggttgctctcaggctcgaattgctcgcaagcgaagtccacgcccatagccacgatatgaaagagggacttgccgcattcgagcaaaagcgcaagccgtcgttcatcggccgctga

SEQ ID NO: 6682 - DNA, 792 bp, BradyrhizobiumColbertium
atgcttgagctcagcaatgtcgaggttatctacagcgacgtcatccttgcggtgaagggtattacgctcgtcgtgcccaaggggtcttgcgtcacgctcttgggcggcaacggagctggcaagtcgaccacgctcaaatcgatctcgaacctcctcatgaccgaggacggcaaggtgacgtcggggacgatttcgttcgagggctcgcggatcgacggcggtgatccggcaaaaatcgtccgcaacgggatcgtccacgtcatggagggccgccgcgtcctcagtcacctgaccgtggagcagaacctgattgccggcggtcatatggagccttcagcgccggcgatgcggcggcggctcgatggcgtctacgaccggatcaagcgccttgccttgctgaagtcgcgcacgaccggctatttgtccggcggcgaacagcagatggtggtgatcggccgcgcgctgatggccaatccgaagctcatgatgatcgacgagccgtcgttggggctggcgccgatgatggtcgatgaggtgttcggcgttctccgctcattgaaggaagatggcctgacgctgctcatcgtcgaacagaatacccgcgtcgcgctggacctcgccgatttcggatacgtcatggaagacggacgcatcgtactggaaggtaacgcggccgaccttcgcgccaacgaggacatccgcgaattctatctcggcctcaacctcgaaggcgtgcgcaagagctatcggaacatcaagcactatcggcgccgcaagcgatggctcggataa

SEQ ID NO: 6683 - DNA, 1230 bp, BradyrhizobiumColbertium
atgaagagcagacgttttaaatggatcgcaggcgccgcggcagtggcggtcgtcacactcgcgctgcccgcttcggcgcagacgacctacaatattgcctcgatcgccgactttaccggaccctacgccgacatcatgaaggaccttgtcggcgcccgtcgcgccactgtcgattggtggaacgaagaagtcggcaagggaatgggcatcaagatcgggatcaaggactttgacgggcgctacgacgcggcgcagactgcgagcctttggcccggcatcaaggccgaactcaatccggtggccgtactcggcgtcggtggacctgacgtcgccgcgctgcaaggtcggcttccggcggacaaggtgcccatgttgatgtcgacggccggttacgggttcgcttggaaaggcgatccctggatcttcaacccgcggccaacttatggccatgaggctgccgggttcttcgaatggttccgcagcacccgcggcatcaaggggccgctgaaagtcggcatcatttcctcggaagcctcgccggcttatgtcgatattgccaagggcgcggagaagttcgccaaggacaacccggacaaggctgaaatcgtcgagaccatttttaccgaagttcagccgaccgatctgaccacccaggttggccgcctgatccgcaagggcgtgcaagttatcgatatccagaccaacacggccgcggttgtggcgaccaagcgtgcgctgcaggcgctcggcaaggccgatattccgatcatgatgagttcgcataacggcctgattgcctcaggtaaggccgttggcggcatgaaggacctggaaggcgactatgaagtctacggcatggccgtgccgactgagcaaaagaccaaagcccacgacttccaccagatggtcgtcgcaaaatacaagtcgcaggcgacatggtccgtcgcgagcgtcatgggctacaatcagacgctggtcgcactccgggcgatcgaggcggctgcgcgcaaggtcggcgccgacaaagtcactggcgaggcggttcgcaccgcgctgctgacgacaccgatttcggccgatcagactttcagcattctgccaaacctgacttatacgaatgaggcgccattcccggtcaagggcctgaccgtcaacgtcgcgaccatcaaggatggtaaatatgttatcgccgctgaaaacgtgccggtccccacgattgcgaagtggtaa

SEQ ID NO: 6684 - DNA, 1047 bp, BradyrhizobiumColbertium
atggatccggccggcattttcgccaccagttttgcgcgcgatgcggcgttggtgcggacgcgtccgcagcagattgccctagccttgtttctgattttcctgctggcgctgccgatcctgttcggaccgcggctgctcgccatctcgacgctgatattgatctcgtcggtgatcgtcctcggccttcaggtcaccaccggttatgccggccagatcaatctgggacaggccgcctttatgggcgtcggcgcctacacgaccggttttctggccacgaaactggggtttccgttctggttgaccatcccgctcggggggtgttccgcggctgtgttcggcttcatcttcggattgtcggcggtgcgcatcaaggggttctacctggcgctgacgacgatcgccgcccaggcgctgtttcatttcttcgttctgaacctgccatggtttggcggttcgaacggcctgacgctcgaccctgccagcctgttcggattcgcgttcgcgacggatatctcgatctattatctctgtctcgccgtcgcggcgctcatgacctttggcgcttacggcatggtgcggggccggtacggacgcgctttcgtagccgtgcgcgacgacgacgtcgcagccggcattatgggcattgatgtcgtggccatcaaggcgaccgcgttcttggtcggcgcattctatgccggcgtcggcggcggattgtgggcttatttcgttcgctttgtcgcggtcgatcagttcacgctgttcaattcgatatggtttattgccatgataatcgtcggcggaatggggtcgatcacgggcgctctcgtcggcgtcgtcgtcatcaaatgcattcaggaggccttcgtgtcgctcgggccatccgtcgtctcgcaattcccctcgatcggcggcgatgtcgtattttccctgatgaatgtgtttctcggcagcgtcattgcagcatttctgatcttcgagccgcgcggcctgatgcatcgctggaatatcctgaagcggtcgtatcggacatggccgtttccatactga

SEQ ID NO: 6685 - DNA, 885 bp, BradyrhizobiumColbertium
atgatcgactttctgaattacctgatcaacggttcgctggtagggctcctttacgcccttatcgcgatgggcttcattgtcatctaccgcgcgtcgaaggtgttcaactttgcgcaaggcgagctcgtcgtgttcggcggcttcatcgtctggtggatggtgatccaaaccggactgccactgttcgtggcgcttccgctggcgatggcggtatcggcgatattcgggcttatcatcgagcgcatctttttttcgcgtctcgtcggcgagtccagtttcgcgatggtgatggtgacgatcggcctgctgattctcatcaggggcctcatccttttgatattcggaccgcaggtccggccgtttccgatcatcttcgcgttgaagccggtgatcatcggcgacatcctgattccgcggtcactgctgatcggcgccgtgatcacggtgattgtcggactgggcctgtcgtggttcttcaacaacacccgcgccggactcaaaatgaccgcggtcgccgaggatcatcaggtcgcgttgtcgatgggaatctcggtgaaacgctccatcgctttcgcctgggcgctgggcgccgtattgtcgaccctcggcgcgatcatctacctcagcggcaagtcgctgaatttcctggcgtcggacatcgggctttcggcgctgccggtggccctgctcgccggattcgagtcgatcgccggagtcttgttggccggtctgatcgtcggcgccgtgcagggacttgtgacggcctatgtcgacccggtggtcggcggagcggttggctcggtattcccgttcgtgatcatgcttgtcatcttgtttatccgcccgaccggaatgttcgggtggagaacgatcgagagggtttga

SEQ ID NO: 6686 - DNA, 1962 bp, BradyrhizobiumColbertium
atgaaaacattgccgcaggcattcgtcgaccgggccacggcggagcccgagcggctaatcgcgcgtcacaagtatcggggcatctggcgtgagttccgttacggcgacgtgctcgagcgcgtccgcaacctggcggttggattgcaatcgatgtcgtttgcgcgcggcgagacggtcgccatcatcggcgaaaacgagcccgagaatttttggatggagcttgccgtgctctcgctcggcggcaaggtcgtctcgctctaccccgacctcacagtcggtgaaatcgagtacctcctgaacgacagtcaggcggtttacttcgtaggccaggaccaggagcagattgacaaggggctcgcagtactcggcagcgtcccgacattgcgcaggctgatctactgggatgataccggcatgtggtcttaccggcagccgagcctcatgaagctcgagcacatggaagacgagggacgcaagcggaacgccgccgagccggggttgttcgatagccttgtcgcattgggccagcctgacgacatcgccatcctgtcctacacatccggcacgacggggcgtcccaaaggcgtcattatcacgcaccgttatctgatcgacaacgcgcatcgattggtgaacggcaccgacctgacgccgggcatggattacctcacctacattgcgcctgcctgggtcaccgaacaattgttcggtgttacgatcggcgtcaccttgccgctggtggtcaactttccggagtcgccggagcaggttctggccaatctccgcgaactcgcggtcgaggcgatggtgttcgcaccccggcaatgggagagcctggcctcgacgatccaggcaaagatgctcgacgcggggccaatccgccgccgcatttacgaatggggcgtcaagatcggacgcaaggtcaacgtcgctcggctcgacggcaagccggtaccattggcagcccacttggcatttccgatcgcggagactttggttctgaagccgttgcgcgacaagctcggcctgacgcgcgtgaaggtcgcgctgagcggcggatcaaccatggcgcccgatgtgttccggctgtttcacgccatcggcgtacccttgcgcaatatttacggttcgaccgagatcggcatcatgacgattcacaagggcgaacgctacgacctcgaaaccgtcggccactggcttgaagcccaccccgcaacagcggcgctggaatggaaggtttcaccggacggcgaactgctcgtacgcggtggatctttctttcagggctatttcggcaagcccgacaagaccaccgaacgaatagatggcggatggtaccggaccggcgacgctgtttccgtcactacctccggcgagttggttttcctcgagcggatcgaggatctcgccaagctgagttccggtcaaagctatccaccgcaattcatcgaaacgcggctgcgcttcagtccgttcatcaaggacatcatgacgcttggcgacgcgtcgcgggactacatcggagcgttgatcaatatcgacatgggtgtggtatcgcggtgggcggaggaacgcaggctggcttattcgacattcgccgacctctcgcaaatgacagccgtagccgatttgatccgcgaagagatcgtccgcatcaacaaatttctgcccgatcatgcacaagtccggcgatttgcgaattttcccaaggaactcgatccggacgagggcgaattgacccgcacgcgcaagctacgacgtgaatttctggtgcaacgctatgcagaattgatcgacggcctctacgccggcaaagatcgcgtggcgctctcaatccccgtcacctaccaggatggacgccgcggaacgatggcggccaacgtgctgattcattccgtcgacgcggcccctctggtcgccacggcggtgcaggcgcggcgcaaaatggccgggatgtcatga

SEQ ID NO: 6687 - DNA, 810 bp, BradyrhizobiumColbertium
atgagcgccgaagcggcgacccatgcggagcccaacgtgagcggtatgcggccgatgctgaccgcagaccgtctgcgaatgtcgttcggcggcgttgtcgccctgaacgaagtctcgatcgagatcaggcccgacgagctcattgcggttatcggccccaacggcgccggcaaaacctcgctgatgaactgtatgagcggcttctatcgaccgcagcagggccgcatcgtgttcgatggtgagcagatggtcggccgaagcgtccatcaaatcgcgcgatccggattggcgcggacgtttcagggaacgcacatctttcccggcatgaccgtgatcgagaacatcctgatcgggcggcacatgcatatgcgcagttcgattttgcaggccttcgtgcattttcactgggcccaaaaggaggaagcgcagcaccgcgaggtcgtcgaggaaatcattgaattgctggaaatcgaatcgatccgccatcagccggtcggaacacttggatatggcttgcgcaagcgtgtcgacctcggccgcgcgctcgcgcaggaaccgaaaattctgctgatggacgagccgatggccgggatgaacaacgaggaaaaggaagacctcgcccggttcatcctcgacgtacgcgaggcgcgcggcatccccgtcgtactcgtcgagcacgatatgggtgtggtcatggacctcgcggaccgcatctacgtactagatttcgggaaaatgatcgcgaccggaacgcccgcccagattcagcgggacccgctggtcatgaaagcttacctgggcgaaaaatga

SEQ ID NO: 6688 - DNA, 972 bp, BradyrhizobiumColbertium
atgctgggcgaccccaatcttgctgtgcaactccgcacccagctcaaattgcccgttctggttgggccgatgtttctcgtatcgggtcccgaccttgtcatcgcttgttcgcaggccggcgtcgcgggctcttttccgacccttaatgcgcggtcgacggcaatcctggatcaatggctcgcgaggatcacggccgagttgcagccggacgcggctccctatgcagcgaacctgatcgtccatccaaccaacaccaggctggcggaagacgtcgatctggtcgtcaaacacaagtcgccgctggtgattgccagcgtcggacatccgggtcgtgttgttgccgccgtaaagagctacggcggcttggttttctccgacgtcgcctcgctcaaacacgcccaacgcgcggcggaaaccggcgttgatggtctgattttgttgtgtggcggctccggcggcaacaccggttggctcaaccccttcgcattcgtcaccgccgttcgtaaattcttcgccggaccccttgttctcgccggggcgatctcgaatggccgcctgatccatgttgcggaagagctcggcgccgacttcgcctatgtcggtacgccctttatcgcggcgacggagagcatggcggcggatgattaccggcaaatgctgatcgatagcaacgccgacgacattcagctgacggccgaagtcactggccttcccgccaacatgctccgcaaaagcctcgaacgcagcggcttcaggccggagccgaagcatgacggtttcaatctcctgaaggagatcgagacgctgaaggcatggcgggatatctggagcgcggggcagggcgttggcgatgtcgagcgtgtcgagccggctgcgggcgtgatcgaccgcatgacgcatgattacgatgcggcgcgcgcagcaagccagcaacgggccgcgcgcaggttcgcttcagtcggcagtcaatag

SEQ ID NO: 6689 - DNA, 633 bp, BradyrhizobiumColbertium
gtggtggtgtctggccgtgaccgtcagcttgccgcgtggaacgacaccgttcagacccgcgaccagcaattcaatctgaagcgaaccgccttgctgaaagaggcggcgcgcgcattcagctcgcaaggatatcatgcgacgtcgctcgacgatgtcgccaagacgcttggcgtgaccaagcccgcgctctattattacatcaagaacaagcaggaaatcctgttcgagtgccatatgctgtcgcaggatctcggcgatcgcgcgttcgagcacgcgtacaagaccggcaggaacggccgtgaaattctgctttcgtttgcgaaggaattcatcgagtcgcacaacagcgagatcggcgattgcgccgtcctcgtcgaattccaggcgctcgatcccgccaaccgcaagatcgtcgccgcgcgccgtgacaaggcgcagcatcagatgcaggcgattatcgagaagggcatggccgacggcagcatacggcaggtcgatccaaaattgaccgtgtttttcttcatgggtgcggtcaactggatggcacggtggttcgataaggacggaccgaaaagcggcgcggagatcgcgaaggtttttacagaccttctcgaccacgccgtttcgccctag

SEQ ID NO: 6690 - DNA, 1161 bp, BradyrhizobiumColbertium
atgaacaagcatttcagcgatacaggttcggagccgtttttgtcagaacagcagcgcatggttcgcaacacggcgcgccaacttggacgggatgtccttgccccaactgcagccgagcgtgatagcacctcggcgtggccgaccgaggagctgagagttctcggcgcccagggtttcatgggcatgaccgtctccgaggaatacggcggctcggcatctggctttctcgcctattgtctcgccatcgaggaactttccgccgccgacggcggggtcggaacgatcgtccacgttcacaatctcggcgcagctcatgtcattgcgaaaaacggcactgccgagcaaaagcagcgactgcttcctgcgcttgcctccggcgacaagatcggcgccttcctgattaccgagccgcaggctggttccgaaacatcggcacttcgaacctcggcgcgccgcgacggcgatgatttcgtgatcaacgggaccaagcagttcatctccaacggcagcgaggccggcgtggcgatcatcgtcgcgcgcaccgatccgggtgcaggcaagcgcggcttcaccaccttcctggtcgagccgcctgcaaaaggctacatagtcagtcgcattgaggaaaaactcgggcagcggaccgcgcataccgcccagatccagctcgacgacctccgcgttcccaaggaaaacatcctcggcacgctcgattgcggctacggcatcatgatgtcaggtctttccgacggccgcatcgccatcgctgcgcaggcggtcggaatcgcgcaggcggctctcgaagcagccatacattatgcgcgcgaacgtgaggtcgcaggcaaaccgatcatggagctgcagggcgtcagcttcgctctcgccgacatggcggcgcaggtcgatatcgcccgacaatactatattcatgccgcgcgcctgctcgaggccggcctgccctgcatgaaggaggctgccatcgcgaagctgttcgccagcgaaatggccgagaaagtgtgctccgaggcgctgcagattcatggcggatacggttatctgcgggatttcccggtggagcgttactgccgcgatgtccgcgtctgcaagatctacgagggcaccagcaacatccagaaactcatcatcgcccgcaatctttga

SEQ ID NO: 6691 - DNA, 360 bp, BradyrhizobiumColbertium
atggcggccgaaccgccgagcacgacgccatcctggtccatgagctgcgcggcccgcagttctgaggccgccgcccaacgcgccgaaccaaaggttgcggccgtctttgcctcgcgcgcccgccagatcgacattgcaaaggcaacgatgccacccgatggctgtcagttcgtgatccatgcgaaggcgctgcccggcaaccgctatgacggccacgcgctcgcaaccgtcatccccgagatagaggcgctgatcggcaacaccatcgcgcgcattctcctcgacaagggttatcgggccacaacgccccgccggattacaagttcagggtgtttacgtcaggctagaagcggcgggtaa

SEQ ID NO: 6692 - DNA, 132 bp, BradyrhizobiumColbertium
gtgtttcgcgccgaccggagcggcaggggcgtcggccttgtcattccgaccctgctgacctggccgggcagtttgtcttgttcacgatatcaaaggagagaaatcaaaggagagaactggaatctaacctga

SEQ ID NO: 6693 - DNA, 192 bp, BradyrhizobiumColbertium
atgtcgatccgaccaatcaaaacccaccacacgttcgaggtgatctcggatcagatccgcgacgaggcccgctcgggcgtcctgggaatgggcgaccgcctgcccaacgagcgggacatggcaaaggctcttgccgtaagccgacacgcccttcggcgaagcgctgcgcggcttggaatctctgggcgttag

SEQ ID NO: 6694 - DNA, 201 bp, BradyrhizobiumColbertium
gtgtcggcgcaagcttatccgtcaaagccgatcacgtggctgataccgttcccggcgggcgggccgaccgatgtgctcgctcgtgccgtcgcacccaagctcagcgaggctctcgacgttaccgtaattgtggagaatccaccaggcgccggcggtggcaccgcaatggtttcgctcgcgaaggcgaagcccgatggctaa

SEQ ID NO: 6695 - DNA, 1050 bp, BradyrhizobiumColbertium
gtgtactttcccacgcgttacgaagatatccgtcagattgcgtatgataccgagcatttctcttcacggcgggttcaggtgcgcgagacgccgccccccgtgaaatcgccggcgcctccgatcacgtctgatccgccgcatcatcgcgccgcacgtatggtcctgctgcctcagttcacgcccgaagccatcaacaagctgatcccgacaacgcgcatgatctgcaatgacctcatcgatcggtttatcggcgacgagacgtgcgacgcagcggtggattttgcccagcatattccggtgcgtgtgattgcagggatgcttggcctgccgccaagcgatggggaaatgttccgtggatgggtgcatgggctcgttgaggaagccatcctggacgatgccacgatggtgcgtaccctgtcggaaatgaccgcctacctgctggatcacgtggagcagcgtcgcaggtcgccggccgatgatctcatcagttatctggccgccgatcggattgatggtgcgcctttgacggacaaccacatcctcggcaccctccgccttctgctcattgccggtatcgatacgacatggagcgggatcggagcttgcctatggcatttggccaaaacgcccgctgatcggcgccgcctagttgctgagcccgcgctgatgcagacggccattgaggaattcttgcgggcctattctccggtgaccatggcgaggctcgtcgccaaggacacggtcgtaggtggctgcccttacgagaaggggcaaatggtgctgctctccttcccggcggccaaccgagatcccgcggttttcccggacgccgataaggtcattattgaccgcaaggcgaaccgccatgcggccttcggcctcggaatacatcgttgcgtcggttcgaacctcgcgcgcatggaactcaccgttgcggtcgaggagttcttgaagaggattcctgagtttcacctcgccgattccaaagctgtcacgtggtccgaaggtgcggtcaggggacctcgaaagctcccactcctgctcggatga

SEQ ID NO: 6696 - DNA, 1137 bp, BradyrhizobiumColbertium
atgaaaacggcgttgtgcaagaagttgggtatcgaattcccgttatttgcgttcagtcattgccgcgatgtcgtggcagaggtgacgaacgcaggcggttgcggcgttctcggcgctgtcggacacacaccagagagcttgaaaatcgaactggactggatcgactcgcgtgtcaagggccggccctacggtatcgacctgctgattccgaacaaaatggaggacaagcagggtgaccttgcagaggctgagctgcagtcgcggattccggacggacatcgaaaattcgtgaacagcctcctcgagcggcacggcatcgatacgtcggatctttggagcggcgagtacgacaagcgcacggccgacagcatgcgggaggcgggagccgcaaagcttctcgacgtggcgttccaacatccgatcaagctcttcgtcaatgccctcggtgtgccaccgaagtcgatcatggaacgggcacggtcgaagggcatcctcgttggcgcactgaccggagccaaagagcacgccatcaagcacgccgaggcgggggtcgatatacttgtcgctgccggcaccgaggcgggtggccattgcggcgaggtttcgacgatggtactcgtccccgaggtcttgcaggccatcgagccttacgaaaacatcgatgttttagccgcgggtggcatagcaacaggccggcagatggccgcctgcatggcgatgggcgcagcgggcgtctggtgtgggtcggtttggctgacgaccgtcgaggccgagacgacgcccacggtcaagcagaagatgctgaaggcgacgtcgcgcaacaccgtccgttcccggagccgcacgggcaagccgacgcgacagttgcagtcggcctggtcggatgcctggggcgccaaagatgcgccggagcccctggcgatgccgcttcagggactactcagtcggccgcctatggccaaggtcgataagctcgcagagagcggtcacgacggcgcaaagaatcttgcggcatacttcgtaggccaggcggtcggcctgatgaatacggagcagtcggcacggtcggtcgtcgccgatttcatgaaggattatgcggaagctgtagaacggctttcgggcacgttgcatgagtag

SEQ ID NO: 6697 - DNA, 126 bp, BradyrhizobiumColbertium
gtgctgcggagggtcgcgaaaaaccatccaattctccagcacgcccgtcactatctcgatcttttctcgcatttgtccggacatgtcgccacaaaaggcgtgaacttctccaccgaaaagcgctga

SEQ ID NO: 6698 - DNA, 1386 bp, BradyrhizobiumColbertium
atgtcaaagacactcaccgaggctcagatcacgacggctaaagcgcgctctaggctcgagcttggcgtacattggcgccgcctcgatgcggaagcgcatctgggctatcgtaaaggaaaacggggcggcgtttggcttgttcgctggcgtaatcaccacgaaggcggtaactacaagcaggcgcaagtcggcatcacaaacgacatcaatgacaagcgcgccgaagggattctgaccttcgaacaggccgtgagaacggctcgggaggccgtagctcgagccagaacagaggccgcgtcgcaggcggcgggcccggctcctaccgtgcgatcggccgttgaatcctacatcaaggaacgcgacgctcgagaaagacgccgaacaggtcgcgacgtccgatccgacgccggtaccaagctgcggcgctacgttctcggtcaagaaaagcgcggcaatcaggaagctgcgggagctgctcctctcgcatcagtgcaactgcatgccctgaaagaagacgacttgataacgtggcgtgagggtttgccgaaggacttaaaggtcacgaccaagcagcggttcgtgaatgacctcaaggccgcactaaatgccgcgtggccccggctttccgcagatcggaagaaactaaatccgacgttcctcgccattgtgaaggccggcttcaaagccgagcgggtcgatgatgatgatcatgtgtcggttgctcgagataaccagattctcacggatgaagaggttggcgccatccttcaagctgcgtgtgaagtcgatcaggagcaaggatttgatggcgatctataccggatcgtcgtgtgtctggccgcgaccggcgcgcggtatgcccaggtgaggcgaatgcgcgtgggtgacgtacaggtttctgcacgacgtctgatggtgccgggctcctacaaggggcgcggcggcaatagtggctcagacccggtcccagtgggcgacgatgtgattgaggtgctcttgcccgcaatcgctgggcggccaagcgatgcacctcttttcgagcgatggatccatgaacaggagccgagcggtatcgcgtggaagaagtctgaacgcggtccgtggaaaagaggcgaacttgcacgtccctggaaggccattcgccagcgcgccggtatgccggaggtgattccctatgctttgcggcactcgagcatcgtgcgcggtctccgaaagggcttgcccatccaacaggtcgccaaactgcacaacacctcagtcaaaatgatcgagcggcactacgcgaaatacattgcgaccgccttggaagacctcgcaagagcggcagtcgtgtccctggtgccgcggagcgatggaaacgtggtgccgataggaaaacgcgcgtaa

SEQ ID NO: 6699 - DNA, 609 bp, BradyrhizobiumColbertium
atgccgagacctcgcgaatttgacgagcaagctgccattgctgcggctaccgaccgattttggcggtttggctacgaagcgacttcgattcgtgatctctcgggcgcgatgggcataaccggagcaagcctgtacaacgcattcaagagcaagcgcaaccttttctcgatcgctctcaaacactacaaggaccagaccgtctgtgacagaatggagaggtttgaggccagtttgccgccgaagcaggcgatcctcgcctttttccgggagatcataagcagatcatgcgaagacaaatctcgaaaaggctgcttccttgtcaattcggcactggaagtcgctccacacgacccagcgttcgctcgcatcgtcgagggcattcttgaggaagtggaggccttcttttaccgctgcatagtcgccggccaaaagaacggcaccatcaattcttcgatctcggcgacagacgtcagccggttgcttttggggacgctcttgggattaagagtgttggctcgcgcccgcccagaccggaacgttttgagaggggtagtgcgaccggccgtctccctcctggacgtcaatcggtcgaaggagagaggttcctga

SEQ ID NO: 6700 - DNA, 933 bp, BradyrhizobiumColbertium
atgcgacctggtagcgatcgcgacaagagcggcctctctcctgacaaggtggagaacatctggggcgtatcagcgctcgccagcggtctcgggtcggacggcttcggtgctgctctctggccggtcgagcacggcgtcgtggaaaggccagcgtgcgcgtctacccacgtggtctcggtttggactagcggttcgacgatttccgaactgtatcttgatggaaatctcagattccgccggattcgccggcgcggcacatttcagctggctagagctggcgaagacgtccgcgttatcctctctgaaacgagtggcacttgtctcgatctctatgttcctaagaagttgttggattccgcagccagcgaagaacttggtctgggatcttattccgtcgagctactgcccctcaaactcgagacagacggcgtcatcacgagggtagcagacgcggtcgcgcgcgagatccttaaccccggaacggctactcggcttgccatggacagcgctgtcatgcagctaggcgtcagcctgatcagaaactggtcgaccttgggcaagaacgtgcgcgtaggaggttccggactcaatcctgcacaggttcgcaagacgctctcttatctccaggacacgttacatctggatatctcactcgagagtctcgcgggaaggctcgggctgtcgacgtttcattttgccagagagttcaagatagccgtcggtatgcctccgcatcgctatcaaatgcaactcagacttacgaaggcccgggagttaatccaaaacactcgaatgagcgtggccgaagtggcgaaagccgtgggctatcgagacccgggtttcttttcgcgagcctttcggcgcgagttcggcctcgctccaggagctttccgtcggtcttatctggcgagcgatcatgaagctggatcctag

SEQ ID NO: 6701 - DNA, 363 bp, BradyrhizobiumColbertium
atgatcggcggctatatcgacggcggtaaagccgatctctggctcaccgccgaactcgctggcgtgcccatcggctttgcgttctgcgagccggagcgcatgacgaacggcacctggaacctgctcgcgattggggtcaccccggagcgacaaggtcagatggtcggcgcccggcttgtgaagcgccttgaagataacctccgggctgcgggtcaccgcatcctgctggtcgagacgctcggcacggccgagttcgcgcggacgcgcgcgttctacctcgcgaacggtttcacggagcaggcgcgcatccctgagttctacgacgtcggcggcgacaaggtggtgttctggaaacgcctttga

SEQ ID NO: 6702 - DNA, 183 bp, BradyrhizobiumColbertium
gtggccgacgtcgtgcttttcgatcccgaagaggttcacgccgtgctgacgaacgtgcgtgatcgtgccggcgccgtcgtcaggcacctcggccccgagctgcccgccgcggcaacattgctgctgttcttggacaggcgcgtcatcgcgggcatgcggacgcgtaggcgtttttgtcgataa

SEQ ID NO: 6703 - DNA, 135 bp, BradyrhizobiumColbertium
atgctcaaaggagagccgtcgtccagagctttgatcatggcgttccggatcaacgatttgagcccttcgattcgcgaggccggtcagcgcgtcggtacgcgacttcgcttcagctttctcgagatccgttcttaa

SEQ ID NO: 6704 - DNA, 198 bp, BradyrhizobiumColbertium
atgatcaaagctctggacgacggctctcctttgagcatctttctgatcgacatcgatcatttcaagcgtttcaacgacagccatggccaccaagtaggggaccgggttttacggctggtcgcggactgcgtgcgccagagcatcggaaaagccgatctcgtcctgcaaggtgtgaccgtcgtacgggttatcgggtag

SEQ ID NO: 6705 - DNA, 186 bp, BradyrhizobiumColbertium
atgcgaccgaagaagcccaaagcgacaggatcgggcgatctgttccgggccaggctggaccagatcatcaatatgaagcacgagctggttcagctcgccggcaaggtggaatgggactggatcgacggcgggtcgcgccgctctgcagcgagaacggtcggccgggcatcgcgacccgcttcatga

SEQ ID NO: 6706 - DNA, 147 bp, BradyrhizobiumColbertium
atgtcccgtaaccgggccgccaagcagtttgggttcgcgatcagcaccgtcgttggctggatgaagcggtcgatgagaccggcagcgtcgcctggtcagataggcggctacaagccgaaggcgatttcgggcgagcaggcagtctag

SEQ ID NO: 6707 - DNA, 3504 bp, BradyrhizobiumColbertium
atgccgagcgccggatttgttcaccttcacgttcactcggcctattcgctgctcaaaggctcgatcaagatcgccaagctcgccgagctggcgaagaaagaccaccagcccgcgctggcgctgaccgataccgacaatctgttcggtgcgctggagttctccgacaagatggcgggctccggcatccagccgatcgtcggttgcgatctggcgatcgatttcgccgaccaggatcccaatgcgcgcaacgcgatgggcccctcgcgcgtggtgctgctggccgcgcaggagcgcggctatcgcagcttgatgcggttgaactcacgcgcgttcctcgaatcgccggacagccatgctccgttcatcaagttcgactggctcgagggcgagaccgaaggcctgatagcgctgacgggcggaccggacgggccgatctcgctggcgctcgccggcgggctcagcgagcttgccgccctgcgctgcgagcgtctggccggtctgttcggggaccgcctctacgtcgaattgcagcgtcacaacacggagaaggagcggcgggtcgaaagcggcctgatcgacatcgcctacgccaaaggcctgccgctggttgcgaccaacgagccgtatttcgccgccacagatgactacgaagcgcatgacgcgctcctctgcattgccggcggccgactgatcgccgagaccgagcgcgagcagctcacgccggatcatcgcttcaagactcgcgccgagatggcgctgctgttcgccgacattccggaggcgctggcctcgacggtggagatcgccgagcgctgctcgttccggccgatgacgcgcaagccgatcctgccgttcttcaccgtcggcgccgcctcgagctcggatgctgccgccgtcgaggccgccgaattgaagcgccaggcggaggaggggcttgccaagcgcctgcgcgtgcacggcctgtcgcagggcacgacggaggagacctacgccaagcggctcgccttcgagctggacgtcatcacccgcatgaaatacgcgggctacttcctgatcgtgtccgacttcatcaaatgggcaaagagccaaggcattcccgtcgggccgggccgcggctccggcgccggctcgctggtcgcgtgggcgctgaccatcaccgacctcgatccgatcaagttcggcctgctgttcgagcgcttcctcaatcccgaacgcgtctcgatgccggacttcgacatcgatttctgccaggatcgccgcggcgaggtgatcagttacgtgcagcagcgctacggccgcgaccaggtcgcgcagatcatcaccttcggtacgctgcaggcgcgcggggtgctgcgcgacgtcggccgcgtcctccagatgccctatggccaggtcgacaagctcacgaagctggtgccgcagaatccggctgcgccggtgacgctggcggcagcgatcgagagcgagccgaagctccaggcgttccgcgacgaagatccggtggtcgcgcgtgccttcgacatcgcccagcgcctcgaaggcctgacacgccacgcctcgacgcacgccgccggaatcgtgatcggcgatcgccccttgagcgagctcgtgccgctctaccgcgatccgaaatccgacatgccggtgacccagttcaacatgaaatgggtggagcccgcgggcctcgtgaagttcgacttcctcggcctgaagacactgaccgtgctcgacgtcgcctgcaagctgctcaagccgcgcggcatccatgtggatcttgcgaccctgccgatcgacgatgccgagagctacgcgatgctggcgcgcggcgacgtggtcggcgtgttccaggttgaaagccagggcatgaggcgggcgctgatcgacatgcgccctgaccgtttcgaggacatcatcgcgctggtggcgctctatcgcccgggcccgatggcgaacattccgacctattgcgcgcgcaagcacggcgacgaggagccagaatacctgcatcccgtgctggagccgatcctgaaagagaccttcggcgtcatcatctaccaggaacaggtgatgcagatcgcgcaggtgatgtcgggctattcgctcggcgacgccgaccttctgcgccgcgccatgggcaagaagatccgcgccgagatggacaagcagcgcgatatcttcgtcgcgggtgcggtgaagaacggggtgccgaaggggcaggccgagaccatcttcgaattgctggccaagttcgccgactacggcttcaacaagagccacgcggccgcctatgcgctggtgtcctatcacaccgcctacatgaaggcgcattatccggtggagttcatcgcggcgtcgatgacgctcgatctgaacaacaccgacaagctctccgaattccgctccgaggcgcagcgcctcggcatcaaggtcgaaccgccaaacatcaaccggtccggcgccacgttcgaggtcggcgagaagacgatctactacgcgctcgcagcgctcaagggcgtcggcatccaggcgatcgagcagatcatcgaggagcggaccaagcgggggctgttcacctcgctggccgacttcgccgcgcgggtcaatccgcgtgcgatcaacaagcgcatcatcgaaagcctcgcggccgcaggcgccttcgacacgctggagccgaaccgggctcgcgtcttcgccggcgcggattcgattctcgcagcttgtcagcgggcgcaccaggccgagaccatcggccagaacgacatgttcgggatgtcggcggatgcaccgaccatcatgctgccgcaggtcgagccgtggctgccggcggagcggctgcgacgcgaatacgacgcgatcggcttcttcctatcgggccatccgctcgacgattacgccaccgtgctgaagcggctgcgggtgcagagctgggccgagttctcgcgcgcggtgaagaccggcgctaccgccggcaaggttgcggcaactgtggtctcgcggatggagcggcgcaccaagaccggcaacaagatgggcatcatggggctctctgatccaaccggccacttcgaggccgtgctgttctcggaagggcttgcgcaatatcgtgacgtgctggagccgggcgctgccgtgctgctgcaactgggggccgagctgcagggcgaggacgtccgtgcccgcgtgctgcacgccgagccgctcgatgacgcggctgccaagacgcagaagggccttcgcatcttcctgcgcgacaccaagccgctggactcgatcgccaagcgcttggccggccccgacatggccggctcgaacggcagcgcaccaaagcccggcagtcccgccatggcgccgcgatccaatggcgacggcgagatctcgctggtgatgatgctcgacctcgagaccgaggtcgagatgaagctgcctggtcgcttcaaggtctcgccgcagattgccggagcgatcaaggcggtcgccggcgtggtggacgtgcagcagctctga

SEQ ID NO: 6708 - DNA, 753 bp, BradyrhizobiumColbertium
atgtgcgacaaatgctctgaaaatctgcatcaagctgttgctccctcccggcgcgcgatgatgcttttcgccggttcggcacttgcggcggcggcgtttggcgggtccgcgctggcgaaggaggcgaaggaggcgaaggcgccgccgaagccgcagaacgtgctgtcgcccgatgctgcgctgaagcggctgatggaaggcaatgcacgctatgtgtcgggcgtgtcgcgccgccacgacttcaagcacgagcgcgaagctttggtcggcggccagaatccatacgcagccgtgttgagctgcgccgattcccgcatcgcgcctgaatacgcgttcgacagcggacgcggagacctgttcgtgtgccgcgtcgccggaaatttcgccggcgatgagaccgttgcaagcatggaatataccgtcgccgtgctcggcacgcccctgatcctggtgctcggccatgacaattgcggcgccgtcgatgcgacgatcaagtcgctgaaggacgacaagccgttgccgggacacattccctccctcgtcgccgcgatcgcgccggcggtgaagacggcagcccagcagagcgggaatgcgctcgacaacgccattcgccagaacgtcatggacaatgtcgcgaagctgaaatcggccgccccgatcctcaacgctgcggtcgagcagggcaagctcaaggtggtcggcgggatctatcggctgagcaccggggccgtcgacttgcttacgcagggctga

SEQ ID NO: 6709 - DNA, 528 bp, BradyrhizobiumColbertium
atgctgcgacgagccgcgttgttgctggccgtcggtgcgatgctggtgggctgtgtcagcaatcaggtcgggaccgactttgcgtctgtatcgcagaaggtggggcctccgcgcgtcgggcactctcgcatcgttctgctccaggacaagaggaacggcctcagcatgcaggtctgcgcctgcgaggtgaagctcgatggcgcgccgctcggcaaggtcgtggccggaaaatatgcctttgccgatcggcctgcgggtcggcacgaattgctggtgaccgaactgatgtttccgggcgacaccaagcgcgagatcgtgatggaagccggccgcacgcacttttatctcatcaagagcagcgccaggcacgatgccgcaacgggcggcgcgatcctcggcggcctggccgggcttgccgttgtttccattgcaacggcgggagaggccaatcccgggccggccgaactcgttgcgctggacgaggcgaccgcgcgaacgaagcttgccgaactgcaagccgtggagtga

SEQ ID NO: 6710 - DNA, 2646 bp, BradyrhizobiumColbertium
atgcgtgggacgctcagaaccttcatctgccttcttctgccgatcgtggcccttgccgccggcgcgcccgagacggcgcgcgcgcagcagccggaaaagcgcatcgcgctcgtggtcggcaacggcgcttatgccaaggcgccgctcgcgaccaccgccaatgatgccggattgatcgcacagacgctccaggcggccggcttcgacgtgatcggcgcgcgcgatctcgatggcgacacgctgcgcaagagcttgcgcgatttcatccagaaggcgcaggcttccggcccgggcaccgtcgcgatgatctatcttgccggctacggcgtgcagcttgccggcgagaactatttcatcccggtcgattccagcatcgcccgcgataccgacgtaccgaccgaggccttgcggatcagcgactatgcgcgccagctcgcgtccattccgctcaaggccaacatcgtcgtgctcgacgcggcccgcgcgcagcctttcatcgagggcggtcagcacatcgcgagcggcctcgcgctggttgagccggaggcgaacatgctgatcgccttcaatgcggcgccaccgtgccgggcgccggaggagcccgggccgtacggcatctacgcgcagtcgctcgccgagatgatccgcaccggcggactgccgttgcccgaggtgttcgaccgcgtgcgcctccgcgtcaacgaagccagcaagggcgcgcaggtgccctggaacgagcagaagatatcggcgcagttctcgttcttcgagcgcgggcccgacgcgccgccggagacggcgcccgaccaggtcgccgcgatccgcaacaagccgatccgcgatctcggcgtgcaggatgcctatgccgcggcgctcgaacgcgacacgctggcggcttatgaggaattcctcgcggcctatccgaatgatccgctcgcaaagcgggtgagggcgatcgtggcggcacgccgcgaggcgcttacctggcggcggacctatcgcgccgatacgccggacgcctattggtcgtatctgcgccggtacccgcgcgggccgcatgcgggagatgcccggcggaggcttgcgatcctgactgcgccgctcgagccgccgccgaccttcacaatgctggattacgacgtgccgccgccgccgccggaggaggtgttctatgtcgatcgtccggtgctgtacttcagcgatcccgatttcggcttcgtgccgccaccgccgccgcccgtgtactatctgccgccaccgccgccggatttcgtcgtgctgccgccgccgctgccggtggtcgggctgttcgtgctgccgcagccggtgttcgtgccgatcccggtgttcgtcagggcgccggtctatgtcgcgccgccgccgaacaacatcatctatcagaacatccacaacacgacggtcatcaacaccgtgatcaatcgcccgccgccgccgccggccgcggggccggcgcttggtccgggcaatctggcgccggcggttgccggccgcgccacgccggcaggtcccgccgtgccgcaggcggtcgcgcaacgcgccgccctgatccagcaaggcaaggcgccgatgccgccgagcgcgacgatccagccgacggtgaggcccgcgatcgcggcacccgctccggccaatgtcgctcctggcacgacagcgcagccgccggctgcggccacgccgcaagccaatacattgacggcaccagggacttccggagtgccgccggccggtccgggagcagcgcccggcaatgtcccgccgaacggcaggccgggttcgacggcgaccgctccagccggcaacgttcctgcgacgccgcaagcaacggcgcctgccaagctgccgcaggccaatacgctgccggtgcccggaaccccgggcgggccgccgccgccggcccgggcagggggcgcgccgggcgctgccccgcctcatggcaggccggctgcgaccgtcacggctcccgccggcaatatcccggcggcgcagccgaacgccgcaaccgctgcggcgcccaaccctccgccggctccccgaggtgcggcgtcgccctccgcaggcctgccgaagccgccggcgaccataaacccgcctgcgtctgagctgcgcggcagggcacccgggtcccagccggtcgctgcgccgccttcgagcgcggcctccggtaagccggcggtcccgcccaccgccaggatcgcgccgccaccgccgcccgtggcggcgagagggccgtccggagttcaggatcaccggccggcaccgccgcaggctgcaaggcctgccgcacccccaccgcatcctcaggccttggcgaagccgacgccgccgcctccgccgcgggtcgcgccacctccgccgccgcgcgcagcgcctccacctgcggccgtggctcgaccggcgccaccgccgccgattgcccgaccggcaccgcctccgcctgcgatggcgcgtccggcgccatctccgcctccaatggcccggcccgcgccacctccaccccccgtggcccggccggcgccacctccaatggcggccgcgccgccgcgtgcggcgccgcctccacctccgccggcgcggcccgcagggccggcacccaaaagctgcccacccggtcagccgaggtgctag

SEQ ID NO: 6711 - DNA, 996 bp, BradyrhizobiumColbertium
atggcgctacccgacttcaccatgcgtcagctgctcgaagctggcgtgcactttggccaccaggcccaccgctggaatccgaaaatggctccgttcattttcggcacccgcaacaacatccacatcgtcgacctcgctcagaccgtgccgatgctgcaccaggcccttcaggccgtcagcgacacggtggcaaagggcggccgcatcctgttcgtcggcaccaagcgccaggcccaggacggcgttgctgacgcggccaagcgctgcgcgcagtacttcgtcaattcgcgctggctcggcggcacgctgacgaactggaagacgatctcggcctcgatcaagcgcctgcgtcacctcgacgacgtgctctcgggcggagaagccaattcctataccaagaaggagcgcctgacgctgcagcgcgagcgcgacaagctcgatcgttcgctcggcggcatcaaggatatgggcggtctgcccgacctgatcttcgtgatcgacaccaacaaggaagacatcgcgatccaggaagcccagcggctcaacatcccggtcgccgctatcgtcgacaccaattcggaccctaagggcatcacctatgttgtccccggcaatgacgacgccggccgcgcgatctcgctgtactgcgatctgatcgcgcgtgcggcgatcgacggaatctcgcgcgcccagggcgattcgggcatcgacatcggtgcctccgctcagcctgtcgccgaggagctgccggccgcgtcgtccagcggcttccagggccttgcgggtccccgcggcaccgccgacgacctcaagaagctcccgggcgtgtcgggtgcgatcgagaagaagttcaacgacctcggcatcttccattactggcagctcgccgagctcgaccacgacaccgcgcacacgatcggcgaagaagtcggtctgccgagccgcgcggatgcttgggtggccaaggccaaggcgctgaccgcggaagcggaatag

SEQ ID NO: 6712 - DNA, 924 bp, BradyrhizobiumColbertium
atggcaacgatcacagctgcgatggtcaaggatctgcgcgagtcgaccggcgcaggcatgatggactgcaaggccgcgctgaccgagaacgacggcaacatggaagcggcccaggactggctgcgcaagaagggtctgtccaaggccgccaagaagtcgggtcgcgtcgcggccgagggcctgatcggcgcgctcaccaagggcaccaagggcgtcgtggtcgaggtcaactccgagaccgacttcgtcgcgcgcaacggtcagttccagggcctcgtcaagatgatcgcccaggtggcgttcgacgtcggcgccgatgtcgagaagatcaaggccgccaaggtcggcgacgtcacgatcgacaccgcaatcaatgatgcgatcgccaccatcggcgagaacatgacgctgcgccgcgccgcccagctcgaggtgagccagggcgtggtctcgcactacgtccacggcgccgtcatcgagggcgccggcaagatgggcgtgctcgtggcgctggaatcgccaggcaaggccgacgagctcgccgcgcttggccgccagatcgcaatgcatgtcgcggccgccaacccgctggcgctggatccgtccggcctcgatccggccgtggtcaagcgcgagaaggacgtgctcgcggacaaataccggcagcagggcaagcccgagaacgtgatcgagaagatcgtcgagtccggcctcaagacctactacaaggaagtctgcctgctggagcaggccttcatccacgacaccggcaagtcggtggcgcaggccgtgaaggaggccgaaggcaaggtcggcggcgctgtgaagatcgccggcttcgtgcgctatgctctcggcgagggaatcgagaagcaggaaagcgacttcgcagccgaggtcgccgcggccagcggcaagaagtaa

SEQ ID NO: 6713 - DNA, 717 bp, BradyrhizobiumColbertium
atgactgatccggtctatcgtcgcgtcgtgatcaagctgtccggcgaatatctcgcggggcagcaaggctttggcatcgatcaaccgactgtcgaccgggttgcggacgacctgatcgcggcccgccatctcggcaccgaggtcgcagtcgtgatcggtggcggcaacatggttcgcggcgtcgaggtctcctcccgcggcgtcacgcgcaccaccggcgacaccatgggcatgctcgccaccatgatgaattgcctcgcgctggaagcagcgatcgagcgcaagggcacgccggcacggacgctgtcagccttcgtcatgcccgagatctccgagctgttcacccgcactgcagcacacaaatacctggccgagggccggatcctgttgcttggcggcgggaccggcaatccgttcttcaccaccgacacgaccgcggtgctgcgcgccgccgaaatcggcgcgcaggcggtgctgaaggcgaccaatgtcgacggggtctactcggccgacccgaagaaggatccgaccgccacgcgattcgaccgcctgacgcattcgcaggcgatcgaaggcggttacaaggtgatggatgcgactgccttcgcgcttgcccgcgagacttcgctgcctatcatcgtattctcgatcgcggagccgggatcgataggcgcgatgctgcgtggcgtcggccacggaaccatcgtcgccggctga

SEQ ID NO: 6714 - DNA, 564 bp, BradyrhizobiumColbertium
atggccacgggtaatttcgacctcaacgaagtgaagcgccgcatgcagggcgccgtccaatcgctcaagcacgagcttggcggcctgcggacggggcgcgcctccgcctcgatgctcgacccggtccaggtcgaggcttatggcagtcacatgccgctcaatcagctcgccaccgtcagcgtgccggagccgcgcctgatctcggtgcaagtctgggacaagtcgatggtcaaggcggtcgagaaggcgatcgtcgattccaatctcggcctgtcgccggcgaccgaaggccaggtgctgcgcctgcgcatccccgagctcaacgaggaacggcggaaggaactggtgaaggtcgcgcacaaatacgcggaagccgccaaggtcgccgcgcgccatgtccgccgcgacggcctcgacgtgctcaagaagctcgagaagaatcacgagatgtcggaggacgatcagaagcgtcacgccgacgaggtgcagaaggcgaccgacgggaccatcgccgagatcgaccagttgctggccatcaaggaaaaagaaatcctgaccgtttag

SEQ ID NO: 6715 - DNA, 759 bp, BradyrhizobiumColbertium
atgtccaacgccgccgcgccagcaacggaagggcccgaccggtccgaggcgcctgcgcacgtcgccatcatcatggatggcaatgggcgctgggcggcggcgcgcggcttgccgcgtgcggaagggcaccgccgcggtgtggacgcgctgcgccgggtggtgcgcgcctcgcatgagctcggaattcgctatctcaccatcttctcgttctcttcggagaattggtcgcgcccggcgagcgagatcggcgacctgttcgggctgctgcgacgcttcatccgcaacgatctggcgagcctgcatcgtgacggcgtcaaggttcgcatcatcggcgagcgcgacggccttgagagcgacatctgtgcgctcctcaatgaggccgaagagctgacgcgcgacaacacgcgtctgacgctcgtcgtggccttcaactacggctcacggcaggagatcgcgaaggcggcccagaagctcgcccgcgaggtcgcggagggcaagcgcgatcctgccaccatcgacgccgagacgctcggggcgtatctcgacgcgcccgacattcccgatcccgatctcatcattcgcaccagcggcgagcagcgtctgtccaacttcctgatgtggcaggccgcctacagcgagctcgtgttcgtgccgatccactggcccgatttcgacaaggcggcgctcgaaagcgcgatcgccgaatttgccaggcgcgagcgccgtttcggcggcctggtcgcgaaaacagcctcgtga

SEQ ID NO: 6716 - DNA, 843 bp, BradyrhizobiumColbertium
gtgagcgaacccgacgccgcatcggcaggcgccaagcctgccccaagcaatctggtggtgcgagtcctcgcggcgctggtgctggcgccgctgacgattgcgatcgcttatgccggcggttggctgtgggcccttctcgtcaccctggtctcgatcggactgttcgcggaatggctgatggtggtgggcgcgggatcggctgcgctgaccggggcagggacggtcgtgatcgccatgatgggggccgctgtcgcgtttggcgcgctgaagaccgccgtcatcaccggtctcatcggcggggcgattgtgacgctgatcgcgcgcggcaagttcttgtgggcggctaccggcttcgcctacgcggcggcggcgctgctggccgcgatcctggtgcggaaggatctcgtcaacggtttctccgcgctgatgttcgtgctgctggtggtgtgggcgaccgacatcggcggctatttcgccggccgcagcattggtggaccgaagctgtggccgcgcgtgagcccgaagaagacatgggcgggtgcattcggcggctttggcgcgagcctgttggtcgcggtgggctttgcggtcttcggctttgggaagatgggaccattgctgctcgtcagcgccgtcctctcggtggtatcggcattgggcgacctgttcgaatccgcggtgaagcggcgcttcggtgtcaaggattccagtcacttaattcccggacatggcgggctaatggaccgcctggacggttttgtcgccgccatcctggcggcctggattatcggctttctccgccatggtgtgcatagcgccggaagcggtcttatggtttggtga

SEQ ID NO: 6717 - DNA, 1209 bp, BradyrhizobiumColbertium
ttgcgtaacaacaggcttgcggcgtccgacgtccgcagtgtcacggttctcggcgctaccggctcgatcggcgatagcaccatggacctgctgcgggccacgccagagcgctaccgtgtcgaggcgctgacggcgaacggcaatgtcgcagccctggcaaagctcgccaaggaattctccgcccgctacgtcgcgatcgccgacacctccaagctcgccgaactcaaggctgcactcgcaggcaccagcaccgaatgcggcgccggcgaaagcgcggtgatcgaggccggcgcgcgcccggccgactgggtgatggccgccgtgagcggcgctgcgggcctgaagccggcgctggccgcggtcgaccgcggcgcccatgtcgcgctcgccaacaaggagtgcctggtctgcgccggcgatttcttcatgcagcgcgcggcaaaggcaggcgcctgcatcctgccggccgattccgagcacaatgcgctgttccaggcgctcagctcgggcaatcgcgacgagctcgtccgcgtcatcatcacggcctccggcggcccgttccggacctggaagccggcggacatcgagcaggcgacccttgcgcaggccctgaagcatccgaactggagcatgggccagaagatcacgatcgattcagcctcgatgatgaacaagggcctcgaggtgatcgaggcgtcgtatctgtttgcgctctcgccggacgagatcgacgtgctcgtgcatccgcagtcgatcatccacggcatggtcgagttttccgactgctcggtggtggcccagctcggcgcgcccgacatgaggacgccgatcgcgcattgcctcggctggcccgatcggatcaaggggccggcagcaaagctggacctcgccaagatcggtcagctgactttcgaagcgccggacttcgagcgtttcccaggtctccggctggcctacgattcgctccggacagggaagggggcgaccaccgtctacaacgccgccaacgaggtcgctgtggccgccttcatcgccggcaagatccgcttcggggcgattgcccggctggtcgaggcgaccctcgaggattggatcaaaggcgggaaccaggcccctctgacgtccgccgacgatgcaatctccgttgaccatgttgcgcgaaatagggcggccgccctattgcctcaaattgccttaaaggcatcctag

SEQ ID NO: 6718 - DNA, 1152 bp, BradyrhizobiumColbertium
atgatcgactttttcgtccatagtttcaacacgttgagccatgggctcctcggttacgccgttcccttcctgttcgtcctgaccatcgtcgtgttcttccacgagctcggccatttcctggtcgcgcgctgggctggcgtgcgcgtgttaaccttttcgctcgggttcggacctgagctggtcggtttcaacgaccgccatggcacccgctggaagatctcggcgatccccctcggcggctacgtcaagttctttggcgacgagagcgaggcctccaccccgtcggcccagacactctcgtccatgacggccgaggagcgcgccggcagcttccaccacaagaaggtcggcccgcgtgctgccattgtcgctgccggaccgatcgccaatttcatcctgggcgcgctgatcttcgccggcatggccctctactacggcaagccgagcaccatcgcccgcgtcgacggcgtcgtcgccaccggcgccgcggcggcggccggcttcaaggtcggggacgtcgtccttcagatcgacggcaagccgatcgagagctttgccgacatgcagcgaatcgttgcgatgaacgccggttcggcgcttactttccaggtgaaacgcgatgacgccattgtcacgctgaccgccaccccggcgctgctcgagcgcaaggatccgttcggcaacagccaccgtctcggcgtgctcggcatcgagcacaagtcgcaggccggggaggcgtcgaccgcgccggtcggcatcggcgaagcgctcaagatcggggtcgagcaggtctggttcatcatcaccagcaccttcaagttccttggttccctcttcgtcggacagggcaatccgaacgaggtcagcggtgttctgggaatcgcgaagatgtcggggcaggcggcgagcgccgggttccagttcgtgatcaatctctgtgcggtgctgtcggtctcgattggtctgctgaacctcttcccgatcccgctgctggatggcggccatctcatgttctatgcggccgaggtgctccgcggtcggcccttgtccgagcgaacccaggaaatggggttccgaatcggtctcggcctggtgctgatgctgatggtgtttgcgacctacaacgacatcctgcggatggccgcttcctga

SEQ ID NO: 6719 - DNA, 2496 bp, BradyrhizobiumColbertium
ttgctcgcaaccctgatcatgttcggcgcgccggtaattgccccggtcggggctgttttcctgtcttcgtctgcgctcgctcagagcgtccagtcgatttccgtcgagggaaatcgccgcgtcgaagtggagacgatccgttcctattttaggccgggtccgggcggccgcctggatcagggcgccattgacgacggtctcaaggcgttgatcgagaccggcctgttccaggatgtgaggatcaaccgcggccccggcggtcagatcatcgtctcggtggtggaaaacccggtgatcggccggatcgccttcgagggcaacaagaagatcaaggacgagcagctctccgccgaggtgcagtccaaggcgcgcggcacgttctcccgcgccatggtgcagtccgacacgctgcgaatcgctgaaatttatcgccggtccggccgctatgacgtgcgcgtcacgcccgagatcatcgagcagccgaacaatcgcgtcgacctgatcttcacaatcgaggagggcgccaagaccggcgtcaagtcgatcgagttcgtcggcaacaacgccttctcgtcctaccgcctgcgcgacgtcatcaagacgcgtgaatcgaacctcttgagcttcctcgccagcggcgacatctatgatcccgatcgcgtcgaggccgaccgcgacctgatccgccgcttctatctcaagaacggcttcgccgacgtccaggtcgtggccgcgctcactgagtacgatccggagaagaagggcttcaacgtcaccttcaagatcgaggaaggcgcgcagtaccgcgtcggcacggtcgacttccgctccagcattcccaacttcgatcccgcgtcgatgcgcgcctattcgcgcgtcaatgtcggctcgctctacaacgtcgagtcggtcgaaaagtcggtcgaggagatgcagatcgaggcctcgcgtcgcggctatgccttcgccgtggtccggcccggcggtgaccgcaacttcgaggcgcacacggtctctgtcgtcttcaacatcgacgagggcccgcgcacctacatcgagcgcatcaacctgcgcggcaacacccgcacgcgggactacgtgatccgccgcgagttcgacatctcggagggcgacgcctacaatcgcgcgctggtcgaccgcgccgagcggcgcctgaagaacctcgactatttcaagacggtgaagatcacgacggagccgggctcgtcgagcgaccgcgtcatcctgaatgtcgacatggaagagaaatcgaccggcgacttctcgatctcgggcggttactccaccaccgacggcgcgctggccgaagtgtcggtctccgagcgcaatctgctcggccgcggcctgttcgccaaggcgtcggtgacgtatggccagtatgcccgcggctactcgctgtcgttcgtcgagccttatctgctcgactaccgcgtggcgctcggtctcgacctctatcagcgccagcagctgtccaacagctacatctcctacggcaccaagacgctcggcttctcgccgcgcctcggcttctccttgcgtgaagatctggcgctccaggtgcgctactcgatctaccagcaggagatcacgcttccgtattaccttgcgaactgtaacaacgtggtcggttcggcggcgttcaatcccagcccggccttctctgctgccactggtatacctctggatccgtccaccaatggcctcggctgctacaacgatggcgaagcctcgctgccggtgcgcagggagctggccaacggcaagaccctgacctcggcgctcggctacacgctgacctacaacacgctggacaacaacaagaaccccaccgacggtctgcttgtcgatttccggcaggattttgccggcgtcggcggggacgtctcctatctgaagtcggtcatcgatgcgaagtactacacgccgctcgtctccgacatcgtcggcatcgtgcgcctgcagagcggcatgctgaacaagatcggcagcgatctgcgcatgctcgaccacttccagatgggcccgaatctcgttcgcggctttgccccgaacggcatcggcccgcgcgacttgaacccgtacggttcgcgggatgcgctcggcggcacccagtactggggcgcttcgctcgaattgcagatgccgttctggttcctgccgaaggaagtgggcctgaagggcgcggtctatgccgatgccggcggcctctacgactacagggggccgacgagctggaccacgaccaacgaagtcaatgcgcccggctgtatcccgtcgaccatcgatccggcgagcagcggcacctgcaccggcctcgtgtatgatgacagcaaggttgtgcgctcctcggtcggcgtcggcctgatctggcagtcgccgttcggtccgcttcgcttcgactacgccgtgccgctcagcaagggcaagtacgatcgcgtgcaggaattccggttcggcggcggcaccacgttctag

SEQ ID NO: 6720 - DNA, 1068 bp, BradyrhizobiumColbertium
atggcgcagtcgatcttcttcacaaagccgcctgccacagcgttggccgagattgccacgctgaccaaggcgcagctggtcgaccccgcgaggggcggccacgtcatcacgggccttgcctcgctggacgaggcgggccccatgcatctggcgttcttcgacaacctcaaatatgccgatcagctccgggcgaccagggctggtgcttgcctggtcagcccgcgattcgaggccgaggtgcctgcgcatgtggccgtgttgcgggtggcgcagccattccgcgccttcgtcaggatcgcgcgggaatggcatggagacgcgctgaggccgcaatcctgggtcggcaacgacggtatcgcgccatccgccatcatcgatcccacggcccggctcgaggatggcgtggtcgtcgatcccctggccgtgatcggccccgacgtcgagatcggcagcggcaccgtgatcggcgtcggcgcggtgatcggcccgggcgtcaagatcggccgcgactgcaatgtcggtgcccgaaccgccatccagtgcgccctgatcggcaacaacgtgctgatccaccccggctgctcgatcggtcaggacggctacggcttcatcttcttcggccccgaaggccatctgaaggtgccgcagaccggacgggtgctgatccagaacgacgtcgaggtcggcgccaacaccacgatcgaccgtgggtccttgcgggataccgtgatcggtgaggggactaaaatcgacaatcaggtccagatcggccacaatgtgacgatcggccggcattgcctgctcgcggcgcagatcggtctcgccggcagcctgaccatcggcgacaacgtggcgctgggagcgaaggttggcatcaacaatcacctcaagatcggcgacggagcgcaggtgacggccatgagcgcggtcaaggacgacatccccccgggcggcaggtggggcgggcatttcgccaagccgaccaaacaatggttcaaagagatcatcgcggtggagcgcctggtacgcgacagcaaggcggagccgaaagacgagggacgggaatga

SEQ ID NO: 6721 - DNA, 462 bp, BradyrhizobiumColbertium
atgacggcggaatcacctgttaagttcgagctggtggatatcaacgccatcctccagaccctgccgcaccgctttccgatgctcttgatcgaccgcgtgatcaacatccgggccgactacagcggcatcggcatcaagaacgtcaccttcaacgaaccggccttccaggggcacttccccgagcgccccgtctatcccggcgtcatgatgatcgaggcaatggcacagacggcgggcgtgatcggcatcaagtcggtcgagggcaccgagaaaccgcgggcggtctatttcctcacgatcgacaagtgcaagttccgcaagccggtgctgcccggcgacaccattgaatatcacatgcgctcgctggggcgccgcaaagccatgtggtggtttcacggtgatgccaaggtcaacggccaggtggtggcggaggccgacgtcggcgccatgctgacggactga

SEQ ID NO: 6722 - DNA, 345 bp, BradyrhizobiumColbertium
gtggtcagggccctggtcctcttgctagcgcagctcgcgggtacaccgatcgtgtcagagacgatcgagactggcgagcagcggatcgtcgatctcgtcacgtttgaatgccgggacatcacccgcagcacggtgcttcagcgggtctgttacgatcgcgcgcagcaggacctgattgtcgcgagcaacggcgcctatgtccgttattgcggcgtggcggcggacaccgtcgaacgcctcatgggcgcaccgtccatgggtcagttctttagccggaatatcaaacgtgaggcgaccaccgggcgctacacgtgccggacgcgcgagccggtccagaagagctga

SEQ ID NO: 6723 - DNA, 792 bp, BradyrhizobiumColbertium
atgagcaagattgatcccaccgcacgggtcgcggacggcgccgtgatcggcgagggtaccgagatcggaccctattgcatcatcgggccgaacgtcgcgatcggaaagaactgcaagctgatcggacatgtgcacatcaccgcgcagacgaccatcggtgacgattgcaccatctatccctttgcctcgctcggcacgccgccgcagtcgctcggctatcgtggcgagctgacgcagctccggatcggcgcgggctgcaccatccgcgagtccgtgaccatgaacgccggcactgttgccggcggcggtgtcacgaccgttggcgaccgcggctatttcatgaactgcagtcatgtcggccacgactgtcatgtcggcaacgacgtgatcttcgcgacctcggcgacgctgggcggtcattgcgagatcggcgatttcgtcttcatcggcggcttgtccgcggtgcaccagttcacccgcatcggatcgcaggtcatggtcggcggcgtctgtggggtgcgcgacgacatcattccgttcggtctcgtcaacggtcaatatgcggtgctggaaggcctgaacctgatcggcatgaagcggcgcaagttcacaaagcagcggctcgcgaccgtgcgtgcgttctaccagaagcttttccatggctccggcacattcgccgaacggctggaggcggcgcgtccgctggcgggcgaggaccctgcgatcgccgaaatcctcgacttcatcggcaagggcaagcgcccgctctgtcttcccgctatcgcgaagtga

SEQ ID NO: 6724 - DNA, 870 bp, BradyrhizobiumColbertium
atggccgcgggaatgacatcggcggctccggaagtttcgtcaccggtcgggatcgtggccggcggcggcgcaatgccgtttgcggtcgccgagtcgctcgcggcgcgcggcatcacgccggtgctgtttccgctgcgcggggcctgcgatccggcgcgggtggagcagttccgccatcgctggatttcggtcggccagctcggccgcgcgatgcggctgtttcgccaggaaggctgccgcgacctgatcttcatcggcacattggtgcggccgtcgctggcggagatccggttcgacatcaagacgctgcgcctgctcggcaacgtcatccgcgcctttcgcgggggcgacgaccatctcttgtccggtgtcggccgcatgctcgagcaggatggctttcgcatggtcggcatcaaggatgtcgcgccggatctgctgatgcccgagggctgcatcagtcgcgcctggcccagcgacaccagcaaggccgacatcgaacgcggccgcgcggtgctgaccgcgctcggcccgttcgacatcggccaggctgtcgtggtgatcgacggccacgtggtggccgtcgaggacatagagggcacagacgcgctgctcgctcgcgtcgcgcggctgcgggaggaagggcgcatccgcgctgccaccggacgcggcgtgctggtgaaggcaccgaagagcggccaggatctgcgcttcgacctgccgacgatcggcccgcgcacaatcgagggcgtcgcggccgccggccttgcgggcatcgcggtcagcgccggcaacaccattgccgccgagccgcaggcgatgatcgcgcttgccgacgcaaaatatctcttcgtcatagggctgagcgcgtga

SEQ ID NO: 6725 - DNA, 1197 bp, BradyrhizobiumColbertium
atgcagtcgcgtgatcccaagcgcaagatcttcctgatcgcgacggaggaatccggcgaccggctcggcagttccttgatgaaggtactgcgccagcgcctcggcgacggtgtgcagttcgtcggcgttggcggccgcaccatggcccgcgagggccttgcaacgctgtttccgatcgaggagctgtcgatcgtcggctttgccgcggtggtgcagcaattgccgaagatcctgcggctcatccgaaagacggccgacgccgtgaccgatgccgcgcccgacgcgctcgtcatcatcgacagccccgattttacccatcgcgtcgcccgccgcgtgcgctcgcgcagccccgagatcccgatcgtcgattacgtctcgccgcagctctgggcgtggcggccgggacgggcgcggaccatgctcagctacgtcgaccatgtgctgggcctgctgccgttcgagccggaggaataccgcaagctcggcgggccgccctgcagctatgtcggtcatccgctgatcgagcaattggcgtcgctgcggccgaccgcggaggagcagacacgacgcgatggcgagccgccggtgctgctggtgctgccaggcagccggcgcagcgagatccggcatcacctcgatgtgttcggcgcggcactcggccggttgcaggcggaggggcgcgcgttcgagctgatgctgccgaccatgccgcatctcgaacccaccatccgtgaaggcattgccaattggccggtcaagccgcagctcgtgatcggggagaacgagaagcgtgccgccttccggatcgcgcgcgccgcgctggccaaatccgggacggtgactctcgaactcgcgctgtcgggcattccgatggtgaccgcctatcgcgtcggcgctatcgaagctttcatcctgcgccgcgcgatccgcgtctcgtcggtgatccttgccaatctcgtgatcggcaaggacatcattccggagtttctgcaggaggattgcacgccggataagctcgcgccggcgctcgccgaactgctgatggattcgccgcttcgccggcgacaggtggaagcattcgcccagctcgatcagatcatgtcgacgggtaacacatcgcctagcgtgctcgccgccgacatcgtgctggccgcgatgcgaaagggcgtgcgaacgggctcgggcgtgtcctcataa

SEQ ID NO: 6726 - DNA, 1041 bp, BradyrhizobiumColbertium
atgtcggatcagaacagcaagttcaatcgccgaaacgtgttgatgggttccgtagcaacgcttgcaacgccttcgatcattggaagcgcgcacgcgcaggaaaaggtttcctggaaggtgcagtcgcactggcccaaagcatcgggctcgttcaacgacagtcttgtcgtactgcagaaggagctggaagaacgtaccggcggacgcttcaagatggaattgtacggcgcgggcgaaatcgcgaaggatcgcgagatcttcaacgtagtccgcaagggcgtcgttcagatgggcacgatctcgccggcctatatcctcggcgaggcgcaggcgatgggtttgtactacggagttccgggtacgttgcgcgagacctgggagctgatgcacctgaccaagaatctcggcatcgagaagatggtcaacgatgaactgcgacccaagggcgtgatcctgctcggcgaaaaggcctatccgaccgagatcgtgctgaagaagaagatcacctctgcggcagacctcgggaccctgaaggtgcgttcggccggcacgatgcttgattacctgtcggccgcgggcacctcgccgcaacaggtcgccggccccgagatctaccaggcgatttcgacgggcgtcgtcgatggcgctcactggggcgcggcgatcggcgcgctgtcgatgaagttctgggaggtcgcgccctatcacatgaaaccggcgctcggcgtcaccaacgactgctggatcatcagcaccgctgcgctggacaagttgcctgccgatctccggctccagtttctcgccttgatcgaagagcgctacttccgtcgctcggtcgagtatctgcacaaggaagcgattgcgctgaccaccggcaagacgaagatgaacgttgaggtagttcgctttcccgacgacgtgctcaagaagttcgccgatgcttcgaagggcattctccagaaggagatcgccaagggacctgttgcgagcaagggtggcgaggccctgacgacattaatgaccgatctcggttacgtctga

SEQ ID NO: 6727 - DNA, 543 bp, BradyrhizobiumColbertium
atgctgaaactcgccaggacggtcacgcacctgaatatctggatcggcaaggtcgcggcatggctgatcgcgccgatgttcctgctgctgatgaccgacgtgatcatgcgctacgtcgtcggcagtgcggctatctggaccgccgaattcgcacagctgatcttcggcgggtacgcggtgattgccggcgggtatctgttggtcgagcgggcccatgtcaacgtcgacatcatctatggcaaattcagccgcgtgaacaaggcggtcgtcgatctcgctacttcattcctgttcttcctcttcctcggggtgctgatctggcaaggcgtcgacatggcctgggattccgcggccaagttcgagagatcgtccagtctctggaatccgcatatctggccggtcaagatcatcatcccagtcgcgggcgtgctgttgctgttgcagggcctcgtccggtttgcctcggacatccgcaccgtcaaggggctggagaacgacccggatacgttcggcaagcaggcgaccgacgaaccctctcattag

SEQ ID NO: 6728 - DNA, 1323 bp, BradyrhizobiumColbertium
gtgtcagtcgagcttctcacgcttctattcttcggttcgctgctggtcttccttttcatcggcacgccgcttaccttcaccctcggcggcatctcggtcgtcttcctgtacttcacgatggggccggtcgggttctacatcgtcgcgtccaagttctgggactcgatgatgagcttcacgctgatcgcgataccgatgtacgtttatatggcgatgctgctcgagaagtcgggtgtcgcgaacgatctttaccggatgatgcatctctggttcggcggctttcgcggcgggcttgcgatcggcaccgtagcgatctgcgcgatctttgccgcgatgagcgggatcagcggcgccgcagtcgtgacgatgggcaccatagcgctgccgcggatgctggagcgcggctacgacaagcggctcgctgtcggcgcgatcaactgcggcggcggctggggcatcctgatccccccatcgatcctgatggtgctttacgctttgctgaccgaggtatcagtcggccggctgttcgcatccggaatcggtcccggcatcctgctgttcgtgctggtttcgatctatatcggcgttcgcgcctggttgcagccatcgcttgcgcctgcattgccgatccaggagcgcggcgactggcaaacaaagttcgcttcactgaaagccgtgttcttgccgctgttcatcgtgtttctggtgctcggcgccatcttcggcggctttgcaacgccgactgaggctgccgcgctgggcgtgttcggcgcgctgatcgcatccgccgttcatcgcaggctgtcgatggccgtgctgaacgacgcggcgatccaaaccctgcgcctgacggcgctgatcatgtggatcttgttcgccgcgcatgcgttctcgacggcatacacgacgctgggtgccagcgagttgatgaatcacctgatgacgcttgttcccggcggaaaatggggagccctcgcgttcatgttgttcgtgctgctgatcctgggcatggtgcttgacccggtcgggatcatgctgatcacgcttccggtgttcctgccggtggtccaggcctacaattttgatccgatctggttcggcgtgatcttcatcatcatgatggagatcggctatatgacaccacctttcggcttcaatctgttttatctgaagagcgtggcgccgccggaagtcacgatgggtgatatctactggtccgtgattccgtacgtgcttgtgactatggtcggtgtgctgatcctgatcgttttcccggatatcgcgctgtacttcccgaacctgttctttggcgtggcgagatag

SEQ ID NO: 6729 - DNA, 294 bp, BradyrhizobiumColbertium
ttgccaaagggcgctcgcgtcggggcgtccgcggtgcggcgaggcccgacgacattgccaccatggagctgttcctcgcctcccgggacagccatcgcatcgccggtcagtattttcggggcgatgcgggtctcgcccagggcgtgcactcgaattcgtctcgggttcgcgttgcgcgacggagatgtcgcggatattgatccaggtcgcgatcaaggtgatctacgatcgatggtctcttggggtgcgaaatgggcaggcgtagcaacggatgtttgcccaccgaaatcgtaa

SEQ ID NO: 6730 - DNA, 1302 bp, BradyrhizobiumColbertium
atggacgcaaaaccaagcaacaagaccgccactctgacggttggaaacaagagttacgatcttccgatcctcagcggcagcgtcgggcctgatgtcgtcgatatcggcaagctttacggccagtccggcctgttcacttacgacccgggcttcacctcgaccgcgagctgccagtccaagatcacctatatcgatggcgacgcgggcgtcctggagtaccggggctacccgatcgagcagcttgccgagcacggcgacttcctcgagacctgctatctcctgctctacgggaacctgcccaccgccgcgcagaagaaggatttcgatcatcgcgtgacccatcacacgatggtgcacgagcagatggcccgcttcttccagggcttccgccgcgacgcccatccgatggcgatcatggttgcggccgtcggcgcgctcgccgcgttctatcacgacagcaccgacatcaacgatccgcagcagcgcatgatcgcgtccatgcgcatgatcgcgaagatcccgaccctggcggcgatggcctacaagtacaccgtcggccagcccttcgtgtatccgaagaactcgctgggctttgccgagaacttcctcaacatgtgcttcgcggtgccctgcgaggattacaaagtgagccccgtgctcgccgatgcgctggagaagatcttcatcctgcacgccgaccacgagcagaacgcatccacctcgacagtgcgtattgccggctcctccggcgccaacccgttcgcctgcatcgcggcgggcatcgcctgcctctggggcccggcgcatggcggcgcgaacgaagccgcactgaacatgctctatcagatcggcacggtcgacaagatccccgagttcatcgccaaggtgaaggacaagagctccgaggtccgcctgatgggcttcggtcaccgcgtctacaagaactacgatccgcgcgccaagatcatgcagaagatgtgtcacgccgtgctcaaggagaccggccatggcgacgatccgatgctgaaggtggcgatggagctcgaaaagatcgcgctcagcgaccagtacttcatcgaccggaagctctacccgaacgtcgacttctattcaggcatcacgctgaaggcgatgggcttcccggtgtcgatgttcaccgtgctgttcgcggtcgcacgcaccgtcggctggatcagccagtggagcgagatgatcgaggatccgcagcagaagatcggccgtccgcgccagctctataccggcgtaacaaagcgcgattacgttccgatcgacaagcgctaa

SEQ ID NO: 6731 - DNA, 144 bp, BradyrhizobiumColbertium
atgtgtggtgaaacgggccggagccggaggcccctagggagatcatgggggcaggccggaagttccagaatgtacggggagatgggtatattattgctatgtgcgctgcaagatcgccgcgcgcatggtcgacttacgtcgtag

SEQ ID NO: 6732 - DNA, 1428 bp, BradyrhizobiumColbertium
atgtccgattccgtcgtcacccgcttcgctccctcgccgactggctttctccatatcgggggtgcccgcacggcgcttttcaactggctctatgcgaagaagcatggcggcaagatgctgctccggatcgaggacaccgaccgggagcgctccacggaggctgccatcgcggccatcctcgatggcctcaaatggctggagctcggctgggacggcgatgtcatctaccagttcgcccgcgccgcccgccaccgcgaggtcgccgagcagctgctggccgacggcaaggcctatcgctgctacgccaccgccgaggagctcgccgccatgcgcgagaaggcgcgcgccgaaggccgtacccgcctctatgacggcatgtggcgcgaccgcgatcccgcgaccgctccgagcgatgtcaagccgaccatccggctgcgcgcgccgcagaccggcgagaccgtgatcgaggaccaggttcagggccgcgtggtctggcagaacgagaacctcgacgacctcgtccttttgcgcggcgacggcaacccgacctacatgctcgccgtggtggtcgacgaccacgacatgggcgtcacccacgtcatccgcggcgacgaccatctgatcaacgccgcgcgccagaagcagatctatgatgcaatgggctggacgctgcccagcatgtcccatatcccgctcattcacgggccggatggctccaagctgtcgaagcggcacggcgcgctcggcgtcgatgcctaccgcgccatggggtacctgcccgcagcgctgcgcaactatctcgtccggctcggctggagccatggcgaccaggagatcttctcgacggaggagatgatcgcggcgttcgatctcgccagcgtcggccgtgccgccgcccgcttcgatttcgccaagctggagaacctcaacggccactacatccgccacgccgacgatcaatcgctcgtgaggatgttcgaggacgtgctcgaccacgtcgtgccgagccgcgacgagattaaggccaagttaaacgagacgacacgggcacaacttctcaaggccatgccggccctgaaggagcgcgccaagacgctgatcgagctgatcgacggcgcccatttcattttcgcagaccggcccttgacccccgatcccaaggcgcaagcgttgctgacgcaagataaccggaggctgatcggccggcttcattccgcgctggagaaagtcgagacgtggagcggccccaccaccgaagccgcgctgcgcgcctttgccgaggaaaacggtctcaagctcggcgcggtcgcccagcctttgcgggcggcgctcaccggacggacgacgtcgcctggtatatttgaggttttggatgtcctggggcgccaggagagcctcgaccggcttaaggatcaatctacgacgtaa

SEQ ID NO: 6733 - DNA, 1677 bp, BradyrhizobiumColbertium
atgacagaaccggtggcagctgaggttgggcgcgatttcattcgtgacatcatccaggccgacctcgagcagggcaagtacaaggagatcgtgacccggttcccgccggagccgaacggctacctgcatatcggccacgccaagtcgatcgcactcaacttcggcatcgcccaggagtttccgggccgctgtcacttgcgcttcgacgacaccaacccggtcaaagaggaacaggaatacatcgattccatccaggccgacgtacgctggctcggcttcgattggggcaagaacctgttctatgcctcggactatttcgaccgcctgtacgaatgggcggagcagctgatccgcgacggactcgcctatgtcgacgaccagagtcaggaggagatccgtctctcgcgcggcacgctgaccgagcccggcaagaactcgccgttccgcgaccgcagcgtggaggagaatctcgacctgttccgccgcatgaaggccggcgaattccccaacggtgcgcgcgtgctgcgggccaagatcgacatggccgcgggcaacatcaacctgcgcgaccccgtgctgtaccgcatcctgcatgcgcaccatccgcgcaccggcacgaagtggagcatctatccgagctacgactatgcgcatggccagtccgacgccatcgaaggcatcacgcattcgatctgcacgctggagttcgaggaccaccggccgctctatgaatggttcatcgagaagctgccggtgccgtccaagccgcaccagtatgagttcgcgcggctgaacctgacctacacgctgctgtcgaagcgcgtgctgacccagctggtccgcgacggccatgtcgcgggctgggacgatccgcgcatgccgaccatggcaggcatgcgccgccgcggcgtgccgccggcggccttgcgcgaattcgtcaggcgcatcggcgtcgccaaggccaacagcgtggtggatgtcggcatgctcgagttctgcatccgcgaggagctgaaccgcacggcccagcgccgcatggcggtgttgaggccgctgaaggtcgtaatcgagaattatccggaagggcagaccgaagagctcgaggcgatcaaccatcccgacgacgccagcgccggcacgcgcaagatcactttcggccgcgagctctatatcgagcaggacgacttcatggagaacccgccgaagaagttcttccgcctgtcgccgggcaacgaggtgcggctgcgttatgcctatttcgtcaaatgcaccggcgtgatcaagaacgacaagggcgaggtggtggagctgcgctgcacctacgatcccgccaccaagggcggcaacgcgcccgacggccgcaaggtcaaggccaccatgcactggctgccggccgcgacttcgatgccggcggagatccgcatctacaaccagcttttcgccaatccgaccccagacgcctccaattttgcagccgatctcaatccgaactcgctgcagattctctccgacgcgcgggtggaggcttccgttgccgagagcaattcgaccgagccgatgcagttcgagcgccagggctatttcgtgcgtgacaaggactcgacgcctggcaagccggtgttctcgcgcaccatcggcctgcgtgatacgtttgcgaaggaagtcgccaaaggctga

SEQ ID NO: 6734 - DNA, 387 bp, BradyrhizobiumColbertium
atgagcagtgaggccggcgagatcgtttccgccatcatctcgaaatggtgcgcaggcttcgcaaagctcgacgcctcggcgctgtcgtcgctgtattcgaagaacgcgttcttcttcggctccaatccgaaactctatcggggcagggacggcgtcgccgactatttcaacggcctgccgcgctggcgcaaaccgagcgccgcgttctcggatgtacaggcggcacagtcgggtcccgacctcatcaacatggctgcgaccatctcattcgatcttgccggcgagcgtgccgatctcatggtcaagatgagctgggtgatcgtccgggaggacggcgactggaagatcgtcaaccaccatgcctcctcgcaggcgccgctgatctga

SEQ ID NO: 6735 - DNA, 2265 bp, BradyrhizobiumColbertium
gtgcgctcccagggagtcgccgggacgtggccagtcggccgtgtcgcgcccgctggcggcttcgcgccggctgaccttggcctttggcccgccatcgtcgagacgctgcgccgatgggcccgcgccgaggcggggcccggccggttgttgccctgggtgccggtcgccttcgggggcgggattgcactctacttcgccgcggatcacgagcctgtgctgtgggtcgtggcaacgacagcggccgcgctgatgctcggcgcggtgctgctgcggcggagccgcctgttcgcccccgccatcatgatcgcagcggtcgccgccggctttgccgtcgcgacctggaagaccgcgcgcgtcgctcacaccgttttggcaaagccgctctattcggtgtcgctgtcggggttcgttgaagcgcgggacatccgcgagcgcaccgatcgtttcgtgctgcgcgtcaccgcgatggaggcgcagcgcagcgacatcaagctcgagcgcgtgcgtctttcggttcggaagggaacggcaccggaggtcggcagcttcgtgcagctgaaggcccggctgctgccgccgatctcgccggtgcgccccggcagctatgatttctcacgcgacatgttcttccagggcatcggcgcctccggcttcgtgatgggcacgatcacggcgtcgacgccgccggatgccggcggcttgcggctgcgctacgcggctttcatgcagggcctgcgcgatgcgatcgacgggcgcatccgtgccacgctcgaaggcgacaaccgagcgatcgcgacggcgctgctcaccggccggcgtgatgcgatcaccgcgcccgtcaacgacgccatgttcgtctcggggctgggccatgtgctgtcgatctccggctaccacatggcggtcgtcgccggcgtcgtattcttcgcagtgcgcgcgctgctggcgttgatcccgggactggcggccggcttcgcgatcaagaagtggtcggcggcagcggcgctggttgcggctgcgttctacctgctgctttcgggcgcagaggtcgcgacgcagaggtcgttcttcatgacggcggtggtgctgatcgccgtgatggtggaccgccgcgccatcacgttcaggacgcttgcggtggccgcactgatcgtgctcgcggtcgcaccggaggccctggttcatcccagttttcagatgtcatttgccgcaacgctcgggctggtggcgctggtgcagatcggcatgccgaacctgctcgcatcgcccgatcattccgcaacggcgcggatcgcgctgtggggcggccgcgagatcgcgatattgttcctggcctccttgatcgccgggcttgccaccacgccttatgccgccttccacttccaccgcgtgacgccatacggcgtgctcgccaatctcggcgcgatgccggtggtctcggcgctggtgatgccggccgggctgttggggctgctcgcggcgccgttcgggctcgacggcgtgttctggtggctgatggggatcggcatcgactggatggtcgcggtctcgcgctgggtggaggcattgcccggcgcggtcggccgcattcccgcgttcgggatcgcgccgctgatcgcggcgagcctcggggtcatcgtgatgggcctgttgcgcacgcccttgcgctggtccggtgcgctggtgctgtttgccgcgatcatctgggggctgtcggtgcgacagcccgatatcctgatcgccggggacggcgcgagcgtcgccgtgcggggcagggacgggcatctgcatgtgatccgcgcgagcagggatggcttcctgctcaagcaatggctggctgccgacggcgatccccgcgacgccggcagtgcctcgctggccgacggtgtgtcttgcgacgcgtccggctgcgtcacggccttggctgacgggcgcttggtcgcgctttctctccgcatcgacgcgctggcggacgattgcagccgcgccgcgctggtggtgacggcgcggcccgtgccccctgattgcgcggcgatggtcatcgaccggccgcgtctggccagtcagggtgcactggctctgacgcggagcggcgaaggcttctcggttcaggccgtgagggcgcgcagcgcaagccgcccctggttgccggcgggcgccggcgagggagacttcgacggcagcctcgcgccgaagacggcactgccccgcaatcgggacgcaacgccatcggatgccgacttgcaggctgacgatggaggatag

SEQ ID NO: 6736 - DNA, 435 bp, BradyrhizobiumColbertium
atgtgtgactacagcctgcatgccatcgcgacgcgcccggccgaagtcggcgagaccatcgtcacgacaacgttccgcggcacctcaacgcgcggcttcgcgtctgaagccgatctctccgtcgcagtctgcctgctgccgggcaccgagctcgcttttgccgacaacgtccgttacgataaccgctggatctggacgcgcaccgtcaactcccgcgtcggcaagttcggcaagatcgatccgcacattcccgatcgccatcatgacgcgatcgaattcccggacggcaagtccgtgctggtgacacagctggtcgaaggccagcgcgcgaccgtgctgcagctgccggtgacccagacaattggcgagcgcgagcacaagccgcagatcgccgccgggacccggtcgacgatcacccgcctgccgatcgactga

SEQ ID NO: 6737 - DNA, 798 bp, BradyrhizobiumColbertium
gtgtccgttcatgatttgtttcgagatgtagcggccttatcgccgaaattcatcgtctcggaatcgaacgacatcaaccgggggactttggtcgagatgttgacgcgcaaacaatacgagcttctgcggttcatcagcgaacgtctgaaggaaagcggcgtgccgccatccttcgatgagatgaaggatgcgctcgacctgcgctcgaagtcaggcatccatcgcctgatcacggcgctcgaggaacgcggcttcatccgccgcctgccaaaccgcgcccgtgccatcgaggtgatcaagctgccggagctccaggccgctgccggcagccgccgcggcttcacgcctagcgtcatcgagggcaatctcgggaggatacgccccacgtccagcccgcctgcggacgaaggcgagcgtcccgttgcggtgcccgtgatggggcgcatcgcagccggcacgccgatcgaggcgttgcagacccggagccacaccatcagcgtgccgcctgacatgctcggctcaggcgagcattatgcgctcgaggtacgcggcgattcgatggtcgaggccggcatcctcgacggcgacatggctctgatccagcgcaacgagagtgccaataccggtgacatcgtggtggcgctgatcgatgacgaggaggccacgctcaagcgcttccgccgccgcggtgcctcgatcgcgctcgagcctgccaatgccgcgtacgaggtccgcatcctgccgccgaaccgcgtgaaaattcagggcaagctgatcgggctttaccggaagtactga

SEQ ID NO: 6738 - DNA, 1212 bp, BradyrhizobiumColbertium
gtggccctgatgccggtttctgacgcgctcgcggcggtgctggccggcgccgagccgctggccgaagaaacggtttccctcgagggggcctaccatcgcgtgctcgcgcgcgacgtcgcggcgcggcgcacgcaaccgcctgaggcgatgtcggcgatggacggctatgcagtgcgggcggccgatgcggccacgatcgattccaggctgacggtaacgggcgaggtcgcagcgggccgtccgttcgctggaagggtcggcgtcggcgaagccgtacgaatcttcacgggcggcgtcgttcccgatggcgccgacgcggttgtgatccaggaggacacgatcgccgagggcaagctcatcacgatcaaggaggccgcaattcccggccgtcacattcgccccgccggcgtcgacttccgcgagggcgacgtgctgctgcgcaagggaacccgcctcaccgagcgcgatctggcgctggccgcggcaatgaatcacccgcagctcgccgtctgccgccgtccgaaggtcgcgatccttgccaccggcgacgaactggtggcgccgggcagcacgcccggtcccggccagatcgtctactccaacggctacgccctgcacgcgctcgcgcgcagcgagggcgccgagaccatcgatctcggcgttgccgccgatacgctggagtccacgtccgccggcatccgccgcgcccgcgagagcggtgccgacatcctgatcaccaccggtggagcgtcggtcggcgaccacgacctggtccagcaggcgctgagggacgaaggcatctcgatggcgttctggaagattgcgattcggcccggcaagccgatgatgcacggccggctcggcgcgatgcgcgtgatcggcctgcccggcaatcccgtatcatcttacgtgtgcgccttcctgttcatggtgccgctgattcgtgcgctctcgggccgctcgatgattcatcatcagcgcgagcacgccgtgctgggtcgcgatctcgctgccaacgaccagcgcgaggattatctgcgcgcacgcctggagctgcgcgacgacggcgcgctcgttgctgttcccgtgagccatcaggactcctcgctgcttgcgaatcttgctgcggcacagctacttctcgtgcgcgcaccgttcgcgccgaaggccgaagccggcacgccctgcgtggtgctgcggcttccggcctga

SEQ ID NO: 6739 - DNA, 207 bp, BradyrhizobiumColbertium
gtgctgggcaaaacctatctcaccaggcaggcttctctgctgcttgaattcgccagaaccacctcggattctgaactttccgccaagctgatcagcaaggccgccgacctgaagtcccaggccgaccctctgccagacaaggatcaaggccccaaagcgcccgacgtcgcctcgaacgacggctggggccgaccaagcgggagttga

SEQ ID NO: 6740 - DNA, 624 bp, BradyrhizobiumColbertium
atgacatcgctctctcccggcagcgcggatgcgcttctgttcgacctcgggcgcgtggtgctcgacatcgacttctccaaggcgatcgcctgctgggcagggcatgccggttgccagccggaggccatcgtcgcgcgctatgtgcgcgacgaggcctaccggctgcacgagatcgggaagatcagtgacgaggactatttcgcctcgctgcgtgcttcactcggaatcggcatctcggacgcgcaattcctggaaggctggaacgcgatcttcgccggggagatgcctgacatcgccgagctgatgccgcgcgcggcgaaactgatgccgctctatgccttttccaacaccaatcggccgcatgtggactatttctcgaaggaatatgccagcgtgctcggccatttccgcgaactgtatttgtcgtccagcatcggcctgcgcaaaccggatgccgaggcattcgatcacgtcgtggcggcgatcggcgtgccggcggagcgcattgtgttcttcgatgatctggcagagaatatcgaaggcgcacgggcgcgcggcctgaccgccgtccatgtgacgtcgccgcgcgatgtcggcaacgcattgagggccctgggtatctga

SEQ ID NO: 6741 - DNA, 1134 bp, BradyrhizobiumColbertium
atgaacgaagcgccccgcatccagccggaccggaacgtcgagctcggtgccagcaacgagccgttccagaacctgcacgagttcatccggaaagcgcgcgccaacctcaaccagaatgcctgggactacatcgtcggcgccgccgagaccgaaaccacgatgcgccgcaaccgcatggctctggacgagatcgccttccgcccgcgcgtgctgcgcgacgtccgcaaggtcgacggcggggtcgatcagttcggccgcaggatgcgcttgccggtcgtgctcgctcccgtcggtgccctcgagatcttcgatccggatggcgcggcaagcgtggcgcgcgccgccggcgctttcggtgcggcgcacatgctgagctcggtatccgaaccaggactggaaaagaccgccgaagccgcgcccgatgcgctacggctttatcagctctatgtccgcggcgacgatgccgtcgtcgccgatgtcgtcagccgggccgagaagaacgcctatgcggccttctgcctgaccgttgacaccgcccattacagccgtcgtgaacgcgacatcgccaagcgctacgttcgcgagagccgcctgcgcgccacagggggcgatttccagaagggcctggaatggcggacggtcaagatgatcaaggacaaattcgagataccactgattctgaagggcatcgccacggcagaggacgcgctgatcgcactcgatcatggcgtggactggatttacgtctccaaccatggcggccgccaactcgaccacggccgcggtgccatgcatgtgctgcccgagatcgtcgatgccgtgaagggccgcgccaagatcatggtcgacggcggtttcggtcgcggcaccgacatcgtcaaggcgatcgctgcgggcgcggacctcgtcggcatcgggcggttgcaatgctgggcgctggcggcggcaggcgaagccggagtcgcacggatgctggagctgcttgaggacgaggtgctgcgctgccttggcctgttgggcgccacctcgttcgccgaggtggacaagtcctgcctgcatccggcaaccgccaccaacgcgccgagcgtgttcagcgcgttcccgctgttcgaccatgagccctatcgctactga

SEQ ID NO: 6742 - DNA, 1338 bp, BradyrhizobiumColbertium
atgcggaaatccctgctgttccccctcggcgcactcaccggagcctgcctgacccttctggtagcgagcccgcacggctccgtatgggcggcgcgggcggcggcgggcgcgaatgatgcctacagccagctcaatctgttcggcgcggtgttcgagcgcgtcaaggcgagctatgtggagaagcccgacaatgccaagctgatcgagggtgcgatcaccggcatggtgacttcgctcgatccgcattcgcgctatatgaacgccaaggcctggaccgagatgcaggagaccacctccggcgagttcggcgggctcggcatcgaggtcacgatggaggatggcctcgtcaaggtggtgtcgcccatcgacgacacgccggcgtccaaggccggtctcatgtccggcgacctcatcagcaagatcgacggcgaagccgtgcagggcatgacgctcgagcaggcggtcaacaagatgaagggcccggtcaacaccaagaccaagctgaccatcgtgcgcaagggcgcggacgcgccgcttgaagtcgcgatcacgcgcgagatcatccacgtgcgccccgtgcgcttccgcgtcgagaacggcgacatcggctatatccgcattacctcattcaacgagcagaccaccgatggcctgaagaaggcgatcgcgtcgatctccaagcaggtgtcgccggagaagctcacaggctacgtgctggatctgcgcaacaatcccggcggcctgctcgaccaggccgtgtcggtgtccagcgccttcctgcagcgtggcgaggtcgtgtcgacccgcggccgcagtccggaagaaacccagcgcttcaccgcccaaggcggcgatctcactaagggcaagccgatcgtggtgctgatcaacggcggctcggcctcggcctccgagatcgtcgccggtgcgctgcacgaccacaagcgggcgacgatcatcggcacgcgttctttcggtaagggctccgtgcagaccatcattccgctcggctccggcaacggcgcgctggcgctgacgacggcgcgctactacacgccgtcgggtcgctcgatccaggcccagggcatcgcgcccgacatcgagatcctccaggacgtgccgccggagctgaagggccggatggacaccatggccgaggcccagatgcgcgggcatctctcggccggcgagggcggcgagcagaccgggtcgcaatcctatgttccgccgaaggaggaggacgacaaggccctgcatgcagcgttcgacttcctgcacggcggcacggcgaacgccatcgccgccaagcggccggcgaaagctgcggtgccgaactga

SEQ ID NO: 6743 - DNA, 2733 bp, BradyrhizobiumColbertium
atgaagatgaaattcggaagtcgtctctttgaccaaatcttcgtgcgcagcggaccgatccgttggctggtggcgggcggcacgcttctgatcgcaaccatcgccatcggctcggtcctgatggcgcagaacttccgggagcgggcgctgcgcaactccagccgcgagctggagaataccgtgctgctgctcgctcatcatttcgatcagcaattgcaggatttcggggtcatccagaaagccttcatcgatcatgtccgctcgattggaatcacgaccggagagcagtatcgtacgcgcctctcgggcgaggacgttcaccgaatgctgcggtcgaagatcgaggccctgccctacatcggaggcgtcaacgtcatcgatgccgagggcaatctgatcaattcgtcgacggcatggccagccccaaaagtgaacgttgccgaccgcgcctacttccgcaccttcaagtacgaccccttttcgcctgacgtgctgatcgagccgctgtatagccgcctctccggtgcctggaccattctggtagcccgcagaatcgtcggtcccggtggcgagttcctcggtgtcgtcggtcgcggcatcgagcccgccaatttcgagaaattcttcgcctccgtcgtgctcggcgacggcgcgaccatctcgatgctgcatcgggacggcacgctgctcgcccgctatccgcactcccgcgaattgatgggacggaacttcaagaccggcccgttcgagcaccagagggtgttcgggctggatcattttgccggccgctttacgagtcccgtcgacggcgaggaccggctgatctcctcgcgggccctgccccacttcccgatcctgatgatggccaccacgacgcgcgcgtcggccctgacggactggcgcgagcaaatcggaattctgacgtcggtcgccgcctcgtccgcgctcgccatcgcaggcgtgctgatcgcggtcgtgcgcaagctgcttgagcagcaccgcctttcccgcgaacggctgacgctggaaaagcaacggctcgatcacgccgtcaacaacatgacgcaaggcctcttgctgttcgattccgagcggcggctcgtggtctgcaaccagcgctacatcgagatgtacggactgtcgcctgacatcgtgaaacccggctccagcttccacgacatcatcgcccatcgcaaggcgaccggctcgttcaccggcgacgtcgacgcttacgtcgcgctcgtgctgaaggacatccatgtccgcaactccatggtggtcgacaccgccgacggccggtcgatccacatcctcaatgaaccgcttgcggacggcggctgggtcgcgacccatgaggacatcacggagcgccgccgcatcgaggagcgcatcacccatctcgcccactacgactcgctgacggatctgcccaaccgcaccatgttccatgagcatctgcgcggagagctggctgcgctccgcgacggcgagcagattgccgtgcactacatcgacatcgacgaattcaagggcgttaacgacgcgcttggccatctcgtgggcgacgagctcttgaaatcggtggccacgaaccttcgccgctgtgcgggccccgccgatttcgtggcgcggctcggcggcgacgagttcgccattgtgcaaagcgctgtgacgtcatcggaccgggtcagcgaactcgtcgcgcgggttttcgaagccatccgcacgccgttcgactgcatgggccaccatctcaccagcgatgccagcatcggtattgcgctcgcgccggaacacggcacggtgctcgatcagatcctcaagaacgcggacatggcaatgtatgcggccaagtctgccggacgccgcacctatcgtttcttcgagccggagatggatgccaaggtccgcgagcgccgccagctcgagaacgacctgcgccacgcccttgcccaagggggtctggaaggcgggctcgaggtctactaccaaccctgtctcggcttgaaggacgaccgcatcaccggctgcgaggcgctggtgcgctggcgccaccccgggcgcggctgggtctcgcctgccgaattcatccccatcgcggaggacaccggcctgatcaacgagatcggcgagtgggtgctggcgaccgcgtgccgggatgcagcaaactggcccgacgacatccgcctcgcggtcaacgtctctccggtgcagttcaagagcggcacgctggcgctcaagatcatggcggcgctcgccgcctcgaacctgccggcgagccggctcgagctcgagatcaccgaggcggtcctgatccgtgacgacgatgccgcgctggcgatcctgcaccagctccgcgccatcggcgtgcgcatcgcgctcgacgatttcggcaccggctactcatcgctgagctatcttcaccgcttcccgttcgacaagatcaagatcgatcgctgtttcgtcgacgatatcgcccgccccgacggctccgccagcatcgttcaggccgtggtcaatttggcggccgcccggcgcatgactaccacggccgagggcgtcgagaccgaggagcagcagcgcctgcttcgcacgctcggctgctcggagatgcagggctatctgttcagcgccgccaggcccgccgacaagatgctggaactgttcgcgctgcaccgcagccggctcgcccggcgcgaaggcagcgagagccgccgccgcgaagccggttag

SEQ ID NO: 6744 - DNA, 534 bp, BradyrhizobiumColbertium
atggcgcgcaagccagccaatacaaagccaatcaagaggaagccggctgaatccggggccggtcccgccctcacccatatcggcgcctccggcgaggcccggatggtcgacgtctcggacaagcccgcgaccgcaaggcgctcggtcgcggaagggcgcgtcgtcatgaccaaagcaacgctcgacctgatcgtatccggcaacgccaagaagggggacgtgctcggcaccgcgcgcatcgccggcatcatggccgccaagcgcacctctgagctgatcccgctctgccatccgcttgcgttgtcgaaggtgacggtcgagatcgagcctgacgtcaaattgccgggctgcctcgttcgcgccagcgtgaaggtgaccggcccgaccggcgtcgagatggaggcgctcacggccgtctcggtcgcgtgcctcaccatctacgacatgatcaaggcggtcgagcgcggcgtacgcatcgagggcatccatctcgtcgagaagctcggcggcaagtccggccattatcgcgcctga

SEQ ID NO: 6745 - DNA, 828 bp, BradyrhizobiumColbertium
atgcgcatgtcggacatcctgaccaagatcgaaacctacaagcgcgacgagatcgctgccgccaagtgcgcacagccgctctcggacctcgaggcgaaggcgaaggcgcaagccgcgccacgcggcttcgtgcgggcgatcaaggccaagcacgcgcatggcgatttcgcgctgatcgccgagatcaagaaagcttcgccttccaaaggtctcattcgcgctgatttcgacccgccggcactcgcgagagcctacgaggccggcggcgcagcctgcctttcggtgctgaccgacacaccctccttccaggggcatctcgacttcatggtggcggcgcgcgcggcgacctcgctgccggtgctgcgcaaggacttcatgttcgacacctaccaggtggtcgaggcccgcgcccacggcgccgactgcatcctgatcatcatggcggcgctcgacgatgccgccgcgaaggacatcgaagatgccgccatcgcctatggcatggacgtgctgatcgaaatccacgatcgcgccgagctcgaacgggcgctgaagctgcgatccccgatgatcggcgtcaacaaccgcaatttgcgcaccttcgagactacgcttgcgaccagcgagctgctggcaccgctgatccctcaggaacggctgatggtcggcgagagcggtatcttcacgcccgaagatctcacccgcctcgagcgcgtcggcatgtcgacgttcctggtcggtgaaagcctgatgcgccaggccgacgtcactgccgcgacgcacgcgctgctcgcgcgcaagaccgcggcgcacgcgacgggcacgcgctga

SEQ ID NO: 6746 - DNA, 588 bp, BradyrhizobiumColbertium
ttgaagatcgtgcgcgtggcaagctcgacccgggtcggaccgacgttcttcatggcgggatggtgggcgggggcgaacatgaagccgatgccgcattcgcgcacgcagcgcccgacctgctcaggcttcaggtcgatcttgacgccgagcgaggccagcacgtcggcggcccccgagcgcgacgacagcgcgcggttgccgtgcttggccaccggcacgccggcgcccgagacgatgaaggcggcgcaggtcgagacgttgaccgagcccgagccgtcgccgccggtgccgacgatgtcgaccgcttcgggcggggccgtcacggtcagcatcttggagcgcatcgccgcgacggcaccggtgatctcgtcaacggtctcgccgcgcacccgcagcgccatcaacaggccgcccatctgcgagggtgtggcctcgccgctcatcatggcatcgaaggcggaagcggcttcgtcgcgcgacaggctggcaccggtcgcgacttttccaatgatcgatttcaggtcgtccatcgcgtgctttcaactcactggttcgcgccggtcacctgcgcgaaggcggcctgattga

SEQ ID NO: 6747 - DNA, 1887 bp, BradyrhizobiumColbertium
atgcgcaaggcctcatcaaactggctcggcaagaccattatggccatggtgatgggcgtgttgatcatcagtttcggcatttggggcatcgccgacattttcaagggcttcgggcagtccacggtggccaaggtcggcagcaccgagatctccctcaacgagttccgccagatctataccgaccggctacagcagatcagccgccagttcggccgtccgctgacgcccgaccaggcgcgtgccttcggcatcgatcgccaggtgctccagcagaccatcgccgaagccgccctcgacgaagaggcgcgcaggctcgggctcggccagtcggacgagcagatccgccacgtcatcatgaacgatcccaacttcaagggcgtcggcggaaacttcgatgcgaaccgctttcaggccgtgatccgcaatttcggctacaccgagcagcgctacgttgccgagcagcgcaaggtgtcgctgcgccggcagatcaccggcaccatcggtgccggcatcaagccgccgaagaccatgatcgacatgctgacgcgctaccagaacgaacaacgctcgatcgaattcgtccggctcgacgcggctcaggccgggaccatcgacccgccctcgcccgaggcgctcgccgcctatttcggggatcataaggtccaattccgggcgcccgaataccgcaagatcgccttcgtcgtggtctcgccggaggacatcggcaaatggaccgaggtgtcggacgaggatgccaagaaggtgttcgagcagcgcaaggaccggctcggcacgccggagaagcgccagattcagcagatcgtgtttccgaacgtcgccgaagcgcaagccgcacgcgagcgcctcgtcagcgggacgtcgttcgaggatctcggcaaggaacgcgggctgagcgcctccgacatcgacctcgggctcgtgaccaagtcttcgctcacgcctgccgtcggagacgccgccttcgcgcttcccgtcggcgagatcagccagccgattcagagcggtctcggcgtcgcgatcgtcaaggtcgacaagatcgagccgggcaaggaggccgactacgccagccttgccggcgacatcaaacgtgagatcgcgaccgagcgtgcgcgcgtcaaggtcgccgatctccgcgacaagatggaagacgagcgtggcggcggctccagcgtgatcgacgcggcgcagaagctcggcctcaccgcggcgaccatcgacgccgtcgaccgctccggccgcgccccggacggccagccggtcgccaacatcccgcagggcctcgacgtcgtatcgcaggccttcaacaccgatgtcggcgtcgacagcgatgcgatctcctacaagggcggctatgtctggtacgacgtgctcgccatcacgccctcgcgagaccgcaatctcgacgaggtccgagaccaagtcgaggcgcgctggcgccaggaccagatcgcagccaagctgaagacgaaggcgaccgagatggtgcagaagctcgaagcgggcggcaagctcgcggatgaggccgccgcgatcggcgccaaggtcgagaccgcgaccggattcaagcgcgacgattctccagccggcgtgcccggcacggtcgtcgcggccgctttccgcaccgccaaggatggcgtcggacagaccgccgtgagcggtggcagcgaggtgattgtcttccgcgtcaccgacatcgtcgaacccgcggtcgacgtcgcctccgatgcggtcaagaagctgaaggagagcctcgaccgggcccagaccgaggaacaggtcgcctcctacatcaacaagctcgaagccgacatcgggaccaccatcaatcaggccgccttcgcgcaggtgaccggcgcgaaccagtga

SEQ ID NO: 6748 - DNA, 114 bp, BradyrhizobiumColbertium
atgcagattccgcaaaagcgcgtcaccaaattgatcaatcatcataaagtggcggctttccccccgcaacctcgcctcgggcgccgcttcgagcctgcggttaaaagcctctag

SEQ ID NO: 6749 - DNA, 756 bp, BradyrhizobiumColbertium
atgaccgacgccatccgaccgctgatcgccggcaactggaaaatgaacggcctcaaggcccaggctgccgaattcgacgccatgctcagcggcgcggcagacgtggccggcaaggccgatctcctggtctgcccgccggcgaccctgatcgccaccttcgctgacaaggcgcgcggcaagaaggttgcggtcggagcccaggattgccaccccaaggcctccggcgcccataccggcgatgtcgccgccgaaatgctggtggacgcgggtgcaaacgccatcatcgttggccattccgagcgccgcgccgatcatggcgagagcgacgctctcgtcaggcagaaggcggaagccgcctggcgggccggggcggcggcgatcgtctgcatcggcgagacgcaggcccagcgcgacgccgggcagacgctggacatcctgcgtggccagctcggcggctcgctgccggacggctcgatcgccgcgaatctgatcgtcgcctatgagccggtctgggcgatcggcaccggcctgacccccacggcccaggatgtcgagcagattcatggctttatccgggaactcctgacctccaggttcaaggacgaggggaccaagatgcggattctctacggcggctcggtcaaaccgtcgaatgcggccgagctgatggcggtgaagaacgtcaacggcgccctggtcggcggcgcgagcctgaaagcggccgatttccttgccattgccaagggctgcccttag

SEQ ID NO: 6750 - DNA, 384 bp, BradyrhizobiumColbertium
atgcagaccgttgtcatcgtcatccacctcatgatcgtcgccgtcatgattggcgccgtcctgctgcagaagtcggaaggcggcggcctcggcatgggcggaggcgccggcttcatgtcgagccgcggtacggcgaaccttctgacgcggaccactgccatcctggcggtgggcttcttcatcaccagcctgttcctctcctggtacgctggttacaaccgggcgccgtcgtcgatcatcggccagccgtcgcagacccagccggccggcggatcgccgatcgcgccgcccacctcgggcggcatcctggattcgctgaagaaggccgacgagcagcagcagaaccaggcgccgtcaggtccgcaggtgccgcgttcgcaataa

SEQ ID NO: 6751 - DNA, 1632 bp, BradyrhizobiumColbertium
atggcgcggtacatattcatcaccggcggcgtggtttcttcgctcggcaagggtctggcttcagcggcactgggtgccctgctgcaggcccggggctacaaggtccgcctccgcaagctcgatccctatctcaacctcgatcccggaacgatgtcgccgtatcagcacggcgaagtgttcgtgaccgatgacggcgcggagaccgatctcgacctcggtcactacgagcgcttcaccggccggccagcgaccaaggccgacaacatcaccacggggcgcatctaccaggacatcatctccaaggagcgtcgcggcgattatctcggcgcaaccattcaggtggttccgcacgtcaccaacgccatcaaggaattcgtcctcgaaggcaatgacgagttcgacttcgtgctggtcgagatcggcggaaccgtcggcgacatcgagggactgccgttcttcgaggcgatccgccagctcaagaacgagctgccgcgcgaccatgccgtctatatccatctgacgctgctgccttacattccgagcgccggcgaattgaagaccaagccgacgcagcactcggtgaaggagctgcgctcgatcggcatccagccggacatcctgctctgccgcaccgaccgcgagatcccgaaggaagagcggcgcaagctcgggctgttctgcaacgtgcgcgaaagcgccgtgatcgaggcccgcgacgtcgacaacatctatgccgttcccgaggcctaccacgacgccgggctcgacgacgaggtgctcgccgccttcggcattgcctcgcggatcccgccggagctgcgcagctggcgggagatcaacgagcgcatccgcaatcccgagggcaacgttaccatcgccatcgtcggcaaatacaccggcatgaaggatgcctataagtcgctgatcgaagcgctctcgcatggcggcatcgccaacaaggtgaaggtcaatctcgactggatcgagagcgagatcttcgagaaagaggatccggcgccgttcctcgagcacgtcaatggcatcctggtgccgggcggcttcggccagcgcggcgcggagggcaagatcaaggcggcgcagttcgcgcgggagcgcgacgtgccgtatttcggcatctgcttcggtatgcagatggcggtgatcgaggccgcacgaaacctcgtcggaatcgaggatgccaactccaccgagttcggcccaaccaaggagccgctggtcggcctgatgacggaatggctgcgcggcaacgagctggagaaacgctcgcaggccggcgacctcggcgggacgatgcggctcggcgcgtatccggcggcgctcaatcgcggcagccgggtgtcgcaggtctatggcggcgccaccgagatttccgagcggcaccgccaccgctatgaggtcaacaccgcctacaaggatcgtctcgagcagcacggcttgaaattttcgggtctgtcgccggacggcgtgctgcctgagatcgtcgagtacgaggatcatccctggttcatcggcgtccagttccatcccgagctgaagtcgcggccgttcgagccgcacccgctgttcgcctcgttcatcgaggcggcggcgaagcagagtcggctggtgtaa

SEQ ID NO: 6752 - DNA, 327 bp, BradyrhizobiumColbertium
atgatctacgaaatgcgcgtctatcgctgcgtgcccggccggctgccggcgctcctgaagcgattcgaagccgtcacgctcaagctctgggaaaagcacggcatcaagcaggccggcttcttcacgacgctgatcggtgagtcaaaccaggagctgacctatttcctggcctgggactcgctcgccgagcgcgagaagaagtggggcgcgttcatgaccgatccggattggctcgaggcgcgggcaaagtcggaagcggacggccagatcgtcggcaacatcgtcagccagattctggcgccgaccgccttctcggccgtgaggtaa

SEQ ID NO: 6753 - DNA, 849 bp, BradyrhizobiumColbertium
ttgagctcttcgacgtcagcggcgccggtcgtcaccattggcacggtcaagttcggcaatgatctgccgatctcgatcattgccggaccctgccagctcgaaagccgtgagcacgcgctggaggtggcctccgccctgaaggagatcgccgcgcggctgaagataggtctcgtctacaagacctccttcgacaaggccaaccgcaccagcgcgtccgccgcgcgcgggcttggccttgcgcagtcgctgccgatcttcgcggagatccgatcctcgcttggcctgccggtgctgaccgacgtgcatgaagccgcgcaatgcgccgaggtggcgcaagcggtggacatcctgcagatcccggccttcctgtgccggcagaccgatctcctgcttgccgcggccgcgaccggcaaggtcgtcaacgtcaagaaggggcagttcctggcgccctgggacatggccaatgtcgtgggcaagatcacgggcggcgacaatcccaacgtgctcgtcaccgaacgcggtgtctccttcggctacaacacgctggtctccgacatgcgcgcgctgccgatcctggcacgcaccaccggcgcgccggtcatcttcgacgccacccattcggtgcagcagccgggcgggaagggggcctcgtcgggtggcgaacgggagttcgtcccggtgcttgcgcgcgcggccgttgccgtcggcgttgccggtgtcttcatcgagacccatcccgaccccgaccgggcgccctctgacgggcccaacatggtgccgctgcgcgagttcgaggggctgatcgccaggctgatggcgttcgacgcgctggcgaagaacccgcgctaa

SEQ ID NO: 6754 - DNA, 1206 bp, BradyrhizobiumColbertium
atgcagcaaggcgagacgcggtcgcacgatcagggcttgccggcagcgctctacgtcatatcaggcgcgagcttcgccgcggcactctcggctcgcgcgctcgatccggtgctgccgcacgtcgccgaggattttggcgtcagcatcgccaccgctgcgggcttcgccgcggtgttcgctttcaccttctcgatcatccagccgatcatcggcgccgccgccgacctgttcggcaagacgcggctgatgatcggctgcctcgcgctgcttggcctcgccaacatcctgggtgcgttctcgacctcgttttcggtcctgtttgcgacccgcatcctcgccggcatcggttcaggcggggtttttccggtggcgctgagtctcaccagcgatctcgtcggtcccgacaagcgccaggtcgcgatcagccgcacgctggcgggcgcgatgaccggcaatctgctcggcgcctcggcttccggcctgatcggggattttctcggctggcgcggcgtgctggcggtgctcggtgcgatcgtgatcgtggcgtcgatcgcggttgccgccggctttcacggcgccaaggtcaagcatccgccgaagacgagcctgtcggcattgagggccggctatcgtaccatcttcaccaacccgaacgcctatgtctgctactcggcggtgttcatcgaaggctgctgcgtgctgggcctgtttccctacattgcctcgttcctgttcgatctcggccagacctcgctgtcgatcgccggtatcgtcatcgcgggctttgcggtcggcggcctgttctacacgctgacggtgtcgcgcctgctgccgcggctcggcgtgaagggcatgatgatcgcaggcatgacgctggttgcttcgcagctcatcgccgtcgccttcggcccgcgctgggaggtgcaggcgttgaacctcatcgtgatgggatggggcttctacatcgcacacggctgtctgcaggtgttcgccagcgagctttcggtcgaggcgcgcgccaccgcgctgtcgctgcattcgttcttcttcttcatggggcagactgtggggccgctcgcctatggatttggactccagcatgccggcaagatgccgaccctgttcacgagcgcgttgatcatggcggtactgggcttgttctgcgcgcggcttctcaagcagcgtgccccggcggatgcgcgctag

SEQ ID NO: 6755 - DNA, 489 bp, BradyrhizobiumColbertium
atgtcgaaaaagcccagcaaatcgaagaccccgcgcctggacccggctgccctgcagctcggccacgccgtggcatggccggatgcgccggacaaggcccagctcgaccgcgtgcccaatccgcaaagcggcaccgattatctggtgcgcttcaccgtcccggaattcacctcgctctgcccggtcacgggccagccggacttcgcgcatctgatgatcgactacgcgccgggggcctggctgctggagtcgaaatcgctcaagctctacatcgcgagcttccgcaaccacggcgccttccacgaggactgcaccgtcatgatcggcaagcgcatcgccagcgagatcaagccgaaatggctgcgcatcgggggctattggtatccgcgcggcggcatcccgatcgacgtgttctggcagaccggccgcataccgaaaggcctgtgggtgccggagcagggcgtcgcgccctatcgcgggcggggctag

SEQ ID NO: 6756 - DNA, 1284 bp, BradyrhizobiumColbertium
atgaccgccatcatcgacatcatcggacgcgaaattctcgacagccggggcaatcccaccgtcgaggtcgatgtcgcgctggaggacggcgcgctcggtcgcgctgcggtgccgtcgggagcctccaccggcgcccatgaggccgtggaactgcgcgacggcgacaaggcgcgctatctcggcaagggtgtgaccaaggcggtcggcgccgtcaacggcgagatcttcgaggcgctgagcggtctcgacgtcgagcagcaggcccagatcgatcagatcatgatcgacctcgacggcacgccaaacaagagccggctgggcgccaacgccatcctcggcgtctcgctcgcctgcgccaaggcggccgcgaactcgctcgacatgcccctctatcgctatgtcggcggcacctcggcgcggctcctgccggtgccgatgatgaacatcatcaatggcggcgtgcatgccgacaacccgatcgacttccaggagttcatgatcctgccggtcggagcatcctcgtttgccgagggtctgcgctatggtgctgaagtcttccacaccctgaagtcggagctcaagaaggccggccacaacaccaatgtcggcgacgagggcggctttgccccgaacctgccgtcggcggacgccgcgctcgacttcgtcatgaacgcgatcggcaaggccggcttcaaggcggggaccgacatcatgctcggcctcgactgcgcctcgaccgagttcttcaaggacggaaagtatgtctatgaaggcgagggcaagagccgctcgatctccgaccaggccaagtatcttgcagacctggtcgcgcgctatcctatcgtgaccatcgaggacggcatgtcggaagacgacatggagggctggaaggagctcaccgacctcatcggcaagaagtgccagctggtcggcgacgatctgttcgtcaccaacgtcaagcgccttgccgagggcatcaaggccggccgcgccaactcgatcctgatcaaggtcaaccagatcggcacgctgaccgagacgctcgctgccgtcgagatggcccacaaggccggctacacctcggtgatgtcgcaccgctccggcgagaccgaggattccaccattgccgacctcgcggtcgccaccaattgcggccagatcaagaccggctcccttgcacgttccgaccgcaccgccaaatacaaccagctcctgcgcatcgagcagcagctcggcaagcaggcactctatggcggcaaggcggcactgaaggcgctggcataa

SEQ ID NO: 6757 - DNA, 1134 bp, BradyrhizobiumColbertium
atgagcgacggcaccacgggactggaattgcgttcgctgctgaagaagagcggcgagctggaattgttcctcgtgaatgtcccgaccccggagccggccgacgatgaagttgtggttcgcgtcgaggcgacgccaatcaacccctccgatctcggcctcctgatcggcccggccgacatgtccgccgccaaggcgtccggcaccaaggagatgccggtcatcaccgccaggatgccggagggagcgatgcggatgatggcggcgaggttcgatcagtcgctaccggtcggcaacgagggcgcgggcacggtgatccggaccggctcgtcggacgcggccaaagcgctgatgggcaagacggtgtcgatgatcggcggcgcgatgtacacgcagtaccgcgtgctcaaggtccgcgacgtcatggagctgccggcgggcaccacggccgccgacggtgcctcctggttcgtcaatccgctgaccgcgctgggcatgaccgagacgatgcggcgggagaaccacaaggcgctcgtgcacacggccgccgcctccaatctcggccagatgctcaacaagatctgcatcagggacggcattggtctcgtcaacatcgtcaggagcaaggagcaggccgacatcctgcacaagatcggtgccaaatacgtcgtggattccagcgcaccgagcttcatggacgatctcaccaacgcgctggtcgagaccggcgcgacgatcgccttcgacgccatcggcggcggcaagctggcgggccagatcctcacggccatggagatcgctgccaacaagacggcgaaggaatacagccgctacggctccaacgtgtacaagcaggtctacatctatggcagcctcgacccgcgcccgaccgagctgaaccgttccttcggcctgagctggggcgtcggcggctggctgctcaccccgttcctccagaagatcggtcctgccgagatcggccgcctgcgccagcgcgtggcgtccgagctcaagacgaccttcgccagccactacaccaaggtggtctcgctccccgaggcgctcgatctcgccaacatcgcggtgtacgccaaacgcgccaccggcgaaaaattcctcatcaacccaaataaataa

SEQ ID NO: 6758 - DNA, 999 bp, BradyrhizobiumColbertium
atgatcgatctcaatcgacgtcacctgctcgcaggcgctgccgccatgggcgcagctgccgctaccgggctccggcccatcgccgcgaatgccgcagcgccgcaggtggggacgcaggcgcccggcttctatcgctacaaggtcggcagcttcgagtgcacttcgatcaacgatggcgcgcgaaccttcccgatgccggacaagttcgtcgccaacatttcgaaggaagaggcgctggcggcgggtgaggcggcctacatgccaaagggcatggtcacggtgccgttcaatccgcagctcatcaacaccggctccaagcttgtgctgatcgataccggcaacggcatcgcgaatttcgaagcgagcaaaggcgcggtcggtcgcacgctgcaaaaccttcaggctgccggcgtcgaccccaagaacgtcgacgttgtgctgctgtcgcacatgcacggcgaccacatcaacgggattcgcctggccgatggcgcgctggcctttccgaatgcggagatcatggtgcctggcaaggagtgggagttctggaccagcgaggacaacgccgccaaggccgagtccaaccccgcgttgaagaacaactttgccaacgtgaagaagaccttcgccggtctcgagtccaaggtcacgaggtacgactggggcaaggaggtcgcgccgggcatcacctcgatcgccacgccgggccatacgcccggccacacctcgttcgcggttgcttctggcgatgccaaggtactgatccagtccgacgtcaccaacattccggagttcttcctgcgcaatccggactggcacgtgatgttcgacatggatgccgcgatggcgcaggcgatgcgccacaagttctacgatatggcggccgcggagaaggcgaccgtgatcggcttccacttcactttcccttcgatcggtcacgtcgcgaaagacggcgccaagtatcgcttgatcccgtcagcgtggaatccgacgatctga

SEQ ID NO: 6759 - DNA, 552 bp, BradyrhizobiumColbertium
atggcctacaacatcgtcaccatcgccggcagcctgcgcaaggagagcttctcgctcaagatcgccaatgcgctcgccaagctcgcgcctggctcgctcaggctcgaggtgatcacgccggcgggcatctcgttcttcaaccaggatctcgagggcacgccgcccgcggactgggtcgccttccgcgaaaagctccaggcgtcgaacggcatcctgttcgtcacgcccgaatacaaccgctcgatcccgggcgtcctcaagaatgccatcgatgtcgcatcgcggccgtatggtaagagctcgctcctcggcaaaccggtcggcatcatctccaactcgcctgggctgctcggcggcgtcagcgcggccaagcatctgcagaacgtgctgccgggcatttccggtcccgtcctccagcagccggaaatctacctcagcggagtcggcgacgctttcgacgcagacggcaacctgaccaaggactcgctcaaggcggtgctgcagcagtacatcgacgcgttcgctgcgcacgtggcgaagcaccaaggctga

SEQ ID NO: 6760 - DNA, 318 bp, BradyrhizobiumColbertium
atggtctcgcgcgcccgcctgaaatcgatcctgaccggacttgccctctatgcgatggcggcggccatcgtcggctatttcggcgtcaatgcctataccggcaaatacggcctcaacgcccgccaggagctcgatcaggagatcatcgcgctgaccagcgaattggcccagctcaagcgtgagcgcgccaggagtgaacatcgggtatcgctgctgcggtccgagaagatcgaccccgacatgctggatgagcgggcgcgctaccagctcgattatgtcaatccgcgcgatctcgttcggatcatcccggcgaattag

SEQ ID NO: 6761 - DNA, 963 bp, BradyrhizobiumColbertium
atgaatgggtcaacgccccggcatcacgcggcccgtatcgaggccgccatcgcgtcaggccaggcggctcgttccgcgctcgtggcgtcctggcgccgttcctccagattgcatcgtctcgatcccggcggccgcaccgcaccgatgcggctgaccgaagccgaactgcgcgaggcgcgcgagcgcatcgcgcctcttctggccgcggcgcaaggcgcaatggaccggctttatcaggccgtcggcgccgcggggtgctgcgtgttgctcgccgaccgggagggcgtgccggtcgatcgccgcggcatggtggcggacgacgcgacctttcagtcctggggcctctggaccggtgcgctctggagcgaggagcacgagggcaccaacggcatcggtacctgcctcgtcgagcagcgtccgctgaccatcgatcgcgatcagcatttctttgcccgcaacacacttttgagctgcaccgctgttccgatctacgaccacgatgcggcgcttgcgggcgtgctcgacgtatcctcctgccgcgcagatcgcaccgacgcctttgccggcctgatagcgcttgcgacgggcgaggcggccaagcgtatcgaggccgacctgtttcgaaaggccttcgcccatgcccgcatcgtgctgacgcaagctgccgacgggagttgcagcggtctcatcgccgtcgatgcggacgatctcgtgatcggcgcgacccgctctgcccgggtggcgctcggattggcgctcggccgggcattgcagccggtgccggccgccgaccttctcggcgacgattccgcgagcgatcatctcgccggcggtcagcgcgcggtgttgcagcgggcattgctccgcgccggcggcaatgtctcggcagccgccaaggccctcggcatcagccgagccacgctgcaccggaagctcaagcggttcgggttgaacgcgcattga

SEQ ID NO: 6762 - DNA, 225 bp, BradyrhizobiumColbertium
ttgctgtttgcgcaattcgtcgcgttggcgcgacttgcgcggacgatgtcgcgggaggtgtttcctgtcagcccgtgggaaagcgatggcgcggccgacctgtcgcagttctgcgacagtcgcgggcgaggcagtgcgggattgcgtgcacgcagcttccacaccgtcgtcgttgcgagtgcgcaaattgcgcggctcaatgcgcgttcaacccgaaccgcttga

SEQ ID NO: 6763 - DNA, 1518 bp, BradyrhizobiumColbertium
atgaacaaggtggaattcctcagcgtcaccaaggttccctttgccgaacggtacgacaatttcatcggcggcaagttcgtggcgccgacctccggcaaatatttcgacaatgcttcgcctgtgaccggtcagatcgtctgcaagatcgctcggtccgacgcgcaggatgtggaggcggcgctcgatgcggcgcatgccgccaaggtggggtggggccgtaccagcgtcgccgagcgcgccgcgatcctgaatcggatcgccgaccgcatggaagacaatctcgagcgccttgcgattgccgagacctgggacaacggcaagccgatccgcgagacccgcgccgccgacctcccgctcgcgatcgatcacttccgttacttcgccggcgtcgtccgcgcccaggaaggctcgatcagcgagatcgaccacgacaccatcgcctatcatttccacgagccgctcggcgttgtcggccagatcatcccctggaacttcccgctgctgatggcctgctggaagctcgccccggcgctcgctgccggcaattgtgtcgtgctcaaacctgccgagcagaccccggcctcgatcatggtctgggccgagatcatcgccgacatcctgccgccgggcgtcctcaacatcgtcaacggctttggcctggaagcgggcaagccgctggcgtcgagcccgcgcatcgccaagatcgccttcaccggcgagaccacgaccggccggctgatcatgcagtacgccagccagaacctcattccggtcacgctggagctcggcggcaagtcgccgaacatcttcttcaaggacgtcatcgccgaagacgacgacttcttcgacaaggcgatcgaaggatttgtgatgttcgcgctgaaccagggcgaggtctgcacctgtccgagccgcgcgcttgtccacgcggacatctatgaccgcttcatggagcgggcgttgaagcgggtcgccgcgatcaagcagggcgatccccgcgatcccacgaccatgatcggcgcccaggcctctggcgagcagctgtccaagatcctctcctacatcgacatcggcaggcaggaaggcgccaaggtgctcgccggtggtcaacgtgccgaactgacgggtgatctcgccggcggcttctatatccagccgaccgtgttcgaggggcacaacaagatgcggattttccaggaggagatttttggcccggtcgtctcggtcacgaccttcaagtctgacgaggaagcgctcgcgatcgccaacgatacgctctacggcttaggtgccggtgtctggagccgcgatgccaatcgctgctaccgtttcggccgggagatccaggccggccgtgtctggaccaactgctatcatgcctatcccgcgcatgcggcgttcggcggatacaagcagtcgggcgtcggccgcgagacccacaagatgatgctcgatcactatcaacagaccaagaacctcctggtcagctacagcccgaagaagctcggcttcttctga

SEQ ID NO: 6764 - DNA, 1023 bp, BradyrhizobiumColbertium
atggccgcacccaagaaagccgccgcaagcactccacaggacaagactgacggcggttcgcctccggaattcaccagggagcaggagctcaaggcgttccgcgacatgctcctgatccggcggttcgaggaaaaggccgggcagctctacggcatgggcgcgatcggcggcttctgccatctctatatcggccaggaggccgtggtggtcggcatgcagatggccctgaaacagggcgatcaggtcatcaccggctatcgcgatcacggtcacatgcttgccaccggcatggacgccaacggcgtcatggccgagctcacgggccgccgcggcggctattccaagggcaagggcggctccatgcacatgttcagcaaggagaagcatttctacggcggccacggcatcgtcggcgcccaggtctcgctcggcaccgggcttgccttcgccaatcactatcgcggcaacgacaatatcagcgtcacctatttcggcgacggcgcggccaaccagggccaggtctatgagagcttcaacatggcggagctctggaagctgccggtgatctacgtcatcgagaacaaccgctacgccatgggcacctccgtctcgcgcgcctcggcgcagcaggatttttccaagcgcggcgtgtccttcaacatccccggcaagcaaatcgacggcatggacgtgcgcgccgtcaaggcggcgggcgaggaggctgcggcctggtgccgcgcgggcaagggcccgttcatcctggagatgcaaacctaccgctatcgcggtcactcgatgtccgaccccgcaaaatatcgcacgcgcgaggaggtcgagaaggtccgccacgatcaggacccgatcgagcaggtgcgcaatcgcctcctcgcagcgaaggtcagcgagcaggatctcaaggcgatcgacgccgaggtgcgtgacgtcgtcaacgccgccgccgatttcgcccagcatgatcccgagccggatgcagccgagctctggaccgacgtttaccgctga

SEQ ID NO: 6765 - DNA, 1395 bp, BradyrhizobiumColbertium
atgccaattcaagtgctgatgcccgcgctgtcgcccacgatggagaagggcaacctcgccaagtggctgaagaaagagggcgagacgatcaagtcgggcgatgtgatcgccgagatcgaaacggacaaggcgacgatggaagtcgaggcgaccgatgagggcacgctcggcaagatcctgatccctgagggcaccgccgacgtcgccgtcaacacgccgatcgccaccatcctggccgacggcgaaagcgcggctgatcttgccaaggcgcctgcgcccgccaagcaggagaaggccgccgagtccgcgccgccggctgctgccaagccggagatgccgcagtcgaaggcgccgaccggcgtgccgcagcaggccgtcgccgagcccgatccggaggtgcctgccggcaccgagatggtgacgcagaccatccgcgaagccttgcgtgacgccatggccgaggagatgcgccgggacgccgacgtcttcgtgatgggcgaagaggtggccgaatatcagggcgcctacaaggtgacgcagggcttgctccaggagttcggcgccaagcgcgtgatcgacactccgattaccgagcacggctttgcaggcgtcggcgtcggtgccgcgatggccggcctgaagccgatcgtcgagttcatgaccttcaacttcgccatgcaggcgatcgaccagatcatcaactcggcggccaagacgctctatatgtccggcggccagatgggctgctcgatcgtgttccgcggtcccaacggtgcggctgcgcgcgtcgccgcccagcacagccaggattactcggcctggtactcgcacgttccgggcctcaaggtcgtcgcgccgtattcggccgccgacgccaagggtctgctcaaggccgcgatccgcgatcccaatccggtgatcttcctcgagaacgaggtgctctacggtcacaccggcgaagtgcccaagctggatgatttcatcatcccgatcggcaaggcgcgcatcgtgcggtcgggcagccacgtcaccattatttcctggtcgaatggcatgacctatgcgctcaaggccgccgatgagctcgccaaggacggcatcgaggccgaggtgatcgatttgcgcacgctgcggccgatggacaccgagaccatcatcaactccgtcaagaagaccggtcgcgcggtcacggtggaagaaggctgggcccagagtggcgtcggcgccgagatcgccgcgcgcatcatggagaacgccttcgattacctggacgcgccggtgacccgcgtctccggcaaggacgtgcccatgccctatgccgcaaacctggagaagcttgctctgccctcggcggcggaagtcgtcgaggccgccaaagccgtctgttacaggtag

SEQ ID NO: 6766 - DNA, 303 bp, BradyrhizobiumColbertium
atggcgggcccgaaggagcagccactgccgcccgatgtcatgacccgcgacgacgcggtcgagatcctgcgcgtgttcgtgctggacggcgggctgtcgatggcgttccagcgcgccttcgaggagcccgacatgtggggcctcctgctggtcgatctcgcccgtcacgccgcgcgcgcctatgcgcgcgagagcgaatataccgaggaggacgcgctgaaccggatcctcgagatgttccaggccgagatcgagcgtcccaccgacacgggcacgacgacgccgcgcggcaaggggcactga

SEQ ID NO: 6767 - DNA, 453 bp, BradyrhizobiumColbertium
atggctatcgaatcctatcactacgatttcatgctggaagcgatccgcgaggcggaagcttcgatcgcgcagggcggtctgccgatcggtgccgtgctgacgcgcgacaacaagatcatcgcgcgcggccacaacaatcgcgtgcaggagaacaatcccattctgcacggcgagatgagctgcctgcgcgaagcgggcgcgatctcgttccacgacaccgtcatgtacaccacgctgtcgccatgctcgatgtgcgccggcgcgctcgcgctgttcaaggtcaggctggtcgtgatcggggaatccgtcaccttcgagggatccaaggacatcctcgacaagttcgggatcccctggatcgacctcgccgatgaccgctccatcaccatgatgaagaattggcgttccatcgctgccaatgagcgcctgtggcagggcgacatcggcaactaa

SEQ ID NO: 6768 - DNA, 1371 bp, BradyrhizobiumColbertium
atgcccatcaacatcctgatgcccgctctgtcgccgacgatggagaagggcaacctcgccaagtggctgaagaaggaaggcgacaaggtcaaatccggcgacgtcatcgccgagatcgagaccgataaggcgaccatggaggtcgaggccatcgacgagggcaccattgcgaagatcctggtgcccgagggaacgcaggatgttccggtcaacgatgtgattgccgtgctcgcgggcgaaggcgaggacgtgaaggctgcgggtagcgccaagcccagcgcgtcggccgcgcccccgaaagctgctgaaaagacggcagacaagcccgctgtgcctcctgctgctgcgcctgctcctgcgccggcggcgcccagggcggctccgagcgccgcgacagctgcgccgcaggctgcggctccggccgcacaggccaatggccacggcggtcgcgtgttctcgtcgcccctggcgcgacgccttgcgaaggaagcaggcatcgatgttgcgatgatcgccggttctggtccacacggccgcgtcgtcgcccgcgacgtcgagcaggccaagtccggcaagggcctgaaagcaccggctgcagcgccgtcaggcgcgccctcgatcgcgccgaccatgtcggacaagcagatcctgtcgctgttcgagcccggctcctacgacatcatcccgcatgacggcatgcgccgcacgattgcgcagcgcctgaccgcatcgatccagaacgtcccgcacttctatctcaccatcgactgcgacatcggcaagctgctcgccgcgcgcgaggagatcaacgccgccgcgccgaaggacaaggagaagaagccgctctacaagatctccgtcaacgacttcgtcatcaaggcgatggcggtcgcgctgcagaagatcccgaactgcaacgtcagctggaccgaaagcggcatggtcaagcaccaccattccgacgtcggtgttgccgtggcgatgccgggcggcctgatcactccgatcatccgcaaggcggagaccaagacgctctcgaccatctccaacgagatgaaggatttcgccgcgcgcgcacgttcccgcaagttgaagcccgaggaataccagggtggcacaacggccgtctccaatctcggcatgtacggcatcaatcacttcacggccgtgatcaatccgccgcatgcgacgatccttgccgtcggcaccagcgaggagcgccccgtggtgcgcggcggcaagatcgagatcgcgcacatgatgagcgtgaccttgtcctgcgatcaccgcgccatcgacggcgccctcggcgccgagctgatcggcgcattcaagcagctgatcgaaaatcccgtcatgatgatggtctga

SEQ ID NO: 6769 - DNA, 240 bp, BradyrhizobiumColbertium
gtgatcttgcatgcccggacgcgctggccatggatatcgctgctgctcggcgctggcgtcgcgctcaacccggtcgggctcgattttcttcagtccgccttcctgtcgggagagcagctgtcgcggaacatcgctcaacccatcgtgttgagcgcgctggccattcttgtccttattgggaccatcgaatggctggtcaggtttgttgtcgtcaagcgccgcgcccgcggcgcctcttga

SEQ ID NO: 6770 - DNA, 1422 bp, BradyrhizobiumColbertium
atggccgatacatccttcgacgtcatcatcatcggctcaggtcccggcggctacgttgctgcgatccgtgccgcgcagctcggcctcaagaccgcaatcgtcgaaaaatcctatctgggcggcatctgcctgaactggggctgcatcccgaccaaggcgctgctgcgttcggcggagatctaccactacatgcagcatgccggggattacggcctctcggcggaaaaggtctcgttcgatccgaaggcggtggtgcagcgctcgcgcggcgtctccaagcgcctcaatgagggcgtcggcttcctgatgaagaagaacaaggtgagcgtaatctggggcgccgccatgatcgacgcgccgggcaagatcaccgtgaagaagtccgacgtcgaggggccgaagggcgcgttgggcgagggtgcctatcaggccaagcacatcatcgtcgcgacaggtgcgcggccgcgcgtgctgcccgggcttgagcccgacaagaagctgatctggacctatttcgaggcgatggtgccggagcgcatgccgaagtcgctgctggtggtcggctccggcgcgatcggcatcgagttcgcctcgttcttccataccatgggctctgacgtcactgtggtcgaggtgctgccgcagatcctgcccgttgaggatgccgagatcgcaggtcttgcgcgcaagcggctcgagaagcagggcatcaagatcatgacctcgaccaaagtgaccaagctggagaagaaggccgatagcgtcgtcgccaccatcgatgacggcaagggcaagcccgttacctccgagttcgagcgagtgatctcggcggtcggcgtcgccgggaacatcgagaacctcggtctcgaaaagctcggcgtgaagaccgaccgcggcatcatcgtgatcgacggccacggcaggaccaacgtccccggcatctatgccattggcgacgtcgcgggccccccgatgctcgcgcacaaggccgaacatgaaggcgtgatctgtgtcgaggccatcaagggcctcaacccgcatcccatggacaagaacatgatcccgggctgcacctactgccatccacaggtcgcatcggtgggcctcaccgaagccaaggccaaggagagcggccgcgagacccgcgtcggccgctttcccttcgtcggcaacggcaaggccatcgcgctcggcgaggaccagggcctggtcaaggtcatcttcgacaagaagaccggccagctgctcggcgcccacatggtcggcgccgaggtcaccgagctgatccagggttacgtcgtcgccatgaatctggagacgacggaagaagagctgatgcacacggtgttcccgcatccgacgctctcggagatgatgaaggaagccgtgctggatgcgtatggaagggtgttgaatgtttga

SEQ ID NO: 6771 - DNA, 1242 bp, BradyrhizobiumColbertium
atgaaagacaacgacaacctgaccatcgaacgcccgaccttcgtcacccatctcgaatgcgcgatggaaggcgatcactacgccgccgaccaggtccacaacctctccaaggccggcaagccgctgctcgtgcgctacgacctcgccggcgtgaagcaggcgctgaccaaggatgcgctcagccagcgtcccggcgacatgtggcgctaccgtgagctgctgccggtgcgcaaatgcagggacatcgtctcgctcggcgaggtgaccacaccgctgatccggctgccgaagctcggcgcaaagctgggcggcggcgagatcatcgtcaaggacgaggggcggctgccgaccggctcattcaaggcacgcggcctcgtcatggcggtgtcgatgggcaaggcgctcggcatcaagcacatggcgatgccgaccaacggtaatgccggcgcggcgctggcggcctatgcgacgaactgcggcatcaagacaacgatcttctgtccggccgacacgccggaagtgaacgtcagcgagatcgagctgcagggcgcgaccgtctaccgcgtcaacggctatatcgacgattgcggcaagatcgttggcgagggcaaggcaaaggtcggctggttcgacacctcgacgctgaaggagccgtaccgcatcgaagggaagaagacgatgggtctcgagctcgccgagcagctcggctgggacgtgcctgacgtgatcttctatccgaccggcggcggtaccggcctgatcggcatgtggaaggcgttcgacgagctcgagaagatcggcttcatcggaagcaagcgcccgcgcatggttgcggtgcaggcctccggctgcgcgccgatggtgcgcgcttacgaggctggcacggagcacgccacacgatgggaagacgcccagaccattgcgtcgggtatccgcgtgccgcaggcaatcggcgatttcctgatcttgcgtgctgtgcgcgaaagcaagggcttcgcgatcgccgtcgacgatgacaagatctcctctgcgctgaacgaggttgcgcgtgaggaggggctgttgttgtgccctgagggcgccgcgacctacgccgcctacaagcagagcctcgccgacggccgcgtctcgaagggtgaccgcgtgatgctgttcaactgcgcgactggcctgaagtacccgctgccgccggtcacccgcgcgctcgaccgccacaagccgatcgattacgcgcagttctag

SEQ ID NO: 6772 - DNA, 972 bp, BradyrhizobiumColbertium
atgacgaaggccgtctgggctgcgctgattgctattctcgttgtgaccggcgccgcgcgcgccgatgactatcccacccgtcccatcaccatcatcgtgcctttcgcggccggcgggccgtccgatgccatggcgcgggtgcttgccgagcgcatgagagtgccgctcggccagcccgtggtgatcgagaacgtcaccggtgcaggcggctcgatcggcgtcggccgcgccgtgcagtcgccgccggacggctacaccatttccttcggccatctcggcacccacgtcgccaacggtgccgtctacaagctcaagttcgatctcgtcgccgacctcgagcccgtggtgctgctgccgagcaatccgatgatcctggtcaccaagaattcggtgcccgcgacctcgctgaaggagctgttggcgtggttgaaatcgcggccgtcgcccccgaccgcaggcaccgccggcgccggctccggcagccacatcgccggcgtctatctcgagaacgtttccggcatcaagctgcaatacgtgccgtatcgcggcaccgcgccggcgctgaacgatctcatcgccggacagatcgacctgatggtcgaccagacctccaactccatcggtcaggtccgcgccggcaccattcgtgcctacgccatcaccgacgacaagcgcctggcatcggcgccggagatcccgacggcggacgaggccggcttgaagggcttcaacatgacgctgtggtcggggatgtgggttccgaagggcacgccgaaggaaatcgtggccaagctcaacgccgcggccgtcgaggcgctgaacgatcccgccgtgaggaagcagctcgaaagccagggcctggagatgacaccgaaggatcaactcacgcccgaagcgctaggcatgcgtcagaaggccgagatcgccaaatggtggccgatgatcaaggccgcgaacatcaaggtggactga

SEQ ID NO: 6773 - DNA, 819 bp, BradyrhizobiumColbertium
ttgcgaccgcccgcacccctgctggccgccgccgatacacacgtcgcggacgagcgcgtgcgcgccgccgacatgctctacgccctcggcgagcgcgacatggtgttctactacgctcgggatttcgccaaggagagcaccgacgtcgcggcgctcgaagcactcggcgagctcgccggccggcacaaccatgcgcgcgtgatgctcgaggtcggaaagacggcgctggcgcgcgggctcgcgctcgatcattatgcgttcccgaccatcggcattcccgagcacaagcaggtcgcgcccgcgatcgagacgagcgtgatctattcggtggcgcggaccgaaagctctttcgagcagcgagacaagtcgcacgccaatgcggtcgggctgatgcaggtgacaccggaagccgcgcgcgacaccgcaaaacgcttcggccttaaatacgactgggacaagatggtctccgatcccgtctacaacacgcagatgggcgccgccgagctcagcgcgctgctctcggaatatcgcggcaaccagatcatgaccttcgccggttacaatgccggccgcggccgcgtgcgcgaatgggtgcagaagcgcggcgatccccgggaccccaacgtcgatccggtcgactgggtcgagcgcatcccgctgtcggaaacgcgcaactacgtccagcgcgtgatcgagaacgtgctggtctaccgcgcaaggttcgagggcagcagcatggtcgccggcaagagcgaccagcgggtggtgaccaaggacgcggccgcggcaactccggtggcatctacggacgcggactag

SEQ ID NO: 6774 - DNA, 132 bp, BradyrhizobiumColbertium
atgcggcttgagaatcaaagcaccggacggcgcgacatcatcgtgtcgcattcctcacgctgtcgcaacaatgcggcaaaatgcggttgtgataagcggaacttgcgcaagggcgaaaaggtcgcgctttaa

SEQ ID NO: 6775 - DNA, 1737 bp, BradyrhizobiumColbertium
atgccgattttcaaccagtcgatccggcgcaagatcgtcggtatcgccctcggattgatcgtcctgatgctgttcacgtcgatcctgtcgatggcgatgtcgagccaggtcggcgtcctcctggacgagctcaccaatcgatacatcccggcctatagccatctggcgcgcgccaacagccgctcgctggagcgggggctggcgctacggcggatggtcatgacccggatggaggcgccctcggatgaggaggcctacgcggcgcgccttcgcgacttcgaggcgtcggaccgcaagatcgaggaggaggcggaggccgcgcgcaaactgatcaacgcgatcatcgatgatcccaggacgtattccgacaacgccgcactggggcggatcgatagccgcatcgagaccgccgtcagcgagctgcgccgcgacctgagcgaggaccataccaagctcatcaagcaggtcgaggcgaagcagatgtccgaggcccgcggcacgctggagcacatcgacgtgctgcgcgatcagttcaaccggaagatcgacacgatccgcgccgacatgctgacgcaggtcttcttctcgacgtcacaagtgatcggccgccagcaccaggccatcatcgtttcgggtgtcgtgacattgctcgcggcgatcgtcggatttgccttcgcgctgttggtgtcaagcggcatcactcgcccggtgcggctgctgctggccggcacccgcgaggtcgaggcaggccggttcgacaagcccatcaccgtctccacgcaggacgagatcggcgagctcgccgcggccttcaaccgcatgatcgagcagctcaggcacaacgagcgcatccgcgagacgttcggccgctacatcgaccccaaggtggtgcagggcctgatcgaccggccggaggtcgcgatcgacggcgagcgccgggtgatgaccatcatgttctgcgacatgagcggcttcacctcgatgagcgaaggcatgacgccgcgcggcctcgtcaaggtaatgaatcactatttcactgtgatgtccggcccgatcaggagcaatcgcggagtcatcgacaagtatatcggcgacgccatcatggcgtattgggggccgcccttcatcgaggaggatgaggcggcgctgcttgccgcgcttgctgcgatcgagatggccgaccaggtgcctgcgctccaaaagcaattgcccgatttgcttggcatccgcgccatgccggcactgtgcgacctgcgcatcggcattgccaccggtgaggttctcaccggcagcatcggctccgagctcatgatgagttttaccgtcatgggcgacgccgtgaacctcgcttcgcggctggaggtcgtcaacaaagtctacggcacccgcatcctgatcgcgcagggcacggcggatgccatcggcgcgcgccttgaactgcgcgagatcgaccgtctggcggtggcgggccagagcgcgccccaggcgatcttcgaagtgatgggcagggccggcgcactcaccgatgcgcaggcgggtctgcgcacgcactatgccgaaggcctcgctgcctatcgtgcccggcgcttcgacgacgcccgtgcggccttcaacgcggcgctcgaggcgatccccggtgacgggccctcgcgcacgatgctcggccgcatcgcccagttcgcagccaatccgcccgatgccggttgggacggcgcttggcggctggaccagaaatag

SEQ ID NO: 6776 - DNA, 177 bp, BradyrhizobiumColbertium
atgacacatcttacggacaggctggaacggttcgagacgctcaccgccgaatgcgagctgatcgccaagcttgcgaccgacagcagcaagcgcgagttttatctgaaactcggggagcagtatcgccagctggcgctcgacatccggcgggcgatcgccaccacggctgcggcctga

SEQ ID NO: 6777 - DNA, 213 bp, BradyrhizobiumColbertium
atgcgcctcgttgccgtgatcattatcgcgctcatgacggtggcctgcgatcaggagcaggacatcaccggctcgacgacgccagcctgtccgatgcgaaactacagctacaatccacgcgacttgagccagtgcgtcaatgcctgcagagcgtgcgaccgcgggaccacggtcacctgcacgacctcctgcaccctcaaaggggcgcgctga

SEQ ID NO: 6778 - DNA, 258 bp, BradyrhizobiumColbertium
atgggtatgctcgatcccggccgatttctggtgtcgtgctcgcactgcgatgcttggccgatggcggccaacgtcaagcggtcgagttggtcggcgtctccaaacgaggtccgctttgtctgcacgcgctgccggcgcgaggaaacagcgatcgtatccgcctccggcgagttgatgcccatcaagcgcgtcgatgatccgccacgcgacgtcgctgtcgcctgggcccgggcccagcgtttacgggggcggacctga

SEQ ID NO: 6779 - DNA, 2226 bp, BradyrhizobiumColbertium
gtgtcctgtttcgtcactgccgccaggcgctgctgcgccggcatcgttgcggccttttcctttcattcgctcaatctctccatcgccaacgccgagcagcttgccgccgagcaactgccgccggtcgaggtgaccaactctgacgatcagaaccgtacgcgtgcgagggtaaccggcgaaggcgatagggggcggcgccgggcgacgccgaccggggcgccggcggggaccaactcggccggcccgggcagtgaggccgacaacgatggcggcatcgtcggcgcggccacgaccgtcgtcacggccgcggacgtcgcgcacgcgcccacgcagaatctggccgaaatcatcgcggcacaagtgccaggtgcccagatcacaacgttctatggtggcccgatcggtgccaagaccagcgtcgacctgcgcggcttcggctccttcgctacggcgaatacgctggtgctggtcaacggacggcggctgaatgatatcgacatggcgcaggtggatctcgccaccatcccactcaatgccatcgagcgcatcgagatcacgcgcggcaattccggagcggtgctctacggggacaatgcggtcggcggtgtcatcaacatcgtcaccaagaacggcgtcggcggcccaccggcgaccgcgcgcatcgaggccggtttcggctcgttcaacacccggcttggcaacgtctcgaccgcgctcacttctggtccctggtcgacctcgttctacggcaatgccgccaggtccgatggctaccgagacaacaatcgttacgtccaggagaacggcgtcggcaatttgaactacacgacgcctggcctgaccgcctttctgaccgtcaccggcgacaatcaggcgctgcggctgccgggtggccgcctcgtcgatccttcgatcggcctcgacgagctcgcgacgaaccgtcgaggcaccagcacgccattcaactacgccaaccagcagggctttggcgcgacggcgggattcacgaagaccctggtgaacggcgtcgatcttatcgttgacggcggcatgcgtgacaagaagcagcagagcgcgtttttctcgagcccgacgccggtcccagctttattcacgtcgacctatgtcgatgctgaactcgcgacatggtcgatcacgccgcgtctcagcgtgaagagcctgctgggcggaatgccgtcgcagctgttgaccggagtcgactattacgatgcgagctttcggcagaaccgcggggcaggtcagggtctcgctgcctggcacaattacgatctcagacagcgcacggttgccgggtatgtccagcacacattgggtgtaacgcctacaaccgacgtctcctatggcgcgcgggtgcagagcatccatctcacggcccgtgacaatttcgacccggcggctccgttcaatgccgatatcggcgcgcttccgctgcggagcgatgaaactcagtatgcgctgcacctcggtgccgagcatcgcgtcagcgacaccgtcgcgctgtttggccgcgctgcgcgcgccttccgcacccctgacgttgacgagcgggtatcgtcgggtccttcattcgatccgttcttcaacccgctgccgcaaacgttccagctcaagacccagacctcgcaggacatcgagggcgggctgcgcatcagagggggtggcttgcagatgcagagcagtctctacctgatggacctcaccaacgagatccatttcaatccggtcctgttctataacaccaatctcgatccgacccgccgttacggctcggagaccagtatctcctatcgcatcagcgacgccctgcttttgcgttccggcatggcctacacacgagctgtcttccgcgaaggcatctgggcgggcaacgacgtgccgctggtctcgcgttacaccgccagtgcaggcgttacctggaacatctggcagaactatctggtgctcgatgccaccgcacgcttctggagcgagcgccgcatggacaacgatcaggcgggaacgcagaagccaattccggccaatggcacgatcgacctcaaggtcagtggtcaatatgagcgctacttctggtcgttcagcgtcaacaatgtgttgaacgcgctctattacgactacgccatcgcaagcaccttcacggacggacgcttcaacgcctacccgctgcccggtcgcagttacctgctcaaggccggtgcgacgttttga

SEQ ID NO: 6780 - DNA, 582 bp, BradyrhizobiumColbertium
atggttttcagtattttctcatccgacactgaccgtttccgcctccatccggtggcgccgcgtcttgcgcctatgttcggctttgcgctgttgacggtttcatgcgcgctcgcaagcttggcgttcgcctgcgcgacgcccttcgcagcgttcgccgtcttggcggccgcgatgctgccgctgcgtccggcgcttctcgtcgtgaccggcgcctggctcgtgaaccagaccatcggcttcggcgtgctgcattatccggtcgatggcaacggcatcgcctggggctttgtgatcggcgcggcggcgctgttgtccacggcggcagcgtcggccgtgctgcgcacactgccgcagggccgtgcggccctgatgctcgcgattgcgctgtttgcggcctatgcgacctacgagcttgcgctcttcgccgcgacgccgttcctgggtggagaggccgccttcacggcggacatcgtggcacgcctcgggctgaccagcgcggtctggcttgccggcctcgtcgcggtctgcgaggtcgtccgcctggtcgatccgttcagccgcaagagtgcgatgtcggcctga

SEQ ID NO: 6781 - DNA, 558 bp, BradyrhizobiumColbertium
atggagactttcgtcggaaccgactacgacaaactgttcttcaagtcggaaggcctctacgacggaaagaccaggaccaccgaggaaggccaactgcaagtgctctactcgcgactgatcagctattacttcgacgctcagttcggcgtccggcaggacttctcgaagaagtcgcatcgaacctatgcggtgatcggcatcgaagggctcgcacccggcttcatcgaaatcgacgccgccgcgtacgtcagtcagaaaggggaagtttcggcccaggtgacggcattccacgacctgctgatcacgaatcggctgatcctgcaaccgcgcatcgacgtcaagtttcagatgcagtcggtacccgacctggagctcggtgccggcctcaccgatttcgagctaggtgcgcgtttgcgctacgagttcacgcgcaactttgcgccctatgtcggtgtgaattgggatcgcaaggtcggccagacggcgaccatcgccaagaataacagggagtccgtatctgccgtatcctttgtcgcgggtgcgcggctgttttggtag

SEQ ID NO: 6782 - DNA, 1182 bp, BradyrhizobiumColbertium
atgacaacgatctcgcaatcggtcgtatccgagaatatcgaagccgcaccaagcatcgcacgcaacgccgcggtcgaccgcgcgcgcacattcttgatgctggtcgtgctcctgcatcacgccattattccgtatacttatttcggccataccgaccccgaggggtggatcggcttcgacatgatggtgctcgccaatgacagcttcttcatggcgatgttcttctttctatcggggctgtttgtctggcccagcctggctcacaagaagccgggggtctttttgtgcgatcgtttgctccggctaggacttcccttcgcaatcgctactctcaccatcattccgctcgcctattacgcgatcgaactgcggcagtcgccgaacaccaatcttgccgtgttctggtggaagatggtcacggtgggtccgtggccgagcggacccgtctggtttgtctgggttttgttggcgctagatcttaccgccttccttttctatcgattcacgcctctcctcctcgatccaatcaaccggatctcgctaagcagccactcgcggccggccatattcttcctgttcctgcttctcgccaccgcgctcctgtacgttccggcacgggtctatttcggcgcgggtcgttggttcgagttcggccccttttcgctacaggcgagccgcgtactgctctatccgacgtacttcttcgtcggcgcgggcgtgggtatggcgaatttcgatcgcggcctgctcggtacggatggacatctagccaaaagccgctggcattgggtggtcgtcgccctgctttcctattgcctgctgtggatgctgatttacgtcaagcgcgagatgctcggcaatccggtatggctgccgaactggtatgaagcgagctacggattgttctttgtcgccttcagcgcggccactatgcttgccattctcggctattttctgaggttcaaccgatctggcttcaccctgctcgatactatccgaacagatggctacggcatgtttctagtgcactatccgatcgcgctctggattcaatactggctgtatgatttcgacgcacccgcctttaccaaagcgctgataacgttcgtgctcaccgttctgttcagctggggcgcggcggcggcattgcgtgctatcccgggcgctgcgcgggtactgtag

SEQ ID NO: 6783 - DNA, 462 bp, BradyrhizobiumColbertium
atggcggactcgaacaaaagcaagtacccgaccggtggcggctacggccgattcttcctgggcgctgtggcagtgttcgcggcagcggctctgttctggatgacattctcctctggacccgcaccgcgatcgctctccgcggaggtcgctgagccggaactgtcgtcgttggccgcgacgggcaaggttctgtacgaagcgaattgtgcgatttgtcatggtatccgtgcctcgggcacggataccgggcctccgctcgttcacgacatctacaatccgggacaccacgccgatcacgccttctttgcagcggccaagtttggcgtaaggcaacatcactggcgttacggcaatatgccgccgcaaccgcaggcccgtgaggatcaggttgcggcgattgtgcgctacgttcgagagctccagatcgcaaacggcatccggtataaaccgcgtcgcatgtag

SEQ ID NO: 6784 - DNA, 1734 bp, BradyrhizobiumColbertium
atggccgaactcggcagacgctgcgtgctggcgctcggcttcggcagcaatgtggaagccgccgccacgcttgcgctgtccagtctgatgcagccattcgatcggctgctggacgggcaattgtccgattgggcgaggtggcatcggtgctgcgacgaacgttgcgactgcgtgcttgccgtgccggccgatctccgcaaccagctcgcggtgtcgaaagccgtgctgcgcagccatctggacaagacttacccgggagccatggtggcgagcctcagcgtgccgtggggggactgcggggaagagcgcggcggctactttctggtgtggccgcgggacctcgtccaatgcgccaccgcattgcttgcgatcggcggcgaagccgaggcgcgcgacacgcttcgttacctgatcgccacgcagaacgccgatggacactggaatcagaaccaatggctggacgggcgctcgttctggcgcggcgtccagctcgatgaggccgcccttccggtacttctggctgccgcgcttgccgaacgaaacgcattggcgggcaccgaagtcgcggacatggtgggccgggcccttgccttcgtagcgcgtcaagggcccgccaccgaccaggaccggtgggaggaaaacgcgggtatcaatccgttcacgcttgcggtctgcatcgcggccctcgtctccggcagcgcctttctgaacatgaaggcggccgattgggcactggagctcgccgatttctggaacgaaaacgtcgaacggtggacctccgcgcgagccacggaaatcggtcgccgggccggcgctgcaagccattacatccgaacggcgcctcccagcgtgctacgatcgggccaagctgccatggaccaacccgtcgcgatccgcaatcgggccgatggtctccaactcgccgcccgagagcaggtcagcaccgactttctccagttggtccggttcggcttgcgccggccgcgggacccgctgatccagtccacgattgccgtgatcgatcgtctgttgaaggtggaaactccggctggagcggtatggcgacgttacaacgaggatggctacggtgaacacgagaacggtggtccctacgacgggaccggttgcggacgaccctggccgttgctgaccggtgagcggggacatatcgaattgaccgccggccgcgacgctctgcctttcctgcgtaccatggcgtcgtgcgccagtcccggcggcatgattcccgagcaggtctgggatgccgcccccattccccaacgtcgtcttgctccggggcgaccgaccggctcggcgatgcccttggcctgggcgcatgccgagttcgtcaagctcctgatgtcgcgcgcactaggccagccgttcgaccggccgcacttggtctggaatcggtatcagggcattcgacctctcgcccgcagcgcattctggtggccgcacgcccagatcggaagcatccgcgagggggcggaactggtcgtcgcatcgagggacgaggcggccattcgcgtcgggatagatggctggcgcctggtggatgaagtgccggccaaggacacgggtctcggcttcttcgcggcgaggctcgatacggccgggctgaaggccgggcagcagctggaattcacgatccgatggaataccggagagtggatcggacgaaatttctcggttgcgatcgagccgcctgcgccccgcgagccagtctcatag

SEQ ID NO: 6785 - DNA, 714 bp, BradyrhizobiumColbertium
atgaagctgatgacacggttcgcccagaccgaggccttgtttgccgcagaccggcaagaggaccaatcgaacatgtccgagctaaacgatgctccgggggtgccgggcatcgcacctacctggaccagcagcgcgaaggacgcggtaggctgttcgttggggccggcgcgtctttggttcacgatcggctacggcattctgaacgaggtgtactggccgcgcgtcgatctcccgcagatcagggacctcggtttcgtcgtgtccgacggcaaaggcttctggtcggaggtgaagcgctgcggcaagtactcgcttcggtcgctcgcatccggaacgccggcctatgagatcgtccatccgcacgaccgatatcgtctcaccctgaggatctcgcccgatccgcgccgggacgtgctggcttgtcgaggtcgtgctggagagcagcgcgccggaaatgcaggtatatgccctacttgccccgcacctcggggcgagcggaaacaacaaccgagccggcatcgcgaagcacaacgaacgaaccgtgctttgggccgatcgggcgccgttttccctcgcactcgtcgccgtcgatcaggcccaaaaggatgcggtgctgcgcgcgagcgccggttacgttggcttcagcgacggttggcaggattttgcgcgcaacggcgcaatgacgtggtcatatccgtcggccggacctggtaa

SEQ ID NO: 6786 - DNA, 306 bp, BradyrhizobiumColbertium
atgatgaagtctgctgtcaaatccgcgctgttcgccatcgcactcgccgtcgctccgagcgtcgccttcgcccaagggaacctcgctgccggggaagtaaagaaggtcgacgaaagcgccggcaagatcacgctcaagcacggtcccatcaagaacctgaacatggacgaggaggagatgaccatggtgttccgggtctccgatccctccatgctcaagcaggtcaaggtgggagacaaggttcagttcgaggccgagcggcagacgggcggaatcacgatcaccaagattcagaagtcgaggtag

SEQ ID NO: 6787 - DNA, 531 bp, BradyrhizobiumColbertium
atgatcgtgagactgcaatcgaggaaaggaagatacgagatgaactacaccagcgcgctcgccgctgccgcgatggcttggtccctttcgaccgtgacatgggctgatcctggccaccatcaaggagggcaccacaacaaggatgagacgtattccgcgggtgaaccgggagatccaaagaagcccgcccgagtcgttcaggtcacgatgaacgagaccgacggcaaaatggtgttcgttccggaaaaagtcgacgtgaagaagggcgagcaggtcaagttcgtgcttcgcaacaacggcgagctggaccacgaatttatcctcgcgaccacggctgagaatctcaagcacgccgaggcgatgaagaagaatcccgacatggagcacgacgatccgaacggcaagcggctggcaccgaagaagacgggggaaatcctctggaagttcgatacggccggcgagtttgaatatgcgtgtcttatcccgggtcaccgtgagggtggcatggtcgggaaggtcgtcgtgaagtaa

SEQ ID NO: 6788 - DNA, 1389 bp, BradyrhizobiumColbertium
atggaaatgttgtctcgacgaagttttctcggtaccgcgaccgcgcttgcgagcgccagcctcgtttctggacgggttcaggccgcgggcattcccgaagcgcctaccatggacaaggtggccacccagccgccgctgcacccgagcagcggacccgaatatcggccggtggtcactctcaacggctggtccctgccttggcgcatgaacggcgattggaaggaattccatctggttgccgaacccgtggtgcgcgaattcgccgaaggcatgaaggcccacctgtggggctacaacggacaaacgccgggccccacgatcgaggcggtcgaaggtgacaaggtgcgcatcttcgtcaccaacaagctgccggagtacaccaccgtccactggcacggcatgatcctgcctagcggcatggacggcgtcggtggcctgacgcagcctcacatcaatccgggcaagaccttcgtctacgaattccaagtcaagcacagcggcaccttcatgtaccacccccacgcggacgaaatggtccagatggcgatgggaatgatgggaatgttcgtggtgcatcccaaggaccccggctttcgtcccgtcgatcgcgactttgtcttcgtgatgagcagttatgacatggatccggggacctacctgccgaaggtcacggagatgaccaacttcaacatgtggtcctggaacgcgcgcgtctttcccggcatcgatccgctgcccgtaagactgggcgaccgcgtccgcgtgcggatcggcaatctgacgatgaccaatcacccgatccatctccacgggcatagcttttcggtcagcggcacggacggcggctgggtgccggagagcgcgcagtggccagagactacgatcgacgttccggtcggagcgatccgtgccttcgacgtgttggccgacaatccgggtgactgggcgtttcactgtcacaaatcgcatcacacgatgaatgcgatggggcacgacctcagaaccttgatcggggtctcgaagaaggacatcgccaaggcggtgaagcggctggcgccggactcgatggcgatgggttcgaccggcatggcgatgggcgaaatggagatgccgctgccggacaacacgctgccgatgatgacgggctcggggcaattcggcccgatcgaaatgggcggcatgttcaccgtgatgaagatccgcgagggactaggtcgcgacgattacagcgatccggggccttacaggtttccgaagggaacggttgcttatgagatcgaaacacctgctgcggagccgccgcgccaggacactcagccgaatgcgggggagcgcaagggagcgaagggaactaagggaatgaaaggcatgaagatgaagggagcatga

SEQ ID NO: 6789 - DNA, 1287 bp, BradyrhizobiumColbertium
gtgatcgcgatccgatcggccgacgatgacgatctggccaatacgctgatcgcccagctcctgcgccgaaccctgacggtcgacaccgcggtgcagatcgcgctgctgaacaaccgtggacttcaggccgcctacagcgaactcgcgttggctgaagcggacgcgatcgagcagagcctgcctccgaacccgaccttttccatttcccggatctccggaaacggcggatacgaactcgaacgtcaggtcgtcggcgacatccttgcactggcaacgcttccctttcgttccgacatcgcgcgacgacgatttcgcgaagcccagctgcgggcagccttggagacgctgcgcctcgctgccgacgtgagacgggcgtactaccaggcggtcggcgccaacgagctggtcgtacttctgacggagacgaagaccacggccgagacgatcgctcagctcgcggaaaagctcggccacagcggttcgatgaacaaactcgatcaggcgcgcgagcaggtcttctacgcggagatcacggccgatctcgcgtccgtgcggcagcaggcaacgtccttgcgggagcgcctcgcaagactgctcggcgtatgggatggccggctcgacttcaagcttcccaaagcgctgccgtctctgccgcgcgccccgaagtcgctgcccaacatcgaagtggaggccgtcagccaccgcatcgatcttcagatagcccgcatcgagctggaagttctggcgaaggctctgaacctgaccgaggcgacccgcttcgtcaccttgctcgatctcgcggggatctatcgaaagaccaaagaccccgaaagcccgccgttccgcgaacgcggcttcgaccttcagtttcaggtcccgatattcgacgggggcgaggtccgcgtccgtcaggcgacggaaagctacaacattgccttcaacaggctgacggaaaaggccgtcaacgtgcgctcggaggcgcgcgacgcatatcgcgtctatcgctcgagctacgatatcgccggtcactaccagcgtgaggtcgtgccgctgcgcaacatcatctcggatgaagctcaactgcgctacggcagcatgcagatcgacgtgttcgcgttgctggcggaagcgaagctgcggattgcggcccagcgcgcgtcgatcgacgccagacgcgatttctggctggcgcagtcggagctgcagacggcagtcaacggcggaggccgtgccgatagtcaacaggagagccgttcaccgaccaactcattggcgagcggcggataa

SEQ ID NO: 6790 - DNA, 297 bp, BradyrhizobiumColbertium
atgctggcgcaaatggcggcgaacgacgccgccgcattcaatgcattcacgagaacgggatccagacgcgcggtcatccggcgcacgattctgattgttctggtcggcccgtttcttgccggctgttcgacgaccgtgcctttggtgggtgccgatcccgcagatccgggagtaaaggtccggcgggtcggatacaggcccacggtcgccccctacgtcagcctgcgcccgatctcgccggccggatggcgcgaacagaatcagcgcgtggcgcccacgccgaagaacgagcggtag

SEQ ID NO: 6791 - DNA, 240 bp, BradyrhizobiumColbertium
atgcccgtcatggctatgctggtggtcgtggctgtgctgatgcttctgggcgtgctcatgagccggcagggtttcgtgggcgcgctgagccactacttcggcgaggccggccggaaacggcgcggcgatggacggcgtcaacgacccgagcagatacgtgatggcgacgagccacccccaccatctgcgcgcaggctttctgaagccaatcatcccatttaccgccattccgaagactaa

SEQ ID NO: 6792 - DNA, 477 bp, BradyrhizobiumColbertium
atgggcagcaagaacccgggatgtccgagccggcgcaaccgcgcaaacgagccggcctatgtgctccttgcaagcacattcgcgcgcgagttctacgcggtcgtgccgacctacaatccgattccaaatctgctgctgagcccgggttggcgcttcgtgcgcatcttgaagggcaggaacgcgcgtcagccgtgtctgcggggaaagtccgcgatgacggctttcgcccgggacggctactacctgtttacgaaccggcagtttgctcccaagcttcccaagcctgcctctggaagtcccgaaaaccctggcgcgagctcgtcggcggccggccacatgcttgatcgcagcgaactgtcggcagcgtcgcccgatgaaggcgccctgcgtggcagtgtgatcagcggcgacgataacaggccggatgccgggggcacctgcggcccgcggcacacgtttgacctcgatcaacaatga

SEQ ID NO: 6793 - DNA, 180 bp, BradyrhizobiumColbertium
gtggccgcgataaacaggctgcttgctgaacgacccgaggccgcgggcatcgcagtgcccgggatgccccagggatctccgggcatgagcggcaaacctcagaagtattcggtcgttttgttcggcccgcacggacgccgcacctacatggagttcatcggctccgacgaagtcggctga

SEQ ID NO: 6794 - DNA, 684 bp, BradyrhizobiumColbertium
atggctgtctcgggttggacggacgcagtgcttcccgggccgctctcggagaagcatgccttcctatccaataaatgcgaaagttgtcatacgccgaccaaaggcgttgaagccgcggcctgtgtcgcctgtcacacgacggccgctgcggatctcgggaagcaagcgacggcattccacgcgacgagcaaggagtgccgcggctgccatctcgagcatgcgggcggcgtgcggccgacgaggatggatcacgccgcgctattgcgcattggggcgtttccacatgaagcaaacacgtctgcgcgcgcaatcacgggacagatggtcgccgatctgaagaaattcctgcgcgtaccgaattccgacgaagcggagaaggccagcctcgactgtgtcagctgtcacagcaatcgagaaccgcaccgcggactgttcgggcgcgaatgcgcgagctgtcacgcaatcgatacatggagaattgcgaagttcctccatccttcgcccacctccaaggaatgtgcgcaatgccaccaggcgccgccgagccactacatgcaccacttcgtgatgatggaccagatgatcacggggcaacaccatgcgcgtgtaaaccagtgctttctttgtcaccgcaccgattctttcaacgacataaaggatatcggttggttcaaacaccattga

SEQ ID NO: 6795 - DNA, 705 bp, BradyrhizobiumColbertium
atgggtgacagagagcggctgatcgtcgatgtcgtcctcgccagcctgctgttgctgattccggcattcttgcttcattccgatgagaggttcgccggaagcctcgctggatttgctctcggcgcgtcggccgccggcctgatgcttctcctcctcgtctatccactcgcgaagtacggccgaaacttcaagaccatcgtcaccagcgtcgtctcgatgcgcgcgctacttggttttcacgtctacgccggcattgcggcatcgtttctcgcgctcctgcataccggacacaaatatcaaagcccgcttggaatcgcgctcgtagccagcctgctggttgttgtcgtcaccggattcgtggggcggtactacttgccgcagaccgccgccgaaatacgggagcggcagtctcgccttgcaacgttgcggtctacctacgaccggaccgcgctcatcctgtccgcgcgcgaagcatccgctgacgacgatcctcccacgagtgcttcagcgctgcaggaagtgccgatcctgcagctcgtcgagggcatttcggatctcgagtatgcgatcggatcccaagaggccgtcaagaaggtcttcacgcagtggatcggattccacgtgcttgcggcgatcgcgatgtacgcgctgttggcgctccatatcgcaggcgaggtctattacgggcttcggtggctcacgtga

SEQ ID NO: 6796 - DNA, 2064 bp, BradyrhizobiumColbertium
atgtcgatattcgagctggtgtttcgaaatcgcggtggtctttgggtggcgggcctctgcaccctatttctcgcaggggcctccatcgctgcaaccgcgcagctctcggcagagcagctacgggatcgcgatagccccaagcgtctcgatgcggagttcggatggccggccgatttgcggttggcgcaggccgaggacaatcactcggcgcatcatcccggcgctcccggctccggaggcgcgagcgctcctcaatcgaacagtccggcagctccaagtggcggctcgccggcaccttcgtcgagcggctccaatccgggcatgatgggcgaaaccgggattatgggcgagatgatgggccgcccacgcaaggagttctatccatcgttgatggaaatgcccgccctctccgctgagcggcggcgcgaccttgaatccgaggcccgtgcccgcatcaactccggaatcgatggtctttctgccgcggaagcggacctgcgccatgccatggcgggaggcgacatcgccgccgccgatcaggcttccggtcgaattcgcgggtctctcgatcaggtgcaaagcggcgtgaccgtgctgcgttcgttgagcgaaggaaaatctccgcagcagatcgcgcaaaattggttcaaggcgcagatgaatctcctgccgccgccggcgaccttcactgccgagggagtcctgggcatttcctggtttcatgtcgtaacgatgggactgctcgcggccttctcgtcggggatgcttgcggtctatgtggcgcgaatgcgccgagccaacgctctggtcgataggctgacaaaggcgccggcgctcgcaccgacgccaccggttgcctcgccggcgtttcagcggcagggcgggtcgagcgatggccctgcggtcaagccatcgtttacgcgcagcgactctccggaaggaactgcgacggtttcgacgatgcgcgcaaccggcggttcgacgacgccggggcagctctggaaaggcaaactcaaggtctgcgcaatcttcaaggaaactccgagcgtgaagacgtttcgtctccgggatccggaaggcggctcgattcctttcacgtttcttcccggccagtttctgacctactccgcccagatcgacgggaagaccgtcaggcgatcctacactatcgcgtcatccgccgcccagacggcttacgtcgagaccaccatcaagcgcgaggacggcggagtcttctccgactacatgcacgacaagatcaaagaaggagacctgctcgacgtgatggctccctccggcgccttcactttcagtggaaaggaggccgacagcgtcgtgttgatcggcgggggggtcggtatcacgccgttgatggctgcgataaggtatctgttcgacatcgcttggccgggccaagtccacctggtgtacggtgcgcagacgaccgaacagttcatcttcagggacgacctggaatacctgcagcggcggatgaacaatctccacgtcgcagccactatggcgcgcgcggccggcacgtcgtggatgggaagcgagggccagatcacggccgatttcctgacgcgggccgtccccgatctggcccgacgccgtgtgcatctgtgcggccctcccggaatgatgcaggcgatcaagaagaccctcggcgagcttggagtcccgtccgaacagatcaagactgaggcgttcggccccgcgctcggggccgttccgcctcccggcaggaccgtcaccgagagcacgaaatccgagaacggtggcgccgcagccatcggtccggccacggcgtccgtccgcttcgccagatcaggcaaggtcgcgcagttgcctccggacaagagcgtgctcgaagtcgccgagtctgtcggcgtgccgatcgactattcctgccgcgcgggcatctgcggcatctgcaagacgcacctgctggaaggcagcgtcacgatggaagtccaggatgcgctcaccgaggaggacagagccaagggcatgatcctggcttgccaggcgaaatccatcggaaacctggtcgtcgaggcctga

SEQ ID NO: 6797 - DNA, 723 bp, BradyrhizobiumColbertium
atggataatatcaagaggttcgttgcgataacggcggttgccgtcctgggcctggctgctgggtcgccggcgggcaagcttgtggcggcggaacgcgcgcagcttgccatgatggacgagatgaagaagaaacccgattcgtccagcggcaccgcgaacaacatggggaacatggggcagcccggcagccagtcgcagagcactggcggcggtcgcatggacgacaagatgaagatgcccatgccgggtcagatgcaggactgtcagggcgccggctgtcagccgcgcgactccaacatgatgccgatgatgcaaatgatggagcgaatgcatggccgcatgaatcagcagatgaacggcatgggttccggtgccggtgcaagcgcgagcggccccgccgacgtcaccgagcgactggaggggcgcatcgcgttcctcaagaccgagttgcagatcaccgacaagcagacggccgattggaacgttctggcggacgcgctgcgctccagccgtcagcacctgctggaagcgcgcaagctgctggtgatggatgacaaagcggccggccccgagcgccttgaccgctacgagcatcatttgggtgagcgcttggaagcgatcaaatcggcgcgctctgcattcgctcggttgtacgggacccttagcgacgggcagaagcagacggctgatgccatcctgctgcctttaatcgcgacgttctga

SEQ ID NO: 6798 - DNA, 1755 bp, BradyrhizobiumColbertium
atgcaagcttccacctgcacgcaatgcgtgccgcaagaaaccaatcgtgacggtcgtgctgacggcggcttcgaagaggcacgcgaccgcctcctgaacccggcaacggatcagggcgcattatgggcatacagtcgcgatttttgggaacgttcgatcctcttctgggacacgcttcgacaacgagccgacgatctgatcgagcatgagcgccgggggctgccgcctctcctggacttccgcttcgagacgattctcgacgcgcgccagttcgagcgtccggtcaattacgtcttgctgcgcatcctacccgagcacgaatctgccagcggtccaggcagcgagaagaagccgccgatattgatcctggacccgcgggcgggacatgggccgggcatcggcggattcaagcaggactccgaagtgggcatcgccctcgccaacggcaatccggtctatttcgtctcgttttttccgcaaccttgtcatggacaaaccctcgccgatgtgttgcacgcgctccggcgcttcgtggaagccgtagcccaccgccacccagatcgaccgcctatcctttacggcaattgtcaggccggttgggcggtcaccctgctttcggcggattgcagtggcctcgtcggtccggcggtactcaacgggtcgcccctctcctattggtcgggagaagcagggatcaaccccatgcgcctcgccgccgggttcaacgggggagcctggcttgtacacctcgtgtccgatctcagcgacggccggttcgatggcgcctggctcgcccagaacttcgagaatctcaagcccgaggcacagtgggagaaatacgccgatctgttcacgcatatcgatcgggaacgcgaacgctttctggacttcgagcgctggtgggggagcttcttcttcctcagccgtgaggaaatcctggcgatcgtcgagaacctgttcatcggcaatcagctcgagggcggccgcttccgaatctgtgaacactgcttcgccgaccttcgccgcatcagcaacccgctcgtgatatttgcctcctacggcgacaacatcacgccgccgcaccaggcgctcggctggattcccgtcgtgtacaagaccacggaacagctgatccaggctggccaacgcatcgtctatttgacgaacccccacgtaggccatttgggaattttcgtctctgctaagattgcccaacgcgagcaccgggccattcttgccagcctctcggaaatcgaagggctggcaccgggcctatacgagatgaagatcgaagaggcagactcttcgggcgcgtccaatctgccttttgcggttcggttcgaatcccgacgtgtcgaagagctcaaattcctgccgccggatcctgctttcgagcgaattagggatttttcggaggcggctgaagccatctacaggaccttgttcagtcccttcgtccaggccacctcgaatcccttgacggcggaagcagccaaatggtttcacccgatgcggatgagccgttatctgctctcgtcatccttttcgccgtggctccgcggactcccggaacttgccagctcgatccgcgatacccatgtcccgcttgcaggagacaatccgtaccttggcgccgaacggacgttcatcggcctgaccgcctcgctgatcgaggcgacccgaataaatcgcgacgccgcgctggaacgcatgttcgagttcctgtacggccgtacgtcctctcgcggggtctga

SEQ ID NO: 6799 - DNA, 414 bp, BradyrhizobiumColbertium
atgataacctcggagcggatcttcaacgagcaaacgcaaggcgcgattctgcacggacttcactggaccgcgtcggccatcgaactgctcggtgtggtggtgatcgtctgcggcgtggtagccgcaaccgtctggtcgcttcgcgaattgcggcacgggggatttgccgatgcatttcgctcttatcgggcgaacctcggtcgaggcattttgctcgggttggagttcctgattgccgccgatatcatcggtatggtcgcgatagtgccgtcattcgatcgactgggaatccttgcccttattatcgtgatccgcaccttcttgagcttctcgcttcagattgaaatcgagggccggttgccttggcagcggcgcacgtcgcttgccgacgaggctgatcgcgccgaactctaa

SEQ ID NO: 6800 - DNA, 1161 bp, BradyrhizobiumColbertium
gtgctgccgaagtctcagcgcgatctccgcctcgatctatttcgcggactggcgaactggctgatcttcctgggtcacatcccggactcggcgctcgcctggttcaccacccggaactacggcttcagcgatggagccgacctgttcgtgttgatctccggatacaccgcgaccctcgtattcggtaagattatgatggatcgcggctttgtagtcggagcgacgaggctgttacgccgagtgtggcaactctatgccgcccatttgctgcttttcttgttttacctcacttcggtgcattacctttcgcacaggttcgatgatccgcatcttatggatcaattcaacgtcgcgcaccttatgaattttcccgtcgagacgctttcgcagggattggcgctgaaattcaagccgctcaatctcgacgtcctgccactctacatcgtgttgatggcggcattcccgatcgtactttggttcatgctgcgatggcgcaacgccgtcgtggtcggatcgatcgggctatacctggccgctcgccactacggctggaacttccaatcctatcctgcgggagtgtggtacttcaatccctatgcctggcagttgctcttcgttcttggagcctggctcgcgctcgggggcgccgaggccagtcgaaggctgctccgttttcggattctctatgcgcttagtgccggcgtcttgctgtttgctctcgtgatcaccctggcggagcggattccggagctacgacagctcattcccgattcgatcgatgaaatgttcatccccaacgacaagaccaatctcgcgccttaccgagtgatccatttggccagcctggtattcatcgtcgtcgctctcattcccatcgactggcccggattgcagtggcccatcttcaagccgctgatcaggtgcggccagcaatcgttgccggtcttttgcgtgggtctctttctttctttcgtggtccattttgtgctggaattcggttcgaaggggattttggtccagctcctggtcggcgccgccggcctgtgcatcctgacgatcatcgcttactatcgcacttggtcgaagcagctcgacaagagtttgtcttccgggggaaatagatcgacgccggcaggcgcaggtggcgagccgcaaatctag

SEQ ID NO: 6801 - DNA, 654 bp, BradyrhizobiumColbertium
atgatcggtcacgccacgacgcacaaattcttcgagatagtcctcggtcaggccgagcgcagctcgtttccgccgttggttggagcgatcgccttcctttccacgctgacgatgagcgttcccgtggagtggttggtagtcgtggcgtccctggcctgccgacgccgatggacgatgatcgccttgatggcggccgtcggaagcgcgaccgcgtccctcggcctgtacctcacctttcaccatttcggctggagcatattgcttgcgcgttaccccgagcttgcggactcgcaagcttggtcgcaggcgacggattggctgtcgaaatacggtatcctcgccatattcgcaatgatggccttgccgctgcccgttcccaaagtgccgatgctcgcggtagctggaatctatcgactgcagaccgctgacgtcttcgtcgccattcttgccgggaagatcatcaagtacttggcatatgcatatctagccgttcgctttcccgaggccctgcgcttcctcacccaacgcggttcgcgcgcccaccgcgttccttatcgagtgcgaagcctgatggttgcccgtatgacaacgagccgtaagatacgaactttcgtcacccctgccggtggcgcggaaacccatcatcaggaatga

SEQ ID NO: 6802 - DNA, 195 bp, BradyrhizobiumColbertium
gtgtcgcgctatctcatggaagagaactcgctttcgctgatggtgttcgatcctgccgtccggaggttcgtcaggctcgacgatcttcgcctgctcgaccgcatgaagcgacaccgatgggtcggatacaacgtcttcgccaggtccggtcgtttctggaaggagcgcctactttcggcttgcagccaccaatga

SEQ ID NO: 6803 - DNA, 219 bp, BradyrhizobiumColbertium
atgccgttctgcgatgcctactggagtaggctcctcaaccgcagctacgactacgaagaagagatcaacgctctcccgcactgcgggcgcgatgagaggtatgagttcgtcgattgctgcgcaaacttcggatactggtcggtcctcgcctcgagcaagcccttcggcgcgcaacacgcgcttgcgatcgaggtgggtggcttgaacgtgaacgtctga

SEQ ID NO: 6804 - DNA, 252 bp, BradyrhizobiumColbertium
atgaacgcccgcaagttgtttttggccgcaaccattgcctccttcgttacgctgccggcaatcgcgcagaccgccccttccccgagcgatggcggacatcactattcaggtggaccaagggccgagccgcaccacatgggaaagaaagagagtacggccccgaagaagaagtcctccggcggcagccatcactatggcggcggacccaagtccgatttgccgcatcatatcgggcctaagaaggatcaatga

SEQ ID NO: 6805 - DNA, 258 bp, BradyrhizobiumColbertium
atgatatcaggtgcaaggacgatccggatccacggcgaggatgtcccggtcgccgccgaggttcgcaacatcgatgccctttctgcacacgcggatgccgacgaaacaatcgaatggctcaagagcgccggggcagcgccgaggaggacgttcgttactcatggcgagccgcgagccgcccgggcgctgcagactcgcatcgcgaaggaacgggatggacctgcatcctgcctgaacgaactcaggagactcggttga

SEQ ID NO: 6806 - DNA, 972 bp, BradyrhizobiumColbertium
atgaattgggagagattcccggtccagccggccggcatctccgctgtcgtcctaacccacgcccatctcgatcattccggcgggcttccccttctggtgaagcagggattcgccggagcgatcatctgttccgaagcgacagccgccctatgcgaggtgctgctgcgcgactctgggcatctgcaggagcaggatgcgcgatttgccaacaagcgcggcttctccaaacataagcctgctcttccgctctacacggtaaaggatgccgaagcggccctgcgtctgctgaagccaacatcttttcacgatgaccacagcctgccgggcggcgcaaatctggtgctccgacgcgccggccacatcctgggggcttcctggattgagatcgggtgggagcgaacctcgatcgcattttccggcgaccttggtcggcacgacgatccgatcatgctgcagcccgagccgttggcaaaaaccgattacctcgtcgtcgaatcgacctatggcgaccgctcgcacccgaagatcgatcctcaacgtacgatcgaggagatcgtcggcacgacggcgaaacgcggcggcacggtggtcattccggcgtttgcggttggccgcgttcaggcgctgctttactacttcgcacgcatcaaattggccggtggcctgcgcaacgtgccgatcttcctcgacagtccgatggccgtcgatgcgagcgaaatcttctgcaaattcaggtccgatcaaaagttgtcgcacgaggaatgcaagagaacgtgcgctgtcgcgacttatatccgttccgtcgaggattcgaagcgcctgagcgacagcccagttccgaaggtcattatttccgcgagcggaatggcgaccggcggccgggtgctccatcatctgaaacgcttcgcgtcggatcagaagagtacggtcttgcaggctatcaggccgaggggacgcgaggggcggcgatga

SEQ ID NO: 6807 - DNA, 837 bp, BradyrhizobiumColbertium
atggacgacaccccacagacgtccaaggagacctttcgtccctcgaacatcgagcaactggactcgcccgcctacactttagctgccctcgatcaaggctttctgcttggcgattccatgcgtggggtacgattcctgctggagtacgcaaaggccgaggaatgcctgagatcgtggggcgtccgatccactatcgtcgttttcgggtcggcacgagttcgggaggatgggcctgaatcgcactcccgatggtatcgggaagcacgcgcgttcgcgcgcttggcctccgaacgcggtggcgccctgacttcgaacggcggccttcgagacaacgtcatcgcgaccggcggtggcccgggaatcatggaagctgcaaaccgaggagccggcgacgcgggagcgccttccatcggcttcaacatcacgcttccggaggagcaacaaccaaacccttactccacgccagcgctgacctttcaattccactatttcgcaatgcggaaaatgcacttggccatgcgcgccaatgcgctcgttgcgttcccgggaggcttcgggactttcgacgagttgttcgaaatcctgacgctgcggcagacgaagaaggcgccggccattccgatcgttctgtttgacgaacaatactggcggtctgccgtcaacttcgaggcgctgatcgacagcggcacgatcgatcgatccgactgcgatctcttccggttcgcggaaacgtcggaagatatttggtccgaactactttcgtgcggtctcggcgcacccggtctctcctgtccggcctcgcaattcagccgcactacgtcctcgaacgcgagttag

SEQ ID NO: 6808 - DNA, 162 bp, BradyrhizobiumColbertium
atggccgccgtcaacttcatgatccattccgatttcaagtgggttctgctcggcatcgccctcgtttggggggtgagcattgtcatgttcgtccgagaagccgtcgtttctccgaaggcggccgagccggccggttcgaagcaccagcgccgagcgcgataa

SEQ ID NO: 6809 - DNA, 327 bp, BradyrhizobiumColbertium
atgcgcgacgcatcgtatcgctggcgtctgtcctcgatgctgttggcggcctccggtatcctgttgatcggggtcggcgtctacttcctcctccttcggcctcccctgctgccggacgacatccggtacatgagccttacttcgatcgaattgcagttgatcgggcccagactgacatcatggcccacccatgtcttccgcgtgatgggcggctacgtgacggctacgggaatgctcgcgctcaccctggcgttgacgtccttccgagaccatcgcgctgtagctgcggtcggcgccggggtcgccggcgggcttcgatcgggttga

SEQ ID NO: 6810 - DNA, 678 bp, BradyrhizobiumColbertium
atgcatgattctacgcccgcttacggcctctggagccttgtcatcgtcaactccgcggtcttcatcctgttcgcatacagcttcttcaagccgcagacctcccgggactggcgttcgttcggcgcattcagtgcgtttctggtggcgctattcgtggagatgtacggcttcccgctcaccatttacttcctctcgggctggctgcagtcgcggtttcctgacgtggactggttctcgcacgacgccggtcatctgctcgagatggtgttcggttggaaggccaatccgcacgccggaccgttccacatcctgagcttcatcttcatcgccgccgggttcattctgatctccgccgcctggaaggtgttgtacgacgcgcagcagacgcgcagtctcgccacggccggtccctacagctatgtgcgccatccgcaatatgtcggcttcatcctcgtcatgttcggcttcctgttgcagtggccgacaattctcacgctcgcaatgtttccggtgctgacgatcatgtacgtgaagctcgcgagaaacgaggagttggacgccgagtcggagttcggcgaggcctatacgaaatacgctgcggaagtcccaggcttcataccgcgcctgagccgaattctcgggcagggctcgaccggccgcacctatcgtcacggttga

SEQ ID NO: 6811 - DNA, 255 bp, BradyrhizobiumColbertium
atgtcggtgcaagatcgttccggtcaccaaggacatgcgcctgagggtttgtcgctcaaatcgcgtgccgggctggttctgatcggatttctgatcatcgcaggtgccctgctgttcactgagcatagagcgcacgtgctcggattgcttgtctggctcccaatcctcgcctgcccgctgatgcatttgttcatgcatcacggacacaggcatcatcacgccgacaatcaacagaacgatccaaggagcgtgtga

SEQ ID NO: 6812 - DNA, 120 bp, BradyrhizobiumColbertium
gtgaactcctgctacccaatagtaagtaaacaacttgccgaaaccttcttcttgatcgagatcaagcagatcggaccggaaacgcccgcaaacaaggcgcttgcggcgaccgctgcctaa

SEQ ID NO: 6813 - DNA, 642 bp, BradyrhizobiumColbertium
atgaagacggatgatttgatcgcggcactcagtgcccacgtcgagccggtcgatcgccgatcggtcggtcggacagtgggcctcgcccttgcggccgcaacggttctgacgttgggcggcatattggtcggcctgggtacccggtccgatctgacgaccggtcacgccgtcgtttccgtgctcctgaagattgtgttcgcggtcggaatcgtcgtgttggcatcggcctacctgatgcgcctggcgcggccgggcggagaacgtaggtcctcttcggggtgggccgtcctcccattcgcaggcatcttgttgcttgccgcaatcagcctcgggctggcgcccagtacgcattgggccaagatggtcatgggtgacgagtggctagagtgcattatctcgatcccgatcatcgcgatcgtacctttcaccgtcgttatcgcggcggtgcgaacggcggcgccgaccaatctcgtccggacaggtgcctttgcgggtcttgtttcgggcggcatcagcgccatgggttacgcgcttcattgcaccgacgattccttgccatttgtcgcaatctggtacggcgggacgattgtgctctgcaccctggcaggggcgatgctgggccccaggttgctgcgttggtag

SEQ ID NO: 6814 - DNA, 378 bp, BradyrhizobiumColbertium
ttggccattcacatcaagagacatacctacgacgccaccgacctgctgacaccatgggtccatgcgatcgcgcgccacaaattgatcgactttctgcgtcggacccgcgcgtcgttggccgatgtgcctctggatgaggctgacgaggccatggcatcggacgaacatgtcggtgcggagagttcctacgacgtcgggcggctcttgcgacggctgccgccaaacgtcaaatgttccatggaagccgtgaaactcgacgggttgagcatcgccgaagcggcgcagcggtgcggactttcggaatccgggattaaggtgaatattcaccgcgggctaaaaaccctggccgcgctgattgcccgggaagcgagatcatga

SEQ ID NO: 6815 - DNA, 1299 bp, BradyrhizobiumColbertium
gtggaagccatagtgaaagcctatcagtcaaatccgcagctgagcgcggcacgggcgcgccaacgggcgaccgacgaaaacgtgccgcaggcgttgtcgggctatcgcccgcagattgtggcaagcctgagcgccggcctgcagcaggttcgcaacctgttgccggacaacgtcgtccagacggtcacgctaaagccgtggaccgttgggctcacggtgacccagacgctgttcaacggcttcaagaccgccaacaatgtccgggtggcggaggcgcaggtcaggtccggccgcgaagccctgcgcaacgtagggcaggggaccctgctcaatgccgtcaccgtgtacatgaacgtacttgccaatggagcgctggtcgacgcgcagcgcgccaatatcgccttcctacggcagacgctctccaacactcgcagtcgtctcaatgccggcgacgtcacgcccaccgacgcggcccaggccgaagcgcgcctgaactgcggccttgccgacctcaacgccgcagaagtggcccttgccgtgagcaaggcgacctacacccaagtggtgggcgggcctcccgcgcagctcgtggcggcgacgccggcggaccggttctcgccgcctactcttgcggatgcgacgaatgtggcgcgtcaagagaacccggccgtccttgccgcgcagttcgatgtggatgtcgcccaatcttcgatcgcagtggcggaaagcgggctgcttccgaccgtttccgtgcaggccagcgtcagccgcgccgtgcagaatgatcctaccctcgcgacttcgcgcatggatcagacttcggttttgggccaggtcggcgttcccctctacgatgcaggcatggccgccgcccagacccgccaggccaaggaggtcacttcgcaaagccggctagtcctggagcaggtgcgcaatcagacgcgcactgcggcaaccggcgcttgggtcgccaatgaaggagcaaaagtcgcggtcactgccgcagaatccgaggtgcgtgccgcgaacgtggcactattgggggtgcagcgggaggcgcaggcaggacagcgcacgacggtcgacgtactcaacgccctgcaggatctgaccaatgcccgagctcggctgatcctcgctcagcgcgaccgcgtgatcgcatcctacacgctcctcggcgccgtagggcgcctcgacgtgaagacgctcgggttgaacacgcccgactatctgccagaggtccactactaccaagtccgggatgcctggcatggtttgcggacgcctgcaggacaataa

SEQ ID NO: 6816 - DNA, 1983 bp, BradyrhizobiumColbertium
atgatcgagaacgcgcacaagcacctggagcgggcgaagccggggcaatcgcgcgttcaaatcctgatcgaggcggcctccgaagtgggccccgcattgttcttcagcctcttgatcatcaccgtttcgttcatgccgatcttcacgctggaatcgcaggaggggcggctgttcagcccgctggcgtacacgaagaccttcgcgatggccgccgcagctctgctttcggtgacgttggtcccggcgctgatggtggtcttcgtgcgcgggaagatcgttcccgaacacaagaatttcattaatcgcttcctgatctgggtatatcgccccgtcatcaagggggtgctgcgcgcaaagaccctagtcatcctcgcctccgtgacggtcctcgcggtcacgatctggccggcccgacagcttggaaccgagttcatgccgacgctgaacgagggcacgctgctctatatgcccacgaccctgcccggcatctcggtgaccaaggcggcggaactgatgcagatgcaggatcgcattatcaaatccttcccggaggtcgcttccgtctacggcaaggcggggcgggccgcgaccgccaccgatccggccccgaccgaaatgttcgaaacggtcgtcaacctcaagccgaaagcgcaatggcgtcccggaatgacgatcgacactttgatcgcggagatggacaaggcgctgcaatttccgggcgtctccaatgcttggaccatgccgatcaaggcacgcatcgacatgctgtcgacaggcatccgcacgccgatcggcatcaaggtcatgggcacggatctcgtggagatcgatcggttggcaaagcagatcgaacgggtcatcaagacagtccccggtacatcatcggcctatgccgagcggggcatcggcgggtactatctcgagatcgctccggaccgggaggcgctcgcccgttacggcgtcctgatccaggacgtccaggacaccatcgcggccgcattgggaggtcagacggtcaccacgaccgtcgagggccggcagcggttcacggtgaacatgcgctacccgcgcgatctccgggacaatcccaaggccatcacgagcgatatcctggtgccgatgccggccggcggcgccgttccgcttggcgaagtggcgaaggtcgaacccgcccgcgggccgacttcgatccgtaccgagaacggacagctcgcgacctacatctatgtcgacatccgggacagggacatcgggagctacgtcgccgacgcacagcgagcggtcagcgagagcatacagtttccggcgggttactatgtcgtctggagcggccagtacgagtacctgcagcgcgccgctgcgcgtctgaagatcgtggtaccggtcacgctcacgatcatcttcctgctgctctacctgaacttcaggtcgattacggagaccttgatcgtcatgctctcgctgcccttcgcgctggtcggcggcctctggatgatgtggtggctcggcttcaacatgtcggtcgccgtcgcggtagggttcatcgcactcgccggcgtcgccgccgagaccggcgtggtgatgctgatctatctcgaccacgcgttggcggaaacgagcgagcggataaaggcggaaggtcgcgcgctgacgcgaagcgatctttacgacgccatcatgcaaggcgccgtcgagcgggtccggcccaagatgatgacggtggttgccatcatggccggcctcctgcccatcatgtggagttcgggtaccggatccgaaatcatgcagcgcatcgctgtgccgatgatcggcggaatggtctcctccacgctgctgacgctcatcgtcattccggcgatcttcggactgatcaagggcttccggttgccttcgacgtcccatcgaggcgaccgcgatccacagtctcccgcacatcaagaagcgcctgcaaagaggccgcgcattatggagccggcccaatga

SEQ ID NO: 6817 - DNA, 1443 bp, BradyrhizobiumColbertium
gtgcacaccatgaacacctcgcgcttgcttacaatcatcgcgctcggcgccggaatcggactgaccggctactggtcggtggaacgatctttctggcccgttcacgcccgcttgaccgacgctgccgcggccgcggacaagacaccgctgtactaccgcgaccccgctggggcccccctctggtcggccgttccgaaaaaggatcagcagggacgcgattacctgccggtctacgatgaggacgagccctcgaccgagtccgcgaagccgaagcggcaacaggcggattcctcccgcaggatcctgtactatcgcaatccgatgggcctgccggatacctcgccggtccccaagaaggacccgatggggatggactacgttcccgtctacgaaggggacgatcaggaggacgggtcggtcaagctctcgcccggcaagatccagaggacgggcgtgaagtccgagcccgtcgagcgccgttcgatccggatcttggtcaagtcgcccggtacgatccaactggatgaacgccgcgtctcggtcatcgcaatgcgcgccgtaagcttcgtgcagaaggtcgccgacgtgaccaccggtacgcgcgtgaaggcaggccagccgctgatgcagatctacagttcggctgtggcgtccgccgccgcggagtatttctcgacgatcacttccaagaccaccggcgggattgaggcctacggccgcggctcgcggcagcggctgatcaatctcgacgttcccgagcaggtcatcgcggacatggagaagtcccacgtcgcgcccgtcaccgtgcaatggtcggcgccgcgcgacggaatcgtgcttgaacgcaacgccatcgaaggcatgagagccaatccgggcgacgtactgttccggattgccgatatctcggtggtctgggccctggtcgacgtcgccgaacgcgatcttggcaacatcgcagtgggtcagccggtcacggttcgcgcccgcagctatccgactcgcaccttcagcggcaggatcgccgtcgtctatccgcaggttaaccgcgaaactcggacggcgcgtgtccgaatcgaactcgccaacccggatgtggcgctgctgccggatatgtacgtcgatgcagacatcgacaccgcggactccaaatccgaattggcggtccctgacagttcggtgctcgacactggcagccggcaggccgttctcgtcgacaagggcgaaggacgctacgagccgcgcgaagtcaagcttggccggcgcggcggcggttacatcgaggtgcgggagggccttgcggatggcgaggcggtggtcaccgcggccaatttcttgatcgatgccgaaagcaacctgaaggcggcgctcaaaggcttcgcggaggctgcgcccaatccttccgtcaccggcgccgcccactcgacgggagagcacaaatga

SEQ ID NO: 6818 - DNA, 396 bp, BradyrhizobiumColbertium
atgacttccaaattcagcagtgctgccgcactgaccgtcgtcgtcactctcgtcgccacggctgcgtcggcgggggcaggcgactacgtgttcgagcccgtcaatgcggagatgaagaagggcgacgacgtcaccgtcgcggtccgcttgaccaacaagacgaccgggaaaccggtctccgacgccgtgatcttcaggacgcgcgtggacatggcgcccgacggaatggccgaaatggaatccccggtggctccgctgccgtccagcgagtccggcgtgtacgccttcaagacggatcttccgatggcgggtcgctatcaggtcacgctctccgcaaaggtccagggcgagtctgagaccatcaacggcaaggtcatcgtcaaggctaacaagtga

SEQ ID NO: 6819 - DNA, 366 bp, BradyrhizobiumColbertium
atgcggctcgtccgtaccattctggcattcgcgatcgccgcctccttggcgttgttgccggtcggcgcgtccgcggccggcttcggcgtgatggccgacgatgcgcagtccggaatgcagatgggcacctcggccgacatgtcgatggactgttgcccggacgacatgaacggcgccccctttcacgccgccggccataactgcagcatgggtttctgctgcgcgggcggattcgtcgcgctgggcgacgtccgaagcatcggcttccgcttcgtgcccgcagccgagagcaaagtcgccatccctgcggaccagttcgttcccgtgcgcggagcgagccctcccttccgacctcctcgggtctga

SEQ ID NO: 6820 - DNA, 276 bp, BradyrhizobiumColbertium
atgaggaccgacatcaaggcttcctctcagaaacgcctgaaccgcatcgaaggccaagtccgcggactcgcgaagatggtggacgaggaccggtactgcatcgacatcgtcacgcagatttcggcggtcagagtcgcgctccgccgcgtcgaggaagaaatcctcaaggatcacgtggcccattgcgtggaacacgctattcgtagcggggataaggccgaccagcggcgcaagatcgcggaactgatggaagtggtcgggcgggcggacaggtga

SEQ ID NO: 6821 - DNA, 930 bp, BradyrhizobiumColbertium
gtggatccggcgacggcctcccataaggtcgagcatggcggccggaccttctatttctgctctgatcgttgcaggaccaaattcgcggaagcgccggcaaaatacgttcacggcaaggtgcagcatgaaccccgagccgacgtacccgaaggtacggtctacacctgtccaatgcatccgcagatccggcagatcgggcctggcaattgtccgatatgcggcatggcgctcgaaccggaattcgcaacagcggacgcgggaccaaatcccgagttggtcgatatgacccgccgattttgggtgggtctcgcgctctccgtcccggtcgtgatcctcgagatgggcgctcacttggtcggagctcatcgctggattgatcaggcgttctcgaactggatccagctggctcttgcgacacccgtggtgctttgggccggctggccgttcttcgtccgcggttggcagtcggtgctgacgcgcaatctgaacatgttcaccctgatcgcgatgggtaccggcgtcgcctggatctacagcgtcgtcgcgacggttctgccagccgcgtttccttccactttccgcggccacgacggcgcggtcgcggtctacttcgaggcggctgccgtcatcacggtcctggtgcttctggggcaggtgctcgaattgcgcgcgcgcgaggcgacctccggggcgatcaaggcactgctggatctcgcgccgaaaaccgcgcgacgcatccgtgcggacggcgccgacgaggaggtgcagatcgcggtgctgcagccgcaggaccgcctgcgcgtccgtcccggcgaaaaagtacccgtggacggcgagatcatcgagggtcgctcgacgagtcgatggtcaccggagagtccatgccggtcagtaaggaggtcggcagcaaggtcatcgcaggcaccctga

SEQ ID NO: 6822 - DNA, 1098 bp, BradyrhizobiumColbertium
gtgcaggacttcgactcgccggtcggcaagggcgcgctcggaaccgtcgagggcaagaaggtgctcctcgggaacgcgacgttcctgagctcggaaggcgtcgatacgtcctccctcgaatccgaagccgaacgtcagcggggcgaaggcgcgaccgtcatcaacatggcggtcgacggcacgctcgtcggcatcttggccatcgccgacccggtgaagcagtccacgcccgaggcgctgcgcgagctcgccgccgaaggggtcagggtgatcatgctgacgggcgacaaccgtacgacggcccgggccgtcgctcggaggcttggtatcgcggacgtcgaagccgaggttctgcccgaccagaagagtgcggtcgtcgcgaagctacacgagcaaggtcgaatagtcgcgatggctggcgatggcgtcaatgacgcgccggcgttggcggccgccgaagtcggtatcgcgatggggaccggaacggacgtagcgatggagagtgccggtgtgacgctactcaagggggatctcacgggtatcgtacgggcgcggcgactgtcgcgcgcaacgatgcgcaacatccgccagaacttgttctttgccttcgcctacaacgcggccggcattccgatcgccgccgggctgctctacccgaccttcggcttgttgctgtcgccgatcgtcgccgcggccgcaatggcgctgtcgtccgtcagcgtggtcggcaacgcgctgcggctacgaacagtgcggtctgacgcgcgcgaaatcgccggccatcgtcgctggccatcggaattcgcgtcaaggcgacgatgtgatcgacgaatcggcagcccgcttcgcgtttccatcggggacgccgtgcgcgagcaacctggactccgaaaggcttccaagaagctcgaccttggcgtcgttgagcgctccgcaggctgcctgtacggctttgacggcttcgagttgatcgccgaggtgcacgtaccagacttcctgtgcgtgcttcccatcgcggacttcgggccaggtcacgaggatcgtgtagccggccgccgctatctcgaaatcgcgaatgtcgggtccggattgctctga

SEQ ID NO: 6823 - DNA, 1191 bp, BradyrhizobiumColbertium
ttgactgatctgctgcgcgtgttgattgaacgatggcgcgaggactcaggatcgacctatcgcacatggttcttgtgggacgagcggctcaagaatttccggtccattcgtcgcggcattgctcaggtagtcgaggagatcgaagcaggaacgttcggcaacgtctacaagggctcttccctcgaaacgatcgtgggatcgatcgcggagcagaggcagatcttcaaaggtgccgatcacgccttcctgtggaagccgaagcttcggatccccgacatttacgagaatcccgagaatcagcgagcgttcggcagactcctgcatcactgttcctgctgcagcaccgagcaggagctggtcgaaggaatcgagtccatcgatcgcctgtccatcaagggtctcgggcccgctgtcgccaatctcctgtacttcctgcacccgaccctgatgccgccgttcaatacagcgatcgtcaacggcttcaatgcgatcacgggcgccaaggtgaaactcggtcgctgggatcagtatcttgggatgcgacggggcatcctggagctgaaccgcagctatcgcgatctcctctccaacgatctcggcgcaatcgcaggatttctgttcgatgtcggtaccggacgcttcagtgcgcctcccgtcggcagtggcgacaccgcaagagacgcgtggctatccgagctctcgaaggcgcgagagaccgcgaaacggctcgaaggtcccatcgctgccgcgcgcgagaacgatcttacccatacggaagtccaagcttggctccgcgacttgggcttggcgctcggctatcggatctggatcgcttcgaacgatcgaggacgcccgtataacggtgcgatgttggcggccggctgcctcgaccgtctaccctcatccatcgaaaacgccgccggcgcagaatcgatccggctcatcgacgtcctttggatagactccgcgagcgattgtgttgccgcggctttcgaggtcgagcacacgacgtcgatctactccggcatcgttcgtatgctcgatctcgcgctgagcagcgatttgcacgcgacgggcggactgtttctggtcgctccggacggcagggaggacgaggtgcgcagccagcttcgtcgaccccgccttcagtcgcgtagcggacctcaaggtgcgtttcttgccttacggtga

SEQ ID NO: 6824 - DNA, 1866 bp, BradyrhizobiumColbertium
gtgattgccctgccttacgactatttcctgattgcgtggtttgcaatcgcgctgatctcgacggcctatgtggcctatgaccagttcgctggcaatcctgagccgaccgtgatgaagtgggctttcatcctggtcacgctgtacatgggaccagtgggtctcctgctctacgtgcttgccgacaaagagccgcggcctggagagcacgagcggttcacctccccactttggaagcagggggtcggcagcaccatccactgcgtcgccggagacgctaccggcatcatcctggctgcggcgacgaccgccctgcttgggttaccgatgtggatcgatctcgtcgtagaatacctagcgggattctcgtttggtctcctaatattccagtccctcttcatgatgcgcatgatgggcggctcgtattggcagaacgtcaagatgagcttcatgccggaattcatcagcatgaacgccatgatggccggaatggccccgacaatgagcctcctgatgatggggcgtgacatgcgggcgatggacccccttgaactggtgttctggggcgtgatgtcgttgggggtgatggtcggattcaccgcggcctatccgttcaacgtgtggatggtcggtgccggcatcaaacacggactgatgacggaaaggcgcaccggaagctcgcaagccagcgagcacgacaaaaaggggcagcggcacgcgagccatggcggcggtaatggacacggtggcgggcacgggatgaagagccaggcgacggggcctcagcttgctgccatggctggcgtcacgggttttatactcatgaccggcatgatctggcctggcttttacgtcaatctgcggctcagtgcgcgggacgtcgagggagcgatcatgccgccaggcatgatcaatacgttcgatcttccgggcgccgcgatgcgggaaatggcagcggtgaagccgcgacaggttagctatgtagcgccgattaccgcacgcggcgaccaagtgctgcagccgcgcgtcgaaggtggcgtgaaggttttcgagatcgaagtgtccgcaatccgctggaatatactaccagacgtgagcgttgacgcttacgcatacaatcgtcaaattcccggtccgcgcctggtattgaccgaaggcgatcatgtcaggatcaactttcacaacgccctgcccgagagcacgaccgttcattggcacggattgatcgtgcccaacgagatggatggcccggcaaaggtgacgcaacagccgattccgcccggtggttcctacacctacgagtatacggtcggacagcacgggacgtacttctaccacagccatgaccatcccgaccgtcagcaggcgctgggcctatacggcgcgctgatcatcgcgccgaaggatccggcggcggaattgaacgccgatctcgactacacgattcagctccaggaatggctgaaacgcgagtggcttacctatcccgcgatgctgatggagggcgccctccccaattacttcaccatcaacgggaaagccttccccgcgacagacgtcgtgccgatgaaggtgtggcaggccataaagctgtggttcattgggacccacaacaatttcgttcatccgatgcacgtgcacggcgggcctttcgaggtcgtcgcggtggacggcatcactctcgccgaacgcgcacgctatcaggcggatacagtcaacgtgggcccgggacaaagatacgacgtgatctggaccgctcgcaaacccgggaaatggctggtgcattgccatattccacaccacacggccaacaacaacgtcgagcaagacggcggaggcggactgatgttggtcctgaacgttcaatga

SEQ ID NO: 6825 - DNA, 252 bp, BradyrhizobiumColbertium
atgctgacgcctgcgctcatccgcgcggcaagaggcctgctgggtctcgatcaggccgaggtggccgaacgggccggcctgaaacaaaggacgatttcgaagctggagggggagaccgatttctctctgaaggatcttcgccgcaggaaggccctgaaagcgatcagggacgccttcgagaaggcaggcatagagttcatgtttccaagcgagacgtcgggcgaaggggtacggaagaagagccctggttga

SEQ ID NO: 6826 - DNA, 315 bp, BradyrhizobiumColbertium
atgcactacgcaagttacatgggaagcgacgcatggcggcggaatcccgcgcgcctgaaggcgctgtccgacgccgatggacactgccgcctgtgccacgctgacggaagtctggaagttcatcactcgacctacaagcgtctcggacgcgaacgcgacaatgatctgatcgcgctgtgctccgactgccatcgcgacgtgacgagcatcctgcgcgagcgtcgttatgcggcggtcaagccgaagcgcgcggacgtcgagcgccttcacgacgcccgcattctcctcggcgatccgaccgcgggaggctactga

SEQ ID NO: 6827 - DNA, 576 bp, BradyrhizobiumColbertium
atgcagcgcgagaccatccgtttccgcatcgtcggcaccaaacgcctgctgatgcactgcgggcgtctggcggatccgctcgatccgatcacgcaggatctggcgcggctcacctcgaagaggccgaagacgatcgccgaccacaagatgatcagcaaggtggagtggttcggaagcctctggctgcatgacggagcgccttgccttccggccgaagcgctcctggcgtgcgcgatcggcggtgcgaaggtgctgaagcgcggcccccaggccgccgccggcctcgcgatcgaggaggatgccgtcctcgtctacgacggccccaccgacgtcgacgagctttgggagaacggcgacttcctcttccgctgcggagtgaaggtcggagcgaacgcgaagaccatgcgcacccgcccgtgcttcaaggattggtccgccgaattcacggcgagctaccttccctccgtcatcgaccgcgagcacgtgatccaggcgctcgcgcaggcgggtgtgcggcgcggcctgggcgactggcggccgcagaacggcacgttcgaagtgaagcagatagaatag

SEQ ID NO: 6828 - DNA, 450 bp, BradyrhizobiumColbertium
atgaagacccacaagaccaagaaggctcccgtcggacgcggtcgccggcgatgcgagccgccaccgattggacccctgttgtggtggcgcaccattcgcgcggaccacttcaacgtggccgccgccggggccctgcgcgcttccatcgcaaacgtgttcatcccgggtgagccgacgtggcgcgacgccgccgacggcgacgaagccgccgcggttggcctagcgcttcgactccacaagggcacgagcccggtcacgtacgatctcgtcatgacggcgctcgccgcctgcgccgccgaggatggcgcggccgcgtgccttgccatggcgcacatgctgcgcggattcccgggtgccgggcgggcagaggcgcgaatcgcaacgagctggctcgtgcgcagcttcatgaagaccacgtcctccgaagaagagacggggagcggtcgatga

SEQ ID NO: 6829 - DNA, 759 bp, BradyrhizobiumColbertium
atgatcgcgcaaatcatgtccgacctgcacctcggccccggttcggaagctcccccgccgctcgtcgacggcgtcgagctcgtcgtggttgccggcgacacctgcgaagggctggtcaaagccgtcgagtcgctccgagccgcataccccgacgtggacatcgcgatggtggcgggaaatcacgagttttacggccgtgtcttcaaagaggagctcgaagccgggcggaagcgtgcccaagagctcggagtgcatctgctggaaaacgacaccgcgactttcggtcgtctccgcatcgtcggtgcgacgctctggaccgactaccggttgttcggtccggacctgcagcaggcggcgatgcgcgccgcctacgatcagatgcgcgaccacaaaaggatccgctggaaccgcgagccgtggcaacgattccgcccgcaggaagcgctgtccttgcacgcgcgcacgcggaatttcttagaggccgaattggcgcgacgtcatgatggtccgacgatgctgctcgcccaccatggaacgacttgggaggccctcgatccgatcaacgagcgctccctcctcgcggccgcgtacgtttccgacctccggttgacagcgagcgccgatttcgtcgtcaccgggcacactcaccggcccatgaattttcggcgagagcgtacgcacttcatctccaatccgcgcggctaccgcgacgaaggcgtgcggttcgacccttctctcgttatcgagatcctgccgtga

SEQ ID NO: 6830 - DNA, 2340 bp, BradyrhizobiumColbertium
gtgacccagccgatctacacagctctcgagagctttcccgatcatccaccttccggaagccgagcttctggcgatcgtcgccagcgcgccgtcgaggccgacgacgtaccgacgtccgccatgggcgccctggaactggagacctaccggaagtgctggctcgcctcgtcccgcttccgccgccacaacacggaagtcgccgccgaacgcgaacgtgagcgcgcgatcggcttggcagaaaaggaagcccgcgccgcgatcgagaaggcgatgcgaacaggcaagggtttcccgcgctctgcgtcgaggagcgggcattcgtcatcgtctcgaagctcgatcgaggacgtcgacgacgatcaggacgagtccctgcggcgaatctccgacgccgagcgctatcctcccaacgggggcttggtagcggcgcgtctcttgttctcccggatattcgaccgccggcccgcgctgcttgatgcgctacgcagcggcgctcccgccatcctcatcgacgtcggcgacgccctgatgctcgatcgcgtcgcaatggtctggcggagcatcctcttcgaaagcacgacacggttcatggatctcgctcgggaccccgtgaagcgtcgcgaggatctggatgccttgtacctggtcgtcaaagagcctccgaaaagcacatccaaaatctccctcgacacgacggcgctgtcgatgctggcgttcgcgctcccgctcatcgcaatctcgcccctggcccggtcgcatcttcccgaagccgtgaacgcggcggccaccgatcgcatcgactttcctccgctggatgcaacaacgatcgtgcgaacgatccgcatcgtcacgggcaagacttgcccgcaagcgatcgcggatggaaccttgacccatacgtccatcgccgacctcgatatcgcggtgcgcttcgaccgcactccgcaggaatgcctggcagaacttcgtcgcctgaacgtggcgaagatcgcgaagaagaaatcgcgcgaactgacgctttcccaactgcacggcctcggcgaagcacgcgaatgggcggaagaggccatctcggatatcgaggcctggaaacgcggcgaaatttcctggagcgccgttccgtccggcgtggcgctcaacggacccgccggctgcggtaaaaccaccttcgccgccgtttttgcggcgtccgccggactgaacttcgtcagtgccactttggccaagtggcagtccagcggcgaggcgcatctcggtcatctcttgcgcgcgatgcgtcaggatttcgaagccgctcgtgcgcgggccccctcgtgcctcttcatcgacgagatcgacagcttcccggaccgggccggggtcacccattcgcatcgcgactatgtcatcgaggtcgtaaatgcgctccttgcggagatcgacggaatcgccggtcgagagggcgtcgtgatcatgggcgcgagcaacgacatcggacgttgcgatccggctctcctgcgcgcgggtcgcctggagcgaatcgtccagatcggtcttccggatatccccgaattggaaaagatgttccgggtacgtctgggcgcggatctcgtcgacgaggatattttgcccatcgccgaactcgccgccgggatgacgggagccgacgtcgagcgtgtggtcaaggacgcgcgccgcgcagcgcgcagggatggtggtcgctcgcttgttttcgacgatctgcagaaggcgttggtcgaagacgacgaccggccccatgagctgcgttggcgcacctgtgtccacgaagcagcgcacatcctggtcgacgtcatccatttcggtcctcagaacgtgttcgccagggtcgccaagatgcaagggcgcttcggcatgtccgcgcgccgcaacaacggctattcgagcggcacgactgaggagtatcggaagcggctcgaggtaattcttgccggacgcaccgctgagcagttgatctgcggttcggcctcgcacggtgccggcggagtgcccggctcggacctggacagcgccaccggcctcgcatgcgcgatggtgggaagctttggcttggccggcccgaccccactcacctatctaggaccggcacgcgatgccggcacgttcctcgccttcgccgaaatccggacagcggtgaaccacgaactatccgaggcggctcgttcgtgtgccctcctattgaaggagaatcgttccgtgctcgaggcgatcgcccggcgattggcggcacacgggcgcatcgatggtgctcaggtcgcgacgttgctcgccgaggcacgccgcgacggccttccctcagggcggggcggcgcggagccgtga

SEQ ID NO: 6831 - DNA, 918 bp, BradyrhizobiumColbertium
atgacggtagctgccgctcgaatccccgcggacgcggccgatcccgaacgcttggccgaactcctggagtcgaccggcgattatcgcgttctgcgtcgaatgcggccgccctcgtttccagccccgaacggctgccctacgaagcgcgcgatcttcgtcgacgtcgagacgaccggtctcgacaaggtgaaggattcggtcatcgagctcgccatgctgccgttcgattatactatcgacgggaccatcgtgggcgtcggggagccattcagctccctgcaggatccggggtttccccttccggcggagattacggcccttaccggaatcacggacgaaatggtgcacggcgccagtatcgatccgagcgaggtgactgccttcgcaaaccaggcggtcctggccatttcccacaatgcaggcttcgatcgcccgttttgcgaacgcgaatggcccgtgtttgcggcgaagccatgggcctgttcgcttcacgaggtcgattggtccgcggaaggcttctcaggcaagaagctgtcccaaatcgcgaccggctatggatttttcttcgacgcccaccgcgccctcgacgattgtcgcgccggtgtcgatatcctggctcggcgtctccctcggagcggtcgaacagggctggccgccttgctggaatcagcgcgtgcagcccgatggcgagtgtgggcggagggcgcgccgtatacgtctcgcgacattctgaaagcgcgccgctaccgctggagttcgggcgacgacggtggccgtcgagcgtggtatctggaagtcggggaagacacgcttgaaggggaactagagtacctccgtcgcgaaatctatggccgtgaggccgtggagatcgctcgccaccggtttactgcctttgaccggtattcgatccgcgggtga

SEQ ID NO: 6832 - DNA, 300 bp, BradyrhizobiumColbertium
atggagagcgccgacgtggtgctcatgaagagcgacccctatgacattgttggcgccatcgagctctcccgcgccaccctgcgtaagatgcaccagaacctgctctgggcggtggcctacaacgtggtggcgtttcccatggcggccggcgtcctctatcccttggtcatcagccccgaggtcgctgcgctcgctatgtcgggcagctcggcattggtggcgatcaatgccctgctcctgaaacgggcgcggctcgaaggcattcacagaccacatcctcaggccgttgttaagggatga

SEQ ID NO: 6833 - DNA, 207 bp, BradyrhizobiumColbertium
atgggccccggtgcggcttcggtcaccatcctgaccgaggcgatggaaagccctgatcgcagcattaggatgccggcaatggaaatgcccttccacgtcacgaaccgtcgcatgctgaaagggttgcgaccgggagatttagtggaatttgaggccgcccggctgaagaatgctctgatggtcacgaacatccgcaaagcgcgctag

SEQ ID NO: 6834 - DNA, 1437 bp, BradyrhizobiumColbertium
atgaagcgctttgttgaaggattggatcgcgggcagagcacactgtttccggcatcgctcgacgactatgtgactgaggacaacccggtgcgagcggtcgacgtgttcgtcgacggtctcgatctcgacaagctcgggtttgtcggtgtccagccgctcgacaccggccgacctagctatcaccccggtacgatgctcaagctctacatctacggctatcttaatcgggttccgtcgagccgacgcctggagcgggaatgccaacgcagtatcgagatgatctggctgactgggcagttggcgccggacttcaagaccatcgcagatttccgcaaagacaatggcaaggccattcgtgaggtctgccgcgagttcgtcgcgctgtgccgcaagcttgatctgcttgttgcagcgagcgtcgccatcgatggatcgaagttcaaggccgtcaatgcgagggacaagaacttcactgaggcaaagatgaagcgccgtctggagcgaatcgacgagagcatcgcccgttatctctcgcagctcgagaccgccgatcggcacggcgatgcagtgccagaggcgaaagttgcgaggttgaaaggcaagatcgagaagctcaaggaggagatcgttcggctaaacgcgatcaatgcggagatgatgaagagtgaggacaagcagatctcgctgaccgatcctgacgcgcgctcgatggcgacaagtggaaaggacaccgggatcgttggctataacgtgcagattgcagttgatacgcagcatcatctcatcgtggctcacgaggtgaccaacgtgggcaccgatcgccaccaactcgccaatatggccgggcaggctcgcgacgagatggctgtcgagacgctcgaagtcgtggcagaccgcggctattacgatggagaggagatcagggcctgcgaggaagccgacatcacggtgacgttgccgaagccgatgacttcgggcgctaaagctgctggccgcttcggcaaacagaacttcgtctatgtcgccgccgacgatgtttatcgctgtcccgccggcgagcggctaacttatcactatacgaacgtagaggacggaaagacactgcgccgctattggacaagcacctgcaaaacctgcgcgctaaaagcgcagtgcacgacaggccccgagcgccgcatcacacgctgggagcacgagaccgttctggagaaagttcaggatcggctcgaccacaaccccaatgccatgggtgtccgccgtcagacagcggagcatccgttcggcacgatgaagtgttggatgggagcaacacactttctcacgaaaaagctgccaaaggtggccaccgagatggcgctcaccgtgctcgcctacaacatgaagcgcgtgatgatgatcgtcggcgtaggcggattgctggaggcgatgcaggcgtga

SEQ ID NO: 6835 - DNA, 546 bp, BradyrhizobiumColbertium
atgcgtcccggccaaccggcccgaagaagccatgactacacaaggcacggcaccacatcgctgttcgccgccctcgacattgcgagcggacgggtcatcggcaagtgctacggacgccatcgcgctgccgagttccgcaagttcctcgacgagatcgaggctgccgtgccgcgtgaactcgacgtccatctcgtcatggacaattacgccacgcacaagacccccttgatccgaaaatggctggtcaaacggccgcgttggcacgtgcacctgaccccgaccagttcgtcatggctcaaccaggtcgagcgcttcttcgcgctcctgaccgataagaagatcaggcgcggcatctatcgcagcgtcgccgctctcagggctgacatcacttcgttcatcgaccgacacaacgccgatccaaaaccgttccgatggaccaagtccgccgtgacatccttgcttccatcgaacgcttctgccgatacaatgccccggcaaaacaccacccgatgccgcgaacttctggttcaggcccaggccgtgtga

SEQ ID NO: 6836 - DNA, 120 bp, BradyrhizobiumColbertium
gtgttcggtgatcccacctatgccgacgccgtgctcgatcgcctcgtccacaatgcccatcggctcgaccttactggcgagagcctgcgccgaacccggcaatccgcccgaaagacctga

SEQ ID NO: 6837 - DNA, 786 bp, BradyrhizobiumColbertium
atgaaccgtatccctcacgtcgcaagcatcgcactaatcgtattgtccggcgcagcaatcagcgcgcccgctggggctcaaacggctccatcatacacggaagctgcgccatggtacctgcgcagtccctccggcataaacttccccgatcagcagcctttcagcgccctgcgtttcgacaagctcgaatggggcggtccaaacacgggcgctagtgcccgctgggacatggaggcgttcgtcggcaccgattacgacaagctgttcttcaagtccgagggtttttacaacggtaaagccaggaacctcgaggagggccagtttcaggtcctctattcgcgcctcttgacctactacttcgatgcccagttcggtgttcggcaggacttttccaaaaaatcgagccggacctacgccgtcatcggcgtggagggcctcgcacctggcttcattgaaatcgatgcggacgcctacatcagtcaaaagggcgaggtttccgcttcgatcaccgccttccatgatctcttgatcaccaaccggctgatcctgcagccgcgtatcgatgtcaagctgcaggcgcagccggtagcggacctggaattaggcgctggaattaccgatttcgagctgggggcacgcttgcgctacgagttcacgcgcaacgttgcgccctatatcggcgtcaattgggatcgcaaggtcggccagacggcgacaattgccagaaacaacggcgaagcggtatccaacgtgtcgttcgtcgccggcgtacggctgttctggtag

SEQ ID NO: 6838 - DNA, 1173 bp, BradyrhizobiumColbertium
ttgaacatcccgagcatcgacttcgatctgggcgaagacatcagcctgctgcgcgacacgctccgcgccttcgtcgaggcggagatcaccccgcgcgccgccgagatcgagaaagcaaacctgttccccgcggacctctggaagcgcttcggcgaccttgggctgctcggcatgaccgcgccggaccaatatggcggctccaacatgggctatctcgcccacatcgtcgccatggaggagatttcgcgcggctcggcggcggtggggctgtcctacggcgcccattcaaatctttgcgtcaaccagatccgccgcaacggcaacgatgcgcaacggcagcgttatctgcccaagctgatctcaggcgaatatgtcggcgcgctcgcgatgtccgagcccggggccggctccgacgtggtctccatgaaactgcgcgccgacaagcgcggcgaccgttatgtgctcaacggctccaagatgtggatcaccaacggcggcgacgccgacgtgctcgtggtctacgccaagaccgatccggaggccggcccgcgcggcatgacggcgttcctgatcgagaagggcttcaagggcttcatccacggccagcatctcgacaagctcggcatgcgcggctccaacacctatccgctgttcttcgacgaatgcgaggtgccggaggagaacgtgctcggcaaggtgggcgagggtgtcaaggtgctgatgtccggcctcgactatgagcgcgcggtgctctcaggcggccccctcgggatcatggcggcctgcatggacgcggtggttccctacatgcacgagcgcaagcagttcggccagccgatcggcgacttccagctgatgcagggcaagctcgccgacatgtattcgacctggcaagccacgcgcgcctatgtctatgcggttgggcgcgcttgcgatcgcgccgaccatgcgcgtaccttgcgcaaggatgcggcggccgcaatcctctattccgcggagaaggcgacatggatggccggcgaggcgattcaggcgctcggcggcgtcggctacaccaacgaattccctgtggggcgtctgtggcgggacgccaagctctacgagatcggcgccggcacctcggaggtccgccgcatgctgatcggccgcgagctgatggccgagacggcctaa

SEQ ID NO: 6839 - DNA, 1359 bp, BradyrhizobiumColbertium
atgccgctccattccagcatcgatccgtcttcatcagactttgcgcgcaattccgaggccatgcgcgcgctcgtcgccgacttgcgcgagaagctcagccaggtcgccggcggcggcggcgaggtctcgcgcaaccgccacaccgcgcgtggcaagatgctggcgcgccagcgcgtcgatctgctggtcgacccgggaacgtcgttcctggagctgtcgccgctcgcggcctatggcctttatggtggcgatgtgcattcggcgagcgtcgtcaccggggtggggcgcattgcgggccgcgaatgcgtgatcgtcgccaacgacgccaccatcaagggcggcacttattatccgatgaccgtgaagaaacatctgcgcgcgcaggacgtcgcgcggcagaacaatcttccttgcgtctacatggtcgattccggcggcgccttcctgccgctgcaggacgagatctttcccgacgagcggcatttcggtcgcatcttctacaaccaggcgcagatgtcatcgcaaggcattccgcagatcgcgatcgtgatgggctcctgcaccgcgggcggcgcctatgtgccggcgatgtcggatgagagcatcatcgtccgcaatcaaggcaccatcttccttggcgggccgccgctggtgaaggctgcgaccggcgaggtcgtcagcgcggaggagcttggcggcgccgacgtgcattcgcgccagtccggggtgaccgaccactatgcccagaacgatgcccatgcgatcggcattgcgcggcgcatcgtcggcacgctgaagccacccgcgcggccgaacctcaacatgcatccgccccgcgagccgctgtttgcggcggaggaaatctatggcgtggtgccggtcgacggccgcaagccgttcgacgtgcgcgacatcatcgcgcgtgtggtcgatggctccgagttcgacgagttcaagaagctctatggcacgaccctggtgtgcggcttcgcccacatctggggttatccggtcggcatcatcgccaacaacggcatcctgttcagcgagagctcgctgaagggggcgcatttcatcgagctgtgctgccagcgtggcattccgctggtcttcttgcagaacatcaccggcttcatggtgggcaagaagtatgaggccggcggcatcgcccgcgacggcgccaagctggtgacggcggtcgcgacggcctcggtgcccaaattcacggtggtgatcggcggctcctacggcgcgggcaattacggcatgtgcggccgcgcctactcgccgcgcttcctctggatgtggccgaacgcgcgcatctctgtcatgggcggcgagcaggcctcgatgggctga

SEQ ID NO: 6840 - DNA, 150 bp, BradyrhizobiumColbertium
ttgagctgtccatcgcatcacatcctgaacaggccgaacttcgtcggctcgatcggcgcattcgacgccgccgagaggccgaggccgagcacgaggcgcgtgtcggccggatcgatcacgccgtcgtcccacagccgcgcggtcgcataa

SEQ ID NO: 6841 - DNA, 2004 bp, BradyrhizobiumColbertium
atggacagctcaaagctctaccggcgttttcgcacgctcctgatcgccaaccggggcgagatcgcctgccgcgtcatccgcacggcgcgcgccatgggcctgcgcacggtcgcggtctattcggaggccgaccgcgacgcgatgcatgtcgcgctcgcggacgaggccgtgctgctcgggccggcacgcgcccgcgacagctatctcaacatcgatcggctgatcgaggccgcccgcaagaccggcgccgaggccgtgcatcccggctacggattcctctcggaaaatgccgggttcgcgcaggcctgccttgacgccgggctggtgttcgtcggcccgaccgccgggatgatgaatgcgatgggctcgaagtccggctcgaaagagctgatggagaaggccggcgtgccgctggtgcccggctatcacggcgaggcccaggacgaggcgacgcttgcgaaggccgcggacaggatcggcttccccatcctggtgaaagcctccgccggcggcggcggccggggcatgcgcatcgtccggtcggccgatgagcttgggcctgcggtcgtcagtgccaagcgcgaggccaaggccgcgttcggcgacgaccgcatgttgatcgagaaatatgtcgacaatccccggcacatcgaagtgcaggtcatcggcgatagccacggaaatctgctctcgctgttcgagcgcgaatgcacgttgcagcgccggcaccagaaggtgatcgaggaggcgccgtcaccgacgctgaacgccgcccagcgcgagaccgtctgcgccgccgcacgcaaggcagcgggtgccgtcaactatgtcggcgccggcacgatcgagttcgtctccgacggcaaggacgtgttcttcatcgagatgaacacgcgcctccaggtcgagcatcccgtgaccgagctgatcacgggcatcgacctcgtcgaatggcagcttcgcgtcgccttcggcgaggcgctgccgctcaggcaggacgagatcaggctcaacggccatgcggtggaggcgcgcgtctacgccgagaatccgaccaagaacttcatgccgtcggtcggcaggatatcgacctggcggctgccggcggaagccgggggcttgcgcatcgatgccggctatcgcgaaggtgatagcgtctcgccgtattacgacgccatgctggccaagatgatcgcctgggcgccgacgcgggacgtcgcgatcgagcggctcaatcgcgggctggaagagtccgacgtccgcggcatcgtaacgaacatcccgttcctgtcggcgctgatgacgcatcccaaggtgcgcatgaatgcgatcgacaccggcttcatcgagcgtgagctggcggttctcacacaggccgcgccggtacccggcgagctcgagctttgcgccgcggtggcggcgatcctcaaggacgagcagcaggcggcccgtgcgcaggcaaattcgccatggcagaccttcggctggcagccggtcggccgccgccagcgcagctttgccttccgcgtcggtcacggaccggagcagaagatcgtgctgaactacggcagcggaccgtcgacgctgctgatcggcgagcgcgagctggctttcgcgattgcgccgcgtgacggcggcttcgatctgacgctggacggcgtcaaatcgtccgtcgcggccgtgatcgacggccatgagctctacttgcgcacgcgcaacggccgcttcgatttgcactgggtcgatccgttcggcggcgaaaccgaggagcagacgggcgaggacaagatcgccgcgccgttgccgggaacggtcgtcgcggtgctggccgaggagggcgccaagctcgacaagggcgctccgatcctgaccctggaagtgatgaagatggagcagacgctgcgcgcgccctttgccggcgtgctgaagtcggtcaagtgcaaggtcggcgacatcgtccaggagggtgtcgaactcgccgtcgtcgagccgtccggggagtga

SEQ ID NO: 6842 - DNA, 912 bp, BradyrhizobiumColbertium
atgagcgaccgagtccgcatcatcgaaatgggcccccgcgacggcctccagaacgagaagactcccgtcagcgtcgaggcgcgcatcgccttcatcgaggcgctggttgaggccggcctcgatacggtcgaggtcggcgccttcgtctcgcccaaggcgatcccgcagatggcaagctcggacgccgtgctgcgcggcgtcagccacgtcaaggacgccgaatttcacgtgctggtgccgaacgagaagggctatgacgccgcgcgcgccgcgggcgccagggtcgtctccgtgtttgcagcggcctcggaaggcttttcgcgagcgaacatcaactgcacgattgcggagtcgatcgagcggttcaagccggtgctggcgcgtgccaaggccgacggcgtgccggtgcgcggctatgtctcctgcgtgctcggctgcccgttcgacggcgagatcaagccgaaggcggtcgcagaccttgcgagtacgctgttcgaactcggctgctacgagatctctctcggcgacactatcggcgtcggcacgcccaccagggccaaggagatgctgcgcgcggtggcggccaacattccgccggccagactcgcgatgcatttccacgacacctacggccaggcgctcgccaacctctatgccgggatggaggagggcgtgagcgtcatcgacgccgccgccggcggccttggcggctgcccctacgcgccaggtgccacgggcaacgtcgcgactgaagacgtcgtctacatgctcgaaggcatgggcatcaggacgggcatcgacatggaaaagctgctcgcggccacgaacgcgatgagtggcctcctgggcaagccgcccgtcagccgcgtggcgtcggcgctgaacgcgaagaagaagcgggccgcctcatag

SEQ ID NO: 6843 - DNA, 246 bp, BradyrhizobiumColbertium
atgaccattcgcacccgcatcgtgctcggcgtctcggctgccgctctctcgctcggcctcgcgtttgccccggccgcctttgcccaagacaagatgggcaaggatgacggcatgatgaaaaaggacacgatgtccaaggacggcatgatgaagaaggacacaatgtccaaggaaggcggcatgaagaaggaccacatgtccaaggacggcatgaagaaggaagacgggatgatgaagaagaactga

SEQ ID NO: 6844 - DNA, 348 bp, BradyrhizobiumColbertium
atgagtggattcagggaaccaggtttcgcagaccggcaaaaagcggcgcaagaggcgcgcaagaatcttttgaacaagttcaagtcgcagccgggtcccgatgatcccgcggtggcggcgaagcgtgccgaacgcgaggctctcgcggccaagcgcgccgaggcgaaggctgcgcgcgaggccgaaaaggcggagcagaagcgacgcgaggaagaggccaaggccgccgaggccgcgcggatcgcgcgcgaggctgaggaggccgaagctcagcgcgctgcgctggaagccgagcagaaggccaagcgcgacgcgcgctatgccgcccgcaaggccaagcgcaagtaa

SEQ ID NO: 6845 - DNA, 237 bp, BradyrhizobiumColbertium
atgacgttctccagacccaacctgaaggcgctctcaatcgccttcgtcctggcaagcctgaccggcgccgcggtgctgctagcccgtccgcagcccattgaaagtgccgtacttggggcggattgggaatgcacccagaccgctttcgtgctcacgagctgcgcaccgcgggatctgcaggcgatcccggcggtcgagacctcgggtaaggaagctattccgtcccggcgcggctga

SEQ ID NO: 6846 - DNA, 231 bp, BradyrhizobiumColbertium
ttgcgcgatcaggtggccatgtccaagcccgaactgggccagaagcccaaaccagctggaagacctcgacccgtcggcaatcggcgcggcgccattgccggcttgatcattacgcttgtcatcctcgccgtcggctggtggcttgctcgccacctcacctcggcaagcaagatgcaggactgcctgatgtcgggccgcaccaattgtaatgtgattgaaccggcccgctag

SEQ ID NO: 6847 - DNA, 771 bp, BradyrhizobiumColbertium
atgagtgcgtccaaacgcatcaagatcatcattcccgtggcttcggccatgtcgttcctcgcgctttcggcgcaggctcaggactcaaggccgagggatgccggcccggcagcggcccgccccagcgctggtgcgccggccccgaccgatcagaacatgcgtaaaggccttccgccgcagcagcaggcggtccggccggcgcagcgccctgccgatcggccccatgcgggtcctggtgcgcaccatgccggggggccgccgccgggacggcacgtcgcccgcggtcctgcgccggagcgccattggggcggtcacatctatcgcggcaaccgcgcctgggatgggggacggtggcggcacgaagtccgcaacggacggtccggctggtggtgggacgtcggcggcgtctggtattattatccgcagcgcatggcgggcccgcccgcttacatctccgaggattacatcgacgacgtgccggtggcctacgccccacctccggtcgcctatgcgccgccgcctccgcctcctgcaccggcggatcccggtgccagcgcgctcggcggggcgctcgtcggcggcttgctgggcggcctgatctcgggcaatgcaacgggggctgccgcaggcgcggttctcggcggcgcgacgggcgcgattgcgggggccaccgctgcatcccagcccggctattactgggcgcagggcacctgctactaccgttatccgaatggccagtatgtgcaggccgatcctcgcgcgtgctattga

SEQ ID NO: 6848 - DNA, 234 bp, BradyrhizobiumColbertium
gtgcccggctggatgagagaggccggttcgctcgccacgcggatcgcgggcgagctggtgccatgccagggccagctggatgagccgttgcctgtccgcaccttcggcctccgcagcgcgcttcattgcgagctcggcttcatgctgcggatcgtactcggtgcacatgaggcagaccctaaccgaccatctggacaagcgcgtggcaatttcgtccgtatgattgcggggtaa

SEQ ID NO: 6849 - DNA, 213 bp, BradyrhizobiumColbertium
atgaccgatcccgagctacgagcacagtctttcgagatcgcctggcgatatctcgaccagtccggcctgctcacgggtgagcacaaggattccgcccgtttcatcttgagccggatcgaccgcatgatgcagcgcggagagcggcgcagattgctgctctcgaatgccgcgatcgacgcctatcggctgcggcccgcgctcgtgactgcctga

SEQ ID NO: 6850 - DNA, 228 bp, BradyrhizobiumColbertium
atgtctgaaatcagagagcacatgaagatcatcggcaaggacggcgcacatgtcggcaccgtcgatcgcgtcgagggcaaccgcatcaagctgacgcgcaaggacagcccggaaggtcacaaggaccatcatcactacatcgacacgaaatatgtaggagccgtcgagggcgacgtcgtgaagctgtcgatgaatgccgacgcggtaccgaagacggaagccgcatga

SEQ ID NO: 6851 - DNA, 1302 bp, BradyrhizobiumColbertium
ttgacgcctgatcagatctgtcagaagcgcatggagaccattcaagcctatctgcaacgaaagcatgaggaactcaggctgttgaatggctgcctgagaaaccggattgacttagtgcgtccgcaatccgtcgatgacgtggtcgggtccaagttccggatcactgcggcgctgagggcggagcacgaactgcatgagtggaaggcgacggagacggcctggtcgcacaccgccaatcccgccagcggaccgttcgagttcggctacgattatcagcgggccgatcttacggtacgcgggccgccgttctatgaagtcgactgcgcctccacgagcaccgcaatctataccgcctcgggtatggccgcgatctctgccgcgctgctcgcctccgcgcagatcgcgccgaaggccgatatcctggtgctgccgggctcctatggcgagacgctggaactgatccggagctacgtcgctcatttgcggctcgaggctttgaagctgccgctgggcgatgcgtttgcccgggcgggccggccgcgcatcttgctgctggattcctgctccttggccggcgctttcgaggcggcgctgcgctgcgacggctctggcctcgacctcctggtgttcgatacgacatgcttcgccggccggtcaggccggatcaggcgggtcctgagctgggcccggcgacacggcattccgctggtgctggtgcgcagccacaacaagctcgactcgctcggagcggagtatggccggcttggctcggccgtcttcgtgcatgaaaatgagcgtcagcagcgggcaggggggctcgaatgggcgcgtctcgcgtccgaaacgcgaaacgcggtgcggctgctcgggggcgcggcgctgccggcccacttcccgccctttgcgggcagcgccgcgtactgggctctcacgaaaaggcgcgttgcggcgatcttgcgcaacggccgaagcaccgctcggtattttgccgcaaagctcccggcgctctcggccgaactgcatttcgcccacggcctgtacgtgaccctccggggaaggcgcccgctcgacgaggcggcagcgcgccaggctgccgaagacatgagcagcgaactgcggcgtgagggctttcccatccgccacgccggcagcttcggctttgatttcgccgcgacggagtggtttcacgacgcgaccacggaccagtatagcgtccgggtggcggtcccggatcttccgaccgagctttggaatgatctggccgccgcaatcgcgcgatggtggctggcacatcaggcgtga

SEQ ID NO: 6852 - DNA, 219 bp, BradyrhizobiumColbertium
atggcgatcgcatctgcggtggcgatcgtcgcgatgtcatacttggcgatcgacgcaggcgtcgtgaatacgaacgttgtcaagaagcctatcgaagtggcgcaggcatcgatcgtcggcgccgcgatgggtcagcatcaccttgccttcgccgttcaggagtgggcgcgtggcggccaagagaagccggccttggagcagtgcctggcgaccgattga

SEQ ID NO: 6853 - DNA, 74 bp, BradyrhizobiumColbertium
ggtcccgtagctcaactggatagagtagcggatttctactccgcgggttgcaggttcgagtcctgccgggatcg

SEQ ID NO: 6854 - DNA, 5205 bp, BradyrhizobiumColbertium
atgatcgctttgcttcgcgccgtcacactctgcgccacgctggcgttcggcctaagcgccgcgcaagccgcggacaaggcgttcaagcgcgacgatctcgctgattccgcgatcaagctggaggcgcagatcaagagcgaggcggggccggtcgccaagaccagcgcgacgctcaagacggacgccgacgccgcgttccggcgcaatgattaccgcaccggcctctcggtgctcggccagatcgccgccaccacgcctgaagatgccggcaattggctgcgcctcgccaaggtcatcttccagatcacccccaagagctcgagcgagcagacgttcctcctggagcgggcctcgactgcggcctacatcgcctatcagcgtgcaggaaatccgggcgtggaggccgacgcactcgccgtgctcggcaagtcgttcgccgagcgcaagctgtggcggccggccctggacgcattgcggctatcgctggacatgcgcgaggtcgccgacgtccgcggccagtacgagaagatgcgggacgagcacggcttccggctgctcgactataccgtagactcggattcggcgagcccgcgcgcctgcttccagttctcggaggagctcgccaagcgcaccgatttcgcaccgttcctggcgctggcgggccaggacaagccggcgttgtcggccgagggcaagcagctctgcgtcgacgggttgaagcacggcgagcggtacaacgtcaatctgcgtgccggcctgccgtccacggtgaaggagggcctgccgaaatcggccgagttcaacatctatgtgcgcgaccgcaagcccttcgtgcgcttcaccagccgcgcctatgtgctgccgcggagcggccagcgcggcattcccgtcgtcagcgtcaatacgcccgccgtcaacatcaacgtcttccggatcggcgaccgcaacctgatcaacacggtggtcgacagcgatttccagaagaccctgtccaaataccagctcagcgatctcggcgacgagcgcggcgtcaaggtctggtccggcgagctcgcaaccgcgatgacgctgaaccaggacgtcaccacggcattcccggtcgacgaggcgattggcgagcttcagcccggcgtctacgtgatgacagccgccgccaagggcccgggctcggacgacgactaccagatcgccacgcaatggttcatcgtctccgatctcggcgtctccgcctattccggcaatgacggcatccacgtcttcgtcaactcgctggcttcgaccgatccggttggcaaggccgaggtgcggctggtcgcgcgcaacaacgagatcttggcgacgcgcaagaccgacgagtccggtcacgtgttgttcgaggccggccttgcgcgaggcgagggcgggctgtcgccagcgctgctgaccgtcaccggcgagaaggccgactacgccttcctcagcctgaagagctcggccttcgacctgtccgaccgcggcgtctcggggcgcaccgtcccggcgggtgccgatgccttcgtctatgccgagcgcggcgtctaccgttccagcgagaccgtctatctgaccgcgctgttgcgcgacgggcagggcaatgccgtcaccgggggaccgatgacgctggtgatcgagcgtcctgacggcgtcgaattccgccgtgccgtgctggcagaccaaggcgccggcggccgcacgctggccgtgccgctcaactcggctgtcccgaccggcacctggcgggtgcgcgccttcaccgacccgaagggatcgtcggtcggggaaaccaccttcatggtcgaggactacgtccccgatcggatcgaattcgacctgtccgccaaggacaagcttatcaaagctaacgttccagtggagctgaaggcggacggccatttcctctacggcgcaccggcctcaggccttgcgcttgaaggcgacatgctggtcgcgcctgcgagcgagcggccgggctttgccggctaccagttcggcgtcgacgacgaggagaccacctcgaacgagcgcacgccgctggagaacctgcccgaagctgacgccaacggcgtcgcgaccttcccggtgacgctggacagtcagccggcatcgacccggccgcaggaggcgcagatcttcgttcgcatggtcgagaccggcgggcgcgccgtcgagcgcaagctcgtgctgccggtcgcgccggccgctgcgcagatcggcgtcaagccgctgtttggcgagaagaacgtcgccgagggcgacaaggccgagttcgacgtcgtgttcgtctcgccggagggcaagcagctcgctcgcgacggtctgcggtacgagctcctgaagatcgagtcgcgctaccaatggtatcgccagaacaattactgggagtacgagccggtcaaatcgacctcgcgcgtcgccgacggcgatgtcgcaatcgcggccgacaggccgacgcggatctcgctcagcccgcagcccggccgttatcggctcgatgtgaaatcgaacgaggccgacggcccggtaaactccgtgcagttcgacgtcggctggtattcggatggaagcgccgacacgcctgacctcctggagacatcgatcgacaagccgcaatacgcctccggcgataccatgacggtgtccgtcaatgtccgtagcgccggcaagctgaccgtcaatgtgctcggcgaccgtctcctgacgactcagaccatcgacgtcaaggaaggcaccgcccaggtgaagctcccggtcggcaaggactggggcacgggggcctatgtggtggcgacgctgcgccgtcccctcgatgcggccgcccagcgcatgccgggccgggcgatcggcctgaaatggttcggcatcgacaagcagacccgcacgctccaggtgaagctgacgccgccggcgctgatccggccgaacgccgcgctgaagatcccggtcaagctcgacgggctcaatccgggcgaggacgccaaggtggtgatcgccgcggtcgatgtaggcatcctcaatctcaccaattacaagccgccggcgcctgatgatttctatctcggccagcgccgcctgaccgcggagatccgcgacctctacgggcaactgatcgacggcatgtcgggcacgcgcggccagatcaaatccggcggcgatgccggtgcgggcgagctccagggttcgccgcccacgcagaagccgctcgcgctctattcgggcatcgtcaccgtcgccgccgatgggaccgccgaagtcagctttgacattcccgagttcgccggcaccgcgcgcgtaatggcagtggcatggaccgcaaccaaggtcggccgcgccaacaccgacgttgtgatccgcgatcccgtggtgctgaccacgaccctgccgcgcttcctgctcaatggcgaccacggcacggtcaacctggagatcgacaacgtcgagggccaggccggcgattacgccatcaacgtgaagacaggcggcccggtgaagatgacgggcaatcccgccacgaccgtcaagcttgccgccaagcagcgcaactccttctcgctcgcgcttgacgcaacggcggcggggcaggcgacgctcgatgtcgacatcaaggggccgaatggccttgccctggcgcgccattatgcgttcgacgtcaagccggcgacccaggtgctcgcgcggcgctcggtccggacgctggccaagggcgagagcctgacgctgacctcggacatgttctccgatctcgtgccgggcaccggcagcgtctcggtttcggcgagcctgtcgaccgcgctcgatgcggcgacgatcctcaaagcgctcgaccgctatccctacggctgctcggagcagatcacgagccgggccatgccgctgctctacgtcaatgacctcgcagccggtgcgcatctggccatggacacggaggtcgaccagcgcatccgcgacgcgatcgagcggctgctggcgcgccagggctcgaacggctcgttcgggctctggtcggcgggcggcgacgatgcctggctggatgcctatgtgacggacttcctgacccgcgcccgcgaaaagggctttgcggtgccggacgtgctgttcaagaacgcgctcgaccgtatccgcaactccgtcgtcaatgccgacgagccggagaaggatggcggccgcgaactcgcctacggcctctacgtgctcgcacggaacggcgcagccccgatcggtgacctccgctatctcgccgacaccaagctgaacaacctcgcgaccccgatcgcgaagtcccagcttgcggcggcgctggcgctggttggcgatcgcaaccgcgccgagcgggtctatggtgccgctctcgacagcctcgcgccgaagccggcgctggagttcggccgcaccgactacggctcgcagcttcgcgacgccgcagcgctggtgtcgctcgccagcgaaggcaacgcgccgaaggcgaccttgacgaaggcggtagtgcgggtcgagaccgcgcgcgggctgacaccctacacctccacgcaggagaatgcttggctcgtgctggcggcgcgcgcgctcgccaaggagaacctttccatggaggtggacggccagccggtgaaaaccgcgctgtaccgcagctacaaggctgcgacactggaaggcaagccgatgaagatcaccaacaccggcgacgcaccggtgcaggcggtggtctcggtgtcgggctcgccggtgacgccggagccggcggcatcgaacggcttcaagatcgagcgcacttacttcacgctcgacggcaagcccgccgacatcagcaaggtcaagcagaaccagcgctttgcggtggtgctgaagatcaccgaggcaaagcccgagtacggccacatcatggtctccgattatctcccggccggtctcgagatcgacaatccgaacctggtgtcgtccggtgacagcggcactttggactggatcgaggatggcgaggagcccgagcataccgagttccgcgatgaccgtttcactgcggcggtcgaccgcgcctcggactccaagtccgtgttcaccgtcgcttatgtcgtgcgcgcggtctcgcccggcaaatacgtcctgccgcaggcctatgtcgaggacatgtacaatccatcgcgttatgggcggaccggcacgggcactgtcgaggtacgcgccgcgaagtga

SEQ ID NO: 6855 - DNA, 2112 bp, BradyrhizobiumColbertium
gtggatggccgggtcaagccgggccatgacgggcggcgagggcggatagcctttcgtctgctgtcagccgctgcgttcacgctcatcctcgccctcgtcggtttcgtcggctgggtctactctctcggtcctctcccgctcgacgaggcccgccgggtctccaccaccattgtcgatcgcaacggcaagctgctgcgcgcctatgccatggccgacgggcgctggcggttgccggtcgatgccaagaccagcgtcgatcccacgtatctgaagctgctgttcgcctacgaggatcagcgcttctacgcccacaacggcctcgacccgcttgcgctcgggcgcgcggcgttgcagctcggaacgcgcggccacatcgtctcgggcggctcgaccatctccatgcagctcgcgcggctgatggagccgcggcgccagcgttcgctctatgccaagctgaggcagatcgtgcgcgcgatcgagctcgagcgaacgttgagcaaagagcagatcctcgatctctatctcgcgctggcgccttacgggggcaaccttgagggcatccgcgccgcgtcgattgcctatctcggcaaggagccgaagcggctgtcgctggccgaggccgccctgctggtggctctgccgcaatcgccggagacgcgccggctcgatcgccatcccgaggctgcccgcatcgcgcgcgaccgtgtgctcgaccgcatggtcggggagcatcaggtcagtgcggaggaggcgaagcaggccaaggccgttcccattccgaagctgcgcaagccgatgccgatcctggcgccgcacgcctcggacgccgcgctgtcgatgatcaaggataagccggtagtcaagctgacgctggatgcgaacctgcaaaaggtgctggagccgctggcgcgcgaccgcgccatcgcgctcgggcccaacatctcggtcggcatcatcgtggtcgacaatgagagcgggaacgtgctcgcccgcgtcggctcggccgattattttgacgaaagccgggcagggcaggtcgacatgacacgtgcgatccgctccccgggctcgacgctcaaacccttcatctacgggctcgccttcgaggacggcttcgtccatcccgacagtctgatcgacgaccgtccggcccgcttcggctcctacgcgccggagaactttgacatgaccttccagggcacggtgcccgtgaagaaggcgctgcaattgtcgctgaacgtgccggccatcgtgctgctcgaccgcgtcggctccagccggctggcgtcgcgactgcgccaggccggcggcaacctggtcctgcccaaggacgaggcgccagggctcgccatgggcctcggcggggtgggcgtcacccttcaggatctcgcccagctgtatgcgggcttcgcccggctcggcaccacgaggcccattcgggagatcatgtctgacaaggacgaccgcgagccgatgcggttgctggatcaggtcgcagcctggcaggtcggcaacgtgctcctgggtacgccgcccccggagaacgccgctcataaccgcatcgcgttcaaaaccggaacgtcctatggctaccgcgatgcctggtcggtcggcttcgatggccgcatgaccatcggcgtctgggtcggccggcccgacggcgccccagttcccggcctgattggccgcgtcgccgcggcgccgatcctgttcgacgctttcgcgcggagcggcaagacgcttgtcccgctgcccaaggcgcccaagggaaccctggttgccagcaacgccaagctgccgctgccgctgaagcggttccgcccagtcggagaattggtgcgcgccggaagcgagcagccgctgcacattcagtttccgctcaacggctcgcggatcgacgtcgaccgatcgggtggtcgggaaagcgcagccatgccggtcaaagtcgccggcggcgtgttgccgatgaccgtcatggttaatggcaccgcgctcggcgagatcgacggtcgccgtcagcggctgatcgatccgcccggtcccggctttgcccggctcaccgtgatcgatgccacgggcgccgcggacacagtcgtcattcgaattcaatga

SEQ ID NO: 6856 - DNA, 1665 bp, BradyrhizobiumColbertium
gtgcgcatgctcgacatcgtcacgaccagccatgcgcgcgccgtcggcttcctggttctgtgcgcgctactgctcttcctgccgggcttcttcaccatcccgccgatcgaccgcgatgaggcgcggttcgcccaggccaccaagcagatggtcgagagcggcgactacgtcgacatccgcttccaggaggacgtccgctacaagaagcccgtcggcatctactggttgcaatcggcgaccgtggaggcggcgtcgctgctcaagctgccgagggcggaattgcgcatctgggtctatcggctgccgtcgctgatgggcgcgatcggcgccgtgctcatgacctattgggccgcgctcggcttcgtcacgcggcgtgccgccgtgcttgccgcactgatgatgtgcgcttccgtgctgctcggcgtcgaagcacggctcgccaagaccgacgccatgctgctgttctgcgtcgtggccgcaatgggcgcgatggcgcgggcctatgtgtcctggcaacgagccgaggacgagacgcatccgccctggagctggcccgcgatcttctggactgcgctcgctgtcggaatcctgatcaagggcccgctgatcctgatgttcgcgggcctgaccatcgttgcgctcgcgattcaggatcgcgatgcttcctggctgtggaagctgcgcccggtgtggggcctgatgtggatgctggtgctggtgctgccctggtttgtcgcgatcttctggcgcgcgggcgacaccttcttcaccacctccgtcggcggcgacatgctgagcaagctgggtgcccaggaatcccacggtgcaccgcccggactctacctcgtgctgttctggatcaccttctggcccggtgcgccgcttgcagcgatggcggctcccgcagtctggcgggcccggcgcgagcccggcgcgcaatttctgctggcctggctgatcccgtcctggatcgtattcgaggcggtgctgaccaagttgccgcattacgtgctgccgctctatccggcgatcgcgatcctgaccgcaggcgcggtggagcagcgcgtgctgtcgcgttcctggctggcgcgcggttcggcctggtggttcgcgatccccgcgggcgcctcgatcatcgcggtcgtgggcgcggtgatcctgacgcggcagccggcattcgtggcctggccgttcttcgccgccgcgctgatctttggcctgttcgcctggtggctctacgacaacaatcgcgccgagcgctctttcctcaacgcgctggtcgccgcgctgatgctggcggtggcggtctacggcatcgtgctgccgtcactgacgccgctgtttccgagcatcgagatcgcgcgcgcgctgcgcaacgtcacctgtgtcgggccgaaagcggctgcggccggttatcacgagcccagcctcgtctttctggtaggcacgcgaaccttgctcactgacggttccggtgccgccgatttcctcgggcagggcagctgccgcttcgcgctgatcgagcagcgctccgagcgtagcttcgtgcagcgcgcggaggcgatcgggctgcgctacaaggtcggcgcccgcatcgagggctacaacttctcgcaaggacgcgcgatctcgatctcgatcttccgctcggaaggcaccgagtag

SEQ ID NO: 6857 - DNA, 846 bp, BradyrhizobiumColbertium
atgcgggccccggccgacagtgcgccgcgcgccggctatcccgcgcaagtgctcgccgtgaccaggcgcgggctggcgcagctcgtgcgctcgccctcgcattcgcgccgggccgaggcagcccgcaagctggcgcggcattcgctgtggcttgccgtggccggctcgatcgcgatcattgcgctcatggtcaccttcgaccagaccgagatccagctgatgccgccccgcgggacacccagcctctggccgatccgtatcctcaccgacttcgggaaggacgagtatctgctctcggtgctgggggctgcgctggtggtcctcgccttcgttgcggcgggactacatgggactcgccgcgcgctgctgctcggcttcggcacgcgcctgcaattcctgtttctgtcggttgccgtctcggcattggtgaccgagatcctgaaatacgtcatcggtcgtggacgtccgttcgtcggcggcacgcccaatccgttcaacttcgttccattcgaagggactggcgcttatgccagcctgccctcggggcatgccgtggccgcattcgccctcgcgtttgccgtgtcgtcgctgtggccgcgcctgcgcgccttcatgttcacttacgcgatcgtgattctcctgacgcgcctcgtgctgcttgcccatcatccgagcgacgtcgttgccggcgccctggtgggcacggccggcgccatggcggtccgctactggttcgcggccagacggctcggttttgcgatccgctctgacggcaccatcgtgccgcttccggggagggtttcgaaccgcctcaaaaaggttgcccgcggggcatctgccacataa

SEQ ID NO: 6858 - DNA, 738 bp, BradyrhizobiumColbertium
ttgtcgacgtcccagccctcggtttccatcgtcgttcccgtgcgcaacgaagccgacaatatcgcgccgctgatcgcggagatcggcgcggcgctcgatggccggtggccgtacgagatcatctacgtcaacgacggctccaccgacgcgacgggcgagcgtctcgccgccatcatgaagcagcggagcaatctgcgtcagcttcgccatgcgcgatcgggcggccaatccgccgccgtgcgcagcggcgtgcgtgcggcgcgcggagagatcgtggcgacgctcgacggcgacggccagaacaacccggccttcctgcccgacctgatcgcggcggtcgagaaaggagcagggcgcgtggggctcgctgccggccaacgcgttggccgcaaggacaccggcttcaagaagttccagtcgcgcgtggcgaacggggtacgcaacgcgatcctgaaggacgggacgcgcgataccggctgtggcctgaaggcgtttcggcgcgacgtgttcctgatgctaccctatttcgacgggctgcatcgcttcctgccggcgctggtccgccgggaaggttacgacatcgcctatgtcgacgtgatcgacaggccgcgccattccggcgtgtcgaactatggcttcttcgaccggctgtggatcggcatcatggatctcgcgggcgtatggtggctgatccgccgcaagaagccgacgccggaagtgaccgaggtgcatgcatga

SEQ ID NO: 6859 - DNA, 339 bp, BradyrhizobiumColbertium
atgatcatccaatacggtcaggcgctcagcaactatctctacgacgtcttcgtcgccaagttcgacttctggctcgcgttcgggctcgtcgcgcaactgttcttcaccgcgcgcttcctggtgcagtggatcgcgagcgaacgcgccggcaacagcgtagtcccgatggcgttctggttctgctcgatgggcggcgggctgatgacgctggtctacggcgtcgtgaagcgcgagcccgtgatcatcctcggacagtcccttgcgaccgtcatctacatcagaaacatcatgctgatctggaagaaccgcggcaccgcctcgaagacactggaccgctga

SEQ ID NO: 6860 - DNA, 1683 bp, BradyrhizobiumColbertium
ttggttctgctcgatctcatgggcggcgttgcgctgctattgtggggcctgcacatggtccacagcgggatcctgcgcgccttcggtcccgacctcagacgcctgctcggcaaggcgctaggcaaccgcgccagcgcgttcgccgccggcctcgggctgaccgcgctgctccagagcagcacggcgacggccctgatcacttcttcgttcgcagccgaggggctcgtcagcctcgccgcggcgctcgccatcatgttgggcgccaatgtcggcaccacgctgatcgtgcaggtgctgtcgttcaacattgcggccgtcgcgccggtgctgttcgtgctcgggctcgtcgccttccgctccggcccgcgatcccggatcaaggacatcggccgcgtctgcatcggcctcggcctgatgctgctctcgctgcacatcctgctcgatacgctggcgccggcggagaacgcgcccggcgtccgcatcgtcatgtcggccatcacaggcgatcccatcctgtgcgtcgtcatcgccgctctcgtcacctgggcggtgcattcgagcgtcgccagcgtgctgctgatcatgtccctcgcctattcgcagttcatctcgcccgaagcggcactggcgctggtgctcggggccaatcttggcagcgccatcaatccagttttcgagggcgccaggcgcgacgacccggcgagttatcgcctgccggtcggcaatctcgtcaaccgcgtggtcgggatcggtctcgtcctgcccttcctgggtgacgtcgccgggcacatgcacgcctggcagcccgatcttgcgaggatgaccgcggccttccacatcgctttcaatgtcggcacggccatcctcttcatcggcctgctcgacaccatgtcgcgcctgctcacccgcctcctgccagatcgcgtccaggaggccgatcccgccggcccgcgctatctcgacgagaccgcgctggaaacgccgtccctggcactcgccgacgccgcccgcgagacgctccgcatgggcgatttcgtcgaggtgatgctgcgcaaggtcatgaccgcgatgatgtccggcgaccgtgcgctggtcgaccaggtctccaagatggacaatctcgtcgatggtctcgacgaggccatcaagctctacgtgaccaagctgatgcggggcagcctcgacgagagcgaagggcgccgcgcgatggagatcatctccttcgccatcaacctcgaacatatcggcgacatcatcgacaagagcctgagcgagctcgccaccaagaagatcaagcggcgcttccagttctcggcggaaggggccgaggaactcgccgcgtttcacaagcgcacgatggactccctgcgcatcgcgttcggcgttttcatgtcgggggacgccaccgaggcgcgcaagttgctggtagagaagacggcgctgcgcaacaccgagcttgccgcggtcgagcggcatctcgatcgccttcgcgagggccgcccggagaccatcgagaccacctcgctgcatctggacgtgctgcgcgacctcaggcgcatccactcgcacatctgctcggtcgcctatcccgtgctcgatgcggccggcgagccttaccgcagagccgaggtggacaccgtcaccctgcccgcatcaggcgcagcgtcggcattgccgcgatga

SEQ ID NO: 6861 - DNA, 1185 bp, BradyrhizobiumColbertium
atggactcctcgcaccctcaagagcagcacgccgagacccggctggtcacctccggccgcgacaccaaggcccaaagggggttcgtcaatccacctgtcttccacggctcgaccgtgctctatccgaccgccgaggacctgcatgcccatcgcggcgagttcacctatggccgccacggttccccgaccaccaaggcgttccaggagacgctgatggcgctggaggggccgcaatgcgccggcgtgggcatcgtgccgtcggggctgtcggcaatctccaccaccctgctctcggtgctgagggccggcgaccacatcctggtcgtcgacaacatctatcggccctcgcgcaatttctgcaacggcatgctggcgcgctacggcgtcgagaccacctatttcgatccgctgatcggcgccggcgtcgacaagctgttcaagccgaacacccgcgcggtgctggtggaggcccccggctcgcaatcgttcgagattcccgacatccgcgccatggccgaggtcgcgcatgcgcgcggcgcgctcgtcatcgacgacaacacctgggcgacgccgctctatcaccgctcgctcgagcagggcgtcgacatcagcatgcaggccgccaccaaatatatcggcggccattccgacatcatgttcggcaccatctcggccaatgccaaggcctggccacagatcaacgagggcatccgcctgctcggtgtctgcgccggtcccgacgacgtgttcctcgcgctgcgcagtctgcgcacgctgtcggtgcggctggcgcagcatcatcgctccggactcgacatggcgcgctggctcgcgggccggcccgaggtcgcgcgcgtgctgcatccgggcctggagaccgatcccggccatgcgatctggaagcgtgacttcaccggtgcatcaggcctgttcagcatcgtgctgaagccggcgccgcagaaggcggtcgacacgatgctcaataccctgaagctgttcggcatgggcttctcgtggggcggattcgagagtcttgcgattcccttcgactgcgacagctatcgcacggcgacgaaatgggcgcccggcggcccgacattgcgcctccacatcgggctcgaaaacactgacgatctgaaggccgatctcgatcgcggcttcgctgccctgaaggcggcaacgtga

SEQ ID NO: 6862 - DNA, 1017 bp, BradyrhizobiumColbertium
atgaaacgcgtaaccctggctctcacccttgctctcgccgcaggcctgtctacccaagccgccgatgcgcaaacgctcaagacggtcaaggaccgcggcatgctctcctgcggcgtcagccagggcttgcccggcttctcctcacccgacgacaagggcaactggaccggcatcgacgtcgacgtctgccgtgccattgcgggcgcgatcttcaatgacccggccaaggtcaagttcgtgccgctgtcggccaaggaccggttcacggcgctgcaatcgggcgagatcgacgtgctctcgcgcaacaccacctggaccatctcgcgcgacacctcgctcggcgccaatttcaccggcgtgacctactatgacgggcagggcttcatggtgaagaagtcgctcaaggtgaattcggcgctcgagctcaacagcgcatcggtctgcgtgcagaccggtaccaccaccgagcagaatctcgccgactacttcaaggcgaacaacatgaaatacgaggtgatcgcgttcgccaccaacgacgaaaccgtcaaggcctatgaagccgggcggtgcgacgtctttaccaccgaccagtcgggcctctacgccaatcgcctcaagctcgccaatcccaacgaccacatggtgctcccggagatcatctcgaaggagccgctcgggccgatggtgcgccacggcgatgaccagtggttcgacatcgtgaagtggaccctgttcgcgatgatcaccgccgaagagctcggcgtgacctcgaagaacgtcgacgagaaggcgaagctggaaaatccggagctgaagcgcgtgctcggcagcgacggcaatttcggggaacaactcggcctgaccaaggactgggtggtgcggatcgtgaagaccgtcggcaattacggcgaagttttcgatcgcaacgtcggcgcaggctcgccactcgccatcaaccgcggcctaaacaatctctggaacaagggcggtcttcagtacgcgccgccgatccgctga

SEQ ID NO: 6863 - DNA, 1206 bp, BradyrhizobiumColbertium
atgagcaccgaggcccgaaagccgccgccccagatcgcgctgaagatccggcgcattctgggcggcagggcaggctggaacggcgttgccgtccagtttgccttcgcggcgatcctcggctggatcggctatgagatcatctccaatgctcgtgccaacctggagaaccagcatatcgccgccggcttcggcttcctcaggaacaatgccggcttcgacgtcaaccagaccctgatctcctattccggatcggacactttcctgcgcgtgttcgtggtcgggcttttgaacacgctggtggtctcggcggtgggtatcgtctttgccaccgtgatcgggttcatcgtcgcgctgtgtcggctgtcgcccaactggctcttgtcgcgcgtcagcgagatctatgtcgaggtcattcgcaacctgccgctattgttccagatcctgttctggtacctcgcggtgctcgcggccctgcccaatccacgacagagcatttcgctgctcggcattgccttcatcagtaatcgcggactcgtcattccgagcgcgatcggcgagcgcggactcgaaccgtttttggcaatgctggccttcggcgtcgttgcgtcactggccctgcacttccatgcgcggcgtgcgctgtttcggcaggggcgggtgatccggatctggccctatgtgctgggtctgctgttcgggttgccgctcgctaccgtcctgatgttcggtctgcctttaaccttcgagctgccgcagctcagggggttcaacttcgccggcggctcgcggatcattcccgaattcgtggcgctgacgctggcgctgtcgacctataccgccgccttcatcgccgagatcgtgcgtgccggcatcctgtccgttcacaaggggcagatggaggcggggtcctcgctcggtctcagccgcggcgccacgctccgcctcatcgtcgtgccgcaggccatgcgcgtcatcgtgccgccgctgaccaaccagtatctcaatctcaccaagaactcgtcgctggcggtcgcgatcggctatcctgacctggtctcggtgttcgccggcacctcgctaagccagaccggacaggcgatcgagatcattgcgatgacgatgggcatgtacctcctgatctcgctgttcaccagcgctgtcatgagcgtctacggttggcgcgtcaatcggggcctcggcgcatga

SEQ ID NO: 6864 - DNA, 1521 bp, BradyrhizobiumColbertium
atgagcgatgtcacttcgctcagcttcgtgcggcgggatctgctcgccgagcgtcccgcgccggtgaagaccaccggcttcatcggcctgatgcgcacgcgcctgttcaactcgccgaccaacatcctactcacggtcgtaggtgccttgctgctctggttcaccatcgttccctcggtcaagttcctgatggtcgatgcggtctggaccggccaggaccgcaccgcgtgtctccccgagaacgcaggctttgtggtcggcgcctgctggccctacatccaggccaagctgccccagctgatctacggcttctatcccgaggccgagcgctggcgcgtcaacgtcacattcctcctttcagccgtccttctcgtgccgctgctcgtcccgcggctgccggcgaagggcatcaacgccagcctcttcttcgtcgcatttccggtggtcgcatttttcctgctgtacggtggcggcatcaagggatttggcttgagctggacggccgggctgcttcagctgttcgacgagagcattatcggcgccgggcaggcgctgctcaatctgagcaagacatccgcaatcggccctctgctgtggagtctcggaagcttgatcatgctggtcggcacggcgatctcctggttgatctttccgctcacctggctgagcgatcatatccaggggacggcgcaaccggtctggatcgattttgccgttaccgccgcgattgtctccctcgtcgccttcgtactggggggcggcgttcgtgctggagggcgcgctctggtgaccagcgtcgccgttttcatcggcatcgcggtcgtcatccagctgatgggcctcgatcgcggcggattaccggtcgtgtcgacgaatctgtggggcggccttctggtgaccctggtggtctctgtcaccggcatcgtcacctcgctgccgatcggcatcgcattggcccttggccgccgctccacgattccgttgatccgcatcttttcgatcacgttcatcgagttctggcgcggtgtgccgctgatcaccgtgctgttcttcgccacctatatgttgcctctgttcctgcccggcaatttcagcgtcgacgggctcgtccgcgcgctgatcggcattgcgctgtttaccggggcctatcaggccgagaacgtccgcggcgggctcgctgcgatcccgcgcgggcaaagcgaggcggcggccgccctcggcctgtcctggtggaaaacgacctcgctgatcgtgttgccgcaggcgctgcgccacgtcattccgaacctcgtgaacagcttcatctcgctgttcaaggacacctcgctggtctcgatcgtagcgctgttcgatcttctcggctcccttcgtgcctcgttctcggatccgaaatggtcgacgccgtcgacggcgttcacgggtttcgccttcgccgggatcatctacttcgtcttctgctttggcatgtcgcgctactcgctgttcgtcgagcaccgcctcaacgcccaccggcgcaactga

SEQ ID NO: 6865 - DNA, 738 bp, BradyrhizobiumColbertium
atgtccgaccccatcgtcaagatctcgggcctcaacaagtggtacggcgaattccacgtcctgcgtgacatcgatctggcggtcaacaagggcgagcgcatcgtgatctgcggcccctcgggctcgggcaagtcgacgttgatccgctgtatcaatgcgctggaggagttccaggagggcgagatcgtcgtcgacggtatcgagcttggtcccaacctcaagcatgtcgatgccgtgcgccgtgaagtcggcatggtattccagagcttcaatctgtttccgcatctgaccgtgctcgacaattgcacgttggcgccgatctgggtccgcaacatccccaagaaggatgcggaggcggcggcgatgaagttcctggagcgggtcaagatcccgcaccaggccaacaaatttccggggcagatgtccggcggccagcagcagcgcgtcgcaatcgcccgcgcgctgaccatgaatccgaaggtgatgctgttcgacgagccgacctcggcgctcgatcccgagatggtcaaggaggttctcgacaccatggtcgatctggccgaggagggcatgaccatgctggtcgtcacccacgagatgggctttgcccgcgaggtcgccaaccgcgtcgtgttcatggacgctggccagatcatcgaggccaacactccgaacgagttcttcgccgctccgcagcacgcccgcacgaagctgttcctcagccagattctgcggtga

SEQ ID NO: 6866 - DNA, 240 bp, BradyrhizobiumColbertium
gtggcggcagtcggtctcgaggactgggtcgccgaagatgatgagggctatgccgcgatcgcgtacaaatacgcgacgcagccggcttgtctggcgaagttgcgcaacgaattgccggctcggatcgccgcatcccccgccggcaatgtcgagatctacacgcgcaaggtcgaggcgggatatcgccagttctggcgtgactattgtgcggcggggtcggaacacggcgcgatggtatag

SEQ ID NO: 6867 - DNA, 1149 bp, BradyrhizobiumColbertium
ttgagcggacgtttcgctccggttcgccgcaccgcaaaggccttcccctttggcctgccaagcactacgttctcgccagacctgatcaaccccctggtagcgattttccccgacatgcccattcgaaacgacgttgtcgaagccatcggcaacaccccgctgatcaagctgaagcgcgcctcggaattgaccggatgcaccatcctcggcaaggccgagttcatgaatccgggccagtcggtcaaggaccgcgccggcaaatggatgatcctggaggcggagaagcgcggcgagctcaagcctggcggtctcgtggtggaagcgaccgccggcaataccggcatcggactggcggtcgtggcgagcgcgcgcggctaccgcaccttgatcgtgatcccggaaacgcaaagccaggagaagaaggactttctgaagctgtgcggtgccgagctgatcgaagtgcccgcccttccttacgccaaccccaacaactaccagcatgtcggccggcgactcgccgacgagttgcgcaagaccgagccgaatggcgtgctattcgccgatcagtggaacaatctcgataatgccaaggcgcattacgaatccacggggccggagatctgggaacagaccgcaggcaaggtcgacggcttcgtctgctcggtcggcagcggcggcacgctggccggcgtcagccgttatctgaaagagaagagcaagaccattcgcatcgcctgcgccgatccgcacggcgccggcatgtacgaatatttcaggaccggcgaagccaaggcgacgcccgggagctcgatcaccgaaggcattggcctcaaccgcgccacggcgatcgtcgaaacagccaaagtcgatgacgcctatctcatacccgatgctgaggccgtgagcgccatctacgagctgctgcagcacgagggcctgtgcctcggcggctcgaccggcgtcaacattgtcggcgcgatgcgccttgcgaaacagctcgggcctggcaagacagtcgtgaccatgctctgcgattccggcagccgctaccaatccaagctgttcaacgccgacttcatgcgcgccaagaacctgccggtgccggagtggctggagaagcgcagcaacatcaagccgccgttcgtgtga

SEQ ID NO: 6868 - DNA, 1479 bp, BradyrhizobiumColbertium
gtgacactggaagttcctgcgatcgccgcgcggcggtttctcggttctccgtcatggacgctgcgcgcggcgcgctggattgcggtgctgtgcctcggtgccggttccggtgcgtgtgtgctgacccaggatcttccagatcccgccctcgacgttcccgcgcagtacaaatatgcgggcaaaggcgatgcgccgccgtcactggattggtggcgcggcttccgctctgcggagctgacgcagctgatgcaggaggcgcagaccgtcaatctcgacatcgcagccgccgttgcgcgcatcgtccaggccgatgcccaggcgcggcaggcgggcgccgcgctgctgcccagcgtctcctctggcggctcggaaacctattcgcgcacctcgggctcgagcgcttcgggcctgtccatcggcgggcgcgaggtcgtcaattattcggcctcgctcagcgcgagctaccagctcgacttctggggccagaaccgcgccgcgctgcagaccgcagaggagacggccaacgccaaccgcttcgatcgcgacacggtggcactgacgacgctggcagccgtcgccaacgcctatttccaggtgctggcctcgcaggaccgcatcaggacctcgcagcgtaacatcgcgagcgcgcagcgcattctcgacgccgtcagggaacggcgcaacgccggcaccggcaccgatctcgacgtcgcccagcaggagagcgtgctcgcaaaccagaaggcgcttgtgccaccactgcgccagacgctcgaccagaatgtcaatgccctcgcggtgctggtttcccgcccgccggaaagcgtgcgcgtgcacggcggctccctggaccggatcgcgatcccgcgcgtgacacccggcctgccgtcggaactgctgacgcagcggcccgacattcgccgacaggaggcgcagctcgcctccgccaccgcaaacatcggcaatgcccgcgcgcagttctttccgaccatccagctcaccggcaatggaggctatcagagttcggcgctggtctcgctgttccagccgcatgcggccttcttccagctcgtcggcagcgcgacgcagccgatcttcgacgggggcaggatcctcggcaatttcgagcttgccaaggcacggcaggacgagctgcttcagatctaccgcaagaccatcatccaggcctttgccgacgtcgacaacgcactgttctcgatcaagcaaaccacgatcaggctgcaattgcagcgcgacgtcgttgccgcctcgcgccgagcattcgacttgtccgagcagcagctgcgcgccggcactgccgatatcgtgaccgtgctcaacacccagctgaccctgttccaggcggaagatgcgctgttgcaggcgcaactggcccgcctgctcgccatcgtcagcctgtatcaggcgctcggcggcggctgggagccgcgaatggagaaaccggtcaatgctctttaa

SEQ ID NO: 6869 - DNA, 1392 bp, BradyrhizobiumColbertium
atgctctttaagccggatgcgaagcaaggcgcgggagaggggagggcgaaaagatcgcgtgcacgcggcttcgtcgtgactcttatcacgctcgcgatcctcggtggccttggttacctcggctggattgcgatgcaccagcagcaggccaacaatcgcaaccagcgccccgatctgccggtgccggtgctggcggcgaccccgcgcattcaggacgtgccggtctttctcgacggcgtcggcgcggtccgcgcgctcaacaccgtgaccgtgcgctcgcaggtcgatggcaagctgatctcggtcaatttcacggaaggccaggacgtcaagaaaggcgacgtgctcggcgagattgatccggcgatctaccaggcccagtacgaccaggccgtcgccaagaaggcgcaggaccaggcgcagctcgccaaccagcgcatcgaccttgcgcgctacgagcagctcgccgcctccaatgccggctccaagcagcaggccgacacgcagcgcgcgctggtggcgcagaccgaggcgctggtgaaagccgatcaggccgcaatcgacaatgcggcggcaacgctcagctacaccaagatcgtggcgccgatctcggggcgggccggcctgcgccaggtcgaccagggcaacatcatccgcgcgtccgataccacgggcctcgtggtgatcacgcaattgcagccgatcgcggtgtggttcagcctgcctcagcagcagatcatgcgcgtcaacgcggccgcggcaagagggcccctcgcggtcgacgtgttcggcaatgacggcgtgaccgtgatcgacaccggcaagctgaccggcatcgacaacctggtcgaccagacaacgggcacgctcaagctcaaggccgaattccccaatgccaattaccagctctggccgggccagttcgtcaatgtccgcctcaaggtagagaccttgacgcaggcgctggtggtgccgacctcggcagtgcaacgagggccggtcgggacgttcagctatgtcatcggtgaggacaacatcgtctcggccaagcccgttaccgtgacgcagcagaacgagcatgatgccgtgatagccggcggcttgtccgcgagcgacaaggtcgtcaccacgggctttgccaatctggccgacggctccaaggtgatcatcggccgcgatgaccagaccccgtcagcggatcttgcgccgcgcaagcgctcgcgcgggccggacgcccagaagaaggatggtgcgagagacggccagaagaacggccaagtcaaggagggcgagttccgcgccaagcgcaagagcagcgaaggcgaccagaaggggcagaccgggccggcaccggggccgggggcatcgggaccaggagccaagcagccatga

SEQ ID NO: 6870 - DNA, 3150 bp, BradyrhizobiumColbertium
atgggcgtctccgaacccttcatccgtcgacccatcgcgacctcgctgctcggcatcgctctcatgatcggcgggctgctgggctatttcgcgctcccggtctcggcgctgccccaggtcgatttcccgacggttcaggtgacgacgcagcttcctggcgccagccccgacgtggtcgcctcgctgatcaccgcgccgctggagcggcagctcggccagatcccgtcgctgacgtcgatgaactcgaccagctcgttcggcgtcagccagatctcgctccagttcgacctcaaccgcgacatcgacggcgccacccaggacgtgcaggccgcgatcaacgcggcggccggcgtgctgcccaagacgctgccctatccgccgacctacgccaaggtgaacccggcggatgcgccggtgatgacgctggcgctgcgctcggacacgatctcgctgcgagcgatgagcgacatcgctgataccattttggcgcagcgtttgagccagatctctggcgtcgggcgcgtctcggtgctgggcgggctgaagccggccgtgcgcatccaggccgatctggcgcgcctcgccgcctacggcatcgccatggaggatctgcgcaccgcgatcgccagcgccaatgtctcggggccgaagggctcgctcgacggcgcgcaacaatcctacatcatcgctgccaacgaccagatcgcggccgccgacgcctacaaacccatcatcatcacgtatcgcaacggctcgcccgtcaccatcggcgatgtcgcacagattatcgatggtctcgagaacgatcgcaccggcggctggtaccagggcgcgccggccgtcatcatcgacatccagcgccagcccggcgccaacgtcatcgacgtcgtcagccagatccgcgcggaaatccccaaggtgcagcgcgcgatcccggccggcgtgaacctcactatcgtgtccgaccgcaccgtcaccatccgcgcttcggtgcgcgatgtgcagttcacgctggtcctcgccgtcgtgctggtaacgctggtcgtgctgctgttcctgcgctcgctgcgcgcaacggtgatcgccggcgtcgcgctgccgctgtcgctgatcacgagctttggcatcatgtattttgccggcttcagtctcgataatctctcgctgatggcgctcacgatcggcacgggattcgtggtcgacgatgccatcgtcatgatcgagaacatcgtgcggcacatggagaacggcgacggtccgatggaggcctcgctgaagggcgccagcgagatcggcttcaccgtgatctcgctgacggtgtcgctgatcgcggtgttcattccgctcttgttcatgtcgggtctcgtcgggcgcatgttccgcgaattcgcgctgaccctgacgatcgcggtcgtgacgtcggcggtggtctcgctgacgctgacgccgatgatgtgctcgcgcctgctcaagcattcccacgaagagctggcggtgccgggcttggccgcgatcagccgcttcatcgaccgcacggtcgaggcctatcacagatcgctgctgtgggtgctggaacgccagcgcgccacgttggtcgtgacattcgttacgctgatcgcgaccctcgtgctctatgtcgtcgcgcccaagggtttcctcccgctgcaggacaccgcctcgatcacggcggtaaccgaggctgggcccgacgtatcgttcgcggagatgaagagacggcaggccgaggtggcggaggccatcagggccgaccctgatgtgctcggcgtggtctcggtgatcggtgcgggttcggtcaatccgaccaccaatgtcggccggctcgtcatgggcttgaagccgcgcggcgagcgacgggacgacatcacagtcgtcgtggcccggctgaaggagcgggtgtcgggcatccccggcatgaccgtctatttccagccggtgcaggacgtgcagatatcgacgcagtcgagccgctcgcaatatcagtacacgctgaccggtaccgatgcgacgctggtctcggaatgggcgcgcaagctggttgccgagatgcggcgcgatcccttgttccgggacgtctcctcggaggcgcaggagggaggcctgcgggctcagcttgatgtcgacaggacgcgcgcaggccagctcggcgtcagcctccaggccatcaccgacacgctcaacgacgccttcgcgcagcgacagatctcgaccatttacggccaggccaaccaataccgcgtcgtgctggaggcgctgccgatgtaccagcgcgatccctcgatcctgtcaaagctctatctcccgggcgctgcgagcgtgaccgcgggcgcgcccgccgcccaagtgcctctgtcggcggtggcgacgctgaagcgcaccacggcgccgctcgcgatctcgcaccaggcgcagttcccgtccgtctcgctcagcttcaacctcgcgccgggcgcggcactcggcgatgccgtcgaggcggtcaagaccatcgagacccgcatcggcatgcccaacagcatcgtcggcgtctacgccggcgacgccgccgaattcgccaaggcgctcgccggtcagccctggctgctgctcgccgccgttatcacgatctacatcgtgctcggtgtgctctatgagagctacatccatccgatcacgatcctctcgacgctgccttcggccggcgtcggtgcgatcctggccctgatgctatgcggtcaggatctttcggtgatcggcctgatcggcatcatcctcttgatgggtatcgtcaagaagaacgcgatcatgatgatcgactttgcgctcgaggccgagcgcgggcggggcatgtcgccgaacgaggcgatcgtgcaggcgtgtctcttgcgcttccgccccatcatgatgacgacgctggcggcgctgttcggggcgctgccgctcgcgatcgaaagcggcacgggcgccgagctgcgctttccgctcggcatctccatcattggcggcctgctgctgagccagctcctgaccctctataccacgcccgtgatctatctcgcgctcgaccgcatcaaccggcgcctcgaacaggcactgccgcctgccgaatccggcgggccgccggtcgccggtgcgaccgagggtatgcagtga

SEQ ID NO: 6871 - DNA, 3105 bp, BradyrhizobiumColbertium
atggcttcgatctcggagcccttcatccgccggccggtcgcgaccacgctgctgtcgatcgggttgttcctgctgggcgtcgtcgcctaccaatttctgcccgtcgcctcagtccccaatgtcgatttccccgccatcttcgtctcggccagccgccccggcgcggacccgtccgtgatggcggccacggtggcctcgcccctggagcggcggttaggcgagattgccggcatcaaccagatcacctcgacttcgaccctcgggaccaccagcatccagcttcagttcgacatcggccgcaacatcgacaaggccgcacgcgacgtgcaggcggccatcaacgcgtcgatggtcgacctgccgaccgacctgccgacgctgccgcgcttccggaaagccaatacggccggcgcgcccgtcttcgtgctggcgctgacctcgaaaactctgtcggccagtgcaatctacgacgttgcggatacggtcatcgcgcagcgcatctcgcaagtgcccggcgtcggcgatgtcacggtatccggcgccgaccagccggccgtacgggtgcagctcaaccccgtcgcgctctcgagtgctggcatcgccaccgacgacgtcaggaccgcgatcgtcaatgccaatccgctcggtccggtcggcatcttcgaaggcgaacgccaggccgagacgctggcgctcaatcggcagatgcgcaccgccaaagagttccgcgacatcgtcatcaagagctccaacggcaatttcgtgcggctctcggacgtcgccgacatcgaggattccgtccggaacgcccgctcgatcgcctggttcaacaaacagccggcggtgctgatccagatcaccaagcagggtgatgccaacgtcatcgacaccgtcgacagggtgaaggccctgatccccgcgctgaagcagtggatcccggccggcgtcgagatatccactctggtcgaccgtaccagcacgatccgcgccagcgtcctggacatgcaatggaccctgctggcgacgtcgttcctggtgatggtcgtggtgttcgtgttcctccgccgcctgaccccgacgatcgcggccgggatatcggtgccgctggcgctggccggcacctgcgccgggatgtgggtcgcaggtttctcgatcgacaatctgtcgctcatggcgctcgcgatctccgtcggcttcgtcgtcgacgatgcgatcgtcatgatcgagaacatgtatcgcaatctcgagcatggcatgcggccgttccaggccgcgcgggagggtgcgaagcagatcggcttcaccgtcgtctcgatcagcctgtcgctgatcgccgccttcaccccgctgatcttcatggacggcatcgtcggccgtctgctgcgcgaattctcgctgacgctgaccttcgccatcctggtctcgacgctggtgtcactgacggtcacgccgatgatctgcgctcactacatccgccagaccacgtccggtacggcgacccttttcgatcgcatcatagagggttcgctgtcgcgcatcgtggctttctacgccagaagcttgcgtgccgtgctggattatccgttggcgacattgctggtgttcttcgccacgatcggcctcaccgtgacgctctacatcaaggtgcccaagggctatttcccgaccgacgattccggtttcatcatcggcgcgacgcgcgcctcggccgacatctcgttccagtcgatgctcagcctccagcagcggctcgccgacatcgtgatgcaggatcccgccgttgccggtatcggatcgaccgtcggcagcggaggcgggccgggagcggcgacctcgaatcgcggcaccatgttcatcagcctgaagccgccggaggagcgcgaccacgtctcgacgcaagttgtcatcgatcgcctcaggcgcgcgctgtaccccgtgcccggcatccgtcttttcatgttcgcagcccaggacgtgcgcgctggcgggcgccagagcgattccgattaccagtacacgctcaccagcaccgatctcgggctgctgcagaaatgggctccgatcgtggccaagcgcatggagagcgtcgaaggcatcaccgacatctccagcaatcgcgaccccggcgggctccagctcacgctctccatcgaccgccagaaagcctcggcgctcggcgtccgggttcaggatatcgacaccgcgctcaacaatgcattcgcgcaacggcagatctcgatcatctacacccagcgcaaccagtacatgatcgtgctggagatcgacccgaagttccaggtcgatccctccaacctcgatcgcatctatgtcgccggtgcgggcgacgcccaggtgccgctatcggcggtggtgcatgctacacgcgggctcgccccgcttgcggtctatcactcgcagtctttcccttcgaccaccgtgtcgttcaacctgctgccggacgtaccgctgcaggcggcgacgcagaacatccagcgcgcggtcgaagagttgcacatgccggagggcattcgcggcagcttcgatggcaatgccggcgacttcgccaggaccgccggccgtcaaccgcttctgatcctcggtgcgctggtcgcgatgtatatcgtgttgggtgtgctctatgagagcctcgctcatccgctcacgatcatctcgacgctgccctcggccgggctcggcgcgctgctcgcgcttcagctcaccaacacgccgctgacggtgatcgccttcgtcggaatcatcctgttgatcggcatcgtcaagaagaacggcatcatgatggtggatttcgcgctcgatgccgagcgccagcgaggtctatcgtcggccgaggcgatctttgaagcctgccaggcgcgcttccgccccattctgatgacgaccatggcggcgctgttcgccggcattccgctcgtggtcgcgaccggccccggcacggagctgcgccgcccgctcggcatcaccatcatcggcggcctgttcgtctcccagatcctgacgctctacaccacgccggtgatctacctcctgatcgaccgcctgcggcggcggtccgagccgcgtccgctggcagtgccggcggaatag

SEQ ID NO: 6872 - DNA, 768 bp, BradyrhizobiumColbertium
gtgcagcttcaagcgtatagcgcgcccatgtccaacccgccccagaccaccgccgcgccgcccgagacgattcccgaatgcccgcactgtcagaagccgatgccgctctgcatctgcgacagcgtcgtgccgatcgagaaccgtctttcgctgctgatcctccagcacccgcaggagcaggacagggcgctcggcaccgcgcggctgctggcgaagcattttgccgacgccacagtgcgggtcggcctgtcctggccgagcctgtccaaagcaatgggccggccgatcgagaacgcctcgcactgggccgtgctctacctcggctcggcgcgcgcggccgatctggaagccgaaggcgagatcgtcgcgctcaaccgcaagggcgaggtcgcggagaatcagcgcgcgatcctcagcaagctcgaaggcatcgtgctgctcgacggaacctggagccaggcgaaggcgctgtggtggcgcaatccctggatgctcaagtgccagcgcgtgatcctcaacccggcgcacccctcgcgatacgggcggttgcgcagggagccgcggagcgacgggctttcgaccatcgaggccgcggcgacgatcctcgccgggctcgagcggcgtcccgacatcgccgagacgctgcacgcgagttttgaaaggctgcttgcacgttaccgcgaggtccaggcagagatgccggaattggcgcccagacccgccgcgaaaggccgcaggcgcgacttccgacgccgcaaacgcgcctga

SEQ ID NO: 6873 - DNA, 71 bp, BradyrhizobiumColbertium
ggccacgtggcggagtggttacgcaacggtctgcaaaaccgtgtacaccagttcaattctggtcgtggcct

SEQ ID NO: 6874 - DNA, 195 bp, BradyrhizobiumColbertium
atgagcgaagccgaattcaacttgatgctggatgctgtccgggacgccatggtcttcgaagatgtcgcgcccgtgcctgaggtggaattcgtgccccgctcgtggagtcttgagacgacgcccaaagccgccaatgacaacgaaggcgcctggcccctcctgcccttccccgaggggtggtacgcggccagctga

SEQ ID NO: 6875 - DNA, 228 bp, BradyrhizobiumColbertium
atgaaggcaagattcctgcggtttgcgggcgtgaagagccgagcgcgcggcgcatccaccgtcgggctgttcctgacgctgtttgcctcctcggctcatgcacagggcacagcggtgcagcggcgggcctggacgcccgacgtgtaccggctccacgcgggcgagatcttgaacgtccacgccaccggcgaggcctgccgcgcggtgctcgatcaggcggggggctga

SEQ ID NO: 6876 - DNA, 957 bp, BradyrhizobiumColbertium
atggcaggcgccatgacattcggaggaactggcgaaatggagaaatcggtttggccccaggcgcggcggggaatggcgcgcgcatcaacgccatggcgcaaggccacgcttggcgccgccgtcgtgttcggcctcgtcgtcgccgcaccgctcggtgcgcaggccgctccgcccgccgcctgcgccgcactccaggagaaatacccggactggaagggcaagacactcgtcaacgccatcaacccgcacacgccgggttacgagacgatcgatcccaaggaccccagcaagtacatcggtttcgacatcgatctcggcgaagccatcggcgaatgcctcggcttcaagctgacctacaagcccgtggtgttcgcagccctcttgaccacactggccgccgggcaggccgacatcgtgatctccgacatctacgccaccaaggagcgcgccaaggccgccgacttcatcacctactcgaaagtgttcgacggcgtcctggtcgccaagggcaatccgaagggcatcaacggcatcaacttgtcgctgtgcggcgccgctgccgccgaaaacaccggctatgtcgaggtgcccctgatccaggcgttgatcccggagtgcaagaaggccggcaagcccgaaccgaccatccagctctacgacaacaacgccaactgcattcaggcgatcctcgccggccgcgccgacacctacatcaacgacgtcaacaccgtcgacagcgccgtaaaggcctatccggacaagctggagaaggcgattgcggtgacgatcccgtattccgtcggcatcgccgtgcccaagaacaagccgaaattccgcgatgccgtgctcgccgcgctgatcgaggtgcagaaggccggcacgcacatggcgctccttaagaagcatgggctcgatgtgaacaacttcatggagccgggaattctcacggccgactga

SEQ ID NO: 6877 - DNA, 1623 bp, BradyrhizobiumColbertium
atgtcgctgttccttcactacctgagcatgccgtatctgctcgcgggcatcgagctcaccctggaggtgaccgccctcggactcggcggcggattgatcctcggattgatcctcgccagcatgcagctctcccgcttctggctgctggcggcgatcgccagggcctacaccgtgatctttcgcggcacgccgctgatcctgcagatggtgttcgcctacgacgcgctgccgcatatcggcatcaagctgccggcggtgctcgccgccggtctcgcgctcgcctgcaacgaggcgccgttcatcgcggagatgctgcgcgccggcgtcctcggcgtcgatcgcgggcaggtgaccgcaggccaggcgctcggcatgacgccccggatcctgatgtggcgggtgatcgcgccgcaggcgatccgcacgatgatcccggctttcggaaacgaggcggtgagcgcgctcaagaattcctctctcgcctccgtcgtcgcggtgcaggaactgacgctgcgctcgacgcagctcgcttcctcaactttcgacttcttctcgatcttcttcgcctcaggacttctctatctggtgctgaccacggccatcagcgtcatccagctctttgtcgaatggctgctcgatctcgaccggaccacgcgccgccagcgcaagctcgccgattatctgccgtggcgccgtgtcgatctcggcaccaagctcgagcttgccgctgcgaccgccgcgaatcctgagcccgcaccagcggagctgaccgacacgccgccattggccttgacgcgcgaggagcgcgcccgccgtgctgcgacgatcgcgcgcaacaacatcgcggtcgaggtcaaggacctcaccaagagctacggctcgcagaccgtgctcgacggactcgatctcacggtgcgggtcggcgaggtcgttgcgctgcttggtcccagcggctccggcaagagcacgctgcttcgctgcatcaatcacctcgaaagctgggactccggcacggtgcgcgtcggcggccggcgcctcggtttttccgaacacggcaagctgctatcgccccgggcgattgccaatgagcgcgccagtgtcggcgtcggcatggtgttccagcagttcaacctgttcgcccatctgtcggcgaaggagaatatcgccggccccttgcgttgggttcacggcatgacccggatcgacgccgatcgccgcgcggccgagttgctcgaccgcgtcgggctttcgcatcgcgccgacgcgctgccgcggcatctctccggcggccagcagcagcgcgtcgccatcgcccgtgcgctggctccgaacccgagcgtgctgctgctggacgagccgacctccgcgctcgatcccgagctcgtcaacgaggtcctggaggtcatccggcgcctcgccatcgacgacggcctcaccatgatcatctcgacgcaccagatccgcttcgccgacgaggtcgccgaccgcgtcgctttcttgagcgggggggcgatcattgaagagggcccggcgcatgaggtgctctccaacccgcgtagtccgctcaccgcgcgtttcctcagcgtgatggaagccgacaagaggccggaggcggtgcgatga

SEQ ID NO: 6878 - DNA, 1242 bp, BradyrhizobiumColbertium
atgaagcatttcacgctgccggtttcgccgaagaccgtccactggggctatttctccaagaaggtcacgccggccctgacgctgcgctccggggatcgcgccaccatcgagacgctgacgcatcacgccaacgacgattacgagcggatgattcagggcgatccaggcgccgagagcgttttccagtggacgcgcgagcacaaggcggtggcccgccgtggctccggtccggtcgaaggtccctttattcgtggcgccggggaggggatcggcgtgcatcttctcaccggcccggtcgcgatcgagggcgccgagcccggcgatattctggaagtgcgcatcctcgacgtccggccgcgtccgagctgcagcgcctgtcacgccggccgttgcttcggctccaacgtcgccgcgaactggggctttcactatcacgatctgatcgaggagccgaagccgcgcgaggtcatcaccatcttcgagctcgatacctcgggcgagccctatgcgaaggccatctacaactatgtctggacgccgcagaccgaccctgacggcatcgtgcattcaaccatcgattatcccggcgtccccgtcgaccacgccaccatcaagaagcgcaagaacattctctccaacgtcaaggtgccggcgcggctgcatttcggcacaatggggctcgcaccatcggaggccgatttcgtcagctcgattccgccgagctataccggcggcaatatcgacgactggcgcatcggcaagggcgcgcggatgttctatccggtcgcggtgcctggcgcctatttttcggtcggcgatcctcatgcggcgcagggcgacagtgagctcggcggcaccgcgatcgagacgtcgctgacgggtgatttcgaattcatcctgcacaagaaggccgaccttgccggtaccagcctcgagggcctcgaccatcccatgctcgagaccgaccaggcatggtcgttctacggtttcacctatccaaactacctcgctgcgctcggccccgaggcgcaaaccgagattgccaatcattccagtctcgaccgtgcgatgcgcgatgcgttcaggaaactgcgccggtttctgatgaccgtacatggactcagcgaggacgaggcgatctcgctgatgtccgtcggcgccgattttggtgtcacccaggtggtcgatgccaattggggcgtccacggtacgatccgtaagaacatcttccggtgcgactag

SEQ ID NO: 6879 - DNA, 2430 bp, BradyrhizobiumColbertium
gtgacgagcggagatcatttgcggcccgtcgccacgacggacgatcgcgtgcttctggcacggaggttgcttcgatcgactgcaacttgggtcgatccgatgagcttccgcccgttcacgagcgaatcctacgcgcaagacgaccgtccggaggcctggcgggacgtgctggccgctgtcggcctgcaaccggcgggtggtcacgacgtcttcgacggacatgcgagtgcatcgcaccggcgcgctgcaggcatcgcgctgacacgcatggccgcgggtgcgcagagcgtcgggccgctgtcgcgagccagcgaagacattcccatcgcactgatgccggtggaggatgggatggtgctgaagagcgccggtgatcaccgcatcgttcccgtcggtcaccttgtgctgttgccgcgcagcggcgactggagcatcgtgttccagcgcgacatgcgcgccatcgtgctgtcggtgacgtcggaggcgttgcaggggcgcctctcgggcaagccgcggctcggcgagccccgggtcgttccgccgagcggctttgccgaattgttctcgcgcctgctggatgcaaccgcgcgcacgctcgacaccctgagcgatgccgaatgggatctggtggcacgatcgcttgcagacctgctgctgacgcttgcgcatcagttggcggcctcgaactccgatgccggatcgagtgcggcgcaagccgcgctcctgcaccggatctgccagaccatcgagcgtcgcctcgaagatcccgatctggtgccggcgcgcgttgcccaggccgaagggatttccgagcgctacctgcaaaggctgttcgagacggtgggagacaatttcacccactacgtccgtgaacgccggcttcagcgcgcctgggccgatctgtccaatccgaccgcggcgcatcgctcgatctcggagatcgcctatgcctacggctttggtgactccgcgcatttcagccgagccttccgccatcgcttcggcctgccgccgcgagagtttcgtcaacaggaggcagagcgggcggcctcgcagcttggcatcgcgggccagcgcggctggccacaggaggcgctggctcaattgcgggcgcatcagagcgtagcggcgcgcagcagcatcgccccgggcgacggcgagaagcgggccacctcggagcgcaggcatcaccatctcccggtcgaggccagccgcgtgcattggggctatttcagccgttcgctgccaccgcagatcgagatcgcctccggagatacgatcaccatcgagacgctgacccagcacgcctccgacgatcccgagttgatgatcgcgggcgatgccgccgctgaaagcgtgttcggctggacgcgaaacaggaagaacgtggaccgccgcggcgcaggacccatggatgccagcgtgttcggtcgcggcgccggcgaggggtttggcgtgcacatctgcaccggcccggtcgcggtgaaggacgcccagcccggcgacgtgctggaggtgcgcatcctcgacatcgtcccgcgggcgagccgcaatccgaaccacgcgggccgggtattcggctcctcggtcgcggcttggtggggctatcattacaacgaatttcttggcggccccaagccgcgcgaggccgtcaccatctacgagatcttcgacgacgctgaggtgccgcacgcccgcgccctctattcctaccgctgggagccgcagacagaccctttcggtgttgtgcacaccacctacgactatcccggcgttcccgtcgcacccgccacgatcaagcgtcgccatgccgtgctcgacggcatcaagattcccctgcgcccgcatttcggcgtgatcgcgttggcgccgcgcgaggtcgatttcatcgattccgtgcctccgtcctatttcggcgggaatctcgacaattggcggctggggaagggggcgaccgtgtatctaccggtttcggtacccggcgcgctgctgtcaatcggcgatccccatgccgcgcaaggcgacggcgagctcagcgggaccgcgatcgaatgctcgatgaccggcaccttcgaagtgatcctgcacaagaaggcggacctcgccggtcgtcccttcgccgatctctcctatcccttgatcgagaccgccaccgattgggtgctgaccggcttcagccatcctaattatctcgccgaattcggcgcccaggggcagagcgaggtctacgcaaaatcgtcgctcgacctcgccatgaaagatgcgttccgcaagatgcgccgcttcctgatgaacgtcaaaggcctgagcgaggacgaggccatcgcgctgatgtcggccgcggtcgatttcggcgtcacgcaggtggtcgacggcaattggggcgtgcacgccatcctcagcaagcgcctgtttgaagacgcaccttga

SEQ ID NO: 6880 - DNA, 384 bp, BradyrhizobiumColbertium
gtgaaattccacatgatcagcggcggaccgaagccggtcgcgccattcagccacgcggtcgagaccgatggcttcgtcttcgtcacgggccagatgccggacacgccgcaggcaccaggagtcttgcccgacggcatcgttgcgcagacccgtgcggtgatggagaacttgaaggtcgttctggccggcctcgatctgggcctcgagcacgtcgtgatggcgcgtgtatatctgacgcgcttcaatgaggactacacggccatgaacgagacctaccgcgcgttctttccgccggaccggctgcccgcacgcacctgcgtcggcgtcaccgggctcgcttatgaggcgctgatcgagatcgacctggtgtgccggcggccctag

SEQ ID NO: 6881 - DNA, 153 bp, BradyrhizobiumColbertium
gtgcgcacgagccacctcgtcgaggatctccatcatccggtcataagcctgaaacgttgcctccagcgcagccttggcggccgcgtcgggaacgagcctgtaacgcagggcagagggagcgttgcggggcgactgcttcatggaaagcactaa

SEQ ID NO: 6882 - DNA, 1155 bp, BradyrhizobiumColbertium
atgaagcagtcgccccgcaacgctccctctgccctgcgttacaggctcgttcccgacgcggccgccaaggctgcgctggaggcaacgtttcaggcttatgaccggatgatggagatcctcgacgaggtggctcgtgcgcacaatgtcggctccaatgtcgtcctgctccatgcccatgcctacgagcccgtccgcaaacagacggggctgccgtcgcggttggtgacgctcggcctgcgcgatcgcgccgagtatcgcgcggcgcagggccgccggcttccgctcgacgacaagctcgtcaagatcaagggaccggccgctgtgtcgatcgcgaccgtacaagggcgcttcagcgtgcctttcgactatgccggctatgtcgagggctgggggcagagcgtgcccgcgcacctcatccgcaccgacgacggttttgaaatccactacggcgtcacgccgaacagtttgccagaggaggagaatgccatggataccatcgctgccgctcccgaaaatttcctgtcccgggtcgggcgcctgatcgccggcatcgcttatgacgcgatcgagcaggcggaaggcaagaacaagctgaaggtggtcggacaggccatccgcgagatcgagcgcgccgagacggaggcgcgcgatgcgctcgcggccgcgcgtgccgaggaatatcgcctcaacgcgcgccgtaccgagatcgagcgccagatggccgatcttgcgcccaagatcgaagccgcggtcgctgatagccgtgacgatctcgcgcgtgccggcatcgcgcgacagatggatctggaggcacaattcgaggtgctctcgcgggccatcgacgagaacaacgagaagatcgaacagtgcgtgacatcgcttcgcgccgtgctctcggcgctccaggacgccgagcagcgccgcgccgatctcgaaaagagcgaggcggccgcgaaccatcaaacctcggcgtcgccgcggaagcagggcggcagctcggcggccgcgaaggcgctgcgggcaggacgggcagtggcacgcgccaccggcgtaccccctggcatttcctattcgagcgacatcgacgagctcagcacattgcatcgagacaaggaaattgcggcaaggctggcccggttgaagtcgggctcctga

SEQ ID NO: 6883 - DNA, 660 bp, BradyrhizobiumColbertium
atgagcgctctgctcgaacacgtcatggcgccggaggtcaggccgttcgcgatcgcggcggccatgatcatcatcgtcggctcgatcgagatcgtctcgattctggtgggggcttcgctcagcgaaatactcggcaccaacatcgatttcgctcaccccagcgacaatggcgtcgtcaatgccatctcctggatcaatgtcggcggcgtaccgctcttgatcttcctgctgctgctgctgggcgtcttctccatcaccggattcctgatccaggacatcgcacgaatggttgcgggtcccttgccggcgacagccgcctcggtgggtgcggtcgtggtgtcggttccgctggtccgcgccgcaagcaggaccatcgcgcggctcattcccaaggatgaaagctatgccgtcggcctcggcgatctcgtcggccgcatcggcgaggtcgtcatcggcccgctcgaccacgggccgcctggccgcgtcagcgtcgccgacgtccacggcaatcgccactttgtctcggcggtcgccgcgccgtcatcgggacctttgccgcagggaaccatggtccttctggtcgaccgcgacggcacccgtttcgtcgcggtgaaagctgacgatgaactcaagccgtccaagcccagtctaagcagttag

SEQ ID NO: 6884 - DNA, 1698 bp, BradyrhizobiumColbertium
atgttcgacattgcagtcccggccatgatcggcgtcgcgctgatcgtcgttctggggatcgtcttcaccatcctctacaagcgcgccacccgcgacgaagccttcgtgcgcaccgggcttggcggcaagaaggtcgtgctcgacgggggcgccatgatcctgccgatcttccactcctatgcctgtgtcaacctgaagacgctgcgcctcaccgtcgagcgcaaggagcgggaatccctcatcaccaaggaccgtctgcgcgtcgatatcgttgcagagttctacgtgcgtgtccgccccgacgaggagagcattgcgctcgccagccagacgctgggtgcattgaccaacgatgccgaggcgctacgcaaccaggtcgaggcgaaattcgtcgacggcttgcggtcggtggcggcgaccatgaccatcctggagctccaggagaagcgctcggatttcgtcaagcacgtgcagtcgacggtcgagtccgacgtgaagtcgaacggcctcgagctggaatcggtgtccctgacgaagctcgaccagaccgacgtgaagttcttcaatccggaaaacttcttcgacgccgaaggtcttacccagctgaagaccatcaccgagacccgtcgccgcgaccgcaatgcgatcgtgcgcgacaacgaggtggcaatcgcgcagaaggacctcgaggcgcggcagcagacgctgaccatcgagcgcaccaagaaagaagccgagctgtcgcaggagcgcgacatcgccaacaagaccgccagcacccgcgccgaggtcgcaacagcgacgcaaaccgcacgcctgaccgaggagaacgcgcgcatcgataccgaccgtgcggttgccgagaaggaggcgggtgccaagcaggtcaaggagaccgcagtcattgaatcggatctagcgatcaacaagcgcaggaccgacgcccagcgcgagatccagatcgcgacccaggagaacgagatccagatcgcggccaagagcaaggagacctcggaagccgtcgccgaagccaagaccgcagaagcgctcgccgtctcggcggaagaaaaggtcgtgaccgcgcgcgccgtcgaagtcgccgatcgcgcccgcctgacccaggtgctcgctgcgcgcaccgaggccgagcgcaagtcgaccgaggtcatcgtggcagccgaggcggagaagagggcggcgctcgaccgcgccgaggccatcaccacactggccaccgccgaagccgagtccaacaagatcaaggcggtcggcgtcaggaacatcggtgaggcggaggccgccgtcatcacgatgaaaaacgaggcgcagaacaagctcggcagcaacgtcatcgatttcgagatcgccaagaagcggatcgagacgatgccctcggcgctggccgaaatggtcaggccgatcgccaatctgaaggatgtccgcatcctgcacaccggcggcgcgttcggcgggaacggcaccggcgcgggcggcaatgtcggcttcggcgagggtctcgcgggcgagctcctgaaggtgcatgcgctgcgtccgatgatcgacgagatcctgcgccagggcggctttgcgccggacgacgatcccgtcaaggcgctggtgggtgccgttactgggaagagcaacggcgcggccgtgccgacgccactcccggagaaagcaagcgccgcggatctgtga

SEQ ID NO: 6885 - DNA, 72 bp, BradyrhizobiumColbertium
tcctcggtagctcagcggtagagcatccgactgttaatcggatggtcgctggttcgaatccagcccggggag

SEQ ID NO: 6886 - DNA, 180 bp, BradyrhizobiumColbertium
atgccagacatcccggtcgaccgctctcacatggccccctcgattctgccggcgggcgttcccgagctcagcgacgatgaatgcctcgcctgcctggcgcgcgcggtcgagacgccggattccgcccggctgggcgaggtcgccgctctgatcggccgcctcgcggtggcgatcgaataa

SEQ ID NO: 6887 - DNA, 723 bp, BradyrhizobiumColbertium
atgctccaaagatgccgcgaattctcgtccgcggcatcgtccgcattgcagggtccgcaaatgtccggtttttcgaccgcgcgccaaaaaatggtcgatggccaggtgcgcaccaatgacgtcaccgatcgtcgtgttctcgatgccatgctcacggttccgcgtgaggccttcgtgccggccgccaggcaggcgctatcgtacctcgatctcgatctggacgtcagcgaaggggcggccaagcggttcctcatcaagccggcgctgaccggcaagctgctccaggccgctgagataggcgaggttgacaacgtgctggtcgtcggttgcgccaccggctacctggccgctctgagcgccaagctcgcgcggcagatcactgcgaccgagtgcgattcggccttggctgcgaaggccaaggccgccttcacctctctgggacttgccaatatcgcctgcagggcggcggcctgccccgagggagatccctccgccgccccctatgacgtgatcatcctcaacggcgctgccgaggtgttgccggaagctctgctcgggcagctcaaggaaggcggacgtctggtgggggtctcggccgagtccaagccgccgcgcgccatgctcgtgacccgtacccacggtgaattcggccatcggacgctgttcgacgccgcagccccggtccttcccgggctggaacgggcgcctgccttcgtcttctga

SEQ ID NO: 6888 - DNA, 1386 bp, BradyrhizobiumColbertium
atgcatggggtgaagctcttcaccggagctgcggtttcggtcctgctgctcgcgcttgccgggccgacgcctgccttggcggagaccatggaaggcgcgctggtgcgtgcctatcaggacaatccgcaactcaacgcgcagcgcgcccaggtgcgctcgactgacgaaaacgtgcctcaggccctgtccggctatcgtcccagggtctcgctgtccgcgagcgctggttatcagtactcggacttcaagagcagcagcaccagcgttccggctaacgggaccggcatcccccgaagcgtgggactgactgcttcccagacattgtacaacggcaaccagacggccaatcggacacgcgccgctgagagtcaggtgtccggagcccgcgaagccctgcgcagtcttgatcaaaatgtgctgctccaggcggccacggtttacatggactatctgcgcgatgccgccacgctcgaagtccagcgcagcaacgtgcgcgtgctcgagcaaacgctgaagcagactcgtgaccgtttcaacgtcggcgaagtgacccgcaccgacgtcgcccaatcggaagcgcaactggctgccggcaggactcaggcgctcaccgccgaggcgaatctcaccacgacgcgcgcgaacttccggcgcatcatcggcaacgagccaacgaatctggcgccaggttcgcccgtcgatcggttcctgcctccgacgctcgcttcggccatcgagctcagtctggtcgagcatcccaatgtgacggccgcaatgttcggcatcgacgtcaactttctgcaggtgaaagtcgccgaaggtgcccttctgccgaccgtcactttgcaggccagcgccacgcaggcatacgaacaatccctgatccagtatagggcgttcaacgctgccgcgatcgcgcaggtctcggtgccgatttatcagggcggtagcgaatattcgctgatccgccagtccaaggagaatctggcgcagcagcgcctcaacctcgaaaccacgcgcgaccagactcgtgcgaccgtggtgcaatggtggggatcgttgcaggccaccaaggcgcaggtgcagtcagcccagtctcaggtggctgcgtccgagatcgcgctgaacggcgtgcgcgaggaagcgaaagccgggcaacgcaccacgctcgacgtcctcaacgcgcaacaggcgctggttaacgcacgcgtcgcgctggtcacggcgcagcatgatcgcgtggttgcgtcctataatgttctcgcggccgtcggccgcctgtcgccgcaggtgcttggtctgcggaccacgacctacgacgcaagcgttcactaccatcaggtccgcgacagctgggcgggcgtacgcacgcccgacgggcgctga

SEQ ID NO: 6889 - DNA, 771 bp, BradyrhizobiumColbertium
atgacgcagcctgcaaaggttacagaaccctcgatggaggagattctggcctcgatccggcgcatcattgccgacgatgaggccaagccaccgccggccgaggccaccaagcccgagaaggctgcagcgccggccgctccgccgaagccgcaggccatgaacgacattccaccatccaaggtcgctcctgccaaaccggccgctgagaagcctgcgccgccagctgcgaagccggctccagcggcgccacccgcgccggcggcggatgcctccaacagccaggacgatatcgacgcgctgctggctgggctcgacgcagctacgcctgcgcccgaggtccgtgcccccgagcccgagcccgagcccgagccggaacccgacgtgctcgagctgacggacgagatggtgatggatccgacaccgcctccaccgccgccgagcttccgcaaggtcgagccgcgggacgatcttgaattcgccgagtcgcccccccgtccgacgccgccaccttcctacgcgccggtggatttcgacgcgccgccactgccgccgcagcagccgatcctggcgcaatcgacggtctcggcggtcgaatccgcgttcaactccctggcccatacggtgctcagcagcaatgcacggacgctggaggatctggtcaaggagatgctgcggccgatgctgaagtcctggctcgacgacaacctgccgggcctcgttgagcgcatcgtgaaggcggaaatcgaacgggtctcgcgcggcggccgatag

SEQ ID NO: 6890 - DNA, 2877 bp, BradyrhizobiumColbertium
atgatcgagaaaaattaccagcccgccgatatcgaaacccgcatgtccgtcgtgtgggaggacagcctcgctttcaaggccggccgccctgatcgccgtgatgccgtgccctttaccattgtgatcccgccaccgaacgtgacgggctcgctgcacatgggccacgcactgaacaatacgctgcaggacatcctgtgccggttcgagcgcatgcgcggccgcgacgtgctttggcagcccggcaccgatcatgccggtatcgccacgcagatggtggtcgagcgccagctgatggagcgtcagcagcccggccgccgcgagatggggcgcgcgaagtttctcgaacgggtctggcagtggaaggccgagagcggcgataccatcatcaaccagctcaagcggctcggcgcctcctgtgactggtcgcgcgagcggttcaccatggacgagggcctctcgaaggccgtcgtcaaggtcttcgtcgaactgcaccgcgagggtctgatctacaaggacaagcggctggtgaattgggacaccaagctgctgactgcaatctccgatctcgaagtgcagcagatcgaggtcaagggcaacctttggtatctgcgctacccgatcgagggcaagacattcagcccagatgattcctccagcttcatcgtcgtcgccaccacgcgccccgagaccatgctcggcgacacgggcgtggccgtgcatcccgatgacgagcgctatgagaacctgatcggcaagaacgtcatcctgcccctggtcggccgcaagattcagatcgtcgcggacgagtattccgatccggggaagggctcgggcgcggtgaagataaccccggcgcacgacttcaacgacttcgaggtcggcaatcgccatggcctgcgtcggatcagcgtgctcgacagggaggggtgtctcgatctcctcgacaacgaagactatttgcgggacctgcccgaaggggcttcgcaattcgccgaggagttccacaaggtcgaccgcttcgccgcccgcaagcgcatcgtcgagcggctggaatcgttcggcttcgtcgagcgaatcgagccgcacacccacatggtgccgcatggagaccgctccaacagcgtgatcgagccgtatctgaccgaccaatggtatgtcgacgccaagacgctggcgaggcctgcgatcgcggcggtgcgctcgggcgaaacgacgttcgtgccgaagaactgggagaagacctatttcgactggatggagaacatccagccctggtgcatctcgcgccagctctggtggggccaccagattccggcctggtatggccctgacgggaaggtgtttgtcgccgagaccgaggaggaggcgatcagccacgcccttggctactacgtcgagcaggaagtcatcaccccggagcaggggcgcgagatggcgctcgaccgtaacaagcgcgaaggcttcatcacccgtgacgaggacgtgctcgacacctggttctcctcggcgctgtggccgttctccacgcttggctggcccgacgatacacccgaggtgcagcgctattatccgaccaatgcgctggtgaccggcttcgacatcatcttcttctgggtcgcccgcatgatgatgatgggcctgcacttcatgaaggaagtgccgttctccaccgtctacatccacgccctcgtccgcgacgagaagggcgccaagatgtcgaagtcgaagggcaacgtcatcgatcccctcaacctgatcgacgaatacggggcggacgcgctgcgcttcaccctggccgcgatggcggcgcaggggcgagacatcaagctcgccaccagccgcgtcgagggttaccgcaatttcgcgacgaagctctggaacgcgtgcaggttcgccgagatgaaccactgcgcagtgccagaaggtttcgcgccggcgaaggcgaaggagacactcaaccgctggatcgcgcatgagaccgcgcacaccacgcgtgaggtcaccgaggccatcgaggcctatcgcttcaatgacgccgcaggcagcatctaccgcttcgtctggaacgtctattgcgattggtatgtcgagctcgcaaagcccatgctgctgggtccggacagcccagccaaggacgagacccgcgccatggtcgcctgggcgcgcgatgcgatcctgaagctgctgcacccgtttatgcccttcatcaccgaagagctgtgggaggtgacggccaagcgtgagggcctgctcgcgctggcgccgtggccgctcaagccggtcgggccgacgccggagcaactcgcgatgctcgccgcgacgacggggccgaccgatgcgctggtctcgccggcctgggtgctgccgatcttcgaccatgccgacttcactgatcctgcggcggaggccgagatcggctgggtgatcgacctcatcacccagatccgctcggtgcgcgccgagatgaatatcccgcccgcgacgctgacggcgctggtgcttgcgggcgcatctgcggagaccaaggagcgcgcccctcgctggaccgatgtgatcaagcgtatggcccggttgtcggacatctccttcgccgaccgcgcgcccgacggcgcggttcagcttctggtgcgcggtgaggtcgctgcgctgccgctgaagggcgtgatcgacgtcgccgccgagcgcacgcgtctcgacaaggagatcggcaaggccgacgccgacatcaagcgtgccgagtccaagctggccaatgagaaattcgtcgccaacgcggccgaggaggtcgtcgaggaggagcgtgaaaagcgcgaggcggcgctggcccgcaaggccaagctgctcgaggcgctggagcggctgaaacaggcatcgtaa

SEQ ID NO: 6891 - DNA, 603 bp, BradyrhizobiumColbertium
atggctccaatctcgaagatctcatccccgcctcttggcaagcggctgaagcgggcctttttcagccgcagcgttcacgaggtcgctcctgacctgatcggtgcgaccatgctggtcgacggcgtcggcggcatcatcgtcgaggtcgaggcgtatcatcacaccgatccggctgcgcactcctatcgcgggccgactccgcggaaccaggtcatgttcggcccgccgggctttgcctatgtctatcgctcctacggcatccactggtgcgtgaacttcgtctgcgaggaggaaggctcggccagcgccgtactgatccgcgcgattgagccgacgcatggcctggctgcgatgcgccgccggcggcacctgcaggacttgcatgcgctatgctcgggcccaggcaagctgaccgaggcgctcggcatcactatcgcgcacaacgccctgccgctggaccgcccgccgatcgcgctgcatgcgcggacggaggatgtggaggtcgcaaccgggattcggatcggcatcaccaaggcggtcgaacttccctggcgctatggcatcaagggctcgaagttcttgagcaagccatttccgaaatag

SEQ ID NO: 6892 - DNA, 135 bp, BradyrhizobiumColbertium
atgggcaatatcctgctctgttctcaggcgattctcacctcgaatggctccaatctcgaagatctcatccccgcctcttggcaagcggctgaagcgggcctttttcagccgcagcgttcacgaggtcgctcctga

SEQ ID NO: 6893 - DNA, 957 bp, BradyrhizobiumColbertium
atggtcgttattgtcgataccatctcgaacccgttgcgcccgcgccaccctgaaaaggtgaaccggcccgattccgcttcgccgccgaagccggactggattcgcgtgcgtgcgccgagcacccgcggctacgccgacacccggaacatcgtgcggtccaacggcctgcacacggtttgcgaggaggccggctgtccgaacatcggcgagtgctgggacaagaagcacgcgaccttcatgatcatgggtgacacctgcacccgcgcctgtgccttctgcaacgtcaagaccggcctgccgaatgcgttggatgcggccgagccgcagaacgttgccgaggcgaccgccaagctgggcctcgcccatgtcgtcatcacctcggtcgatcgcgatgacctcgccgacggcggtgccgagcatttcgcgcagaccatccgcgcgatccgggtcgcctgtccctcgaccacgatcgagatcctcacgccggatttcctgcgcaaggatagcgcgctcgaggttgtcgttgcggcgaagcccgacgtgttcaaccacaatctcgagaccgtgccgtcgcgctatctcaccgtgcggccaggcgcgcgctatttccactcgatccggctgctgcagcgggtcaaggagctcgatcccaccatcttcaccaagtccggcatcatggtcggcctcggcgaggagcgccacgaggtgctccaggtgatggacgacctgcggtcggcggacgtcgacttcctgaccattgggcaatatctccagccgacgcgcaagcatcacgccgtgatgcgctacgtgccgccggacgaattcagttcttatgagaaggtcgcctacaccaagggctttctgatggtgtcggcgagcccgctgacccgctcttcgcatcatgccggcgaggactttgcccgactgaaggccgcgcgggccgctaacgcccgctga

SEQ ID NO: 6894 - DNA, 471 bp, BradyrhizobiumColbertium
atgccccgtttttcgagcaagcgccgtgtcaatcacagcgcacccgagatgttcgatctggtcgccgacgtcgagcgctacccggaattcgtgccgctgtgcagcgcgctgaaagttcgtcagcgcatggccaagcccgatggcaccgaggtgctggtggccgacatgacggtgtcgttcaagctgatcaaggagtccttcaccagccgggtgacgctagatcgcgccaacctgaagatcctcgtcgaatacctgcaaggacccttcagcaacctcgaaaaccgctggacgttcgagcccaaaggcgagggcgtctgcgatgttggtttcttcctgtcctacgagttcaggagccgcatgctcgcgatgctgatgggctcgatgttcgatgccgccttcgcgcgcttctccacagcgttcgagaaacgggcggacgcgatctacgggcggccgaagctcgcgtcgacgtag

SEQ ID NO: 6895 - DNA, 780 bp, BradyrhizobiumColbertium
atgaccatcaatttcgatacgctgaaagcatcgctcatcctgtacggcttgaacgcgatctatgcgatcctgctgttggcggtcggctggtatctgtccggcgcgatgcaccgtttcgttgctcgcgtcctgagcgtcgcgcaccgcgtcgatccgctggtgacgttgttcgtgggcagcttggcgcgctacggcgtcctcgccgtcgtcggcattgccgtgctgcagctcttcggcatccagaccgcgagccttgtcgccgtattgggcgcgacatcgctcgccattggtctggcgttgcagggcacgctctccaatatcgccgccggcgtgatgctattgttgttccggccctttcacatcggcgacgatgtcgaggttgccggcaaggcaggcaaggtgagatctctgtcgctgttcatgaccgagctggtcgcgcccgacaacacgcagatcctgctgcccaacggacaggtttggggcgcggccatcatcaaccacagcacctatccgggcacaggcgagatcaaggtgacgtttccggtaccggcgagcgccgcttcggctctcgctgatcgcatcctgaatgagcttcgcagcgattcccgaatggacgatcaggctgcgccttcggtcaacatctccagagtcgtcgatgttgccaatccggcgtcgccgatcctggagctgactgtgagtgcgaaggcaaagccctcggaggcgaacgcggtcaggcagtgcgtgctcgatcacgccagcgcgctgctcgcagcggcgtag

SEQ ID NO: 6896 - DNA, 609 bp, BradyrhizobiumColbertium
atgggcggcagcgacccacgcgccctctcccgctcgctgctcgatctttgccggatgcgcaagctgacgatcgcgactgccgaatcctgcaccggcggtctggtcgcggccgctctgaccgacatcccgggctcctccgacgtgatcgaccgaggctttgtcacctattccaatgacgccaagcgcgtcatgctcggggtcgagccaagcacgctgacgaatttcggcgcagtcagcaaggagaccgcaaccgctatggcgatcggcgcactggagcgcgccgatgtcgatctcgcggtcgccatcaccggcattgcgggccccggcggcgccacgcccggtaaaccggtcggtctcgtgcactttgccgccgccgcacgcgacggccgtatcatccaccgcgagcatcgtttcggcgcgattggccgcagcgcggtgcgcgcccgctcggtggtcgaggcgctgcgcatgctgatggatctcgcccgcgggccgcaagtcgcagccaagccgcagcgtgccgccgccagccgcctgcgcccgcgcgtgacacgctcgccgcgccggcatgcagtgaagcgcaggtcgccgcgttcgccgcggagctga

SEQ ID NO: 6897 - DNA, 1182 bp, BradyrhizobiumColbertium
atggcgaaatcacaacgcaccgcggtcgtcctggtggctgccggacgcggcctgcgcgctggcgccggcggaccgaagcagtatcggacgatcggcggtgtgcccgttatctatcgcgccatggaggcgttcagccgccatccggacgtatcagcggtgcagcccgtcgttaatcccgacgacagcgccatgttcacggctgcggtcgcagggctgatgcacgagccgccgaccatgggtggggccacgcggcaggcctcggtgctcgccggcctggaggcgctcgccaggcacgagcccgacatcgtcctgattcacgacgctgcgcgtcctttcgtttcggcaggcgtgatctcccgcgcgatcgaggcggcgagccgcaccggcgccgcgatccccgttgttcccgtcaccgacacgatcaagctcaccggcgagaacggcgaagtcgaggacacaccggaccgggcgcgcctcaggatcgcgcagacgccgcaatcctttcgtttcgacgtcatccttgaggcgcatcgtcgcgcggcaaaggacgggcgcagcgatttcaccgacgatgcggcgattgccgaatgggcgggattgacggtcgcaacctttgaaggcgatgttgccaacatgaagctcaccacccccgaggatttcgtgcgcgaggaagcgcgcttggccgcccagctcggcgatatcaggaccggcaccggctatgacgtgcacgccttcggtgaaggcgaccatgtcatgatttgtggcgtgcgggtgccgcacaccaaaggtttcctggcccattccgacggcgatgtcggcctgcatgcgctggtggatgcgatcctcggcgcactcgccgacggcgatatcggctcgcatttcccgccgagcgatgcgaagtggaagggcgcctcttccgatcagttcctgaaatacgccatcgagcgcgtcgcccagcgcggcggccgcgtcgccaacctcgaggtgacgctgatctgcgagcggcccaagatcggccccttgcgcgacgccatgcgcgcccgcatcgccgagatatcaggcgtggacatctcccgcatcgcggtgaaggcaacgacaagcgagcggctcggctttaccggccgcgaggaaggcatcgcggccaccgcgagcgccaccatccgccttccctggagcgtgtaa

SEQ ID NO: 6898 - DNA, 1035 bp, BradyrhizobiumColbertium
gtgaccggcccggcagtattcggctctaagccgttgaaaataggcgatattgatgtcgccaccccggtcttcctggcgccgatgtcaggtgtgacggactcgcccgtccgccggctggccgccgagcttggggccggtctcgtcgtctccgagatgaccgcgagcgatgagctcgccagcggccaccggatgtcgcggttgcgctgcgaagccacgggaatcggtccgcacgtggttcagctcgccggctgcgaacggcattggatggccgaaggtgcccggatagccgaatccgaaggcgccgacatcatcgacatcaacatgggctgcccggcccgccacgtcaccggcgggcagtcgggctcggcgttgatgcgcgatctcgaccatgcggtcagcctgatcgacgcaaccatcgcggcggtgaaggtgccggtgacgctgaagatgcggcttggctgggacgaccgcacgcgcaatgcgccggaactagcgcggcgcgcggaggcatcaggcgtcaagctcgtcactgtccatggccgcacccgttgccagttctacaagggcgaggccgattgggatgcgatccgcgccgtgcgcgaggccatctccattccgctcgtcgtcaatggcgacatcaccacctacgagaaggcgctcgcagccttggaggcctccggcgccgacgccgtcatgatcggccgcggcgcgcagggccagccctggctgcccggtcagatcggtcgccgtctcaacggcgggcctgaggaggccatgccctcactcgaagcgcagctgcagtacgtccgcacgctctatgacggcgtttgcgcgctctacggtttgcgcatcggtctcaggcatgcccgtaagcacctgggctgggcgcttgatgtcgccgcgcaggcgagccgtgcccccgctgagaagctgaaatcctggcgccagaagatcctggtctcggaggatccgcgcctcgtccaccaatcgctgcaagacgccttcgacgatttcgcatggagggctgctgcatga

SEQ ID NO: 6899 - DNA, 1170 bp, BradyrhizobiumColbertium
atgagcttagccgctgaacatcgtcggccgtccgacagcgacgcgatcctcgatgcacttcccaatcccgttctgatgatcgggccggacggcaagattgtcgctgccaatatcgcgaccgaagccttcttcgagatctcgacccagttcctgaaacggcagtcgctgaaggaactggtgccgttcggcagcccgctgctggctttgatcgaccaggtgcgttcgtcgaattcgccggtcaacgaatacaaggtggacctgggcacgccgcggatgggcggcgaccgtcaggtcgatctgcatgtcgccccgctgacggagcggcccggccacatcgtggtgatgctgcaggagcgcaccatcgccgacaagatggaccgccagcttacccatcgcagcgccgcgcgctcggtgatcgcgctcgccgcgatgctggcacacgagatcaaaaacccgctctcaggcatccgcggcgcggcgcagctcctggagcagcaggcctcgtccgaggaccgcatgctgacgcggctgatctgcgacgaggccgatcgcatcgtgacgctggtcgaccgaatggaggtattcggagacgagcgtcccgtggtgcgcggccccgtcaacatccattcggtgctcgatcacgtgaagcggctggcgcagtcgggctttgcccgcaacatccgcttcgtcgaggactacgatccctcgctgccgccggtgctggcgaaccaggaccagctcatccaggtgttcctcaacctcgtgaagaacgccgccgaagccctgatcgacgtaccggacgccgagatccagctcacaacagcgttccgccccggcgtgcggctgtcggtgcccggtcagaaatccagggtatccctgccgctggaattctgcgtgaaggacaacgggccgggcgtgccggacgatcttctgcccaacctgttcgatcccttcgtgaccaccaagcagaccggctccggtctgggccttgcattggtcgccaagatcgtcggcgatcacgggggcatcatcgaatgcgaatctcagccgcgcaagaccaccttccgcgtgctgatgccgatgtattccacatcggtgaaacatgccgatcaaagcagtcgcgccgactctgccgggacgtcgtcgcctgcgtcacagggggcaaaatga

SEQ ID NO: 6900 - DNA, 1443 bp, BradyrhizobiumColbertium
atgcccgcaggtagcattctcgtagccgatgacgataccgccatccgcaccgttctcaatcaggcactgtcccgcgccggttacgaagtgcggctgaccggcaatgccgcaacgctgtggcgctgggtcagccaaggggagggcgatctcgtcatcaccgacgtcgtgatgcccgacgaaaacgccttcgacctgttgccgcggatcaagaagatgcggccgaatctgcccgtcatcgtcatgagcgcgcagaacacgttcatgaccgcgatccgcgcctccgagcgcggggcctatgaatatctgccgaaacccttcgacctgaaggagctgatcgccatcgtcggccgcgcgctcgccgagccgaaggagcggacctcgacgccggacgaggacgccgagatggaggcgatcccgctggtcggccgctcgccggccatgcaggaaatctaccgcgtgctcgcgcggctgatgcagaccgacctcaccgtgatgatcacgggcgagtccggtaccggcaaggagctggtggcgcgggcactgcacgattacggcaagcgccgcaacggtccgttcgtcgcggtcaatatggccgcaatcccgcgcgacctcatcgagtccgaattgttcggccacgagcgtggagccttcaccggtgccaacacccgcgcctccggccgcttcgagcaggccgaggggggcacgctgttccttgacgaaatcggcgacatgccgatggaggcgcagacccgcctgctgcgggtgctgcagcagggcgagtacaccactgtcggcggccgcaccccgatcaagaccgacgtgcgcatcgtcgcagcctccaacaaggacctacgcgtgctgatacagcagggcctgttccgcgaggatctattcttccgcctcaacgtcgtcccgctgcggctgccgcccttgcgcgagcgcatcgaggacctgcccgatctcgtgcggcacttcttcgcgctggccgagaaggacggcctgccgccgaagaagctcgacacgctggcgctggagcggatgaaacagcaccgctggccgggcaacgtccgcgagctcgaaaatctcgcccggcgcctcgccgcgctctatccgcaggacgtgatcacggcctctgtcatcgacggcgagctcgcgccgccttcggtcagccccggcgccgcggttcagcagggcgtcgacaacctcggcggtgcggtggaggcgtatttgtcctcacacttccagggatttccaaatggcgtgccgccgcccggcctttaccaccgcatcctcaaggagatcgaggttccgctgctcacggccgctctcgctgccacccgcggcaatcaaatccgcgcggcggacctgctcggtctcaaccgcaatacgctccggaagaagatccgggacctcgatatccaagtctatcggagcgggggctag

SEQ ID NO: 6901 - DNA, 2340 bp, BradyrhizobiumColbertium
gtgcggcgctggctggcgccggttgcggtggcgctggcgctgctgtcggccttcctgactttcctggttctcaccggcctcaccaggatcgagccgacgccggaggttgtccgcacgttctacctcatcaatgcagccacgatcctgctgctggtcggcatcatcatccgcgaactctggcaattgatcctggcgcgaagaaggggcagggcggcggcgcgcctgcatgtccagatcgtcagcctgttctcgatcgtggcggtgctgcccgcggtgctcgtcgccatcgtcgccaacgtcaccatctcgcgcggcctcgaccggttgttctccggtccgaccaaggaggtgatccagaactcgctgacgattgcgcgcgcctatatgcaagaccacgcgcagctgatccgaggcgacattctcggcatggccaacgacattgcgcacgcccggccgctctatgaccaggatcgccgctcctttcgcgagatgctgacggccagcgccagctcgcgcaatttgccgggcgcgatgatcatcgacaagaacaccaacatcctggagtcggccgacaccggcatgcggctcgcctattcgccgccggcgccggactttctcagcaatgtcaacgagagcgagcccgaaatcgcggtgctcccagatgcgagcttcgtcgccgcggtgatccgcctgcgcgctttcaacgacacgttcctctacgtcgcccgcccccttgatccgaacgtcgtgaatcagctcaagcagacggaggtcagcgtcgccgaatacgctcagatcgagtcgcgccggctcggcattcaggtcgcgttcgcgctgatgttcgcggtgatcgcgctgaccattctgatggcctcggtgctgatcggcctcaacttcgccaattcgctggtctcgccgatccggcggctgatgaacgcggcgcagacggtttcgaccggtgaccttcatgtccaggtgtccgtgcaccaatcggaaggcgatctcgcccagctgggtgagactttcaacaagatgacgcaggaattgcgcagccagcgcgacgagctcgtcaatgcgagcgacctcatcgacagtcgccgccgcttcatcgaagccgttctgtcctcggcgagcgcaggcatcatcggcgtcgatgcatctggcagcgtcggcattctcaaccgctccgccgagaagttgatcgggcactccgaagcggagacgctgggccacccgctctccgacgtgctgcccgaactcgacgacatgatgaagacggcgcgggaagggacccagcggctggtccagggccagatcaccatcaaccgcgacgggcaggaacgtaatctctccgtccgcgtgagtgccgagaaaaatcagccgcatgacagctacatcatcaccctcgatgacattaccgaattggtctcggcccaacgcacatcagcctggggtgacgtggcccgccgcatcgctcacgagatcaagaatccgttgacgccgatccagctctcggccgaacgcatccgccgcaagttcggcaagacgatcaccgaggacaaggacaagcagatcttcgaccagtgcaccgacaccatcgtgcgccaggtcgatgacatcaggcgtatggtcgacgagttctcgcgcttcgcgcggatgccgaaacccgtcatggaaggcgaggacgtcgccgacaccgtgcgtcaggcggtattcctgatgaaggtcgctcatcccgagatcgatatcgaggccgagttcaagcaggatccgctccgtgcccagtttgaccggcggctgatctcccaggcggtgaccaacatcgtcaagaacgccaccgaggcgattgagcaggtcccagcggaggaactcggcaaaggccgcatcgacgtcgtggtgtcacgagagggcgacgacgtgctgatcgacgtgatcgacaatggcataggcctgcccaaggtcgcgcgttcgcgcctgctcgagccgtatgtcacgacgcgcgccaaaggcaccggccttggccttgcgatcgtcggtcgcgtgctggaagaccatggcgggcgcatcgaactgaaggacgcctccgacttccgcgaagggcagcgcggcgcctggatgcggatgcgctttgcggtctccgggcaaccggcaaaatccgggggatccgagccagcggcgcccgccgggcaagcaaccaagccggaaggcaaggagacggccgcggaattcatcaaggagtccaacagggatttggaaacaaaagagccggccgccggaaccaaagagccggctgaaaagaccaatgattcaaccaaaatcgaagcctcaacaggcagctga

SEQ ID NO: 6902 - DNA, 1371 bp, BradyrhizobiumColbertium
atggcaagtgaaattctgattgtcgatgatgaggccgatattcgggatctcgttgcgggcattctcgaagacgaggggttcgtcacgaggaccgcgcgcgacagcgacacggcgctggccgagatcgccaatcgtcggccgcatctggtgttcctcgacatatggctgcagggctccaagctcgacggcctgcagctcctggagcaggtcaagaaggacaacgccgatctgcccgtcgtgatgatctccgggcatggcaacatcgagaccgcggttgccgcgatcaagcgcggcgcttacgacttcatcgagaagccgttcaaggccgatcggctgatcctggtcgcgaccagagcgctggaaaactcccggctcaagcgcgaggtcaaggagctcaagcagctcgcaccgagcgccagccagctcgtcggccgttcgccgagcatgaaccagctgcgccagaccatcgagcgcgcggccaaggcgaacagccgcatcctgatcgtcggccctgccggcgccggcaaggaattgacggcgcgtacgctgcatgcggcctcgggtcgcgccgacggtcctttcgtcgtcatcaacgccgccgcaatcacgccagagcggatggagcacgagctgttcggcatcgagcagtccaacggcgagcagccgcgcaagccgggcgcgctcgaggaagcccatggcggcacgttgttcatcgacgaaatcgcagacatgccgcgcgagacccagaacaagatcctgcgcgtgctggtcgagcaatcattccagcgcgtcggcggcaccgccaaggtgcaggtcgatgtgcgcatcatctcctcgaccgcgcgcaatctcgaagaggagatctcggccggccgtttccgcgaagatctctaccaccggctctcggtggtgccgatccgcgtgcccgcgctgtcggagcgacgcgaggacattccggaactgatcgactacttcatggagcagatctccgccggcagcggcctgcccaagcgtcagattgggcaggatgcgatggcggtgctgcaatcccatgtctggcccggcaacgtgcgtcagctccgcaacaacgtcgagagagtcatgattttggcggctggcggacctgaggtgatcatcacggccgacatgttgccgcaggatgtcggctccatggtgccggcaatgccgaccagcaacaacggcgagcacatcatgggcttgccgctgcgcgaggcccgcgaagtgttcgagcgcgactatctgatcgcccagatcagccgtttctcaggaaatatttctcgtacggctgagttcgttggcatggaacggtcggcgctccaccggaaattgaaggccctcggtgtgggctag

SEQ ID NO: 6903 - DNA, 249 bp, BradyrhizobiumColbertium
atggcggcagaccgcgcacaaaacctacaggacaccttccttaatcacgttcgcaaaaccaagacgccactgacgatctttctggtcaacggagtgaagctccagggcatcgtgacctggttcgacaatttctgcttgctgcttcggcgcgacggtcactcgcagctcgtctacaagcatgcgatctcgaccatcatgccgggcgctccgatccagttgttcgaaggcggtgaggatcagccggcttga

SEQ ID NO: 6904 - DNA, 1203 bp, BradyrhizobiumColbertium
ttgctcgatcgcggcgagcagcgcgtcgatgccctcgcccgacacggccgaaaccagcatcgccggatgatcctccggcctgcgcgcggcgatattgagcaattcttcgcgctgctcaggggcgaaacggtcgatcttgttccagacctcgatgatgcggccggaatcgtcggggttgatgccgagctggcgcagcacggcatcgacgtcgctctgctgggcttcggcatcttcatgagagatgtcgcgcacatgcaggatgacgtcggcttcgagcacctcttccagtgtggcacggaaagcggcgacgagctgggtcggcaggttggagatgaagcccacagtatccgacagcatcgccttgccgccatgcggcaggttgagcgcacgcaaggtcggatcgagcgtcgcgaacagcatgtcggcggcctgaacgtcggcgcgggtcagacggttgaacagcgtcgacttgccggcattggtgtagccaaccagcgcgaccacgcgatacggcacgcgttggcggccggcgcgatgcagacgccgcgtcgcctgcaccttcttcagttcgctctcgagcttggagatgcgctcctggatcaggcggcggtccgcttcgatctgcgtctcgccggggccgcccatgaagccgaacccgccgcgttggcgttcgagatgggtccacgagcgcaccaggcgcgagcgctgatagttgaggtgcgcaagctccacctggagcgagccttctctggtcttggcgcggcggccgaagatttccagaatgagcccggtacggtcgagcaccttggcttgccattccttctcgaggttgcgctgctggatcggcgacagtgcgcaatccatcaccacgagctcgacctccagcgtcttgatcagcccggcgatttcctcgaccttgcccttgccgatataggtcgcgggccggatctggccgaccggcgctatgatggcatctgcaacgacaagatcgatcgcgcgggcgaggcccgcagcctcgtcaagccgcgcctccacatcgcgcatcgcatggctttccgattgcgcgtcggcaccacccccacgcactctcaggtaggggccgatgacaagcacccgtcccgtatgagcccctgccgaccgcggccggtcggcatccccgccgaaattccggggttccaatcagatcactctcaagccggctga

SEQ ID NO: 6905 - DNA, 852 bp, BradyrhizobiumColbertium
atgaccccttcccgcgacatttcccgcctgatcgagatcatggcggcgctgcgcacgccggtgaccggctgcccctgggacctcgagcaggattttgcgaccatcgcaccctacacgatcgaggaagcctatgaggtggtggacgccatcacccgcggcgatctcgacgatctcagagaggagctcggcgacctcctgctccaggtcgtgtttcacgcccagatggcgtccgagcagaacgcatttgcttttggagacgtcgtcgaggccatcacacgcaagatgatccggcgtcatccccacgtcttcgccgacaaggacggcaatctcgcgccctcccacgtcaaggaagtctgggaccgcatcaaggccgaagagaaggccgagcgcgctgcgcgccgaccgccggaagacgcggccgggcataaatcgctgctgtcgggcgtgaaggccggccagccggcactcacccgcgcaatggagctgcagcgcaaagcctccaccgtcggcttcgactggaacgatccgcgtgcggtgctgcaaaagatccgcgaggaggcaaacgagatcgaagcggcgctggatcgcaacgacaagcaggagctggcagaggaaactggcgacctcatgttcgccctggtcaacctcgcccgccatgtcgatgccgatccggaagctgcgctgcgtgccactaacgcaaaattcgagcggcgctttgcctatatcgaacgcgcgcttgaggcgcagggccggacgctcgagcaggcgtcgcttgaggagatggacgcgctgtggaatgcggcgaagggtgaggagacagcgtcagaggagcgcaatcgggcccgccgctaa

SEQ ID NO: 6906 - DNA, 714 bp, BradyrhizobiumColbertium
atgagtgacgcattttcctccgaaaccgcgctggtgctgttctccggcggccaggattccaccacctgcctcgcctgggccttgagccgctttgcgggggtcgagacgctggggttcgagtacggccagcgccacgctatcgagcttgcctgccgtgaccggctgttcgacggcatcaaggggctgcgggccgattgggccgcaaagctgggcgagagccacacgctgtcgattccgacgctggcggccgtgtccgacacggcgctgacccgcgacgtcgcgatcgcaatgggcgcggacggcctacccaacactttcgtgcccggccgcaaccttgtgttcctgacgtttgcggcagcgctggcctaccggcgcggcatcacgcacatcgtcggcggcatgtgcgagaccgattattccggttatcccgactgccgcgatgagaccatccgcgccatgcaggtcgcgctctcgctcggcatggcgcgcaacttcgagctgcatacgccgttaatgtggatcgacaaggccgcgacttggcagctcgcgcaggatcttggcggcgacggcctcgtcgatctcatccgcgagcactcccacacctgctatctcggcgaacgcggcgcgcagcacgactggggctatggctgcggggagtgcccggcgtgcagcctgcgggcgaagggatggcgggagtttgtggcgggcagatga

SEQ ID NO: 6907 - DNA, 2289 bp, BradyrhizobiumColbertium
gtgaccgcggcatcgagcgtgatcgccgaagcccagaccgcgagcggctcatctcagcaatccgtgctgccggccgtgacagtcgaggctggaaagccggcgacgccgcgccgcacgagacggcagagcacggcgcgtgcgacgcggcaaactcaatcacccgccgttcagccggcgcaaggccggcaagccacggcagcggctcccgaaggcacgaacagcgattccctgaagccgatgggcggcaggctgccgcaaccgggcattcctcatccgccgacgcagagcatttcggttgtcgaccgagcgcagatcgaggcgacgtcgccaactggtctgctcgatgtgcttgcctctgtcccggggatatcgatcgcccgctccggtggcatcggcggccagatctacttgcgagggttctcgtcaaacaacttccgctcacccctgttcatcgacggcgatcgcttccgcggccgcaatacgctgcagctcaactatcttgcccctgatgaagtcgagcgcgtggaggtcatccgcggtccaggctccgtcgtctacggcagcgaggcgctgaccgggctggtcaacgtcgtgacccgatcgtacagcggcgacacgtcggggccgttccggttcacgggcggcggctggtcagctggttacggcagcgtcgccaactcgttcagcacctatgattgggtcaagggcgccggacagggtttcgatttcatcggcggttttgccggccgctggggtagcgactatcagactgcgctcggaacggtgccgaacagcgactatcagagtgtcggcggcaacatcaagctcggctacacgcccgatatcggccagaggctcgagctttcgttgcgctcctacagcgaggtggacgggcgcgccggcggtgtcggcggagcgccgggcgcgccatacctgcaggtccgacaggatcccaatcaggtgcattcggcgcgcatcgcctataccggcgagctcgacggcctggtgaagcacgtcgagacatccttctacgtcaactatttcgatacgaagctgtcgacgatcaacaatacgatcaacgccgcgggcatcgccacgaagactgtcaggtccaccagccatgtcatcggtccgctggtgatcggcgggcgctcactggctgaaattccctggctcggtccttggggcgcaacaaagaagacgctcggcctcgatggcttccgggaagcacggccgggcagcgagtcgacgtccgagaccatcacccgcaacggaacgacgggggtcgtgacaagcgacgtgatttctccttacaccaagcaaggccccgacacgacgcaatccaacgtcggcgcgttcgtcctgcatgaatggaagccgattcagccgctgacgctttcggcaggcggccgtttcgactggttcaacacgacaactgatacctcgccgctcgcctcgaccattcctgcaaatgtcagagcggtatacgcaagcaagaccaacgtggatcaaacggctccgaccggcagcctcggattcgtctacgccgtcctgccaaacgtcgacctgctcggcaacgtggcgacctcgttccgccagccgacgaattccgagctgtttgcggtgacggccacccagctccccaatccgaacctgaagccggagagcggcgtgacgtatgaaggaggcgcacgctttcatacgaccaatgcggagctcaaggtcactgcgttcgatacgcactacgagaactttcttcaaacggtcgcagtaacgctcaacggcgtcggcggatacacccagtcacagaacgtcggcaaggccgaggtgaccggcgtcgaggtggaagcgcgctggcaagtgacgccggccgtcaacctgttcacgaattttgcccagctgcgcggcaccaacacggtgacggacaagccgctgccctttctcgccccgtatcgcgggcgggtcgggatacaatacgcggacccgagcggcgcctactcgatccttggcgtgatcgattgggccgccagcaagacccggatcgatccggcgcaggaatatacgacctcgggctacgccattcccaagctctatgcgacgcttcaactgggcaagctggtatcccctcaactcggcgataccaagctgatcctcggcgtggagaacatcttcaatacggcttatgtcgacgcatcgacgttcgtgaatcgctcctatccgcggagcttcacaaaccctttggtggagaccggccgcaacatctcagtgaaagtgcagcacaccttctag

SEQ ID NO: 6908 - DNA, 1044 bp, BradyrhizobiumColbertium
gtgattgcgctcggcgcattcagctcggctcatgcgattgatctgactgaccagcgcaatcgcagtatctcattcagccgactgccggaacgtctggtcatcatcccgattccggcgccctcgaccttcatggcgatcgatggcagcgagaggaagatcgtcggcatgaacgaatacgccgcacgcgcgatgcaggagggcatttccggaaagctgtttccaggcttcaagcaaattcaaacgggcgtgacgaccgggggagacgcctcgaatttcgctccaaatgtggaggcgatcctcgcattgcgaccggatgccattttccaatgggccaacagcaacgaagtcatcgggccattggatcgaaccggaatacccgtcgtcggaatgcgtgtgggctcgttcgagaattacgtcgcgtacgtgaggctgatggggaagatcgcgggcagggaagaaagggccgccgaacttctcggcaagcaggaagagatacgtcagtccctggcatcgcgctttgccgatctatcatcgacccagcggccacgcgtactctacttcaatcgcgcgaccaacatgctgcgcgtcagcggccaaggcacggcgcaggatctcgccatccaattggccggcggacagaacgcgatcggtagcacgccttcaatcagcaccgtgaccatcgaacagatcctggcgtggaatccgcaggtcatcctgctcggaaacttcgattcagcgatgccgtccgatctctacagcgacccgcgctggcagggcgtcgatgcggttcgggctcgtcgcgtctatcgcgttccgctgggcggttaccgctgggatccgccaagtcacgagtcggcccttggctggctctggttggcgggtctgctgcatcctgagcgtgggcaggtggacattcgtaggtcggtgagggactggtttggctttctctatgcctacgatccgacggacgaggagttggaccgcatcctatttctgcaggaaaacgctggctcggccggctacgaagcatatcgggctcattga

SEQ ID NO: 6909 - DNA, 957 bp, BradyrhizobiumColbertium
ttgctgtggtcggtcgcatcgggacggtatcaggtcccgttcgacacggtcctgtcgatcatcctgtctcacctggtcgccgtcaaagtgacatggacgaccaccgagtccgtggtggtcgaaacggtgaggctgccgcgcgtgctcaccgccgccatcgcaggcgccggtctgtcactctgcggcgcggtgctccaggccatcttccgcaatccgctcgtcggcccgcagacgatcggggcatcctccggtgccgccctcgggggcgtcaccgtcatctatctggtcgggttcggaccactcgtccaggtcggagcgtttggcggagccgccctggcgctcttggcggtgcttgcgtttcatcgcagcgacaatctctcgccgatccttacgctcgttctcgcgggggtggtcgtcagcgcgttctgcagcgcgctggtcggactcgtgacttacctcgccgatcccgagacgacattgcaggtgatcgtattctggctgttaggcagctttgcatcttcgacttggccgcaattcggcttgattgcattctgcaccacgctcgcagccatcgttctcattgggatgcggtggcgcgtgaacgttctttcgcttggagacgacgaggcccgaaccctcggcgtcaatccggctcgggaccgattgatcctgcttgccgcggcgtgtcttgcgatctcgtcccaggttgcggtcagcggcaccatcggctgggtgggtctcatcattcccaacctggcgcgcatgatggtcggggcagacaaccgccggcttctgccggtatcgacggttcttggcgccatctttctggttgtggcggacacgctggcgcggtcgctcacgccggcggagattccggtcggaatcatcacggccctggtcggcaccccgatttttgcgctgcttcttcggcgcaccacgaagagtggcgcggcatga

SEQ ID NO: 6910 - DNA, 777 bp, BradyrhizobiumColbertium
atgatccaaatcgagaatgcaggccacagctacgggtccgggcagtggctctttcgtggactgtcggcgacctttcccgccggcaagatcgcagcgatcctcgggcccaatggctgtggcaagaccaccctgctgagggcgatcagcgggacgctgaggctcaaggaaggaatcgtcgccatcgacggccacgtgggtttcgttccgcaggcactgacggcggatcagtcctatagcgcggcggacatggttctgctcggtcgaagccgctacctcggcaggttcaactcaccgaaccgcaaggaccgggagcgcgcctatgcatgtctcgaggaggtcggcctcacggcgctcgcgcagcagcgttatgaccggctcagcggcgggcagcgacagcttgtcttgctggcccgcgcactggctagcgactgcaaggtgctggtgctggacgagcctgcgtcggcgctcgacatcgccaaccagggcgtcgttcttcgtctgctccttcgccttgcaagctcattaggcttgaccgtactgttcacgacgcatcaccccgaccacgcgatcggcatcgcccatacgacgttgctgatgcagcgggatgccacccacattgcgggccgcaccgaggtggtgctgacggaaggcaatctcgcccggatgtatggcgtgccggtgcgccgcgtggatgttcatgcggacgaagagacggcatcggcgatcgtgccgctgcacggcttgcgaggcagagtgccggatctggcggcgcgttga

SEQ ID NO: 6911 - DNA, 651 bp, BradyrhizobiumColbertium
atgagcctggcgatccttgacggcggcacgttttatcatcacgcggcaatccacggtcagcgctatcgagagctgttcgacaagaccatctatgcccccgagctcacggctgatgccttggtcggcgtcacattcctgatcgttccggatcgtgtcaatccgaatattcttcgcaccaagcgcgacgttttgatcgattttgcaaaagccgggcacacgctggccgtgttcggcgaaaatcgtgctgacacatggttgccgggcgtcacgtgggcgccacggccaaccaatttctggtggtggctcgacaaagacgcgcgtccgccgaaccgtctgctggcgtccgagcacgagttcttccaggcggtgccattcgaacatacgatatggcactttcacggcgtgctaactccgcctgcgggggcccgggcgttgatcgacgttccggccgatccgcagggccgcgacagcggcggcgcgttgctctacgaggatcgcgtcaccctgcccggcagcatgctcgtctcgacgctggatccattctatcatcacggcagcaacttcatgcccgcagccacgaagcttctcgacggcttcctgccctgggccagggcgaaggccgctctccgagcttattccagcgacgtctga

SEQ ID NO: 6912 - DNA, 603 bp, BradyrhizobiumColbertium
atgaagccgggacttgcgctcagctttggctacgaggacgggtcgctgcatgctttgaccagcgcaggaacggcgccggaaattctgctccgcgacatctattcgctgcccgggatcgacctgaacgatttcagcgtcctcttcgtgagcatgcatagcgatcagcgcttcctggcggctcgcgcgctccagatcgagcaattcctggttcgcggcggcgtcgtcgtcgccaacggtcatcatgcctattcctatcttccgcgcatggcaggctttcacaccattcaccattacaggctcagcgacatcaccgtgctgcgcctcaccgatcatcccatctggcacggcatcgatccgcgcgatctgaccttccgccgcggcgtgtccgggttctatggacgggtctggcacgaggcgccgccggatgcgcaaatcatccatgcgcttggcaagccggacatgccgctggacttcatctatcccgtcggtcgcggtcacgtgcttttccatgggggaaacgacctctggacctttggcggcgaggacaagcaactggcttcccggatcatgcaatgggtcgcaggagagcgagacgttcaatga

SEQ ID NO: 6913 - DNA, 492 bp, BradyrhizobiumColbertium
ttggccgaggaggagcccatcgagatcggctttccgatggtggccgcctatcatggccaatccgcgctcgccatggccgcgatcgtattccaggcgcagcgtgccgcgttcgccttgctgtcgccgcaagctgtgccggcacgacgcgacatcagcatcgtgagcggacaccctggccccggtgtgcgcgacgccttcgaggtcatcacccgcgccgtgacccgcggagcttatgtcgtagaccgctcgctgcccgatgcgagattcgtagcgggccacgccatttcgtacagctttcgaattacgctgggtgaacgcaccgtcgagatggcgttgcggccgggcgttctgcccgggcggtttttcgagctcgtgttcaccagggatcgcacaacagagcaggagcgtgagctgagcgcattgaagcgtgccgttgcgcaggatgtgctcgccaaggagccagacaccctcttcacgatgcgggtgagctga

SEQ ID NO: 6914 - DNA, 384 bp, BradyrhizobiumColbertium
atgaacagcagcacacaagccgccgccgcggcgacggcggcgatccccagcattccccgcgacgatgaaggcccggtgttccgcgcgccttgggaagcgcatgcgttcgcgatggccttgacgcttcatgagcgcggcgtgttcacctggccggaatgggccgcagcactcgctgacgagatcaagcgtgcccaggcggcgggcgatcctgatacgggtgagacctactacctgcattggctcgccacgcttgaaggtcttgttgcgcgcaagggtgtcgcctcgacggaaacactgcaccgctatcgcgacgcctgggaccacgccgccgatcggaccccgcacggcaagccgatcgagctgcagccggaggatttccgctaa

SEQ ID NO: 6915 - DNA, 660 bp, BradyrhizobiumColbertium
atgaacggcgtgcacgacatgggcggcatggacgggttcggcaaggtcgagcccgaagccaacgagccgatgtttcacgagcagtgggagtctcgcgtgctggccatggtgcgcgcaatgggcgcagccggcgccttcaacatcgacacctcgcgtttttatcgcgagaccttgccaccgcacgtctacctgtcgagctcgtactacaagaagtggtttctcgggctggaggagatgctgatcgacaaaggctacctcacccgcgaggaggtcgccgccggccatgcgatgcagcctggaaaggcgctcaagcacggcaggttcgatctcgccaatgtcgagcgcgtgatggtgcggggcaagttcgaccgtcctgctccggcaccggcgaaattcagcatcggcgaccgtgtgcgcgcgaagaacatccatccgacgacgcacacgcggctgccccgatacgtgcgcggccatgtcggagtcgtcgagctcaaccacggctgccacgtctttcctgacacggccgcgatggagcgcggcgagaatccgcaatggctctacaccgtggtgttcgagggccgcgatctctggggccctgacggtgatccaaccacgaaggtctcgatcgacgcgttcgagccctatctggaccccgcatga

SEQ ID NO: 6916 - DNA, 630 bp, BradyrhizobiumColbertium
atgagccacgagcacgaacatcatcacgatcacgaccattccgagctgtcggagaccgagctgcgcgtgcgcgcgctcgagacgatcctgaccgaaaaaggctatgtcgagccggccgcgctcgatgccatcatccaggcctacgagaccaagatcggcccgcataatggcgcccgcgtcgttgccaaggcctggacagatccaaccttcaagaaggcgttgctggacgacggcagcaaggcgatcggcacgctgggccatgtcagccgcgtcggcgaccatctcgtcgtcgtcgagaacacgcctggacgccacaacatggtcgtgtgcacgttgtgctcctgctatccctgggaaatgctggggctgccgccggtctggtacaaggccgcgccctaccgctcacgcgccgtgaaggacccgcgcggggtgctcgccgatttcggcgtcgccttgccgaaggacacggaaatccgggtatgggattccactgcggagacgcgcttcctggtgctgccgatgcgccccgaaggcaccgagggctggagcgaagagcaactcgccgggctcgtcacacgcgattccatgatcggcaccggcttgccgcgaaagcccggagcgccatcatga

SEQ ID NO: 6917 - DNA, 819 bp, BradyrhizobiumColbertium
gtggagacgatggtgacggactacgtgaagatcgagaagggccttgggcctgagggacggattgcggtggtgcgcttcgaccgcggcgacggcatcaacgcgctctcgccggaagcgttgcgccagctcaccgcggcggcgcgcagcttcgaggacgacgcggcgacctccgtcgtggtgctgaccggcagcacgagcacattcagcgccgggttcgacctcaaggacgcagagggacgttcgcgcaaggacatggatctcggcacgctgcggcggcatctcaagctcgggccgcgcttgacgcaagcctggcaggaaatggagcagatcacgatcgcggcgatcgagggcttttgcgttggtggcggcgtcgcgctggccgtggcactcgatttccgcatcatgggccgcgatgcgcatctgcgcgtgcccgagatcgggctcggcatgaacatgagctggcagagcatcccgcgcatgctgcatctgatcggaccggcccgcaccaagcaggcggtgatcctggccgaccagcggatcagcgcggacgaggctcatgaatggggcttggtggagcaggtgaccgaacccggccacgcgttcgacgccgccatggagcttgcccggaaagtcgccgcacagccgccgctctcggtcgcaatgacgaaactcaccgtgaaccggctcgcgcacgcgttggacgatctcgccagccacatggacatcgatcagttcgcactcgcgagtctcagcgaggaccacaaggaaggcgtcgaggccttcctggcccgccgcaagccgcgcttcagggggcgctag

SEQ ID NO: 6918 - DNA, 990 bp, BradyrhizobiumColbertium
atgcccttaagcgcaattcttccgattcaagactcgggcgccagtctgcttcaggcgagcagtagcgatgtcgacgagcattgcgcttcgctcggaggctggcggctgagctacgaccagatcagcgccggcgccttcaggggcagctttacccagctctccctgccgcgactcgacgtctttcgtgagatcaccagtcagcaggtccgccaacacggtctgctgggcgacggctgctttggtattgctctgccgtggcagggtgacggtgagatcaattgcaacggcgccagcgttgcaggcgcccaggtcatcgcctgcatcgacgccgaaatcgacatctgcacgccgaagtcgttcgagctgcgcggcgtcgtcgccagcgcggcgctgatcgaggaactcgccgcccggctcgatatcgagctgccgcgcgtggtctggcatcagctgcgggtgatcgaaatggcacaggcgccggtcgcgcgattgcgagcccaccttgcggccattcacgacaccatcacgaccacgcccgaacgattcgaccaaccggccgtccgcgcggggctcgaagacgccctcctcgtcgagatcatggacatgctgccgaccgcacgcgcgaacgattccggccgcagcgcggcggcgcgcaagcgcaccgtggaacgtgcccgggcgctgatgcatggcagcggcgagcgtacgctctcgctgctggaggtctgcaaggcggtcggcgccagcccgcgcaagctcggctattgcttccaggaggtgttgggcacgagcccgatgcactattggcgcgcgatgcggctgaaccgcgtgcggcgtgatctgaagcgcgccgccggcacgggcgcctccgtttacgacgtcgccgtacggcacggcttctggcacttcagccagttctcgctcgactacaagcgccatttctccgagctgccatcggagacgctgcggcgcaccagactggcgccttga

SEQ ID NO: 6919 - DNA, 1197 bp, BradyrhizobiumColbertium
atgcgaccgaccgagatcatgcgcggcagtccgcccgcgcccgaggcgcaggtgacacgcgccaactggcgcagttttccggcgatccgctggggctttacccacacccgcgaagtgctgccgaccgcggaggtccgccgttccgctcatccgactccgatgcgaagcgcgccgcgcgaactgtcaaagctcggcttcaccacgccggacggccagccgaccaccgtcgaagccaccctgcacgagaccttcggcgatgcgctgctggtcatgcacaggggcaccctggtccacgaatggtatggcgacggcatgagcgcgaccacgccgcatctgatttgctcgatcagcaagtcgatcgcgggcacgctcggcggcattctcgccgcgcgcggcttgctcgatcccgaggcgagggtggtgcgctacgtgccggagctggaggcctcggtctacggcagctgcacggtccgcaatgtgctcgacatggcggtcgccatcaagttcgaggaggattatgaggaccccgccggcgacgtggcgcgctaccgcttttcatcgggctgggacgtgccgccgcagggtgtcgagcccagccaccagcgtgcctatctcacaacgctgcgcggcaccggcaagccgcatggcaaggtgtttcactacgtctcgaccaataccgaagtgctcggctgggtctatgagcgtgcctgcggtgcgccttacccgcgcatcctctccgaatatctctggcagccgatgggcgcggaggaggacggctccctgaccctcgacagccacggcatgggccgcatcgccggcggcctctcggtcaccgcgcgcgatctcatccgcttcggcgagatgatccgctgccgcggcgtcgtcgagggccgacaggtggtgccgggctggtggatcgacgacatccacgagaacggcgatcccgacgcctgggccgacggcgatctcgccgacatcttcccaggcgcgcgttaccgcagcaaatggtacacgatcgatccctcgcgtaacgatcttgccgggatcggcattcatggccagtggctctacatcgacgctgccgccgacaccgtgatcgtcaagctcgccacgcagccgaaggcgatggacgtgccgctcgaccatcgctggctcgccgccttccgtgccatcaccgcgcatctcgccctgcgctga

SEQ ID NO: 6920 - DNA, 1995 bp, BradyrhizobiumColbertium
atgctcgatcccaccgaagcgaattcaaggctccaagccgccaggccacatccgctcgatccgctcacggctgaggaaatcaccgcggcctgcacatgggtgcgggcggcggcgaccgccccggagaactgccgcttcccgatcgttcggctggaagagccgaccaagcaacagctcgccgcgggccggggaggccgccgcgccttcgtgctgacactggacgcgatgacgggcgaggcgatcgagcatatcgtcgatctcggccgcggcgagatcgtcacgcgaaaaatgctcccgaaccgcgaggccccctatggccagccgccggtgatgctggaggagttcttcaaatgcgaggccgcggtaaaggccgatcctggctggcgcgccgcgatgcaccgccgcgggctgacggacaaggatatcgagctggttcaggtcgacccgttctcgtccggcttcttcgacaaggagttcgagcgcggcactcgcatcgtacgcgcggtcagctatttccgcgagcatccccaggacaacggctacgcccatccgatcgaaggcgtcgtcgcagtcgtcgatctgatcggaggcaaggtcatcgacctcaccgacgaagacccgatcgtgccgatcccgcgcaagaagcggaactatggcgcacatgaggttacggacccgcgcaccgacatcaagccgctgcacatcgagcagcccgagggcccgagctttcgcgtcgacggctggaaggtcgattggcagaaatggagctttcgtgtcggtttcacgccgcgcgagggcctcgtgctgcatcagctcgcctaccaggacgggacgcgcaagcggtcgctgatccatcgcgccagcgtcaccgagatggtggtgccatacgccgatccgaccgcgaaccatttctggaaatcggcgttcgatgccggcgaatacggcctcggcatgcttgcgaacgcactcgaactcggctgcgactgcctcggcaacatccattatttcgacgtgccggccgccgacaacaaaggcgaaccgtttgtcatgcagaacgccatctgcatgcatgaggaagactacggcatcgcctggaagcactacgagttccgcaacggcctgttcgaggttcgccgctcgcggcggctcgtgatctcgttcttcgcgaccgtcggcaattacgattacggcttctactggtatctctaccaggacggcacgatccagctggagaccaagcttaccggcatcatccagaccgccgccgtgccatcaggcgaaaagtatcgatggggcggcatgatcgacgacaacctgggcggacccacgcaccagcacttcttcaacgtccggctgcacatggatctggatggcggcggcaacaccgttaccgagcacgatttcgtgcctcggccctggggtgacgacaatccgcatggcaacgtgttcgacaccacgacgcgggtgttgtcgcgcgagtcagacgcggcggcggttgcgaacggcgaaaccggccggttctggaagatcagcaatcccaacgcgaccaactcggtcggcaatgctccggcctacaagcttgtcgtcaatccgagcccgttgatgctggcgcaagagggcagctacgtgcgcaagcgcggcggcttcgcgaccaagcacgtgtgggtgacggcgttcgatcccgccgagaaatacgcgagcggcgactaccccaacgtccatgccggcggcgacggtctcccgcgctacgctgcacaggatcgcaacatcgagaatgccgacatcgtggtatggcactccttcggccatacccacgtctgcaagcccgaggactttccgatcatgccggtcgaatatgccggtttcgtgctgaagccgaccggcttcttcgccgccaatgcggccggagacattccgcccgaccgcaacagccgcagcgtgctcgcaagcgggagcaaccgcgacgaatcgtgctgctgcgccggcaagacgtag

SEQ ID NO: 6921 - DNA, 2238 bp, BradyrhizobiumColbertium
gtgctttttctcggagcggtcagcacattctccctcgtcgttcccatcggttccgtggaggcgcagacgcaaattcctgcagtgactgtggaagcgccggcgcagcgcgcccgtcccgcggcgattgcttcgtcgcgaagagcggcggcgacacgcaccgcacgcgccgctcgtcgcgccccggcgcagcagcccgcgccgacccagtcggcatcatcgaacggcgccacgggcgaacgtgccaatggaccggtgcgcggtttcgtcgcgacgcggagcggcaccgcgacaaagaccgacacgcccctgatcgaaactccgcagtcggtctcggtcatcaccacggaccagatcaggaaccagggcgcggtctccatcggcgaagccttgcgctacactgccggcgtcagcggcgacgtcaatggcggctcggacacccgtttcggcggcctgcagatccgcggcttcgacatgaccatgcccggtctctacatcgacggcctgcgaattccgtccagcaattacgtgcatttcaacggcctcgatccctatggcgccgagcgcatcgaggttctgaagggcccgtcatcggcgatgtacggcggcagcggcaccggcggcatcctcaactacgtgaccaagctgccgacggcccagcagtttggagaagtttcgatctccggcggcagcttcaaccgctatcagggtcagttcgacatgggcggccccgccaacaaggagggcaccgtgctgtggcgtctgaccggcgtcgtccgcgacggccagacccaggtcgacttcagcaaggacaaccgcgtcttcatcgcgcccgccgtgacgttcaagccgaatgaggacaccaccctcaccctgctcgccaactatcagcgcgaccgggcagggtggggccttcagttcctgcccgcctcgggcactgtgtggccgaacaacggccgtacgatcccggtgtccttcttcgcgggcgtgccgggcttcgacgccttcaacaccgagatcgcgaccgccggctaccagctctcgcacaatttcaccgacaacatcacgttccggcagaatttgcgctacgcctatcagcacaacgaggagaaggtgttctacggcggcggctataccaacgaggccgcgggtcagctcgcgcgctacggcagctacagcaactcctacatcaattccttcgccgtggataatcagctccagggcaagttcaccaccggcatgctcagccacaccacgctggtcggcgtcgactatcgcaacacctccttccgcgacaccgccttcggcgtcacgacctcgtcccccgagatcaacgtcttcaacccgaactacagctacgactacgtcattggaaccatgagcgacaacacgggagtcaagcagtcccaggtcggcgtctatgcgcaggatcagatcaagctcggccggctctcgttccagctcggcggccgccaggatttcgtgaccacgcaggtcgacaacggtctcgcgaacaccacggcgtcgaaggatgcctcggctttcaccggccgggctgccgtgatgtacaatttcgacaacggcatcgcgccatatttcagctattccgagtcatttctgccggtgcttgccactgcttccggccagttgctgagccccgagaccggcgtccagtacgaggtcggcgtcaagtaccagccgctcggatggaatgcgctgttcaccttcgccgccttcgacctgacacgcgacaacgtcgtgacctatccgccccccaccttcgtcgctgagcagaccgggcaggtgaaatcgcggggcgtcgagctggaaggcaccatgtcgctcgccgacggctggaacctgcgcgccgcctacgcctatgtcgacgccgtggtcacgcaggatccggtcaatgtcggcaaggcgccggtcaccgtgccgctcaaccgcgcctcgctgtggagcgactatacgctgcagaccggaccgctggcaggcttgcagttcggcggcggcatccgccatgtcggcgcaacctggggcgatgattccaacacgttcaaggtgggagcctcgaccgtcctggacgcgctgctcgcctacacccgggacaattggcgcctgtcgttgaacgtcacgaaccttgccgatacgcgctacgtcgctgcctgttacagcctctcaggctgcttctatgccgaaggccgcaaggcgatcggcaggctgacctatcgctggtga

SEQ ID NO: 6922 - DNA, 1290 bp, BradyrhizobiumColbertium
atgagagcgatgttcggcaaactgcaccgctgggcgggcctgctcacggccgggttcctgttcttctccggcatcaccggcgcaatcatctcctgggatcacgagctcgacgacgtcctgaacagccatctgttcgacgtctcgaccaaaggaccggcgattccgtcgatcgagctcgccaagatgatcgagcagcgcgatcaccgcgcacgcgtcgtccatctcttcatgatgccggaggagggccattcgttgtggttcttcgtcatgccgcggatcgatccagcgaccggcaagcgttatgcacttgactacaaccaggtcttcctcgatcccaacaccggtgcggagcttgggcgccgctattggggcgcggtctggcccgtcacgcgagagaatttcgtctcgttcctctacaagctgcattacacgatgcacatccctgagttctggggcagcgatcgctggggcatgcgggtgctcggcatcatcgccatcatctggaccatcgattgcttcgtcgggttctacctgacgctgccctcgcggcggcgcgccaaggcggcgcgggcacctgaagtcgcacgccagctcgagcgcggcttctgggcgcgctgggcaccggcctggaccatcaagacctcgggcagcgcctaccggatcaatttcgacatccaccgcgccttcagcctctggacctggggcttgctgttcatcgtcgccttcacggcgttctcgctgaacctctatttcgaggtgttctcgccgctgatgaagatggtgtcgaactacacgccgacgccctacgagcagcggccctatcgcgatctcgacgatcccatcgagcccaaggtgaccttcgccgacatcgccgcgcgcgccgccgccgacggcaaggcgcgcgggtggaccacccctgtcggctcgatcaattatggcccggcccacggcgtctatgccgcggccttcttccaccctggcgacgatcacggcgccggcggtgtcggtccggcgcagctctactacgacagcgaggacggccgcccgatcggcgagcggctgccctgggtcggcaccgccgccgacatcttcgtgcaggcacagttcccgctgcactcaggccgcatcgtcggactgttcggacgcatcctgatctccgtcatggggctcgtggtggccgcgctctcggtcaccggcgtcgtgatctggtggcgcaagcgccgcgcccgggtccgcgtgcgcgagaccacggcaatgcggctgagccggcagctgacaccggcggagtag

SEQ ID NO: 6923 - DNA, 801 bp, BradyrhizobiumColbertium
ttggtctgcctgctcgtcctcgccgcgccgggccatgccgccgcgcccgagcagcactatctcgagctgcgcgatcgctatatcgccaagttctcgaaggcaaaggagagcgacgaaacatccaagcaacatgatacggctctgaaggagctggccggcgtgctgcgtggcctggtaggtccggtcgccatcaaggggctcccggcagagggcaagtcgaacgtcgacacgctcttcagggatgacgtcggcttcggtcacctcgatgggctcagcttcgcctcggaagactataggacgcaagccgtggtgaccacgatgacgctgctcgggcactggctgcgcgagcatcgcgaggacggcatgccgcaggagatcgcggccgcgctcaggtcggaccgcttctaccattacgccatccaggacgccgccttcgcgaagtacgccgagctgccggtcaccaagcccgcgtctgccagcgctgcggtcgccgtgctgggcctgcgcggcaacggcgacctgaagggcctgccgagcgaaattggcatggtcgcgatccagggtgacaaggtctacttcatcgccacgtcggatgccgtgaagacggcggagattccggcctgcgaaaaggtctggaagcagatgatggccaggaagacgccacaggatgccatggcgcgcgaggaccaggcgatggacgcctacaccaagtgcttcgcgaaggaagcaccgagccagagctggttcgcggcggcggtgaagaaggcgcaggcacagctggattcgttgctggcgcgctga

SEQ ID NO: 6924 - DNA, 1452 bp, BradyrhizobiumColbertium
atgaacgcgatcgaccttctcatcggcggtaaggaccagtcggccagcaaccagcgcaccttccagcgccgcaatccgatctccggggagatcgcgaccatcgtggccgcggcctcgatcgacgatgcgatgcgcgccgccgatgccgcagccgccgcctttccggcctggtctcagctcgccccctccgagcgccgcaagcggctcagcgcggcggccgacatcctggcacgtcgggcggcggagttcaccgcgctgatggtcgccgagaccggcgccaccgacggctgggccgggttcaacgtgcatctcgccgaaggcatgctgcgcgaggccgccgccatgacgacgcagatatcgggcgagatcattccaaccgacaagcctgataatctcgcaatggcgttccgtcagccggtcggcgtcgtgctcgggatcgcgccgtggaatgcgcccgtgatcctgggcgtgcgctccgtcgcgatgccccttgcgtgcggcaataccgtggtgttgaaggcgtccgagatgagcccgggcgtgcatcgcctgatcggcagctgcctgacggaggccgggctcggcgacggcgtcgtcaacgtcgtgaccaatgcgccggaggatgcgcaggcggtcgtcgaagcgttgatcgcccatcccgcgatccgccgcgtcaacttcaccggctcgacacgggtcggccgtctcatcgcactcgcctgcgccaagcatctcaagcgcgcgctgctggagctcggcggcaaagccccgctcgtcatcctcgacgatgccgacctcgaggccgccgtgaacgctgcggccttcggtgccttcatgaaccagggtcagatctgcatgtcgacggaacggatcgtcgtcgacgacaaggtggcggatgctttcgtctccaagttcgtagccaaggcgaacagcctgcctcacggcgatcctggcaagggcaatgtcgtgctcggctcgctgatcagcaacgcagcctgcgaccgcgtccgaggcctgatcgacgacgccgtcgccaagggcgcggtggttgcggcgggcggacatggcagcggcacgatcttgccggccaccatcgtcgatcacgtcacgcctgcaatgcgcatctatggcgaggaaagcttcggtccggtcgtgaccgtggtccgcgtcagcggcgtggacgaggcggtccgcgtcgccaacgacacggaatacggtctctcctccgccgtgttcggccgcgatatcgcacgcgcccttggcgtcgccaagcggatcgaggccggcatttgtcacgtcaacgcaccgaccgtgcacgatgagccccagatgccgtttggcggcaccaaggcgtcgggctacgggcgtttcggcggcaaggccgccatcgacgagttcaccgagttgcgctggatcaccgtacagaccggaccacggcactatccgttctaa

SEQ ID NO: 6925 - DNA, 732 bp, BradyrhizobiumColbertium
atgcttgaggtcgccgccctctcccacttctatggcaagcaccaggccctggccgatgttgcgctcggcatcgaacaaggcgagatcgtcgctattcttggtgccaacggcgccggcaagtccaccctgctcaagagcatcgccgggctggtcaggcctgccgcgggcgcaaggatcagattcgaaggacagagcatcgccgaactgcctgcccatctgatcgtggagcgcggcatcgctttggtgccggagggccgcggcgtcttcggcgatctgaccgttgccgagaatctccagctcggcgcctatcccgctcgtgcccgcgctggcgaggcagaccggctcgcaaagatcctgcagctgttcccgcgcctcgccgagcgcctgccccaggccgtccgcaccatgagcggcggcgagcagcagatggtggcaatcggccgggcgctgatgtcgaatccattgctgctcttgctcgatgagccctcgctcggtctatcgccgctcctcagccgcgaggtcttccgtgcattgacgcagatccgcggcagcggcttgagtgtgctcctggtcgagcagaatgcccgggcaagcctcgatattgccgatcgcgtctacctgatcgagtcaggccgcaacgccggcaccgggcttgccagcgcgatgaagaacgatcccgagatccagcgcgcctatctcggcaaggcgcgcggcgcgtcaacaccaacgtaa

SEQ ID NO: 6926 - DNA, 1671 bp, BradyrhizobiumColbertium
atgaccgggcccaagcgcgcattgttgtggtgcgccgggcttgccctcgccgcggccaccgtcacctacccgctctatgccaatggttactatctcgcgctcggcatcagcgtcctctatttcacgattctggcgaccgcctgggcgatgttctcaggtccgacccgctatatctcgcttgcgacggtcgccttcttcggcctcggcgcctacaccgccgcagtgctcggggagaccatgccctggccagtcgtgctgctggccgcggcgggcgtgggcgcattcaccgccgcaatcaccggcctttcaacgctgcggttatcaggcatctatttcgtgatcttctcgtttgggcttgccgagctgatccggcagctggtgatctggtacgaggtcaacatccacaaatcggtcggccgctatctcttcagtgcggtgacgcaggatattctctactggcagctcctgggcttgaccgcgattgtgttcctggtgggctggctgctcgggcgctcgcgctacgggctggcgctgcgcgccatcggtgccgacgagaccgcggccagccattccggcatcgacgccacgcgggtcaagctcggcgtcttcatcctgagtgcaaccttcatggcagtaaccggcgcggtgatggctccgcgctggacctatatcgatccagccatcgcattcaatccgacgatctcgttccaggtcgtgatcatggctctgctgggcggcgccggctcgctgttcgggcccgtgctcggcgtcattccgctggtcctgctgttcgaggtgctgagcgcgacgctgcccaaccatttcagcatcgtgctcggcctcatcttcgtgctcatcgtcatggtgctgccgaatggggtgatcggcctgttcgggactggccgctggcgcgtcccgaccggcggccccgtggccgcgcgcgcgggtacaagcgatgcaccgctcctcgcagtcgaaggcgtcagcaagtcgttcagcgggttgcgtgccgtcgatgatgtcagcttcaaggtcgcaccgggcgagatcgtcggcatcatcggcccgaacggttccggcaagacgacgcttctcaacacgctttccggcgccttgaagccctcgtcgggcacgatccggttcggtggcatcgtcctcaacggcctgcgcgcgcaccagatcgcacgcctgggccttgcccgcacgttccagctggtgcgtgtgatgccggatctgaccgttgccgaaaacgtcgcggcggcgcagctgttctccacgtcgaacggttcaagcgctacggcaagcgagctgctggacctcgtcgggctcggcaccgtgcacgccgcccccgcaggcgacctgacttacatcgaccagaagcggctggagcttgcccgcgcgctggcgctgcagccgcgcctcgtgctgctcgacgaatggctggccgggctcaatccgagcgagctcgaaacaggcatcgccctgattgccaagctgcgcgaccgcggcttcaccatcatcatggtcgagcatgtcatggacgcgatccgcgcgctctgcggccattgcatcgtcatgaacgcgggctgcgtgattgcacgcggcgggccggacgaggtgctgtccgatccaaaggtcgtggccgcctatctcggagacgacgatgcttga

SEQ ID NO: 6927 - DNA, 876 bp, BradyrhizobiumColbertium
atgctgcttgtcgacatcgtcctgccgggcctggtgcttggcggcatgtacgcgctgatcgcgcttgggctgacgctgcaatatggcgtggcgcggatcatgaacctctcttatggggagtcgctcgttgcggccgcgttcggcgcgttctcgctctacagtggcctcgggctgagcccgctggctgcgctgctcctggctgtccctgtcgcgatggtggtgaactggctgctctatcgcttcctgctcgagcgcctgatgcggcggagcaaggacagaggcgcgcaggagatcgacagcatcctcgtcaccttcggcgtattgttcgtgatccagggcgccatgctggtcgccttcggcggccagtattacagctatagctatctctccattccgctgacgatcatgggctcgacgctcgcggtcaatcgcctggtcgcactgctgttcgcggccctggtcggcggcgccgtgtatctcgccctcacccgcacgcggatcggcacggccgtacgcgccatcgctgtcgatgccaacgccgcgcgcctcgtcgggatcgacgtggccgccttgtcggggctcgcgttcgcctttggcggtggcctggtcgcggtcggcggcgtgttggtcagcatgttcctcaccttcaatgccgcgatgggcgtgatattcaccatgaaggcgctggtcgtcgtcatcatgggcggggtcggcaacgtgatgggcgcgctggtcgcgggactgctgctcggcgtggtcgaaaccgcggtggcgcggctggtcgatccgggcctgacgctggctgccacctacgcgctgtttctcggcgtgctcctgatcagaccgaccggcctgttcgggagagctgcgtcatga

SEQ ID NO: 6928 - DNA, 1215 bp, BradyrhizobiumColbertium
atgttttcggcgaaccgtcgaacgttgctgcgcgcaactggcctggttgcggcagtgctgggagccttggcatccacggccgaggcgcaggagaagatccggatcggctatgccatttccaaaacggggccctatgccggcggcgccggcatcaccacgctgccgaattacgagctgtgggtgaaggatgtgaatgccgccggcggcatcaagctcggcgacaagaagctgccgatcgaagtggtcgaatacgacgaccgcagcagttctgaggaagccgtcaaggcgatcgagcgcctcgccaatcaggacaaggtcgatttcattctttcgccctggggcaccggcctcaacctcgcggtcggcccgacgctgaaccgtctcggctaccctcacctcgcggtgacctcggtgaccgacaaggcgccagaacttgccaagcgctggtccaacgcgacgttctggctcggaacgtcggcgcagatctcccaggcgttggccgatctgctcgggaagctcaggagcgaaggcaagatcggggcgaacatcgcgatggtcagcatcgccgatcagttcggcatcgaattgtccgctgcggggcgcgaagcgttcaagaagcacggcttcacgctggcctacgacaagacctatccgatgggaacgcaggatctccagccgctggtgaaggacgccatcgcgtccaacccggacgcgttcgtcgccttcagctatccgccggacacgatcgcgctgaccgagcaggcgcagctcctgaagttcaaccccaaaatcttctacgtcggcgtcggcaccgcattcccgctctacaagggcaagtttgccgccaacagcgagggcgttatggggatcggtggctggaacgcggactcgccgcggctgaaggactatctcgcgcgccacaaggccgcgacgggcaaggagcccgatcgctgggcaagctcgatcacctatgcgagcctccaggtgctccagcaggcgatcgaaaaggtaggtaagctcgatcgcgccgcagtcgcagcggaaatccgctcgggcacgttcgacaccatcatcggcaaggtcaagctgaaggacggtctgctccaggaggtctggagcgtcggccagtggcagaacggcgaattctacgccctcgcacccgcttcgctttcaggcgcgcgtacgccggtcgtgccgaaggcgcagtggcagtaa

SEQ ID NO: 6929 - DNA, 921 bp, BradyrhizobiumColbertium
gtgcgtcgaggcgtcgcggggaccgtttcggcggccgcgagcggcgctgcgcctgtcggcgcggagctgatccgttcgcattacgttgcgcgccgctggatgctgtcgtcgaaggccgccaggccgttcatccatctgctttgcctgcatgaaggcgccagcatcgacgtcggcgagcccggcaggacgatggccttcaccgggcctgccatcgtctggctcccggcgggttcagccgaatacctggaggtgtcagccggggcgacggccgagttgctgcaactacgcgctggcatttggcaccgctatctgccgccctcggccgagcctgcctatctcgcgctcgaagccgccggcggcatcatggcgctgccggtcgaacccgacctcgtgaccacgatgtcgcgatcaatcgcggcaatcgccgcggaaatcgcatcgcccgcacgcagcgctgcggcatcgatcatgtcggccgagctgacgctgtgcgtgctgcgcctctggcggctgttcgccgacagcgaccggaacgaggagggcagtagcgccgagatactgagccgcttccgccggctgctcgaggagcgctatcagcagcatctgcgcgtcagcgattacgccaagcttctcggcatgaccccggaccgtctgcacgccctctgtagccgcgaactgaagcgttcgccgagcgagctgatccagcagcgcgtcgtcaaggaggccgcgacacggctcgaggccggcaccgttgccgtcaagcagatcgcgttcgcgctcggcttcaaggacaccgcctatttcagccgcttcttccgcaagcacaccggtgaggcaccgggcgtctggcgacggcgcgttgccgcccgctcgcgagccggacagtcgaggccgaccctcaactttgccgactggccgtga

SEQ ID NO: 6930 - DNA, 1005 bp, BradyrhizobiumColbertium
atgacgcaagcgctgacgcgccgacggttcatccggatcagcgcggcggcggcgggcctcggcccgctgtccatcagcggacggctccgggcggacatcgcgccagtcacctggcgcggcacgatgctgggcgccgtcgcgacaatggagatccacgacgaagaccgccgccgggccgagcggctgataacgctggcctgcgccgaggcgcgtcggctcgaacggctgttcagcctctacttggacgattccgccctggtcgagttgaaccggaagggcatcctgatcgatccggccgccgaaatggtcgatctgctgtcggcgtcgcagcattactccacgctgacaggcggtctgttcgatgtcaccgtgcagccgctgtgggatctctatgccggccacttctcacgagatgaggcggatccggcgggacctgccgcaaaggagatccaggcagcgctcgcgcgcatcggcagcagccggctgtcgatcagccgcgaccggatcacgatgccccgcggcatggccgtcaccctgaacgggatcgcgcaaggctatgtcacggacaaggtggtcgatctgctgcgggcgcacggtatctctcacagcctggtcgacatgggcgaggcccgcgcgatcggcgcccgtccggacggccagccttgggaagtcggcatcgccgaccctgatcatgtcggccacgccgaagcggtgctcccgatcgtcgaccgcgcagtgtcgacgtccggcgcctacggcctacagttcggcgccaaggcgcagttcaaccatctgttcgatccccgaacaggaagctgcgcaacgggctatcgcagcgtgaccgctgtgtcccgcagcgcgactgcggcggacgcattgtcgacggcgttcagcctgatgcaggaagaggagattcgatccttgttgccgcgtgccggcatcgaccgcgtcgatctcatcaacgatgcaggccacaccacgctcacggccagtcggcaaagttga

SEQ ID NO: 6931 - DNA, 570 bp, BradyrhizobiumColbertium
atgaggcgcgtggccatcgcttgggccttgctgctgccattcgcgcttgcggcctgcaacgagaagcagaccgcgaagatcccgccgccgcatcggatgacggcagaggacatcgggcattactgcggcatgaacgtgctcgaacaccccggaccgaagggccatatcttcgctgcgagcctcattcagccggtatggttctcgtcggcgcgtgacaccctcgccttcaccatgctgccggacgagcccaaggacattcaggcgatctacgtgtccgacatgggcaaggcggcgaactgggatgcgcccggctccgacaactgggtggaggcccgcaaggcgctgttcgtgatcgagagtcgagtcaagagcggcatgggaggggacgaggccgttccgttctcggaccgggcggccgcggagaaattcgccggcgagaacggcggcaggatcgtcggcttcgacgaggtgccccgcgactatgtcctggcctcggcgaatgccggcggcggcgctgggcccggcgaagccgaagggccgcccggcgacggatcgaggaggacgccatga

SEQ ID NO: 6932 - DNA, 828 bp, BradyrhizobiumColbertium
atgaacgtcctgatcatcgccgccaaggaaatccaccaagccatccgcaatcgctgggtgctggcagcaacgctcctgctcgccggccttgccctgtcgctgacctttctcggcagcgcgccgacggggaacgtgggcgttcgcgcgctcgacgtggtcatcgtcagcctgtcgagcctgacgatctttctcgttccgttgatagcgcttctgatctcccatgatgccgtcgtcggcgaaatggaacgagggacgatgctgctgctgctgagctatccggtcgcgcgatggcaggtgctgcttggcaaattcctgggccacctcgccgttctcggctttgcgacgtgcctcggttacggcgccgccgccggagcgctggcggcgacgggcagcgacatcgacagcgatagtctcctggcattcgctgcgatggtgggctcctcggtgctgctcggcgctgcgttcgtcgccatcggttatctggtcagcgcgctggtacgcgaccgcggaactgcggccggcatctgcatcgggctgtggctgctgctggtgctgatctacgacatggcgttgctgggcgtgcttgcgctcgaccaggggcgcagcatctcagcgaccgtgctcaacgccctgctcctgtcgaacccgaccgacgcctaccggctgatcaacctgaccggattcgccaatgtcagcaccttcgccggcatggccggccttgctcaaagcacgtccctgacgataccggtccttctcgccgccctgctctgctggacgctgctgccgctggggcttgctgcgctcgccttttcgaggagggagctatga

SEQ ID NO: 6933 - DNA, 921 bp, BradyrhizobiumColbertium
atgaccggtacggtacgcgtcagcgaggtcaccaagacgtacggccggctcacggccgtgcgcgatgcctcgttcacgcttggacaaggcgagctcgtcgccttgatcggtcacaacggcgccggcaagaccacgctcatgaagctcatgctcgggctgatccggccgacaagcggctccatcgaggtgctcggagacaatcccgccgccggtgaattcgcgggccgacggcaactcggctatctgccggaaaacgtctccttcgaccctgccctgaccggccgcgagacgcaggcgttctacgccaggctgaagcgggagccggttgccaaagccctggagctgctcgatgccgtgggcctcggcgcagccagccgccgcagggtgaacacctactcgaagggcatgcgccagcggctcggcctcgcgcaggcgctgctggggcatccgcgcgtgctgttgctggacgagccgaccaccggtctcgatccggagctgcggcagacgttctacgacatcatcgcgcggcttgcagctggcggcgcgaccgtactcctgtcgtcgcatgcgctcaccgagctcgaggagcgcgccggccgggtcatcatcatgaaccgcggcatcaaggttgcggacggatcgatcgacgaactgcgtcgcctcgcccggctgcccaccaggattcgcctgagggtggcgggcctcgctccgagcgagctgccgggttgggcgcccaaggacgcgacctgccgtcgcttgaacggccacatcgtcgagatcgacgctgcgccggagcggaagatcgagcttctgcatcgcgcgacggccgccggaaactccgtcgaggacgtcgacgtggtcccgccgaccctcgacgagctttatgctcactttcttcggcaatcggagcaggcgccatga

SEQ ID NO: 6934 - DNA, 1359 bp, BradyrhizobiumColbertium
gtgcgtctcctgtcacgcatgtttccggcggtgctggtcgccgccggattgtccagcttcgctgaagcggagaccttgacggctgcgcccggccagccgctgcaagcggtgctggatcgcgcgcgcgcgggcgacgtcgtcaagcttgccccgggggactatcacggctcgatccggatcgaccgtcccctggagctcgttgggaccgagggcgtggtgctggacggcgatggctccggcaacgtgatcaccgtcagcgcgcccgacgtcgtcgtccgcggcgtaaccattcgcgggtcgggtcgcgacctgcaggcgatggattccgggatcttcctgcagaagacggccgagcgtgcgaagatcgaggacaaccggctggtcggaaacctgttcggcgtctacgtgcacggtgccaggggctcccgagtcgtccgcaacgagatcgagggactgcgcggcgggcgcctcagcgaggcgggcaacggggtctcgctgtggaatgcacccgacgtcaccatcgcgaacaacacgttccgctacggccgcgacggcatcttctcgatctccagcagcaaggaccgcttcatcgacaaccgcttcgagcaggttcgcttcgcggtccactacatgtacaccaacgacagcgaagtcagcggcaacgtgtcgatcggcaaccatgtcggttacgccatcatgtattcgaaccgcctggtgatccgcggcaattcctccgatcgcgatcgcgactatggactacttttgaattacgcgaactatgcgcggatcgagaacaatcgtgtcaccggcggcccgctgaatccggtcatgcagaagactgaggatgctccggacgatgagcgaggcatgcttccgcagccgaaacgggagagctctctcaggaccggcccggagaaatgcgttttcatctacaacaccaatcacaacaagttccgcaacaactggttcgagcgttgctccatcggcgtgcacttcacggccggctccgaaggcaacgaaatcaccggcaattccttcgtcagcaacgccaaccaggtgaaatatgtcggcacccggcatctcgactggtcgatcggcgggcgcggcaattattggagcgacaacccggcattcgacctgaacggcgacggaatcgcggacaccgcgtaccggccgaacgatatgatcgaccgcgtgctgtggaccgcacccgctgccaaggttctcatcaacagccccgccgtccaggtgatccgctgggcgcaggcgcagttcccggcgctgctgccgggtggcgtcgtcgacagccatccgctggtatcgccgccgaacagccgcacaccgaaggaaacgcgatga

SEQ ID NO: 6935 - DNA, 1950 bp, BradyrhizobiumColbertium
atgagcgagaacgaaaagaccaaaggcgtcagccgacgagctgtgctgggaacgacggcggccgcagcgggcgtggggctggccggtggagtggcgatgaacgccggcagcggcttcgtctcgtccgccgacgctcagaccaagacagcggcaccaaaggcgccggcggcgcgaccggcggtgcagaaggccgaagtggcgcccggtgagctcgacgaatactacgtgttcttctcgagcggccagaccggcgaaatgcggatcatcggcctgccctcgatgcgcgaactgatgcgcgttccggttttcaatcgctgcagcgcgaccggctgggggcagaccaacgaaagcatcaaggttctgacagaagggatgcagccggcaacgcgcgaattcctcaagaaccgcggcggtacctacctgaacggcgacctccaccacccgcacatctcctttaccgacggcacctatgacgggcgttatgccttcatgaacgacaaggccaatagtcgcgtcgcgcgcgtgcggctcgacgtcatgaagtgcgacaagatcatcgagcttccgaaccagcatacggtccacggcctgcgcgtgcagaaatatccgcgcaccggctacgtgttcgccaacggcgaggatggggtgcccctgcccaacgacggcaagatcctcgacgatcccaaacagtatcgttccatcttcagtgcgatcgacggcgacacgatgaaggtcgcctggcaggtgatcgtcagcggcaacctcgacaacgtcgatgccgattaccagggcaaatactgcttcgcgacctgctacaacgccgaagaaggcgtcacgctggcggagatgactgccgccgaacaggactgggtcgtcatcttcaacatcaagcggatcgaggaggccgtgaagaagggcgacttcaaggaaatgaacggcgtgcccgtcgtcgatggccgcaagggatcggcctacacgcgctacgtcccggtctcgaacaacccgcacggcatgaacacggctccggacggcatccatgtcgtcgcagccggaaagctctcgcccaccgtgaccgtcatggacgtgcggctgttcgaccagctgttcgacgacaagatcaagccacgtgacgtcgtcgtcgcggaacccgagcttggcctcgggccgctacacaccgcctacgacggcaagggcaacgcctatacgaccctgttcctcgacagccaggtctgcaaatggaacatcgacctcgccaagcgggctttcaagggggagaaggtcaatcccatcctccagaagctggacgtgcactatcagccgggccacaaccatacctcgatgggccagaccaaggaggcggatggaaaatggctcatctcgctgaacaagttctcaaaggatcgcttcctgaacgtcgggccgctcaagccggagaacgatcagctgatcgacatctcaggcgatcagatgaagctggtgcatgacggcccgagcttcgccgaaccgcatgacgcgaccatcgtccatcgttccaagatcaatccgatctcgatctgggatcgtgcggatccgatgttcgcggatgcggtgaagcaggccaaggccgacggcatcaacctcgaggcggattcgaaggtcattcgcgacggcaacaaggtgcgtgtctacatgacgtcgaccgcgccggcctatggcctcgatcagttccaggtcaggcaaggcgacgaggtcaccgtcttcatcaccaacatcgatgcggtcgaagacctgacgcacggcttctgcatcgtcaactacggcatcaacatggagatcggaccgatggccacctcgtcggtgaccttcacggccgataagccaggcgtctactggtactactgctcgtggttctgccacgccatgcacatggagatgaagggccgcatgttcgtcgaaccgaagtcggtctga

SEQ ID NO: 6936 - DNA, 2298 bp, BradyrhizobiumColbertium
atgtcgaagcgcccggttgacgatatcgccttggcaaggcgtgcagcgctcgcgctcgcgggcttgctgttggcgtgtctgacatatatttcgcccgcatgcgcggccggtgacttgcagacatacctgccgaagatcgcacctggcgagttcttcgccagcgcggatcgcttcggcccgccacagggcgatccgccaatcgtgcccgtctaccgcggcgatcaactgcaagggtttgtcttcctcaactccgatttcgcgaactcagtcggctactccggaaaaccgattcacctgctggctgggatcgacccgaagggtgtcatcacagggatcaagctcgtcgatcacaaggagccgatcgtgctggtcggcattcctgaggccagaatcgtcgctgccgtgaacgcgctgatcggcaaggacatgaggccggtcgcaagtggcgccgagaagccgcctcaggtcgacatcgtgagcggcgcaaccgtcaccgtgctggtgatgcacgacagtatcgtccgcgccgcctccaagctgatccggagcggccgcgtcggcgccggcgacggcgctgcggcttcggcagccctgccccctgtcgtcaagactctcgatctcgaacatagtgaagtgcgtgactgggagagcctcgttggcgacggctcggtgcgccggcttcatctcggcatcggtgacgtcaacgaggcgtttgcaaaatctggtagtgcggcagcgagccaatatcccgaaccaggcgaggccagcgagaccttcatcgacctctatgtggcgctcgtgagcgcgcctacgatcggccgcagcctgctcggcgacgatggctatcagcgtctcaagggtcgtttgaagcctgggcagcaggccatcgtcgtcgccggcaacggcctctactccttcaagggttccgcctatgtgcgcggcggcatcttcgatcgcatcgaaatcctgcaggaaggcaacagcacccgcttccgcgatcgcaatcatacccggcttggtgcgttggaggccgccggcgcgcccgagttcagggaagttgccctattcgtcacccctcccgaattcaccctggatccgacggagccgtggcagctccaattgctcgtgcaacggagcctcggcggtcgcgacaaggccttcctgaccttcgatctcagctacgccctgcccgaccgctatatccgccgcgagcagcgtgcggtgacggtgccggagaatgcaccgcctcctgcttcgcagcctgccgctgctgcctctgccgccccgccagaggcagacgagccgctgtggatgcggatctggcgatcgagcacggtgtcgatcgccattaccgcattcatgctggccggcctcaccggaatcttcttcttccagaatctgcttgttcgccgacctgtgttgtacaactgggttcggcgaggctatctcgccttcgttctggtctggctcggctggtacgcgaacgcgcagctctccgtcgtcaacgtcgtcaccttcaccaacgcgctggtgaccggcttccgctgggaattcttcctcgccgctccgctgatcttcattctatgggccgcgacggccggcgggctcctgttctggggacgcggcccgttctgcggctggctgtgtccctttggcgcactgcaggaactcaccaacacggccgcgaaatggctgaaggtgccgcaaataacggtgccgtggggactgcacgagcggctttggccgatcaagtacatcatttttctcggactgttcgggctatcgctctactccgtcgacatggccgagcgatttgccgaggtcgagccgttcaagaccgcgatcattctgaagttctcacgaagctggccgttcgtcgcctatgcagtcgccctgctggtcatcggcctcttcatcgagcgttttttctgccgctatctttgtccgcttggcgccgcgctcgcgatccccggtcgcatgcggacatttgagtggctgcgccgctggcaagaatgcggttcgccctgtcaacgctgtgcgaaggaatgcccggtgcagtcgatccatcccgaggggcacatcaacgtcaatgagtgcatctactgcatgcactgccaggaactctactacgacgatcatcgctgtccgcacatgatccaggtccggctcaagcgcgagaaattcgcggccatgtcgtcgccttcgatgcgttcaggcggcaagggtccggcgaccgtcatcaccgccggcggtaagcccgtcggcgcttcagccgccatctctccaccaccacactga

SEQ ID NO: 6937 - DNA, 828 bp, BradyrhizobiumColbertium
ttgaagtctctcgacgagctctttgcgctagcgcacgcaatggagcaggaagcggccgacaagtacgacgctcttgcccaggacatgcgcgcgcagggcaaggatgatcttgccgacgtgttcacccggcttgcctcggctgagcgcgagcacgtcgatagcgtcgcacaatggtcgcattcgcgccggggcaagagcccggatcccgcgttggtacgctgggaaccgccggaagcccttgataaggaagcagccgcagaggtgaaagcatcccgcctgatgacgccgtaccgcgcgctcgccatggcggtccgtaacgaggagcgcgcctttgccttctggtcttatctggcagcctactcgcatgatcccgaggtcaagaaggcgtccgaggcaatggccagggaggaactcggtcatgttgccacgctgcgacaggagaggcgccgcgcctatcatcaacaacacgaacgggagagcgccgatgcatccgccgcgcctcagctgcccatcgatgcgcgccgactagagcttcgtctggtggaacagcttggggagattgaacaacgtctgcgcggcccggccgccgtccgggcacgagatatccgccagcaagcaaccaggttggctgacgaggccgccgggttcgggagctttccggccgccatggagcgaaaggattcgctggagatcgccgaagccttggccgacgcctacctcgacggcgccgagcgcgcgagcgatgcggctcgcctcgcgagcctgcagcggctcgcagaacaggccatctcaagactggcttggatgcgctcgctcatggaagattag

SEQ ID NO: 6938 - DNA, 888 bp, BradyrhizobiumColbertium
atgttcgaagcgacaggccacaattcgatcgatgcgctactgccgcgagagatggcagaacgcgcggagcagattggtgtcgacaagacgcatctcgaaaccgggagcttgatggcgcttgcggtgctcgcgggtgcgttcatcggttttggttcaatgttctccgttgtggtgaccgccggcgccgaaggtgtgttgccatacggtgtcatacgcctgctgggcggcaccgttttttcgttaggcctcatcctggtgatcgtcggcggcgccgagctctttaccggcaacaatctcatgatcatggcttgtgcgagtggccgcgtcgcaccaggtgctctcctgcgggcatggacgctggtctatatcggaaactttgtcggcgctgccggtctcgcgctgctcgtctttttagccgccggttacgaccacgggagtggagcggttgggctgaccgcgttggcggccgccaatgcaaaggcatccttgtcggcgacccaggcagtcattcacggcattcttgccaacgtactcgtctgtcttgcaacctggctatgctatggcgcacgatcgacgacggataagatcctagccatagttttcccgattgcggcctttgccgcgaacggtttcgagcattcgatcgcgaatatgtatctgctgaccgttgcactcctgcccaagtcaggcgcagacggtacgttttgggatctgatcgggaagacgccctcccattttccgcatttaacggtgcgcggcgccgtgttcaatctcgcctgggtaacagtcggcaacatggttggaggtgtattggttgggattacctactggttcatttttttgcgaaggtcacgaagcaaggccgctactggagggccggctccatga

SEQ ID NO: 6939 - DNA, 1194 bp, BradyrhizobiumColbertium
atgatccctatcgcaatctcgcgtcttgaaacagacgacgaaatcgagatcgtcgagcgtaagggcatcggtcaccccgacaccatctgtgacgcgctggccgagatgctgtctcggaatctctgccgcgagtaccagaagcaattcggtcgggtgctccatcacaacgtcgacaaggcgttattgtgcggagggcaggcggtgccggcctttggaggaggaactgtcacggtccccatccgaatcttcctggctgggcgcgccatcgccgaatttggaagcgtgactgtcccaatcgacacaattgccgtcgaaggttcgaagtcctggctaaaggccaatctgcacgcgctcgacgttgatcgccacgtccggatcgaggctctcgtccgtccgggttcgcacgacctgcggtcaatatactcccggcggcgcatcgaagacattccgcttgcgaacgacacgtcgtttggtgtcggtcatgcgccgctgagcccactcgagcgcctggtgcgcgccatcgagcagcggctaaatggccgtgatcgcggatctgaccatcccgcgtggggcgaggacatcaagatcatggcggtccgcaacggcagccacctcgatctaaccatcgcctgtgccatgatcggaggatttcttgccggcatcgacgactatctggaggagaagagcgcactggccgctagggtccgcgactgcgccagtcagtacggctttccggagtgccacatcgcgatcaatgccgccgacgatccggcatccgggtcggtctatttaacggtcacgggaacgtccgccgaagccggcgatgacgggcaggtcggccgcggcaatcgtgtcaacggcctgatcacgccgtgccgacccatgagcctcgaggctgcagccggcaagaatccggtcagccatgttggtaagatctataatgttctcgcgacgcaattggctgaaacgttggtgtcggccattgcggacattgaccacgcgcactgcctcctcgtcagcaagatcggcgcaccgatatctgaaccggcgctggttcatctcaggcttgcaacgcggaacggtgcgtcgctcgcccagttgagaaacccggtcgaggccctcgtgtcggacggtctcagccgaactcccgaactcgtcgcccgactggccgctggcaccgtggacgtcttctga

SEQ ID NO: 6940 - DNA, 471 bp, BradyrhizobiumColbertium
atgacccgcaccttcgtccaggacatcgttgccgtcgcccccgatcaacgtgtctgcctgatcgccaccgtccagttggtcgtttccggcgccgccaacgatatgatcgctccccgcggcccctacgagatgctcgttgccaactccaccgatgagatcgtcgtccatcgctccgccggacaggcggtcgtttccggcgcggccgaacgctatgctcatctggtcatcggagcccgcgaaccggtcagagtgccggtcaccaatgaagagaagatagtcgtcgaaggtctgggcgatggtttcgtcgacggagtgatgatgatgccgatcctggaaacgcctgctcatgtgattgctccggttggaggccacacggcgagtgctcgacccgcctggacgcgttcgcgccagccgtcagaaccgaagcgcgccaccgatgttcctcattcgatcggcgctagcgcagaatag

SEQ ID NO: 6941 - DNA, 1035 bp, BradyrhizobiumColbertium
atgatctctcccgatagcggccacgatatcataaccgacttccgcaccggtccggggatgttcgaccatcttgcggtcatggacatcgaaccggagcagttccgcttcaacgatacgcgggacggcgtccggattagttggcatacgagcaagggcgacggttcggtgctgctcgagggtgtattcaaggcggacctcgcacaggatgacttcatgttcgccgacgatcggcacctgattgacccgacgagttctcattccgaccgcgtcgccgcggaacacttcgtaaaggacgagggtaacgaggatgcgccgccgtcagcgggcgagacgccggcgcaattccagcgctctttcgatggcaatctcgtcaagtacggcagcgatggacagaacgacgtgttccatgcgacgtccaagaacgatcactatttcggtttggggggcgatgaccatctctccggcgggaggggcgacgaccatcttgcgggagatgccggcaatgacgtcctggacggcggaaacggacgggacgaccttcgcggtggcgacggggacgacagcctctacggcggagctatggccgacaacctcatgggcggcgcgggcaccgatcatctgaacgccggggccggacacgacatgctcgaaggaggaccgggtgacgatatctacaacggcggcgacggcgccgacgctttcatggtttcccacggcagcggtaacgacactgttgtcgcgggtttcgatccaggaccgggcgccttcgatcacgtcgccttcatggatatcatgcccaacgaagtgagcgtcattgattcgctatctccccacggcgatggacacacgggggtcctggtgagctggggcgacggatcaatctttctggagggcatccaaaagagccagatggcgcaggatgacttcatgttcaacgcggtagaagggggcgcgttcgttcccgacccgtcgatcagcaccgaaggaagccagatgatcttccagggaactcacggcgattggcacctggcgtag

SEQ ID NO: 6942 - DNA, 1056 bp, BradyrhizobiumColbertium
atgattccgaacacgccgtggctcaagaccgtatcgcagttcgacgacgaagccatcgcttccgtcgcggtccggttggctccgatggggcgcatcgacgccgacaagctgctccggcttcatctcgacatgccctgggagtcagtctcggcgatcgcaggcaaacccgaggcagtcgccgaactggcagccttgggttcgttcgatctccaaaggctctcgatcggcgcttataaaatattcaaagatcgcatcgaattccttggtcgcgaactgcccgtgggttggttcttgccagagcgtcgtagggtcgcgcccgctcgtttggcagcggacggcaacgatgctcgcatcaggaaccgctggcttgtctcggcctttccttgcgacgtcgagagcggcgaggtgctgctcgacagatgcccgtcgtgcatcaacctgttgggctggagaaatatgaccaacgtttggtcctgccagatctgtgacttcgacatgcggactgcgaggccaaaggcctgtccgcatgaaatcgtcgccgctgccaaggagctggccgactacatctttgactatgatcttagattgccgggtcctctcggcgacctgtcgtcggtggacattctcaagctcagcggatggatggcctactttagagctattcctcaggagctcttcctcggcatcaccgtgaaaaacgccgccgcaggattttcgcaactcaagcgatggccttgctcgttcgatgagattgtcctcgacctcctcggggcctcgaccgctgccgacctggctgtcggggatacgatctcgcgccataaggccgccgcggggatcatggcctccatcgaccgcctgccctcgctcaaggcccgcgaaatcctgaagtcacgcctgatggaacttctgcacctcggtcacggcttcgccgaagccttcctcaacgtaacggaaccggtgctgccgctcgggctcgctatttcagggctcgaccgtcgacgatcgagtaaagccgctcgagccaagaccgaccgaggtctaatcccgtcggattga

SEQ ID NO: 6943 - DNA, 996 bp, BradyrhizobiumColbertium
atgtccgatctggaaaatatcctcaattctccgcttgtgttgagcaagctcgacgacattagaggcatcttcgtgaggcatacgaaggccgaagaagcgcgggagatggtcttgttgtcgctcgcgttcgccaagcgcttgcgcgaaaactcgagcacgtatctcatcggctggtcgcgttgcggaaagagtgagatcgtcaagcgaatgctcacagaacgcaccggcaagcccgtatcgaaggaaaaaattcagctgcttcagggcaacggaaagcgctacctgtacgtcgacctcatgggcggatcgacgccgcggatattggcccggaagatcaactttaagatcttcaatgatcggctcagcctgcgactcggcgaggaggaaggcaccgacgcgctcatcgctaatctcaatgacaacgaagtggacgccgtcttcctagatgaggcgcagaatctcgcggaagacggtgtgaagaagctggcgaggttcattctggcgttcgagaactcctgcaacgcgcccttgttcgtcgtgggacccccggtcctgacgaagatgatggtcaaggcggacgcgatggggcagcggtccggcggcatgaagatcctttcacccttcggcttcgcgaacgacgcccaacgggaggaacatgcggcgtttgtggccgccttctcggatgagcttcccttcgaatcgaactggtttaaggacaacgaagacgaccaccacatgctgcgtgcgacgttcttcgcacagcgcggacgtcccggccgacattcgctgctggtggaggcggcggtacctcacgccttcatgcggaccggcggggtcgagccgaaggaactgacgaaagaagacatcgccgcgggtttcgatcgcgtctttctcagccaggagatcatgcagggccgtaacccatttcgaggcgaagactacagcaggcttccttcgttcccgctcagcgtggaacaggaagcgaccaccgagtag

SEQ ID NO: 6944 - DNA, 2358 bp, BradyrhizobiumColbertium
atgctgaagattctcgatgcgagcgaggccgccgccttgtccacgcccgtggacgaggaaccgcgtcccaccatcgactaccttctcttcgataacctgacgcccaaccagactgttctcatcgacagcaaacctcaccagttcttcaagaagatggagggcgaaggcccccacctcctcatcaaccaccataccggcgaaaccgcgcgcttaacaacgacccggctgatcgagctattccaggaggggcgctactacaaccctctgaggaagccgcctctggtcgacgagaagaagagtatcgacgaaacacgcgcgttgatcggcaaggtttaccacaccctcaacgccaagccgcgcggacgcgcggccggcatctggcgttacgtcggcgcgttcatcaacgagatgcttatcgcgccgcccgggaagccgttctaccagaaccatgcaaacgctgaaacgatcatagaacgggtcgacggtacgatcgacctcgagaacctgaagcggccgcaagggaagcagatcaagaagcccaagaagacgacgcgaacggttcttcgctgggtggccgccgaactggtgcacggcatgcaggaagccaccttcgtgcacaagaatgcgatcaagtcccgcgagcagaagctgcccaaggaggtgttttccatcatctccgcgaccatccgttacctggtcgaaatctcggccgagttcggcccgaccaagattcaaatggtggcgaaccagaggatcgatggccgcaacgcggagatccggatccgcaacgaggagatcaaaaagctcatcgagaatggcgagctttcggagaggcggttgctcgatgagcttccgaccgttggtttgacgacggtacaggttcagtaccgtcgcttcgacgcgtggatcaggctcgcaaaggagcaaggtgtacaggctgcagatctccagttcggcggccagggaagtttcgagcgtccgaaacgcatcctggacgtcgtcgagtacgatcaccaccaattcgatttcgcgggcgtcttgggcgagaccccgttcggtcgtgtctggtcgaaggccgggatcgacaggttctggatttgcctcggtttggatacctacagcgggtaccctgtcggattctttccatcgttcgaacctggcgggctttacccagcactggccgcgatcgatcacgggatcaaggtcaagacttacgtcgataagcgatttccgcatattcgcggctctcttttgagctacggcaagccaagaaaggtccggtacgacaacgggaaggagttcgtttcggaacagatggcgctggccttggcccgcgtcaggatcgggttcgagatggcggtaccgcaccagccggacaccaaaccctatgtggagcggtttttcggaacgctcgagtctgatttcgtgtcgtggcttaaggggtcgactggatccagcccgcaaaagcgaggcgcgcgcaagcccctgctcgacgcgtgcatcacgatcgacgacttcatcatgctgttccacctctggctgatcgaggtctacgcccggcgtaagcaggaaggaatggactgggacactccggaagagcgctggctccgaggtgcgtcgagcgactcgaaccgcccgcagccgctcaccgtggacgaagcgaagaagtgggacttgatcccgagtttggagttgaagcttaccgcgggcaaggacggcatcctctggaacaacctcgtctatcagtcaccgcaaatccaggcgatgcgagcccgatcgggcagcatgggaaagagaaagcgcacgaacacgccagtcaccgtgcgcattccgctggcgaacgtaggccgctgcgtggtgatcgatcacactagccgcttccccggtaacgaacacctcccggaggagttcgtggtgatgtcgaccgacgaggaggcgcacggcctcacaaaattccagtgggaggcgctgagcaaactgcgcctcgcaaagaaacatgcccccacagagcatccctcccacaaggtcggattcaaccacctcctcgaggaagcactgaaagctatgggcgcggtcccgaccggcgagcggcctccggcgaaagccgtgctctcgaacgggtactatccccgtatagccggtgtcctcggtcgaggcgccgaggagcatgcgctcgccgtcaccgatgagttgatcgagaggaccggaatcttcaggccggccaccgcgaccgaagaggttgtcccgccgcctcccgttcaagctgctcgcgcggaagagacatccgtaaaggatacgtccgcaccgcgcaagaagctccggttcggggtggacgcgccgatcatcaggtcgcagtaa

SEQ ID NO: 6945 - DNA, 765 bp, BradyrhizobiumColbertium
atgcctaagaagatcgagcgcgtctggaccgccctctgcgacggcgtcgaggtcttccgcctcgaagccaacgaggcgacgcggcgcgtgatcactggccgccgcaatcacgtcgtcggcggtcactattcgatgaagatgaacgggcacatcgtccacgaaggcggcatcgaagagcgcttcgtccgggtctgcgactacgtgctcggcgtcaagcggatctgggcccagccggagacgatccggatgaacatctttcctgagttcgcgaacgagatctacacgcccgactttctcgtcgagcacgacgccggcttcgtccgctacgaaatcaaagagtggcgcgaacttcgtccgccgcggccgaccgtcggcgacgaaaaagcgcagaagcgctgggatgacgcggtcctgctccgcgcgcgtctccgtcgcatccgcgaagcctaccggcgggctggccttccttttcgcgtcataacggagcgcggcatcggcttgcgttggggagaccgcgacgtcgtggacgagatcgcggccaacgaccggtgggacatcgaaccggaggagctcgaccggctcgtcacggcgctgaacgacgccggcggctccctgcccctgtcgcgttgccaggccctcttcgaggaggctccccatccgcgcggcgtcgtgctgtcgcgcatcccggagcgcatcgtctacatcgacctgttcgccccgatcggacccgagacgatcgtccacaagggagcgatctcatgctga

SEQ ID NO: 6946 - DNA, 207 bp, BradyrhizobiumColbertium
gtgcgttccgtccacaaccatctctccccgatcgtcgagcgcatcttcggtgccatcgatcacgcgttcggaatcccgacgcgggtctatcgcgacaactcgcgcgaattctgcagcctcagcactctggactcttttgtccaagagcaggtcgatctcgtctgcgcagacctgcgcaaacgccccgacgaggacaccgatgcctaa

SEQ ID NO: 6947 - DNA, 822 bp, BradyrhizobiumColbertium
ttggacggcttgagagatgcggatgcttcggcgtcgacgatggactgttattcaagggacattcgggatcttgcggctgcgctcggctccgacgaggtagccgcaatcgtgcggatcgaccagtcggccgtcgacggcatcgcggccacctgggctgcgaccggcacggcgcagtccaccatctttagacgtttctcagcgctgcgaagttttgcccgctttctcagcctgaagcgttcctatgactgctcgaagctgctgagctgccgcttcccaccgtgcggtagggtccgccgcgcggccgtcggcgacgacgtcatcgagatcatgctcgcagcgccgacgggggattgcgacgagtcatggacacacgcgcgcgatcacgctgcgcttcgcttggctgcatcgtccggtctcacgaccgccgagctggtcgcgttgaaccgaggcgactacaacccgcggctatcgacggtcagggtaaccggctcccacctgaacgggcggcccggcatcgtttcaccggacgccaaagagtggctggagcgctacctgcgagtacagcccttcgagcttccgtcgagcgcacctttgttcgttacggcgcgggggacccgcttcagcgcgcgatcgcttcaactggcttgccgccggctgcgacaggcgactggagtcggtccggacgccgtgcctacgtcactgcgcaacgctctcgccgcgaacctggtccgctccggtgcggcgcccgaagtggtggcaaagaccttgggcatcggcgtcgccgcagcgtggcgctacttcgacgcgccggagatgctgtga

SEQ ID NO: 6948 - DNA, 267 bp, BradyrhizobiumColbertium
atgatccgcgttcatatcgaacttctgccgggaggctcgacgcatcttcggcgctccatcgcgagtgtccggatatccaatctgagcgatctggcggaccgatccgactacggcatcgacgtgctggagaccgccaacccgctcgcagggaccccgccgcggctcgccagcaccaaggtgttcgaccactaccgacggcagtcgatctgggcgttgctggccaaggtggtggacgccatcgaaagcgccgatttcgtggagctctga

SEQ ID NO: 6949 - DNA, 2076 bp, BradyrhizobiumColbertium
atgaccggagggttctccaaactgcggcacgatatgttgcccgctccggaagacgatccggaggtcaccgacctggaggcagcgatcgaaggtcagccggatgctgttcccgctcgcggccccgatcgacctaacgcccggctgaatgcgaaaaaagttcgcggcgcgatcgttgccgaggcctttcggcgggccgctcctccgtcgcttagacgagccattgcggcggggcgcccggtcgcgagcgtcgttcaggtgccctcctcggcatggatggaggcagtcgacgaatatctaagcgaggctcgcgtcatgaccatcgcacgcgccggctcgaacaagtcgatcgacgtcaatcacgtcggaaacgaagaggtagcgaagtgcctggtcgcgggacgcagcgtcgtcgggatatcgacggatccgcagcgtttcttgccgaccactctgctgctgtcggccgacgtcaccgtgaaactggttccgcccgacgccaagtcggtccgcgtccttctcagaactctgctgccactgacgggacgcataccgagcagccgcatcgccgacacgtcaggtctcgatctgaacgatctggtttccatcttcaggagcggatcgacggcttccgacgcgctggagcggcttgcgaccctcgcgatgcgccggcggcagagctcgccccatgtcgaaggtgcgccgatcctctccgacgcgatcgagttcggcggtgccgcccgaatttttggcctgaacttcgtgaaggatgtccaagattggagacgaggatccatacagtgggcggaagcggaccagggcgcgattctgcattcagagccgggccacgggaaaaattttttcgtaaattctctcgccttggcggcaggcaccggcctcgtcgtcgcgaagatctcggattttttcgccgaacgcgaaggacacttgggggatgtcgtcaagtcgctcagggccgtgttcagcagggctcgagcggaagcggcccgctttgggccgtcggggcagcgcgggtgtctcttggcattcgacgaattggacgaactgccttctagaaaccggctgtcgcggcacaacagcgactttttttcggtcgtcgtaggcgagatgttgacgagtttggattccgtcatgtccgacaatgagagcaacgtcgggctgtgcgtgttgggaatgaccaaccggctcgacgccatcgatcccgcactcctgcgtcccgggcgcttcgaacgcacgatcgagattccccgacccgacgcggcaggcctggccaacgtcctgcgatatcatcttcgaggcacggctctcgagggtatggatctgtcatccgcggcgcgtctgctcgaaggcatctccccggccgaagcgatggacgtcgcaagagcggcgaggcgcgccgcaaggcgtgccggccggcctctcaacgtcgacgacctcgtcagggaaggtagcgggccggcacttccccaggcggtcttgcgtcgggtggcggtacatgaggcgggccacctggtcgccagcatcgcgaccgggggcaaacctctcagcgccaggattctcaaccggggaaagatcggtggcgatgctcgcctgaatttcgacgacaaccgagtgtggacgctcgatcgtctggagacccatgtcgtttttctgctcgggggtctctgtgcagagaaggtggtcctcggctcggtttccactggggccggtggcactcagttgagcgacctagcgatctgcacgtcgctcctcgcggccgcctttacgtcgacgcccctgctcggtgggctcgtctaccgcggcgccgatagcgaagcgctggccatggtcagtagagatgcgaggctcgccaagcaggtcgacgaccgactgaaaatgctcgagcggcgagcgaccgggataatcacgcggcacgcggccgccgtcgtccggatcgcggaggccctcgttgcccgacgttacgtaagcggcgacgaagcgatggatctcttccggggtcgaacgcccgtccgacaacccatcgcaactgtcgcaaccgatacgccgaggaataccccatga

SEQ ID NO: 6950 - DNA, 474 bp, BradyrhizobiumColbertium
ttggaccccgaaattcttgaaatcggcttcctcgggacggcggggaccgaagcgcagccggtagatattcaagtcgtcaccttccggacaaatgccggctggcggtatctgaacatcgaggtcgcccggccgctgcggtcgctcggggaagccgatgccttcgatcgggaacttcgggcgcgcggcctggcgccctacacattgaccggagcggatattctcaaggagccccgcttctccacggctcgcgcgatctggacgtaccgacgcttttcggtcccgccggacatgcgtcaccggctgctcgcggccttggcggaggacgggccgatgtcgctccatcatctctgcactttggtacccggacctctcgatccgtttgcgtcagtgctatcgctcgcatgccgcaacgaggtcgagatcgacatttcgacgccgctgagcccgtcgacgaccgtgaggtctcgctcatga

SEQ ID NO: 6951 - DNA, 804 bp, BradyrhizobiumColbertium
gtgcgcatctggaccatgagtgatctccatatcgaaaccgcgaggggctgggacctgccctctccttcgcagcggcccacctatgacgtgttcgtttgcgccggcgatctcatgccgggcttcgcgcggggcgtgaagtggttggcggagcgcatcgacgaccatccggtcgtggtggtggccggcaatcacgaattctttgggcgggacatcgaccgcgagctcgacaaggcccgcgaggccgccctcggcaccagcgtcgtcgtacttgatgacgaagccaagttgatcggcggcaaaggcggcgtcctcatcgccggcgccgtcgggtggaccgacttcgacctgtacggcacgccggagaagtccatgctcgcggccgccgccagcatgaacgactaccgtcggatccggacggatcgctatgcccggcggctccgtcctcgagacacgctcgcccgccatcgcaagacccgcgagttcatctggtccacgttcggcgggccgaagacatcgaagcggctcctcgttacccatcaccccttccacgcttttggcggtcggagccgtccggcgtcgaccacggacgagcaggatctcttgggtccggcctacgcttcgcgctgccccgaggtgttcgctctcggtctggacgcggccatcagcgggcacacgcacgtcagcttcgagctggcggtcgagggcgtgaagctcatcgcgaactgcaagggatacggtccctgggacgctgtctcgcgctgggaaaacgatgacttcgatccctgcttcacgttcgacatctag

SEQ ID NO: 6952 - DNA, 537 bp, BradyrhizobiumColbertium
atgtgcgaatggcgtcaacggctcatcgatcggtttcccgagttgttcgacggcgccacggtcgccgagcatgtccccggcctgtcgcttgtggatgatggttggcagcagatcgtgtgccgagccgtcgcccggatcgcggcggcggttggtacctcgtcactgaagatcacagcgatctccagacgatccggagtgctgaggctcgattaccatcgttcctcgtcgatcgcgcgtctcccggatatcgaggccgcgatccagtacgccatcgcgctggcggaggccggctcggcctgcacgtgtgagcggtgcggccgcgagggatgtcttcaccaagtcggttcggaacttgtcaccgcgtgtctggcgcattcgaacggggtgagggtgcgtaatgtgcgtggcttcgaaaacctgcatgtcgtgcggtccttcgacggtaaacgtccgggaccgatcattcttggtcgttatgaccgaattaccgacgtcttcgtagcggtcgatccgcgctcgctcccggcaaaggagtga

SEQ ID NO: 6953 - DNA, 606 bp, BradyrhizobiumColbertium
atgtgcgtcgatattcccggccatccgtccgacctccgccccttcctgaccgccaaaagcccgaccccgattccggtcggcgacgcggtccggttcgatctcttgattcagttggccctcgatcctgctgtgacggccatcgagcacgtcgcgtcggtcactctttgcggtgtcgcctacccgctggatcttttgcttgcgacgcgcggtaacgctcggttgatcctcgacgtcggacctccgcttcgcgatctcgacgacgaaggaacgttcctgctcgcggccgacgaacttcgggcgatgatcgtgcctctctcgtcggaccaggtgcaggcactaccgaggtcatcgaacgccaggctgatctgggcctaccgtaagcgcctggttcccgccgatggccgagagcggatcttcgcggccatcgagaacgacggcgactgcaccgttgccagtctgggctttggtctccgcgactgggtcttcgcgctcgcctgcgagggcgccgtcacgatcgacatcgaccgcgacccgatcgtcgacgcccgcgtgtgtcttggccggtttgcccgggtcccgccactccgctcccacgcaccgcgatga

SEQ ID NO: 6954 - DNA, 204 bp, BradyrhizobiumColbertium
atgaagcggcccaagatcgatgtgtcggaggcccgagagggggaggagggcaggcggcagattttgctttatttgcccaaggacctcatcaaggctctcaagtcggcggcgatcgaggacggcaagccggcctatattctcgctgagaaggcgatcgacgcttatctcaaaggacgcaaggtgaggtcccgctcggcgaagtga

SEQ ID NO: 6955 - DNA, 1149 bp, BradyrhizobiumColbertium
atgaagccgcaggacgatgcgctgctcgacgtgatctacggcgcgatcgccaatcccgagagctggcccgatgtcctgacgcgaacctccgatcacctcggcgccatcggaggtctcattacccaggtgccaaagcggggtcgtccgctcaccgtgatgggtcgactgtctccggaatccctcgaaacctaccacaagcactatcaatggaatctgtggtcggaggccatgaggagcgccccctccggcaaggcggtcgccgtcaactctttgacggagcttggcgccatccgcaagaccgggttttacaccgatgttctcgctccgcaacgtatcgtcgacgccgtccaattcagccatcaatcgatgcgccttggcggcggggttggaggattcggcttcatgctatcggcgcgcggcgccgatagcatggacgagtcgctgcggcgtcttcagcggctcgtcccacatcttgggcgcgcgctcgacgtcaccatgcggttgggcgatctcgaagatggtacgcggcagctaggcagggttctgcagctactgcccactcctgctctccttctcaacggcagcggctgcatcaccttggcgaatccggcggccgaagccttgattagctccggcgacggcctcagggcagagcggaacggtggccttcgactcgctgcggccttgccgacggaaacaaacgccctgcaccgcgccttgaggctatcgctggccgttgccctaggtgccggcaaagagcttggctaccccctgcgcctgacccgtccatccggagcagctccgcttctggtactttccgttccgctgccacctcctgcattcgtgttctgggaaatgcttcctcaggcgcgtgtgttggtcttgatcctcgaccccagcacgcgatcgcgcgcatctgtagacgcggtccaagtcaccttcggcctgactccggccgaggcccgcgtcgccgtactcatcggaagcggactgagcggccccgaggccgcggcattgctcgggatatcgccggcgacggttaagacgcacctgaagcaatgttttgagaagtgcggcgttcactcacaggttgcccttgcgcgtgtcctcggttcgctacctacggatttgcgcggactcaggtcatga

SEQ ID NO: 6956 - DNA, 897 bp, BradyrhizobiumColbertium
ttgggcagtttcgtggggattttcatcacggtagcggcgctgctcggcggctttgccgccatgggcgggcatctggccgtgctgatgcagccgtgggagttcgtaatcatcataggcaccgccgtcggcaccttcatccttgccaatccgtggaaaacggtcgtcgacagcggggttgcctgcattcaggccatcaccaatgcggtgccggggcagcgctattacctcgatctgctgggagcactgcatgcgctgatgcgcgagctgcgaggcaagggccgtaacgaggtggaggctcatatcgacgatccctcctcgtccgagatcttcaaggcattccccagcgtgctcggcgacccgtcactgcttcagttcatctgcgactatgttcgcctcatcatcatgggcaatgcgcgcacgcacgagatcgaagcgctgatggacgaggagatccacaccatcgtaaagggcaagctcgcaccttatcatgcattggtgacggtctcggaggcgttgcctgcgctcggcatcgtcgccgcggtgctgggcgtcatcaaggcaatgggcgcgctggatcagtcgccgaagctgttgggcggctttatcggtgccgccctggtcggcacctttgccggcatcttcctgtcttacggcatcatctcgcccttcgcggtgaagatcaagatgatgcgcgagaagaagtgtcggccctacatcatcgtcaagcagacgctgctggcattcatgaacggtgccatgccgcagatcgccgtcgagcacggacggaagatgatcgcgagcagcgagcggccctcgatcgacgttgtcgagaatgagaccatcgcaggtcccaagccggtcgcgaccgatgccgaacccaaggctgcgcgcgcatga

SEQ ID NO: 6957 - DNA, 243 bp, BradyrhizobiumColbertium
gtgcttggcggcaccttcggctacgccgcgatccagaccgcgcttgtccagcccgcacgaacgggagaggggcagcggattgacgtcgcattgatgcattgcatgctgaacctactggtcttcgagttgcaggaggcgcaattcccgcgctctgtaccgccggcggctcattgggccggtggcgccgtcgacggccatatcctgattgcgccgatcgcgccgcggaactctgccgcgctctga

SEQ ID NO: 6958 - DNA, 138 bp, BradyrhizobiumColbertium
atgcggatcggtgaaggccgcgccgggatcgcgatattcggcggcgggcacgccagccttcccgagagcgtccatgcattcgcggacgggatgccgctctgtccattctcgacggctgcatcatcgcggtccagttag

SEQ ID NO: 6959 - DNA, 246 bp, BradyrhizobiumColbertium
gtgtggatcgtcttcaggcccctcgacctgcccacgatgccaaagcgcgtcagcatcgaactcaagggtaagaacggtcatgttgacctgacgtttgccaacacgaacgcccacatgttccaacctcctgtcaaacatctgatccaaccgggcatgacagtccatcagacgggcgctgcggccgcgatcagggtggcggcgccggagttcgcggtcgccgacggagtttcaggccggacttcctaa

SEQ ID NO: 6960 - DNA, 453 bp, BradyrhizobiumColbertium
atggcccgtctcgtctgccagcgcatgaacctgcagtacgacgcggcgctgcgaaggaagtacggtacctatctgatcgtcggcgcctgcattacgttcgtcgccatgatcgtcgggtcggtcgtggaggatctcaagctgatcgacttcgcggccgtcgccgccacgatctcgcctgcgatcttctggacgatccgcgagcacttcaggcagtcggattctgctgcgacttatgagaccctaaagggcgaagccgagaaattcctagaaagcgttcgggccagcggatgcgacgatgccgagtgcggaaaacgatcccgggaacttcaagatgctctattccagcggcgcgtcgctaaccccttggtgctgccactcgtctatcgcctaatgcgcgacgaactcgaaaagcaggcacaggccggcgccgatgctctcctgaatcgaacctga

SEQ ID NO: 6961 - DNA, 441 bp, BradyrhizobiumColbertium
atgaacgagatcgcgcacgatcaggacgctcccgagttccagcggctgctgaaggcccggcagcgcgtctattcgtatgccacccgctatcagatactccagatcatcctcaccgtcgtcgtacccgtcgccggtgccatgctcgcatttgcgcatcaggcggcccggcgctacgtggcgctctacggtctgatcgcgaccgccttggacgtgacgtggatcgaccggacgcaacgtcgactgctgaaggtcgccgcgaagatcagcgaggaattcgactgcggcgtcctgaagatgccttgggacccgttcgtcgccggcaagcgcgaagacgcggaggtcgtcgatgcctccgcgcggcgatggagcgacgaggctggtatgtgggaattcccccgaccgcgcggcacaccatggcccgtctcgtctgccagcgcatga

SEQ ID NO: 6962 - DNA, 1350 bp, BradyrhizobiumColbertium
atgaagctggtctcgctagttgacgaatccctgaaggatacggtcaacctcaacaagaccaggatcgatctcctggaagccagcatcccggcgctcaggtcgttcgtccgtgattccgactggaagccgaaggtccgcagcttcgtcgagcagggatcttgggcgcaccagacgatcatccgtcccgtcgacggcggcgagttcgacgccgacctgctcgtcatggtggatccggtcgatgggtggaccgcggccgactacgtggagagcctcggccgcgtcttctctgacagcaagacctacgaagacaagacgaagacgtgggactactgcatcacgatcacctacgccggggaccgcagggtagacctcgctccctgcgtcgtcagccggctgtgggaaggcagtctggaggtctgcaaccgcaagggaagcttcgaacttacgtcgccggtcgaatacaccgagtggatgaaggagaggaacgcgtattcggggaacaattccttccgcaaggtgacgcgcctcgtgaagtatctgcgcgacatcaaggagaccttcacctgcccgtccgtcctcctcacgaccctgctcggtaacgagatccagtggtttgaaaaaggcaccgacgagttcgccgacgtgccgaccaccctcaagacgctgatgggccgtctcgataatcgactccggatgtacccgacgaggccgacagtgacgaacccgaaactccagagcgaggatttttcgccgctcttcggcaccgacgagcaatattcgaacttccgcacggtcatcgcgcgctaccggaaatggatcgacgaggctcacgcgatggaagggcgccaggaatccatcaaggcgtggcaaaaggtgttcggaccggagttcgccaaggcagatgtggtgaaggccgcagcggacgggatgagcgaaagcgcgggcacctccctcgtcggccgcttcctggactcgaccgcggcccatctcgggggaatagttgacatggtccgcgactacggattgtcgatccttccggccggcttcgcgcgaccgccccacatccaggcgccgccttggcgcagcgtcgcgcatccggcggaaatcgccgtgacggccgagtggcgctccgccagccacgtgcagggtggacggatggtggccgcgggccagttgcttaagggtcaaggcagcctgtacttccgcgcctcgcttgcagacggtacccccgtgccgccggaatattccgtcgattggcgcatcaccaacaccgccgaggcgatgtccaagaaggcaggccggggcgggttcgagatatcgaacaagggggcggcagatgggagcagttga

SEQ ID NO: 6963 - DNA, 1257 bp, BradyrhizobiumColbertium
gtgaaccactacgaacccggcgaccggatcatgttgttcggcttcagccgcggcgcctacacggtccgcagtctggccaacctcctgatgctctgcggcgtgccgaccaagggcccggacggaccgttgatgcgctaccgcaagcaggtcaaggacatcgccagggaggcggtcgacaccgtgctagagcacggcgccggccatccgcgcgagcactacgaagccgagcgcctcgaactggcgcggcgcttccagatcaaatacggctccggagacggcagtgactccaacgtcgcaccctacttcatcggggtcttcgacaccgtggcggccctcggcgcgagcggcctgcgctacttcgtcatccaggcggggctggccgccggcgtcgccgccgcggcgttcgtcggcggattccggccggccgtcgggatcgcgctgctgtgttcgtggctgggcgccggcttcatgctctgcggctttctcgcgcagatcgtcatcgtcgctggcgcgctcggcgcgttctggtactggcagaacaagtccacgaccaagacgatcgtcgactaccccacccccggagaatcccgctcgcacaaggcagagtggaagggagccaacttcgaccggctcctcagccgacacgtcgcgttcgcgcgctccgccaacgcgatcgacgagcggtggaaggacttcgaccgcgtcggctggggcggcggcaacgagggcccccctgtcttccccgggcacgaacggctgcgccagtggcttttcgccggcaatcattccgacgtcggcggctcctatccggagcccgagtccctgctttccgatgtcgcgctggaatggatgtgccgggaagcgatctcggtccccgacggcctgatcaccggccccatctacgtcgacggaatcaagatggaagggtccggtgacgtcggccaggcgctgaatatccgcccagacgccggcggcgtgcagcactgcgaaatcgccggcatgcgcgacaccatcgacgccatggccggctcgttgcctaactggaggtggctgcgccatctgctcggccgtcagaactgggaggtcaagattcgcgacatcggcaacgcttccaaggtccactcgacggtcggccggcggttcgagcttccgtcggtcgtgcagtgctcggcaggatcggctccgtatcgaccggacgcgctggccggacacgacgacttcaagcggtactatccgaccaaggcggacgcgacatga

SEQ ID NO: 6964 - DNA, 591 bp, BradyrhizobiumColbertium
atgagcgacacggaagccgtgagcggtacccgaccgcaggatccagagcatctcgctgccgaggaggtgctgaaggcgctcgaggttttttccgccgaggacaagttgcgtctcaagctgatcgagcgacggcgccgctccggcaccgatttcggtgagggcgaactctaccacgaagccctctgcctcaccctgatcggcaggcggaagtgcccgatcgacgttcccctgatcgccttcctcgcgaagacgatgcagaacctagcctaccaccgtcgtgcgaagctgaagcgcgagcggaagaacgcgaaatcgaacgcggaggacatccaggatctgcaggtcctcaccgaccagcacaatccggaactgtcgctcatcgaacaggaagataccgacaccgtgaccgcgatctacggatgcctcgacggagacgaggaagcgcagttcgtcgtcatggcgctcgcggacggaaaacgaggaaaggaattgagggatgagatcggcatcgatcaggcggcgtacgactacgccatgcgacggatcaagaaggccgtgaagaagaggttcccagaagggctttcgtcatga

SEQ ID NO: 6965 - DNA, 432 bp, BradyrhizobiumColbertium
atgaccaggaagaatcgcggacgcaacgaactgcagcgcatttccgacgccttcgacgaggacatcctgaacgcctcgccggcgcaactgcgggagctcttggccgaagaaggcctggaccagaccaagatcgtcgcggaaatggacgccatacttgagcaggcgaagcgttcctttggaagggccaagctcgatcaggccaagaccgcgatagccgcccgcgggtcggagccctcgaacgtttccgcgatcgatagggagtgtgtccgaggcaagctcggagctatacgttccggcgccggcgaaaacatggaaggcatgatgacggcggcccgccaaggaaagaagctctcggcgcgcgacgaagagggcgccctagacgacctggcccaactggaagcgctagagaacgaaggcgacccgggggaatga

SEQ ID NO: 6966 - DNA, 735 bp, BradyrhizobiumColbertium
ttgatcgatctcggcatatcgcaaccgaaggatatcgatctggacgccatcgcgtggaccagaggcgcggtcgtcaactatcgtccgatggacggatgcgaagcgaggatcatcggcacgaagcgcaaggccgtgatctcggtgaacagcctcagcatgcccgagcggaggcggttttccctggcccacgaactgggccactggcatcaccatcgcggccgcattctcttctgcggcaaggacgaagtatgcaactttcgcgacgacgccctcaaccccgagcgccaagccgacgacttcgcctccgatctcatcctgccggacttcatggtcactccgcgcgtgcgcaagatgaagcgacccacattgtcggccattcgcgaactcgccgacgagtttcgcgtcagcgacacggcgacggccgtcaagatcgcgtgcctgaatcggttccccataatcgtgatctgtcacggcaagacgcgtcggcgctggttcaggcgctcgaaaatgattcagaactggtggttttcgtcggatacgctcgaccgcgaaagctatgccggacacatgctgttcaacggcgaggccgagcagaactttcccaggaaaacgcccgcggaagcctggttcagcttcaaaggctgcgaccgttcggaggtcgaggagcagtcattcctgctgccgaacgacgagatcctgacgatcctcaagttacccgatgaagcagtcgcttag

SEQ ID NO: 6967 - DNA, 306 bp, BradyrhizobiumColbertium
gtgctcgccttcgagcttccgaccacgggcgcgccggcgctggcactcctgcttgagacggcacggaagaagacggtccggctttgggccgagcagtcgccgtttgaattgaaggattcgctgaagcgccttggctaccgctggtccgacggcgcggacggtcgtccgaagagctggtacgtcgacgtctgcgagaccgcgctcgatgacgagatcgcgttcctaaaagccgagatctatcagcgcgacatttcgccgacgatgcagacgctgaccgctttcacgaagttttcggcgaggatctag

SEQ ID NO: 6968 - DNA, 465 bp, BradyrhizobiumColbertium
atgggacaggaggtcaggacctgcgttctgctcgacaccgagacgaccggtctcgatcacaccaaggacgagatcatcgagctcgggatggtcaagttcgactacacgacggacgggcggatcgtcgggttgcgagacacgctctccgcgttcaacgagcctagcgctcccatctcggcggaagtgacggcactaaccggcattaccgacgcgatggtggccggccaaagattcgacgactcggccatcacggccttcgcggacgatgcggtcatcgtcattgcgcacaacagtgcgttcgacaggaagttcgccgagcgctacaggccagtgttcgagcacaaggcctgggcctgcagcatgagcgagatcgactgggcgcaagcacggattcgccggcgcgcagttgggttacctgctgaacggtgccggctacttccaccacgcgcaccgcaccgtcgatga

SEQ ID NO: 6969 - DNA, 1362 bp, BradyrhizobiumColbertium
atgacgagcaaaccgaagccgggcgaggccggagagaccctcgaagtccggtacggcggtctgctcgtcgggctgctgcgccggcgctcggaggagatccaagacatcgagttcgtctacgacgaggcgtggacgaaggatccgaacgcgttcgccgtctcgacccggatgccgcttgcgaagcccgtccacgaaccggacgtggtgtaccgatggttcttgaacctgttgcccgaaggtcggacgctgaagacggtcggtaccatcctcaagattccggaagccaacgtgttcgcgcttcttgaggagttgggagaggatctccccggtgcgctcgaagtcttgcggcccgccgaccagcggccgaagcggacgccacgctacaggcggctttccgaagccgagctggccgcggccatccgccgccttcccgagaagccgcttctggtcggcgaggaaggcatccacatgtcgctcgccggcgcgcaggacaagcttcccgtcgcccggtatccggacggaggcatcggcctcgcgctcgacggcgcgccgacgacgcacatcctcaaaccggccaacaagcacttccacagcgcggtcgagaacgaggccttctgtcttcgcctggcggcgaaggtgaagctacccgtcgccgagtgcacgatcggcaaggccgaggacctcgactatctgctggtgaggcgctacgaccgcgttcctgagggacgcagcctacgcaggctgcatcaggaggatttctgccaggcgaccggccacattccatccacgaaatacgaagccaacccggcgacgaggctgcgcgggccgagcatgaaggactgcttcgacgtcatccggaaaacggacaacggcgcggccaacgccgcgcgcttcctcgacttcttcgtcttcaacatcctctgcggaaacgtcgacgcgcactcgaagaactattcgctgctgctgctacccggcggcgccgttaccatggcgccgctctacgacgtgatgaacggcgacatctatccggacgtgacccggaatttagccatgaagatcgccggcaagaaccgcggtcgctacatccatgcgcgccactgggaccgcatggcggaggagaaccagatctccggcgctcaggtgaggcgccgcgtcggggagctttcccaggcggtgctggatgcgctgccgtccgtcgtcgatgaattgaacgcgctcaagaagtcgccggtctatcagcagatatcggactgcgtcgccgtcaattgtcgggacatgttgcggaatctgaagagcgacgtcgaggacgagccggaggaagatccggagccacaaggcgcgcgccctctgggcttttcctga

SEQ ID NO: 6970 - DNA, 282 bp, BradyrhizobiumColbertium
atggcaataacatccaccgcagaactcggcgaactgatccggaaccggcgcgcctccttggggctccggcagcaggacgttgccttggcggccaacgtaggcgtccgctttatcgtcgatatcgaaaacggcaaggacaccagccagatcggcctcgtcctccgcctgctgcaggcgctcggcatccgactgacgccggagatgagtcccgtgccgacgccaccgccggcggccgaggaatccgaagcattcgatcccgacaacttctccccgacaccatga

SEQ ID NO: 6971 - DNA, 384 bp, BradyrhizobiumColbertium
gtgctcctgtgcgccctcgccggcaaggcggcgctgcggctgtcccgttcgaccggccggctggcaaaaaccctgtccaggaccttggctaagctcgccgagcgcgacgacctcgaagccactctcgtcgatgaaaacgcgtctgaggacgaaaagcagaaggccaagctgaagctgggcggcctcagccggatcgccgacagcacgctggtcgtggtcgacgaggcctccaggtcgatctcccgacgttcgaacgcctggtcaaacggctccgccccggctgccggctgctcctggtcggcgacgaggcccaattgccgccgaccggctttggcttggtttttcacaagctcgtcggcgatccctcggtcacctcccgcctga

SEQ ID NO: 6972 - DNA, 207 bp, BradyrhizobiumColbertium
atgccatacttctcgcccttcgatggccctatccacgggatatcgttcgtcgacccctcttcggaaagcctggctggcgccctcgacgacgtcatcggccgcttgggtggtcctgccgacgttctcgtcgtgaccgccatcatcggcggtgcggccggcgtggaagccgtgaacgagcgccagcacaccccgccacatcgccactga

SEQ ID NO: 6973 - DNA, 1425 bp, BradyrhizobiumColbertium
atggcggtcactctcgagatcgatcatgcgaaggcgcgcgcgaaggctgcggcggcggccggtttgcccgtggtgccgcaggccgtccaggggccgatccgccggatcaaatggggcatcctgctgctgacgctgtcgatctactacgtcacgccgttcatccgctgggatcgggggccgaacgcgcccgaccaggcggtgctgctcgacttcgccaacgggcgcctctacgcgttcttcgtcgagatatggcctcaggatctctatctcgtcacgggcctgttggtgctcgcttcgaccatcctgatcctcacgaatgcactggcgggccgcctctggtgtggcttcgcttgcccccaaacggtctggaccgatctgttcctgctcgtcgagcgcctgaccgaaggcgatcggcgccagcgcctgaagaatatcggagtgccgctcacgccgaaacgagccgtccggatcgtcgcaaagcacgcgacgtggcttctgatctcgctggcgacgggcggcacgctgatcttctacttcaccgacgcgccggacctgctgcgcgacttggctgccggcaacttttccgccaacgcccttacctggatcgcggtgttcacgggcacgacgtacgggcttgcgggtttcgcgcgcgagcaggtctgcaccttcatgtgtccttggccgcgcctgcagggtgcgatctgggatccggaggcctacaccgtcaactatcgcgactatcgcggcgagcagcggacctccgcgaagaaggccgccgagttgcgcctgcggggtgaggcggcaggagattgcgtggactgcggccagtgcgtggcggtctgcccgatcgggatcgacatccgggaggggccgaacttcgcatgcatcaattgcggcctatgcgtcgatgcctgcgacggcgtgatggcgaagctcaggcgcccgagaggcctgatcgattacgaaagctgggcgaacatcgagcggggccgcagcaaggagtcccttcgcaaccgtctgctgcggcccaagacagtcggcttgacggcggcctgccttgcgttggccggaaccatcggggtcgcattcgcgatgaggaccaccgcgacattgtcggtccagcacgatcgcgatcccgtagctgtccggctatcggacgggtcgttgcgcaatgcctacaccgtgaagctgctcaacaagtcggcgagccctcatcgctacacgctctccgtcggcggcatcgacgcaaggctctccatcgtgggcagtgatggtgtcgctcccatcaaggtcgccgccgacgcctcggagtccttgcgcgtcaccttgacggcggcggacgccgagcagaaggacgtcgtgttcacggctcgggacgagaccggtagcacgctctacgccacggaccggttcgttgagaggtag

SEQ ID NO: 6974 - DNA, 135 bp, BradyrhizobiumColbertium
atgacggatcagtccatcgcacgcgttcgcaacgcgctgcgcgtcgtgatcaatcccgaactgggaggaacatcgtccatctcggttttgtctacgacatcgacgttgtcggaggcgcagtccgcatcacaatga

SEQ ID NO: 6975 - DNA, 417 bp, BradyrhizobiumColbertium
atgacccagtacctggatctcgatgtccgcccgatcctgcgcggcggcgagccgttctcgctcatcatggccgcgctcgagggtttggaagtgggacaggggcttcgcctctatgcgccgttcaagccggtccccctcttcgccgtcatgtccgagaagggtttgcccactccgaccgcgtcctcgacggagaggattgggaagtgctgttcacacctgtcggagcaaaggcggacaccggatctcgcgccggagagaacccgcacttcgccacctggcccgagcctgtcgtggagctcgacaaccgcgacctcgcccctcccgagggagcccgtcttcctgttctcgcagctcgaaaagcgcggctttcgccacgacgggaccacttacgagttgacagtgagggcgccgtcatga

SEQ ID NO: 6976 - DNA, 189 bp, BradyrhizobiumColbertium
ttggccgcgcccgacaggcccggcacgttcctcctgatcggcctcgcgtctctatgcgcgacggtggcgttcggcgcagtattggcgctggcgcttgccggatgggccaggcaaaacggcgaagcggtgctcgcgcgtggcatcccgctgcacgccatcgccgggctcggcggttgttggttacgatga

SEQ ID NO: 6977 - DNA, 216 bp, BradyrhizobiumColbertium
gtgttccgcgaacgatgggttttgccggctctcggcttgttgacggcgggtggcctcgctgattgcggggtttatggcattggaggccgtctgccttccgcaccatgggttctgctgttcggggccgtgctgctggtcgccagcttcggcctggtcgtggtcgatctcggtttgacggcttggccgcgcccgacaggcccggcacgttcctcctga

SEQ ID NO: 6978 - DNA, 2571 bp, BradyrhizobiumColbertium
gtgatcctgttaagaagtcctaaagcatcaattctaacttgttgtttccccgagttcattaggatgtttatgggggaagccatgaaccacgaactcatgttcgcggcattgaacgccacgaacgaagccattctacgttcgacgagtagctccgaactttaccagcgagtttgtgataccgccgtccacggtggccacatccgaattacagctgtccttatcccaaatgatgccggatcgctagacgtcgtcgctgcaacgagcgagacgggattcatcccgcagattagcatttccgtcgatgaggcttcggtccacggccacggacttgcgggacgggcctatcgatccgggcgtcctgccctcagcaatgacgtggttcaggacgacacgttgaagccgtggcgagagcattcgattgcctgcggcgtcggttcgaccgtggcggtcccgattatccagcgcgcgcgaagcatcggcgtctttctattctgctttgcagcacccgactctatcactagcgaaataagtgcgctcctcgaacgtgtggtcgagaatgtcgcattcgctctggagaggttcgagggggtcgaacggcaaaacagggcggagctcgcgcagcgcgaggccgagaacaaagaagctgcgttgcaccgtatgtacatcgcgctttgcaagacaaacgaagccatgatgcgcgccggctcacgtgaagagctctacgatcttgtttgcgaggcagcggttctgggcgggcattttacctcgacgacaattgccttgacccaacccgacgatcacttcttgaagattgtatccaccaaaggacaaaacgccgatcgggttcgcagcacggcgttttcggtcttggcaggccatcctcagggaaaggggctaaccggcacctcgcttcgctcgaaactaccctgcatcaagaatgacttcttgcgcgatgcaggaacaagccactggcacgagcttgcagaaaaaggggggacacgcgctggtgcaagttttcctctcttcagggatggcgacgccatcggagtcctgctcttcctcgccagcaaggaaggcatcttcacttgcgaaatcgttgaactactggccaggttggcggaaaacgtttccttcgccctccacaatttcgaccgggcagacgcaaacaagatcgccgaagagcgcatccgcttcctggcgacccacgatgctttgacgagcattccgaaccgctcgatgttcaacacgatgatctctgaagcgcatcagcgcgcgagtagggcaccgggtcgccggttcgcggttcttttcgtagaccttgatcggttcaagatggtcaacgactcgctcggtcacactgccggagatcaattgctcatcgaagcatcaaagcgtatgcgcgcaaatatccgggcggaggacgtgttggccaggttggggggcgacgagttcgtggttttggttgaccagttggccggcaaagatcaggtcaccgcgattgcccaacatcttctggaagcattcgagtcacctttcctcctgtgcagacacgaatgccgcatcagctgtagcatcggaatcgccattttcccggatgatgcgtccgatcccgaggagctcgtcaagcaggcggacaccgcaatgtatgcggccaaggcaggtggaaagaatgcataccgcttcttttcgattgaactgcagtcacaatcgctgaagcaccttgttctcgaagctgacctgcgccgagcgattgaacgcgacgagctgtttctgcattatcagccgaaggtaaattccgcgcgtcgcattgtcggtgttgaggcgcttctgcgctggcagcatccgcagaagggcatcatcgcccccgcagcgttcataccgatggcggaggagagcggcctgatcattccgataggcaggtgggtactggaaacagcttgccggcagagtattgtgtggcagtctctgggattgccggcaatccctgtggccgtcaatctctcgccgaagcagttcactgatcatgagctgctggaatttctcgatcgggtcttgcgcgagacaggcttagctcccgagctcctgcaactcgaggtgaccgagagtatggtgatgcaggacgtcacgcatgcgactggcctcatgcaggccatcaatcgtcgcggtgttcgtctggcaattgacgacttcggcacgggctattcgtctctctccttagtgaaaagtttcccgattgacacgataaagatcgaccgttgcttcgttggcggaatcggtgaaagcgctcaagatcgcgctatttccgcagccatcattacgctcggacaggcactcggtctgaccgtagttgccgagggcgtcgagaccgccgaacaagacgccattctaaaggatttcaactgtcatgaatttcaaggcttcctgttcggtcgcccggtttcggccgatgaaatttcgcggttgctaggtggcagcgatagccagcgggtcccatctccctccctcgtctgggcagacgaaagggaagaacgcgttacgcctgcccttccggcgtttgatgatatcacctag

SEQ ID NO: 6979 - DNA, 216 bp, BradyrhizobiumColbertium
gtgcttctacggcgaaatgccggaggattccggttcgtcgaagagaaggacggcgccaggattccgaccgttccgggaaagtttcgctccgacccgcatgaggacgtcaacgtcggttggcaccggccgccgtcttcggctgtcgtgcaaagtttcatggactatttcgagaagctttttcgccagccgaggcgcgcgccggctcccgcatcatag

SEQ ID NO: 6980 - DNA, 471 bp, BradyrhizobiumColbertium
atgtcgcatgccatggtgctgcgcgccggcatcggcggcggcggactctggtccatctcgcgcgggctggcacgcggactcgccggccgccatgagtacaagatggcaatgaacgccgccgacagccccaggcgaggcgacctggacggacggggaaacctctcgcaggcggctctgatcgagttttcggaatggttcatgaaggtcatgctggaccagatacgcttcagcaaggcggtgttcaggctcgacggcatcgaggaacgttacaaggatctgctggtgcacctcggactggaatcgcgcgccgtcgatctcgtcgctgcggcgttcaggatggggcaattggagcgcggcgaagcggcttccgtactgcgcgttccggagcggacggcgcgcacgacggtctccaagctcacgcagataggattcttgaaatccaagactccgaaaggtgcgctccggacatag

SEQ ID NO: 6981 - DNA, 423 bp, BradyrhizobiumColbertium
gtgcgcgatcacgctgtggtgaagggcctgcagcgggctgaactcgcccggcggacaggctgcaacctggagaccgtgcgctactacgagagggtcggccttctgcccgagccgccgcgcacgtcgactggctatcgcagctacgacgccacgcacgagcgtcgccttcgcttcgtgcttcgagcgcgtgagctcggcttttccctcgatgagattcgcgagttgctgcacctcgtcgacgaacgcgaccagccttgctccgaggcacgcgccgtcgccgccgcccacctcgatgacgtgcgggcgaagatcgccgatctgaaacggatggagcgggtgttgaagggcgtggtcgcacaatgcgccgacggaacgctaccagaatgcccgctgatagagacgttatttgggaaagccgcttga

SEQ ID NO: 6982 - DNA, 459 bp, BradyrhizobiumColbertium
gtggatttcggcaaggaactggagacatcggacatggttgcaccgcgatctggaacggcagatacagcgcccgccgcggcagctcctgcattctcgaagcggaccgaggttggacaccagcggctggttgctctgggcggcattctcggtgcgatagctgcctcgtcctgctgcgtcattccgctcatcctgttcagcctcggcattggcggcgcctggatcggcaacctgacggcgctcgcgccgtacaagccgctcttcgtcgccggaacggcggccgtgctcgggtacggcttctatctcgtctactggaagccgcggcgcgcttgtgccgatggcgccgcctgcgcgcgcgccatccccagccggctcgtccagctcgcgctgtggatcgcgaccgtgctcgtgattgccgcctttgccttcgactatgtcgtcccgctgctgcttcgcgcttga

SEQ ID NO: 6983 - DNA, 294 bp, BradyrhizobiumColbertium
atgaagaagagcttgagcgtccttgccctgatcgcctcgatgatacctgcatcgaccgcgttggccgccgaacggacggtgacgttcgcagtcgacaacatgacctgcgcttcgtgtccttacatcgtgaagacctcaatggcggcggttcccggcgtcaagaaggtcgccgtctcgttccaagccaaaactgcgaccgtgacattcgacgacgcgaagacgagcgccgacgtcattgcctccgccagcgtgaacgcgggctatccagcccatctaaggcagcagggcagttaa

SEQ ID NO: 6984 - DNA, 159 bp, BradyrhizobiumColbertium
gtggtgatgcggattggcgcgccgcaatggcggcagcgcgaggcgatcgagatgtcgcgatcggtccccgatgccaagcgcgtcgactgcgcacatagcgttgagaacgcgcccctccagtgtgacctgatggcccccgtcctggtcagtgacggataa

SEQ ID NO: 6985 - DNA, 378 bp, BradyrhizobiumColbertium
atgcccgccatcgtgttcaccgatccacaggtggcgagcgtcgggcttaccgaggcggccgcgcgcgcggccggtcataccgttggtgtctcgacgatcggccttgcccaggtgccacgcgcgctcgccgcgcgtgacactcgcgggctggtcaagctcgtggccgacgccggcagcggccgtctactcggcgcgcatatcctcgcgcccgaaggcgcagacagcattcagaccgcgacgctcgcaatccgccaggggctaaccgtcgatgacgtcgcggatgccatttttccgtatctcaccactgtcgagggtctgaagctcgctgcgctggcgttcagcaaggatgtcgccaagttgtcgtgctgcgccggctga

SEQ ID NO: 6986 - DNA, 435 bp, BradyrhizobiumColbertium
gtgacgcgatggctcgccgactgcggtccggacgtgctcgaggacattcgggtagcgctgatcggcaatctctacggcacgttgccggtctttatcggcggcatcctgaataccttgttggtggctggggccatagcggcgcgctccccgacgccattgttcgtcgcgtggctcgtgatcgagatcgtgatctgtctcactcggctcgccgtattgatcgtcgcgcgtcgccgcgcgctgaggcatcgccctacgccgaccgatgtcaacttgctcctttcgaatgcctcgagcgccagcgtcggctacggggcgctgatcagcctggcgatcggcgactgggtggcggcaacgctggcctgcgtatcggccggagctatggtcggcggatctgcttccgcaacttcagtgcgccgcggctctgcggagcgatga

SEQ ID NO: 6987 - DNA, 123 bp, BradyrhizobiumColbertium
atgatcgtgctgagcctcggcccgacgattccgggtgcgctgatcgcagcgcagccactgatgctcgtcctgttcttcccaatcccgatgtatctggcggcaccatggtctgcttcaagttga

SEQ ID NO: 6988 - DNA, 372 bp, BradyrhizobiumColbertium
atgcgtggccttctgcgcgaaggcgacctgccggcgcggctcggcggcgacgagtttgtcgtgctcgccgtaggctgcacggccgaagaagcgacggcgttcgggcaccgcctaatcgagactatcggcgcgccttacgacctcggctctggaacattggctcgcgtcggcgtgagtgtcggcatcgcgatggcgcccgagcacggaagcgaggcggccgacctgctgcgcgccgccgatgccgcgctctatcaggccaagttcgacggcgggtcgcggtgtcaggccgcgtccggagacgacctagcgaggctccgctgcctcgtttcgcgcagcgcagccgaacctgctctccaaagcgccgcggcgtag

SEQ ID NO: 6989 - DNA, 132 bp, BradyrhizobiumColbertium
atgatggtgctgcacgcccggttcggtcggctgccgaacacgctgaatgaccgccttcagacgctatcgcaggcgacctcgacaggatcatcgtccagggtgcaaccgccgccactctcgaagaagcggtga

SEQ ID NO: 6990 - DNA, 213 bp, BradyrhizobiumColbertium
atgctcgtcgcgcaccagtttctcgagcacgagttcgacgagctgcgggcgaaggtatcaacggactatgcgcgcggacggctcgcgacagcaagaattagtacaaccatattcagtggggggcgcgtaaggaagctgatcacggtcgatttggacgagaacccgttgctgagaggaatggtcgagcacgtgcgcaaggagtgcaccatctag

SEQ ID NO: 6991 - DNA, 1212 bp, BradyrhizobiumColbertium
atgctcgacccgcagacctacgacacttgccacaccagggaatactggcttcagtgcggacgcgccgccatggccgcgctccgctcgtgctgtcttttgtctcccgaagagatctccttcctccaccgcgataggttcatgcccgacgggcaagccatcgtgtgcgtacgcgacaccttcgaagcgcgtaaccgcgacatcccgttgatcgaggcggcccggctggtggtgattcgctacatcgaagccacaccggagaagttcaagtcttcgcgctatctcttcgtcaccccgaagagcgcgcgcctaaatcgcagcactgtcaagctgagcctgaaccgcgccgccaggcgcaagggcatctgcgacaacttcatggaggcttccgccgccaccttcgtcaacgccgtgtatcacgatcccgtggacgacggcgcggcccttcttttgacaggccgcagccttgccgacgccggcttcacggtacccccgacgacccaacgcctgaggaattgcctggagcagtatcatccgctacgcgacctcaattcgatcggcttcttcgaggcggagcagcggctctcgaacctggcggccgacatccgcgcctgcaaggagccccgccggctccaacactccgatcgccaattgctccggcgccagcacctgcccgaagccgtcaagctgtttgacgaaggagtcgtcacccaggttgccatcggtcggtacttcggcctggatcgccaccaggtctacatgtggttcaagcgctaccgccggaaaggccgcgaaggcctcatcgaccgaaagcgcggaaggctcacgcccgaatggcgccgcaagacgatggagctctacgagaagatgtcgccgatcaagagccggcatgccttcttcaagcagctcaagaagcggaaattcccatacggctacaccacgctcaacaaattcctcaacgaagcgggcgagagatcgccgaagaaggaggtgatgaccgagaagtggcgcgacctcgtcgaccgcgaattcgccaagttcgagcgtccgccgcagaagcgcgagctgctgagctacctccaggaggaattcgagtttccctacgataggaagaccctcgaaaagtatctcgaccgtgcggggctgtcgccgatccgccgcggctccatccgcggcaaccgcgacaaggcgaccgaggttcggccggaatgctga

SEQ ID NO: 6992 - DNA, 1416 bp, BradyrhizobiumColbertium
atgactcttacgaacggagtttcccacgacgacgcccacgacatcgtcgaggtcgtaatcaaccggaccggcctgcggacgctggacaaggccggcaaacgcgcgctggcggccgcgcgcgcggagaccgccgccgacaagctgacggcagccgacgggctgccggccaaccagaccgagctcgcgcggaactggcagtgggtcctggaggatgcggctaaccgcctgacctcggacgcgctggaggactaccgccgccgcctccacaccattccggtcaaggaggtgctgatcggcgcggccctcctcgacgatttggggccgcgcccgccggtgatcgcctcggcgaaggcgcacaacgagtggaaggcgaaggcgcgcgtctatctgcggatcgggctctatttcggccgcctcacctacggacagatgtcgaagaaggcctgcgccggctacttcaaggcctgcatcgcgatctcgacggaagccgcggagcgcggccgccggggcctgagctacacgacgatcaagaaggacctcgaatatctgcagcgggctgtccgcgagtacgacgagaacaacaacctcggtttccatcccaacgtcgacatcccgtccgacaaggtccggcgcaccgcgtacctgctgcgcagcgaagccgcgcggctgctctgggtgacccgcggccgcgtctggaaccgcgagaccggcacctgggtcaagaccgtcgccaccgagggccgggtctgggacaaggagaagggcgactgggtgaaggccgacggccgggtggtaaacttcatcgacaaggtcaccaaggaccactcgaacggaatgggacgcgcgttccgggtcgagatctacaccggctggcgcagcgagaacatgttccgttcgacctggaagcgccatcccaagcacggcagcatcgacgtggagaccggcatggtgcaccggacgggctacgcccagccgcagaacaccaagaacatgcatcccagctccaaaatgctaaagcggctgctgcagcatgcccaccgctggaagaaggctgatgacaaggaaggccaccgccacatcatccgcaagcgcgacggcgagccctacaagagcatccacgagcagttcgtgaagctcgtcgaggcagctgggctcgaccacgagatcctgatccataccttccgtcacacgctcgcgacctggtcggccatcatcggcgtcgacatccactcaacggccaagctgatgggcatgacggtggacaccctcggtgggtctatcagcacttcgcccccgcctccgaggacaacgccatcgaggtgtgggacgaccccgcgcgccgcgcgcggctccgtaacctcaccaaggagaaggatccggaggactatcccctctacaacgaccatatcccgatga

SEQ ID NO: 6993 - DNA, 699 bp, BradyrhizobiumColbertium
atggcgaaatccccccaactggtcgcggcggtcgcgaaggtggtcaagaagcccgaggagacggtgcgcgtggcgctccgccgcctccacgaggccggcctcatcgaggtgacgggccgcggccggggcggcaagcacatgacggcccgcgacgccgcgatgctgctcctcgcgatgtcgatgggcacgatgctgaaggactcgccgaccacgatacaggactactggaatcttcccctgctgccgaccgacccccaccgcttcgacgtcctcggttttccgcccggcaagcggccagggctgacgccgcgctacttcgccaggatgttcaccaagaagatcacgcccgtcgacaccctcggggtggtgctctccacgatcatcgagcgcgcctgcgccggaatgctcttccccaggcccgaccggggcgacttcgccaagccgcccgagccgcacatcccggtgcccgcggaggtgccgaacagccgtctccaggtcaagatctacgcaccctggcgcgccgcttcgatccatctgcggatgaatctgcaatggcaatccgagatgctgttcggtgaacgggcgacgttgggcgaggaggcgttcccgggcgaggaccggctcgccaacgtggattatgtcgagatccggcagttttcggagctcgcgatcttagcgatcggagaaagcctgcggtaa

SEQ ID NO: 6994 - DNA, 516 bp, BradyrhizobiumColbertium
atggcccgtgcccaggaaggggatcgagccgcctatcaccggctgctgcaggaaatcacgccgtatttgcgttctcttgcggcgcggcggcaccatgaccccagcgatgtcgaggattcggttcaggacgttcttttgaccgtccattcgatccggcagacctacgatccagcccggcccttcgcgccgtggctggtcgcaatcgccaaccggcgtttcattgatcggctgcgccgtcagggccgcagcagagaaatacctttgaccgccgagcatgaaaccttttgcgagcctgcagcgaacttcgaagagagaccggacgagcgagcgctcgagggcatggtcgatcacctccctcctgcccagcagaatgcgctccggttgctcaagctcaaggagttgtcattaaaggaggcggcagcattgagcggcatgtccgtcacgtccctcaaggtgaacgcccatcgcgcgctgaagagcctgcggagaaagctgctcgatcggagcgaaccgtga

SEQ ID NO: 6995 - DNA, 480 bp, BradyrhizobiumColbertium
atggcggccgcggctctgacaggcgtactcgccgccatcgcggccttcctggtcagcctccccgaccggtcacggctctggctcctgctgccgatccccgcgctgatcctgtggctttcgaacgtcggctatcagtgcctaacgcaatgggttgcgatcggacctgacggcataagccttggcgaagccgcgcgttgcttcgccacgctcgtgctcaccagcctgcccttatcgctcgcgatgctggtgatgctgcgctacgccgcgccgctccgccccaccgccgtcgccttcatgggcagcctggccgtcgccgcgatcacggcgacggcgctgtcgctattccacgtcatcgatgcgaccgtgatgatcctgttgtggaacttcggcacggcggtgctgtttgttgggctcgcgggcgtgttcggccggaaaatgttccgatgggtggcgccgcgaacgctttatgcaaaggactaa

SEQ ID NO: 6996 - DNA, 558 bp, BradyrhizobiumColbertium
atgaccaacatgacaagtcccgtgccactgtttccacggcagcctgtaccgccgctccacgtcgagattgcctccgccggctcctttgaccttgcaggcgagaagccggcgcagttcacgcttgtcgtgttctaccgcggcttgcattgcccaatttgcaagacccagctgcgggaactggaatcaaagcttgacgagttcgacaggcgccgggtcgccgtggcggcgatctcatccgacacgaaagaacgggcattgcagaccagagaaacctggggattgacgcggctgcgcatcgggtacggcctcgacctcgctcttgcgcgccgctggggattgttcatttcgtccgggcgcggaatgacgtccaccggtgtcgaagagcccgcgcgcttctctgaaccggcgctttatttgatacggccggatggcacgctctacttcggcagtgtccagaccatgccattcgcgcgcccgcatttctccgatattctggcggccatcgactatgtcctcaagaacaactacccggcccgcggtgaagccacggacgtgtag

SEQ ID NO: 6997 - DNA, 990 bp, BradyrhizobiumColbertium
atgagaattgctttcgcttggttcttgccgacggtggccctccagttggctgcgggaccgattcctgctgctgcccacacgatcaccgagttcgttctagctactgccgccagccgtccctccgcaattacgagaggaccggacggtgcgctgtggttcaccgaggcggcgggccggatcgggcgaattaccaccgatggcgagctcaccgagtttccgatcaaggggggcggcgtcgtgaatgccattacaacgggaccagacggcgcgctgtggttcactaactttacctcgaagaagatcgggcgcattccggcgacggccacggctgaaaatctgctggtcgtcgaattcgcggtccccgggccggctggaccgcttggcatcacgagcgggaaagacggcgccttgtggttcaccgatggagctggcggcaagatcggacggatcacgacgaccggcgaggtcaccgaattcgccgtcatcccgatgaaggctcgcgcgatcacggccggaccagacggcgcactgtggttcacggatgctcgtgacaaaatcgggcggatgacgacggaaggcacggtcaccgagttcacgatcccgacggagaacagtggccccgaaggcataacgagggggccagatggcgcggtgtggttcaccgaatccctcagcggcaagatcggacgaattaccaccgacggcaaaatcaccgaattcgcgcttcccgatcccaatgcgcagccgttcgggatcacaacgggaccggacggcgccttgtggtttactgaggccagttgcgttcgcaagcgaggttcgcgctgtgtgatcggcaacaagatcggccggatcacgacgaccggcctggtcagcgaatttgcggtcccctcggacggtagcggaccccacagcatcacggctggaccagacggcgctctatggttcacagagtactacgggagcagagtcggacgcctggtgcttccctga

SEQ ID NO: 6998 - DNA, 378 bp, BradyrhizobiumColbertium
atgcgtgaccgcatgggcaacatgggttccggtatgatggatcagcgcatgggcggcggaatgatgggtggtggcatgatgggctcgagcgccggtggcatgatgatggaccgagacatgatgggaggaggcggagcgagatctggtatgggcgcactattcggctcccgcgtcacgcccgtcatgaacttgtcgatcgatgacgtgcgcggctacctcgacatgcagctcaatcgcctcgacaacaagcgcctcaaaatcggagacgtcaaaagcgacgacgccaacatcaccgctgacatcgtcaccctcgacaactcgcttgtgcaaagactgaaggtcgaccgccacaccggtgcgatcgaatacgagagctaa

SEQ ID NO: 6999 - DNA, 870 bp, BradyrhizobiumColbertium
atggctcaatatgcacatccggaaatgctcgtcgaaactgcgtgggtcgcggaacacggcaccgatcccggcgtccgcctggtcgaggtggatgtggacaccgcagcctatgatcaagggcacataaaagacgccttagcctggaattggacgacgcaactgtgtgacacgttggagcgcgacatcataccaaaggatgccttcgagacgctcatggccgattccggtatcggcaacgacacatcggtgatcctctacggtgacaacaataactggtttgccgcgtgggcactctggcagatgaagatctatggccatcaggacgtgcggctgatgaacggcggacgcaagaaatggttggccgaaggacgcgaaatcacgatgcaggcgcctacagttgcgagggcaagctatcgtgccacagaacccaacaactcgctcagagcgcttctgcccgaggttcaacaggccttcgagaacaatagtcacacgcttgtcgatgtgcgaagcactgacgagttcacaggcaagatcctatcaccgcccggtttgcccgagacctgtcaacgcggcgggcacatcccgggtgcgaaaagcattccgtggggaatggcttgcaacgatgacggtaccttcaagtcgccggacgaactcgcagcactatatgaaggaaagggagtaagtgtgggcaggcccacgatcgcgtactgccgcatcggcgaacgctccagccacacttggttcgcgctgaagtacctgctgggctacgacgacgtgaagaactacgacggttcgtggaccgagtggggcaacagggtccgcgctcccgttgcgagaggtcccgaggagggaagccagaaagctgcctga

SEQ ID NO: 7000 - DNA, 738 bp, BradyrhizobiumColbertium
atgacagaattaacggccaacgcaatcgccgccgcatttgccgcaggactcgtttcgttcctgtctccatgcgtactgccgctcgttcccggctatgtatcctatattgcgggtcaatccgtctcacaatcaaaacccaactcgttggtcgcgcgcgctcaagctattactctcagtgcctttttcgttctggggtttgcgaccgtcttcgtcattctcggcgcgagtgctactgctcttggccaggcgctcaattcctatcgctatgagctgaacctggctggcggcgcaatcgtcattgcgtttggactattcacagtcggacttgtgcgcccttcttggctgcaacgagacctccggatcgatgtgagccttcctcgcgggcggccgcttgccacctatgtcctgggcgcagcgtttgccttcggttggacgccgtgcatcggtccgatgcttggaacgatcctcacggtcagcgctgcgtcggccacgatcggcaagggcatcgccttcctcgccatttattcatttgggctgggagtgccgtttttgcttgcagccgcctttaccgacggcctcttggcacggctcaggtcaatcggccgaattggttacattcttcagctgtttgcgggcggcgtgatgatcgtcatgggcgtcgccatgatcactggatatttgtcaaacttttccatctggctgctggaggcctttccagcgctgtcgacaatcggatga

SEQ ID NO: 7001 - DNA, 807 bp, BradyrhizobiumColbertium
atggacatggatagcaaacctcgaatctcccgcaccaccggacggatgctgctggtgctcctcgtcctcggtgtcttcggcgcctggtttgcattcgatcccggcttccgatcgctaagatcgtctctcttcggcaacggagcggagatgctgcaggacgaatttgatcggcgggtgcatgactatgtcatggcgcaccctgagatcatagtgcagtcggtgaatcaactggaagcgcgggctcgggcagcggagcagacggaggcccagaaagttctgcaggctcgagcggatgaagtgttccgcgatcccgacagtccggttggcggcaatcccaatggcgatgtcaccgttgtcgagttcttcgactacaactgtccctactgccgccaagtggcgccagtggtcacgaaggctgaggagaacgatcctcagctgaggatcgtctacaaggagttccccattcttgggccaaactcgacctttgcagccaaggctgcactcgcggccgataggcagggcaagtacgttgcctttcaccgtgccctctatcaggtgcgcggcacggttgatcaaggcaagaccctggacgtggctgcctcggtcggcttggacttgggccgtctcaaggccgacatggatgacccgaagatccgggcctccattgagaaaaatctcggacttgcccaagcgctgcgtatcaacgggacgccaggatttgtaattggcactcagattcttcgcggcgcaacggacctcaacacgctgcagacatggattcgcgaggtgcgagatcatcgacaatag

SEQ ID NO: 7002 - DNA, 756 bp, BradyrhizobiumColbertium
gtgattaccgttcggttcgacagcaatgttgcgctggggctgccttggcggttcgagccgcttcagcaggaggtgaaggtccatctcggagagcaacagctggtattctttacggccgagaatctgaccgaccaggcaatcgtcggacacgcaaccttcaacgtgacgccgccgacgaccggaatctacttcaacaagatccaatgcttttgcttcgacgaagagcggctcaatgctcaccagaaggtcgacatgcccgtcgtcttctttgtcgatcccgacatggcatctgactcggagacgcgcaacatcgacacgatcacgctctcctacacgttctttcgctctgtaaatcccgatagcgccaaagacctctcccggtttgccgtcgccgccgaacccgacccggttcgagggcaacgactcttcggcgagcgatgtgccgcctgtcatgcgatcgacagcaacaaggcaggtccgatgctcggcggcgttcttgatcgaaaggccggagcggcaaccggatacaagtactcgcccgcccttgctggcgcagggctgacatggtccgcagccaacctcgatcgctggctcgccgatccccgcaagttcattgccggcgctagaatgcctgttcgcgtgccggatgccagcgcccggcgggatatcattggataccttcagaaggttaaggcggatgtgagcgcgcgcgcctcattcacatcgccggaagaccgctcaaatggtcacccttga

SEQ ID NO: 7003 - DNA, 504 bp, BradyrhizobiumColbertium
atgaagtacacccgtctgattccgatcctgctgctgcaattattgtttggcggccaggcgtatgcgcaaacgtcaggtcaaaacacgatcgtcgttgagcgtccgtgggcgcgcgcgacacccaccggggcgaaaagcggcgttgtctatctgaccctgattaacaatggcggctctggcgataacctgcttagcgcgacgacgccggtcgcggaccagatccaatttcacagcgccagcgaggaaaacggcgtgtcccgcatgcgtgagatgcgcacggttgaagtcgcgcctcgagccagggtcactttcagtccgggaggcctgcacatcatggtggtcggactaaagcagccgctcaaggaggggcaaacctttccgttgacgttgaatttcgaaaaggcgggcacgcgagaggtgaccgtccccatcgccaaggtcggcgccatgcaagctgaagatacgcccggaatgacgcaccgccacggcgacatggccaaatag

SEQ ID NO: 7004 - DNA, 486 bp, BradyrhizobiumColbertium
gtgtccaccaaaggcgagagcgtcaccgatcaaagcttccgcggaaagtggctcctcatattctttggctacacgttttgccccgacctgtgcccgacagcgcttgctaacgtcagcgtcgctcttgagaaattcggcacggatacaagtcggcttcaaccattgttcatcacggtggatccgcagcgcgacacacgtgacgtcatggccgactatctgcagtcttttgatccacggatccttgggctgactggaacccaggcgcagatcgacagcgtgaccaaggagtaccgcgtgtacgttgctctggataagacagaacgcagcggcaatgactatctcgtctcgcatagcgcatacctctacctgatggatcctcagggaaaattcgtcaacgtcatcgagggcaacgagggcggggatgcgatcgcagcctggctgcgcaaggaaatgagtggctcggtgcgaggatggagattcgaatga

SEQ ID NO: 7005 - DNA, 393 bp, BradyrhizobiumColbertium
atggagcgcgcgtcgcaacagggtctacggcacctgatccactccaacatggagggcagcatgcaaacgggctggctgtttgcggcaaccgcgaacggcgtccgtcgcgtcatggattgtttctgtctctggcaggacgcaggaaagctcggcggacaagcatacagcgttggttacgatccgaaacagcccgatcatgtttatgcagcgaccgtgcaaggactgtttcgcagtggtgacggcggagaggactgggacgaactgaagtcgccgagcgccgacgttatcggaattgtcgtcacaccttccggcgatctgttcgtcatcaacgcgaagggacgtctgtacaagagcgaagatcagggcggcacatggacgcaggtgaatgcatag

SEQ ID NO: 7006 - DNA, 114 bp, BradyrhizobiumColbertium
atgatgaagcagatgagccaaatgatggatcactgcaatggcatgacgggcaacagtcgccccaacgagcagtggcggaggaacgaaccgtcgcagcccgatcataaggaatga

SEQ ID NO: 7007 - DNA, 519 bp, BradyrhizobiumColbertium
atggcacaggacggcaagacgtttgtcatgcatgcggcccccaagccgatcgcttcgatccagttcgaggacgcgcaaggcaaggtacgcagcctggctgatttccatggcaaggttgtcctcctcaacgtttgggcgacgtggtgcatcccctgccgcaaagaaatgccggcgctcgatcgattgcaggccctgttcgaaccccgcgatttcgaagtggtgccgctgtccatagatcgcggcatggacgtagtgcgcaagttctatgccgaggtcggaatccaaaagctcggcctctatcgagacacttcgggtaatgccacacgagaactcggcacggttggtattccgacgacactgctgatcgaccgcgaaggccacgagatcggccgtttgatcgggcctgccgagtgggatgcacctcagatggttgcatttatcaggtgcgtgacttctgggggcgctgcgacgctgtcccaggcggaagcgaagccaaccacctcgacgtgccagacgtga

SEQ ID NO: 7008 - DNA, 597 bp, BradyrhizobiumColbertium
atggccatcgaagagatactgacgacgacagccaattctgacctgcggagcagaccactgcaacgatggcggctggtcttttggcttccgctcggggtgtttttgattttggtcgttgcgcttgcctggggcatgacccgcaatccaggcaccatcccttcggtgttgataggaaaacccgtcccgcaattccgcttgccaccagtcaaggggcgtaccctcggcctatcgagcgaggatctgcggggtgaggtttcgctcgtcaacgtctttgcatcgtggtgtgtcgcgtgccgcgaagagcatccgatcttcatgcaagtgaaggccgatggcatcgttcccatccatggtctcaactgcaaggaccagccggacaacgcagccagatggctcaataccatgggcgatccttacacgcacaccggtgccgatatcagtgggcgcgtcgccatcgattggggcgtctacggtgtccccgaaacgttcgtcattaccaaggacggccacattgcctacaagcacatcggcgcggtgacgccgcacgtcttggaggagaaacttctccctcttatccgaaggcttcaacagcaatga

SEQ ID NO: 7009 - DNA, 522 bp, BradyrhizobiumColbertium
atgaaccgcagaacgatgatgatcataacagcgttgctggcgctttccggtctcggcgcggcagcaggaatttatacggggcaaacaagaacgcccggcggcgcatcgacggatcagcaaccggtaactggaccggtgctcgccgcgaacaggcccagcgccactctctaccggaatccgaactgcgattgctgtctggaatacgccaagtatctgcatagcaacgggttcgacatcgcggtggatgcaaagcaggatctttcggcgatcagaaagcaattgcgcgttccgcagcgtctcgaaggctgtcacgtgatggtcatcgaccagtatgcggtcgaaggccacgttccagtgaagacgctcaataaactgctttccgagcatcccgacatcatcggcgtttcgcttccgggcatgccgacgggcacaccaggcatgactggcccgaagagaggacctttcaccgtatacgaaattcccaaagacagcgcgcccgcaaaggtcttctcggttgagtag

SEQ ID NO: 7010 - DNA, 705 bp, BradyrhizobiumColbertium
atgaaggcaccatatgcccttaccatcatcgcagtccttacttcggccgcgctcgaacgcgcgcatgcagacggcaatccgcaacggggcgcgatgatctacggcgcatgcgcggcctgccactccctcgagcccaatctgcatctgacggggccaagtcttgctggcctctggggcaagaaaccggcttcggtagcagatttcgcgcgatattcgaacgcgctcaaaacgaggcaggatttcgtctgggaggaagcgtcgctctacgcctggcttgccgatccgaaggcgttcgttcctggcacgtacatgacgtttcgtgggattcaggacgataagcagcggaacgatctgatcgccttcctcaagcttgcgatggcgccgaacggtgcgaagtccgtcgttgcacaaggactgattccggccgaagaggcgcgtggacaggcccccgaaccgcttgagaacgccggtcctgaagcgcgggttaccgcggttcggcattgccacggcacattcttcgtgagcacggcagacggcaaggagcgtccgttctgggagcttaatctgcgcctcaaggtcgactccggaccaaccggcccgaagggaaaaccggtgttgctcccagccggcatgcaaggcgaccgaggatcgctggtgttctccgatccggccgagattggacgatcgatcgaggaaaagtgctga

SEQ ID NO: 7011 - DNA, 1413 bp, BradyrhizobiumColbertium
atgtccttccttcgtgacctgaaaattgaccgccggacgtttcttgttggcagctcggctcttgccgccgtcgcattttcgggcggcagccgaggcgctgccatgcccggtcgggaactcgcgcttgcggccaggccgaaacgactgcagctcgttggcgctccttacaatgacaccgatgtttggtcttacaacgccagcgttccgggccccgagattcgcattcggcagggcgagcgcttgcgcgtcgttctcgataatcagctgccccaggcgacgacgatccattggcatggagtgcgggtccccaacggcatggatggggttccattcttgacccagaagccgatcgggcctggtgaaacattcgcctacgaattcgaatgtccagatgcggggacctattggtaccacccgcatcaccatagcgcagagcaggtcggccgagggcttgcgggcgtgttgatcattgaggaagccgaaccggtagaggtcgaccgtgatgtggtctgggtcctcggtgactggcgactgaaccgcgatgcgtcaatcgtcgacgacttcggcaaccgtatggaagcgacgatggcgggtcggatcggcaacaccgtcaccatcaacggccgcgtccccgagacatttcaggtccgcgccggcgagcgactgcgccttcggctcatcaatgcctcacccgcacggattttcggactcgagtttcggaaacatcgaccggtgatcattgcgctcgacggtcagccgatcgagccgcacgaacctccgaaaggtcagattgtgttgggacctgccatgcgggcggacattgtgctggagatgaacggcgagcccgacagtaaagccttcgtgcgcgataccttctacgaagggcgcgcgtacaggctggtcgacctcgtctacagcggagagccgcgcctgcgagagcgcccgctcgatccgccggctcgcatgcgcgcgaacacgatgccggagccggacctcgtcaatgccgaaaggcacagcgcggtcctgcaaggcgggatgatgggtggccgcggcatgatgatgggcatgagcggcggcatgggcgggatgggatggtcgatcaacggcgtcgccgcgaccggccacaatctggcgccgatgcttacgctgtcgcgcggccgctcatacgttctcgccgtgcgcaacgacaccgcttggtatcatcccgtccacctccacggtcactcgttccgcgtcatcgcccgcaacggcaggccgacgcgctaccgcgagtggctggataccgtcctgatcccgccgcgggagcaagccgacatcgcgttcgttgccgacaacccgggcgactggatgtttcactgccacatcctcgaccaccaggaggggggaatgatggccgttattcgcgtggcctag

SEQ ID NO: 7012 - DNA, 333 bp, BradyrhizobiumColbertium
atgagcgcgatttcgccagccgagccctctcgacgcgattttctctacgtcgcgacagcggcggcaggaagcgtcggcgcggctgtcacgctggttccgctgatctcgcaaatgaacccggacgcctcgacggtcgcggccggcgcaccgatcgaggttgacctgtcgcccatcgcggagggccagatcatcaaggtgttctggcgcagcaagccgatcttcatctttcatcgcggccagaaagacatagacggggctcgtcgcgtcgactggcataacctgatcgatcctgcgccggatacggagcgcgtgaagccggggcatgatgcctag

SEQ ID NO: 7013 - DNA, 192 bp, BradyrhizobiumColbertium
gtgccggcaatggtggatgccgtggtgcgggcgccgactgctcaccgagagcgcaaagcggcgcgctgcaaggccaaggcgtatgacggggtcatcgagattgaagtcgacggcatcacgatccgagccggtcgtggagcggacacggcgatgattgcgtcgattgtccaggcgctgaaggcgagccggtga

SEQ ID NO: 7014 - DNA, 1539 bp, BradyrhizobiumColbertium
atgcgaactttacgcgtgctgtgctatgcagacacaactaccgcggttccgcattgtgctgccgccgccgagatgctgcgcgttgagctgggcgcgcatatcataatgctgctggagagaggtgttcgtattgatgagacattgtcgaacagcgaaatctattggcgagacggcctatttgttccatctaagcacgtaagaaattcatcagaagggaccaataaaaggaaagccgccgcgctgacgagccgtagaatcgaattgtttggttttcgtaacgtactggctcgttctaagttgctcaggtacatttactccacgattaggcgtctttatctcatattgcgcaatcctccttcactgctccgtcaggctcgctcttggataaggcgcatttcaatcttggctattgctgctgagctaatctgggcacggcagagagcgaagacgctacgagaatttctccgcaagatccgcccagatgtgatccttctggtggaggataatgtcgaaacactctcgacaacagtcatcaatgaaggctgcagacagggtatcccaagcgttatcgtaccattcacgatcccaaaccctttggagccagccaaattctaccgccaccgtaagctgaatccggtcaacgacttcctgtctcggcttgtcgtgcgcatctttccaaaatggcgctaccgacttgatggccaggatctgattcgagtgccggcattcacggcgctggctctggaagctctcggccagtcttccccggctccctggattctgaaccgcgggcgggcggcaaagattgcgcttgatagcgagtctcaacgcgacagatacgtgcagcttggctttccagtaagccagcttgcagtggtgggcgatatacacagcgcgattctgtaccgagctgcagcaaaccgagcgcggcttcgcctggaacttatgactaagtacagttttgtaccggatcgtcctctaattgtttgcggattccctcccaatcagtttggcggggaagacgacgggcagtttgagttttcaagctatgatacgctctcagatgcttggattgaaagcttccggtctctggggaatcgggccaacgttttgatccgaccgcacccgcgcgcctcagccgataggttttcgtcgtttgctggtgggaatattcgctgcagcatgcaaccaaccgcagagttgattccgctatgcgatctgtatgtcgcctcgatatctgccacgatacgttgggcgatcgcttgcggcataccagtgattaactatgatacttatcgataccgctatgatgattatgaaggggtaggtggggtcatccacgtggacttgcttgctgattttcgtgtgcagcttgagcggttcgtcgatgatgcatcgttcgcggagtgtgtatctcgaaagcagcgagaagtaatgcgtcgatggggagtacttgatgacggtctgtcacggcgctttgcaatgctggtcaacgaagtaacagagggcgtgcgctctcgctctgtatcggggcaatag

SEQ ID NO: 7015 - DNA, 1851 bp, BradyrhizobiumColbertium
ttgtcgggtaaattgcaggcctacagggatttgctgaatttacttttgcgttatagcaagagccattctggactcttggtatcattcgtattgctcgcggtgtttggctctctaaccgagagctttggcgtattcttgctagttccactgcttcagactatgggcgaaacaaatgtattcgccaatatcccggtcgtcggtcgcttttctgaactgtttgatgtccttccagtcgatcagcgtttattatgggccggcggcctcatgagtgttgtcgtcctgctgagagggggacttcagttcgcccaagagtttgtgggctacgcaattccgcaccggatcgattttcatcttcggcttcgtgcctattcggcgtttgtggataccagcctgcagtttactgacaccttgggggccggggctgtgacgaatgtcatgatcagccagcctgctcgcattggtatcgcccttcgattctttgcgactctcatagcgaacactgccgttgtggcaagttatatcgtgttgttatcaattgtctcgccgctgcttgtcgtcctggcgacagtttacgtaatcgcagcgactttgacattcagagcactcacaaccaacctcgttcgtagcgtcggtcaagaactttcgcgcgctactgagctattcagccagatctttttcgaaacgttgaacggtgcgaagctgattcgcctggccggtgctgtcgatgatgtgcggcgcgacgtggaatctagtgttaaacggttgcagaaggctcgtgatctaactgtcgcggttgagaacatgacggttccgttcttcagtacggttggagggttgcttgtttgcttcatcgtaatggcggtagggatgcttcgaaccgaaactgccgcgcaggcagttggagttctggtcattttctttgtattactttttcgcatacttggccccctgagtattatcagtatttcccggaataacattatcattcatcttgacgccttcagggagtttgacgcatttcttgcggccgcagagaaatctcgtgaacgtgacggaagcattaaacttgagactttcaagaatgctatccaatttgaagatgtgagtttttcctatctggctgaagggcccagcgtgcttcagcggatcaatttggtggttcccagagggcacacggtagcaattgtaggtccttctggcgggggcaagtcgacaatcatcaacctaatcacccgtctctacaggcccaactctgggcgaattttagtcgatgggggtgacctgaatgatctggccataacatcgtggtgggcccgcctaggtgtcgttactcaagacatagtaatactgaacgataccatccgcgcgaatctcaacttcggcctgcgacgacctgttgcagatgatcagcttcgcagggcggctcggctcgctgcgattgatgactggatcgagtcattgcctgacggatacgatacaatacttggggaccgaggctctcggctttcgggcgggcagcgtcagaggttagcgctcgcccgggcgtttgttcgtgatccggacgtgattgtgctcgatgaggccacaagtgctcttgataccctgacagaacgggcaattcagcggcagctggagagtctttctcgccggaagactatgatcgtgattgctcaccgcctctctacagttaggcgtgcagatacaatctttctgctcgaaggaggacgagttgtggaggcaggaaatcacaacgacctcattcggaagcgcgggctctactgggaaatgatcgaatctcaggcgctgaatctcattgacgacgatgaggcatcagctgtgaatgtcgaatga

SEQ ID NO: 7016 - DNA, 1950 bp, BradyrhizobiumColbertium
atgcaaacctcgcataaatacaggccggaagttgatggtctccgagcggtagctgttctgcctgtggtcttgtaccacggtcacgtcccgggattcagcggcggataccttggagtcgatgtcttctttgcgatctccggctttttgatcacacagattctgctcggaagtctcgacgaagggagtttgtcgatgcgcttgttttacgagcgacgggtcagacgtcttctacctgcccttttcctgatgcttcttacgagccttgcggtggggaccgtcattctgccgccgccacttctcgtaaaccttgcagagagtaccatcgccgccgtattctttggagctaatttccactacctgcagaccacgaattacttttccgcccctggcgagctacttccgttgctccacacttggtcgctcgcagtcgaggagcagttttatcttctttttccgatcgctctagcctggatccatcgctatgcccgcaaaatgctacagttgatcctctgcgctgcggcaattttatccattatcagcgcttatcgtgagaaccaagttgatgcagcgcggggcttttatctgcttcagttcagggcctgggagctcttggccggagcggtccttgcaactttgccacgcaagcagagcaacctactcccgccaatcgggctattgatggtccttgccgccatctttttactaggcaatcgagctaactccggcatcgggtccttgctggcggtctccggtacggtgctcattctcggctacggcggcaccgatttcgcatcccggatcctatcactgcctccattggtctatatcgggtcgatttcttacgccctctacctttggcatcagcccgtttttgctttcgcaaggcacgcgctgataaacgcgccaagccccacaacggttacctctctcatccttttcgccggccttttggcggccctaagcactcattattttgagcagcctctgcgcagagcagctaccttccgcagcgttgcaactgtatctagctctgccgtggcgttgttaatgactgcttgcttcctgaccagtcagacggaaggttaccctcaacggtacacagcgcaacaactcgccctccttagtgcgcggccagagcgtggagttgcctctgttgacggcaaatcatgccgtaggccgattgcggaagcttgcgtgattggagccaaggtagtcccaacctttgctgttgtcggtgacagccacgcggatacgctgacagcctcccttagcaaagtgttagcccagcacggtttagctgccttcgtatacacgaaccctggctgcccatttatcgcctcggtgatcgaggtgatcgatctctaccattgcggcgagcttatgaaccaagttcttgccgcactgaagcttcatgacatcaagaacctcattgtcagcgatcgtagcacggcctacatagctggaacacggtttgataacggcgagggtggggtcgagccaggagcgcccttccccgtcgcaccggtaggattttctggcgcagatcaagagcggcaagaagcaacactcgcggcaatgcgatccacgttaattgagttgctcgacaccggaataaatatctaccatgtcatacccatcccagaagtcggctggcacgttccacaaacgttagcgaagctcgccgcgagacgtgcgcctccaattacgaccagcgtacatcggtacttggaccgccatgcaccagtattgaagttagcagccgaactctcgacgaacgcgcggtatcatccagtttatcctcaccgcgtgctctgtgaccacgttagatgccgaacggtgcttgatgggaaggtcctttataccgatacagatcatctaagctccgaaggagccgccttaatcgtgccagagatcgaaaagcttctaaaggagaaccctgtcggcccttga

SEQ ID NO: 7017 - DNA, 1743 bp, BradyrhizobiumColbertium
ttggctaccgcggtcacggtcaccaagaccaataactcagagatcgacggccttctgtcgggctacaaatggtccggcgcgatcacctacagctttccggacgcacccagcgactacgccaatccatatagtggcgggaacagcgagacgacgagatcgggctttgcctcagtacctagccaaattcaggccgcgatcaactacgccatggggttgatcctcggctacaccaacgccgacatccaatatgcgggcacgaatggcgccgatttgatgatcgcgcagtcgtcggcagccaatccgaccgcctacgcctactatcccgggaattatgcgtcaggcggcgacatctggtttggcaaccaatacaatttctcgctggccaagctcggcaactactacttcaccacggcgctgcacgaactcggccatgccttgggcctcaagcacagccaggacgccggtggaccgggcaacgtggcggtgccgagcgcgcatgacagcagcgaatacaccgtcatgagctatcgcagctatgtcggcgcttcgacgacgggcggctatacgaacgaagcgtacggatattcgcagacctacatggccaacgatatcctcgcgctgcagacgatgtacggcgctgactacaccacccagagcggcaacaccgtttacacctggaatgctaccacagggcagcagtttatcaacggcgtcggtcagcttgcacctggcgatggcgtcggcggttcggccaaccgcatctacgagaccatctgggacggcggtggcgtcgatacttacgacctgtcgaactacacgaccaacctgagcatcaacctcaatcccggtgcctcctcgctgttctcctcagtgcagctggcctatctcggcaacggccattatgcatcaggcaacgtctacaacgcctatctctacaacggtgacgcgcgctcctacgtcgacaatgcaatcggtggatccggcaacgacaccatcatcggcaatgccatcgccaacgtgctgagcggtggcggcggcaacgacacgatcaccggcggtgcgggcaacgacaccatcaatggcagctcaggcacagacaccgccctgtattccgggatccgcgccaactatacggtttcctacaatgggacgacacaggccttcaccatcgtcgatcagcgttttgggtcacccgatggggccgacaccgtcacaggcgtagagaattttcacttcgccgacgtccagatctcgagtggcacattggcagctcaagttactcccgatcgggaagttgtggtttatgatgttcaaaatgaccaagcttggacttatcaggtctttggttacgatgctgaagaccgtctaaatcacctcagcgtaaagaaggatgacggaacttccacacttacagactataactccagccagatgcataatttcaaaatggcggtgtcgcagtacgacagcgaagatcatctgacgtctgtgtctatctatcctaataatggagcgaatcactcacttctcgtgaccacatatgatccgcagcatgtacagagctggaaagaagccatatctggctacagcgtagccggccagatcgaatacgttactgttgagaagtatgatgggacatcagcctacacgaaatactcgggaggggatgtcacagtgtacaactacgcagctgatggacatttggtgagcatcgctcatgcaggagcgatcgtgtacgtctaa

SEQ ID NO: 7018 - DNA, 225 bp, BradyrhizobiumColbertium
atggcgaagaaagccaattcggacgccagcggcggcgggagcagcacggcggggcgcgcaccttcgatgccaatggcccgcgatcccgccgctgcggtggcagaggaatacgaagcagcgcgtcggaagggaacgcgggaagccttcgaactcttcatcgcgcgccacggcgattccccccttgccgagcaggcgcgggccgaattgaaacgcctgtcgcgctga

SEQ ID NO: 7019 - DNA, 1194 bp, BradyrhizobiumColbertium
atgcccattccgcatgcctcggaagccctctcgcggttcactgtgctcgatctgacccgcgtccgctccggccctacttgcgtgcgacagctcgcggactggggcgccaaggtgatcaaaatcgacgcgctgaccgaggacgccgccggcgagcagccgggcggaccacgccgtggttccgacttccagaatttgcaccgcaacaagcgggcgatggctctgaacctgaaggacgagcgggggctcgccgtattcaagcgtctcgccgccaaggccgacgtcgtggtcgagaatttccgcccgaacgtgaagaagaagctcggcatcgactacgacagcctcgccgcgatcaacccgcgcatcgtctatggcagcatctccggcttcggccaggacgggccctatcacaagcggcccggcttcgatcagatcgcgcaagggatgggcgggctgatgtccatcaccggcgcaccgggcgaaggcccgatgcgggtcggcattcccgtcgccgacctcaccgccggcctgttctgcgccatgggcattctcacggcgctgctggagcgcgaggtctcgggcaaagggcaatgggtgcagacctcgctgctgcaggcccagatcttcatgctcgacttccaggccgcacgctggctgatggagaaggaggtcgcccagcagaccggcaacaaccatccaaccagcatcccgactggcgtgttcaagacctcagacggctacatcaacatcgccaccacgggcggacggatctgggagcgctgcgcgcaggcgatcggtgcgccggagctctatgctcatcccgactatgcgacggcccctgcccgctccaagaaccgcgacgcgctcaatgccgaaatcgagagacgcacggtgacgaagtcgacggagacctgggtccgcgaactcaacgaggctggcgtgccctgcggaccgatctatgcgatcgaccagatgttcgaggacgcccaggtcaagcatctcggcatcgcacaggacgtgcccaacgaagagggcaggcacatccgcctggtcggccagccggtgaccctgtcgcgcacgccgagcaggatggtggcgccaccgccggagtttggcgagcagaccgaggaggtgctgaaggagttcggcctcagtgcggacgagatcgagaggcttcgggacgccaaggtggtatga

SEQ ID NO: 7020 - DNA, 144 bp, BradyrhizobiumColbertium
atgggtccgattttcaagaggattagcattccgctggggccgttcaccatcgcgctcgtgctcggcggtcgtgccgaggtggcctttcgtctgtcggtgatcggctccggcggcacattcaaggtggttggtcgaaagatctga

SEQ ID NO: 7021 - DNA, 1194 bp, BradyrhizobiumColbertium
atgacgaagccttgcgccggaagcagcacctctttggtattctttctcatcaattccatcgctattcaaatggtggtcggccaggacgctgccattgaacgtttctcgtcgatttattgggccttggtcctttttgctttggcgctgcccttattttgtatccgcgagatctttaggctgcttctcggacgcggtattctactgcttgccttcttgctttgtgcaggtggctaccagctggcccggggcgatctacaggtgctcgctcagctattgctaatggtctgggtcactgcgtggtgcggatgcgagagcactcggatcacagtcagcacactcaccgacatcttccttggcacgctcttaatgggcgtgatcgttgccatgctaactaaccttaatccctggggtctatttccggggcagacctcagcaggctacggaccttggcggacgtcattcttccctcatatcgccaactccgcgacgatgtcgctggtcatgcttatgatcttgacgcgctcgaccaagcaacacgacaaaaaaggcataattgcactgacggtcgcttgctattttggcctgttcggattcgttcggaccgtgctggttgccgctgtcatctatttttccctattcgcgagtttggcgaaggtgcgacccaggccggtgctcttaattttcaccgcgctaggagtcatactggcgagcatagcagtcgaactcgcaatcgcaccgttcctcgagaaagtccaagattcgcctatcgtgtctcgtttgctcttgaggagcgcgagcgacctcgactcgttcgcgattaatcagcaactgtaccgcccgtggctttggaaagaacacatgaagatattcgtttcgagtccttacctaatgggcttgggaaatttccgactcctggatcatgtctcctacaacctcgtaccagggcttgaggcctcgggctcggaaagttttccgactcgcctgttagcaacttacggaatcagtgctctcctatttctaggttacttgaccacctttcttattagagcagcctattcgagagatttctgggcttgtgcatgctttccggtcatcgttttcgtgatgatgaattggggcagtgtctttcacccgacgaacgcattttttgttctgttcattctcatgatgaggggtgataaagctatttgctga

SEQ ID NO: 7022 - DNA, 1674 bp, BradyrhizobiumColbertium
gtgagactctcctttctttcgagagcatctctctttcggtcgtccatcgtctatctcttggcaaccggcctgtctgccggggcgccgcttgtgcttctgccaattctcacgcgcgccctttctcccgatgaatacgggcagatcgccatgttctctgtggcggcgcagatctttggcatcatgacggggctcagcacgcatggcgcagtggcgatgaaatatttcgatcaagatacgatcgatttcccgcgatttgtcggctcctgcctgatcattttgttaatcagcagcagcgccagcctgctcgtcgcatgggccactctcgattggcttaagttgtacctcacactccccggaagttggcttctgattgcagtcgcattttccgcctgcaacttcatcgtccagatacagctttcaatctggcaatctggcaagaaagcgctgagctttgccgctctgagaagctttcagggagcgatggatctgtcagcatcgttcatcttagcgcttattctcgggctaggttggcagggccgtgtttccggaatggtgctcgcgtctatcctggccgcttgttttgcgctttacaccatgaggcgtagtggttggatttgccttcctcacggcgcagtctacatgcgcgatgcattgcgtttcggtctgccgctggtcccccacgctgcgggcggaatgctcatgatgatttccgaccgctttctggttgcaaacgtaattggagttgcctcgaccgggatctatctcgtcgcagctcagttgggcatgattctttatctcgtcaacgatgccctgaaccgagcctactctccgcacctgatcgagaacctgaggctccacgatcaagctcatgactatcagattgtgcggttcacctacgcctacttcattggaattcttgcgttcgcaatcgcgttcggtttgtcggcgccattcattctcagcgcgctcgccggaccgaaattccaggccgccggcgcaatcttcatttatatcgcaatcgggcaagctttcggcggcatgtacctggtcgtggcgacctacatcttctatgccggccgcacgacttacctggcgatcgtgaccgtaagcgccggcctagcaaatatcgctataacgtattgtctactcaagcagagcgggctggtcggcgccgcccaggcatttatgattactcaactgctgttcttcatcggaacgtgggtactcgcacagcgctgccgcccaatgccatggttgaaggctattggtcttgatccagcgatcttcgtaagggctggcctaatcggtctggctatgacgacgtatgcttttgccttcattccgtcgaacaagtggcacccctttttcgaacgtccagacaatttgccatcggacccgatggaactcatcgacgcggcacgcgtcggcgatttgattgtgatggagacgctcctggcacggggcgtcgacattaacgcggcaaactcgcttggagtaacgcctctcattgctgcatcggcatcttcgcaaagatcggccgtcaagcttctgctttctcggggagctcgccgatcagacaggacaagcgagggctacacggcgtacgactttgccaaaaaccagttgaatgatgagctggcacggctcttgacccagaacggcgaacgaaaatga

SEQ ID NO: 7023 - DNA, 159 bp, BradyrhizobiumColbertium
atgaacggccgcatctacaagcgactgtccagggagcagggcacgcaaatatctgcaaatgatgagatacccgagaagctcgccgacaatgtcgagcttacgaccgttcggcggagcttcgatggtcgtttcgcgtcgcccacggcggtttggggctag

SEQ ID NO: 7024 - DNA, 1509 bp, BradyrhizobiumColbertium
atggaagctttcggactcctgctccacggctttgcggtcctgctgacgtggaagacgctcgtcctgatgatggtcgggctggtgctcggcatcttcgtcggcgtgctgccgggtcttggcggcccgaacggcgtcgccatcctgctgccgctcaccttcacgatggatccgacctcggcgatcgtgatgctgtcctgcatctattggggcgcgctgttcggcggcgcgatcacctcgatcctgttcaacattcccggcgaagcctggtcggtcgcgaccaccttcgacggctatccgatggcgcagcagggcagggcggcggaggcactgacggcggcgttcacatcgtccttcatcggctcgctggtcgcggtgctactgatcaccttcctcgcgccgatgatctcgtcctttgcgctgaagttcggtccgcccgagtttttcgccgtgtatctgctgaccttctgctcctttgtcggtctcgggcgagaggccaagcacaagacggtcatctcgatgtcgctgggcctgctgctcgccggcatcggcatggataccgtgtctggcaatctccgcatgaccttcggctcgccggagctgcttcgcggcatcaacttcctggtcgccgtcatcggcctgttcggcatcagcgagatcctgctgacgatggaggaacggctggcgctgcgcggacacgctgctggcatttcgctgcgcgtcgtgctcggcgtctggagggacctgccgaaatactgggtgacgctgctgcgttcctccttcatcggctgctggctcggcatcacccccggcggcgcgattgcggcttcgttcatgggctacaacctggccaagcgcttcgccaaggagcccgaaagcttcggcaagggccgcatcgagggcgttttcgcgccggagacggctgcacatgcctccggcacgtcggcgttgctgccgatgctggcgctcggcattccgggctcgggcacggcggcgatcctgctcggcgggctgatggtatggggactcaatcccgggccgctgcttttcgtcgagcacaaggacttcgtctggggcctgatcgcctcgatgtatctcggcaatgtcgtcggcctggtgctggtactgacgaccgtcccgatcttcgcttcgatcttgcgcgtgccgtttgcggcggtggcgccaatgatcgtggtgtcctgcgcgatcggcgcctatgcgatccagaacgcgatgttcgacatctggctgatgctcggatttggcgtgatcggctacgtcttcaagaagatcggcattccgctggcgccgttcaccctcgcgctcgtgctcggcaaccgcgccgaggatgccttccggctgtccatgatcggctcaggcgggagtttgaaggtgttctggtcgaacggcctggtcggctcgattacgacgctggcgattctgctactgttttggccggtgattgacggcctagtcgggcgcgtcggctgggcgcagcggacgacgtcctga

SEQ ID NO: 7025 - DNA, 567 bp, BradyrhizobiumColbertium
ttggccacagcattcgctcaactcatgtcccaaaccgatatcgaaatcgtcgtcgacgatccgacagcgcctgaagacgattccccgtccgtcgtctcctccggcacggtcgagatcgtcgtctgccttctgctgctcgcgctggcggccacgctcggttacgacaattggcgcaccggcgcgtcctgggacgcgactgggccggagcctggttacttcccgttctatctctcgatcatactcggctctggcagcctctatggcctgatcgcgacgctcgtctcgcatcgcgcgacgcgcgagaccttcgtcacgcgcgcgcaggcaggccgcgtgatggcggtgttcgtgccgacgctgctgttctgcctggtgacgcagttcctcggcctgtatgtcgcgagctttctcctgatcgcgggctttatgcggctcgtcggcaagatcacgctgtggaagtcgctgctcaccgctcttgtgttcacggcgatcatgttcgtcaccttcgacattgccttcgacgtcatcatgccgaaagggccgctcgaagcggccctcggccgctag

SEQ ID NO: 7026 - DNA, 267 bp, BradyrhizobiumColbertium
atgtttcagggtactttcgatctggagacggcaacgccgatcgatgcgagcgcgctgtcggacgtgctgttcgagcgcggaatctactgggcgagcggccgctccgggatcgtcgatctcgtcgccgcgcacaaatggttcaaccttgccgcgttgaagggccgcaaggacgccgtagcgctgcgccaggaagtcgccgggcagatgtcggaagccgagatctcggccgcacagcgcgaggcgagggcctgggtctccgcgcactga

SEQ ID NO: 7027 - DNA, 231 bp, BradyrhizobiumColbertium
atggacacgaatgaacgatggctgccgattcagatcgctcccgatgagtgcgatctggagctcggacgtctcgacaagaccggaatcttgccctggtcctttccctgccggcggacggacggcgtgtggttcaatgtctgggccggcgaggccgtgctgatatcgccttcgcattggcggatctggcgatctggtatctgggtgcgggcaggcacgcgcgactcgcggtga

SEQ ID NO: 7028 - DNA, 90 bp, BradyrhizobiumColbertium
ggagaggtggccgagtggctgaaggcaacgctttgctaaagcgtcatacggtctcaagctgtatcgagggttcgaatccctccctctccg

SEQ ID NO: 7029 - DNA, 120 bp, BradyrhizobiumColbertium
ttgcgagctgccggcgcgatcccgatcttcgccatctctataaagagtcattgccggcgcgccaaaggcattgcggcgactgcgcttaccggggcgaaggcgctgatgtctgtccattga

SEQ ID NO: 7030 - DNA, 150 bp, BradyrhizobiumColbertium
gtgacgcaagccgagttgctcgaccatctctacggcctgaatgaggaacgcagctcgaatacgatcgaggtctatgtcggtcggctgcgacgcaaaatcggccgcgataccatcaggaccctgcgcggtctgggctacaggttcggctga

SEQ ID NO: 7031 - DNA, 1347 bp, BradyrhizobiumColbertium
atggtcagaagtctgcgcgcccggctgctggttggcgttattctcacgaccgtgacaggtatcgctgtcgctggcgtttcgatttccgcgctgttccgggcgcacgtcacggagcttgtcaatgccgagctgatcggtcatctcgacgagctcgaaggtctgttggcccgcacggccgacggacatgtcgctctggcacaaaggctcagtgatccgcgcttcgcgcagcccgggactggctattactggcaggtgagcgatcgcaacggcatcgtcctacaatcagcctccctcgaaccgcaacggcgttttccgccacccgcgcggggggcggatcggcagcttactcgctcagtcgaagctggcccggctggtgagccgatgatcgcatatgagcgaccgtggcagaccgctgaaaacggttacgtgcttcaaattggcgccgaccagcggatcgtcgatgatgtactgagacattttaatcaggcgctggccctgtcactcggcacactggcaatagccctaattggggccggcacgttgcaggcctggtttggtctgcgtcccatgcgccgtctgcgcgacgcgctgggcgacattcgcgcgggcaaagcagaaaccctgcctggtgacttcccgtccgaagttcggccgctggtcgatgatctcaacgctctgatcgacgccaatacccagatggttcgccgcgcccgcacgcaggcgggcaatctcgcgcatggcctgaagacaccattggccgtgctgacggacgaagcgcgccggctgctcgcgagaggtgataccgagggcgccgcggtcctgactcagcaaacagggcggatgcagcgccagattgatttccagcttgcccgagcccgtgccgcagccaacgccggcctgcctggcgtcatcacgcaggtcgaacctgccttcgcatcaatagccgcggcgatgcggcggctctatgctcatcgtgagctgacgatcgtccatacagccgagacggaattgcttgccgccgtcgatcccaacgaccttgacgagatggtcgccaacctggtcgataatgcctgcaagtgggctcgtggtgttgtctcgatcaaggctacgcgcgataccccgacggggcagctccttattacgatcgttgatgacgggccaggcatcccggctgatgcactaaaccgcgcgttcgccccaggcgagcggctcgacgaggccaaaccgggaagcgggctcggactcgcaatcgtccgcgatctcgccacactgcacggcggctctgtcgaactatccaatggcagaaatggaggccttcacgcggagttgcggctcccatcagcctga

SEQ ID NO: 7032 - DNA, 447 bp, BradyrhizobiumColbertium
atgatcacccagttggcggcggcttataacaatcgcggtgtcgcgctgcggtcgagtggagatatcgaccgtgccatggaggattacgatcgagcacttcgtttgtcccccgactactatgtcgcgctcaacaaccgaggcgttgctttaatgagcaagggagagcttgatcgcgcgatttctgatttcgatcgcgccgtacaactgaggactgactacctcggtgcctattataatcgcgggaaggcactcgggcgtaaaggactctttgatcgtgccatcgcggattatgatctggtcatcaaggctgatccgaagaatccgaccttcttgttcgaacgcggaacgatgaaagcgaacgctggagatcagagcggcgcggatgctgatttcgagcgcgccgaatcgctcaggtcgaatggtgcgcggacgacgcggccacgatga

SEQ ID NO: 7033 - DNA, 74 bp, BradyrhizobiumColbertium
gcgcccgtagctcagctggatagagcgccaccctccgaaggtggaggccacacgttcgaatcgtgtcgggcgcg

SEQ ID NO: 7034 - DNA, 1044 bp, BradyrhizobiumColbertium
atgacaagatcacgcaaagcggtcgacgtcgcggattcctacgcggtgcggctgatgcagcacctggtggtgccgactttcgtgatcgacccgcaacgtcgcgtcgtgatctggaacagggcctgcgagcggctgaccggcgtcgccgcggccgaagtgatcggcaccagcaagcactggcaggccttctatgagacgaagcgcccctgcctcgcagacctcgtcgcgctcgaccggcccgagcagctcccggaatactattcggaatacgctgcgcgcggccataacgggctcggcttttccgcggagaattggtgcgtgatgccgaagctcggcagccagctctacctcgccatcgacgccggcccgatccacgacgaggccggcaacctgatcgcggtggtggagacgctgcgcgacctcaccgaccagaagcgcgccgagatggcactgaaggagctcgccaccaaggacggattgaccggcctgtcgaaccgccgcgccttcgaccagatgctgacgagcgaatgggcccgcgcccagcgcacgcagaagccgctggcgctgctgttcgtcgatgtcgaccatttcaagctgttcaacgaccaccacggccaccagagcggcgacgaatgcctgcgcgcgatcgccgcggccgtgagccggcacgccatgcgcccgctcgacttcgccagccgatacggcggcgaggagttcgccctgatcctgccggacatggattgcgacgccgcctgcagcgtcgccgaagcgatccgctgcgccgtcatggccttgcagatcgcccacggcgccctgggcgccggcgaccatgtcaccctcagtgtcggtgtcgccagccacattcccgttagcgccgacggcagtgccgaccggctgctgggcgccgccgacgaggcgctttatgtcgccaagcggctcggccgcaaccgcgtcatctgcgccgaacaggtcctggccgagttcgccgccatcggccgggaggccgcagcggttccggcgcccttccggcgcaagatggcttga

SEQ ID NO: 7035 - DNA, 3108 bp, BradyrhizobiumColbertium
atgcgccaggtcttttccatggtgaccgccggaatgtctctagccgcgaggaacggctgggaggccttgacgcggcgtggtcctgtcctgtggctgaccctgtgcggcgtattgctggtcgcgggcatcttcaccgtcacggccatggccgtcggcgaattccgagaacgcaccctcgccaaccgcgaacgcgagctggaaaacacggtgcagctgatcgcgcggcacttcgatcagcagttcgaggattccgacgtcgtcgccgccgatctgatcgcgcagatgaaccttgaggagatcacctcgcccgcaatgttccgcgagcgcatgtcaggtcccgccaccagccagatgctgcgcagcaagatcagctccgtatcctatctcggtgacatcgccatctatgacgccgatggcgagctgattagctggtcgcgggctcaaccgctgccgaagatcaacgtttcctcccgcggctactttcaggccttcaagaccaatccgcaatccgaaccggtcattctggagtccgtccgcagcttcatcataggcaaatggaccaccgtcgtcgcacgacggttgaacagcgccgacgggtcgttcctgggcgcaatggtgcgccggatcgatccggacagctaccacaagtatttcgcgtccgtcgcgcttgccgagggcacggcaatctcgctgttcgaccgcgaaggcaaaatgctggcgcgctatccgcacgtcgaagagctgatcgggcgcaacttcaaggatgggccgctgatgcagaaggtgttggccgagggcggccagcacacgctgcgcggcaacagtccggtcaatggtgagcaacggctcggctcggcggcgtcgctgaagcacttccctctcgtcatcatcgccaccaccaccaccgacgcagcgctcgtcgactggcggcagcagaccggcttcctggtcgcgaccgccggattttcggcggcggtgatcgcactgatcctctatttcatcatccgccagatcagccgtcagaatcgtgaggcccgggaacggatcgaagcaaagcggatgcagctcgacacggcgctcaacaacatgtcgcaagggctgatcctgtacgacgccgccggctacatcgtcatctgtaaccgccggtacgccgagatgttcggcctgtcccacgacgtcatcaagcctggctgccacatccgcgaggcgatgcgccatcgcaaggagcgtggcgcgttcgacggcgacgtcgaggcattctgcgccgaggtcatgaggatcgtcgcggagggcagggtctccacgagagttcatcagctcgccaatggccgcgccttccaggtcatcaacaccccgctcgcacagggcgggtgggtggccacgatcgaagacatcaccgaccgccgcaagctggagcaggagcgggatcgcaaccacaccttcctgcgcgagatcatcgaccatatcccttcgcagatcaccgtgaaggacgcacgcacgcgccaatatctgctgctcaactgcgtcgccgagcagctcttcggccggtctcgccaggaagtcgtaggcaggactgcctttgacgtcttccccgaggcgccggccgcccgcatcaccgaagacgacagccgcgcgctaaattcggccaagggattgttcaaggacgagcacgcctggcagatgcctggtacgggtctgcgctacatcacctcgaccaggatcggtattcccgacgaaacgggagagccgcgctacctcatccatgtcatcgacgacgtcaccgagcgtcgacgcgccgacgaaaagatcgcgcatatggcgcattacgatgcgctgaccgacctgccgaaccgcacgctgttccgggagcagatcgaacgcgagctggcaaaggtcgccgacggggatcagttcgcgctgctctacatcgatgtcgacgagttcaagggcatcaacgattcgctcggccaccacgtcggcgacgagctgttgaaggccatcgcaggccgcatccgaagctgtctcaagcagggcgacctgatcgcgcggctcggcggcgacgagttcgcggtcatccagaccgcggtccagtcaccggccgaggtggtctcgttcgtgaaacggatctatggggcaatccgacagccctatcattgttccggccatcagctctccaccgacgccagcatcggcatcgcgctcgcgccgcaggacggcgacgatctcgaccagctcgtcaagaacgccgatcttgcgatgtacggcgccaaggccgaggggcgacgcacgcaccgcttcttcgagcccgagatggatgcgagcgccaaggcgcgattgagcatggagcaggacctgcggcaggcgctggtggacggcggcttcgagattcactaccagccgctggtcgacctgcgctcgggcgaagtctcgggctgcgaggcgctgctgcgctggcgtcatcccgagcgcggcatggtttcgccggcggagttcatcccggtcgccgaagacaccggcctgatcaccgagctcggcgactgggtgctgcgcatggcctgcaacgaggccgcgacctggccgacgcatgtgcgcgtcgcggtcaacgtctcgccggtgcagctcaaatgcgacacgctggcgctgcggatcgcgggcgcactggccgcttccgggctcgacccgcgccggctggagctcgagatcaccgaggccgtgctgatccgcgacgacgaggcggcgctctcgatcctgcatcagctccgttcgatcggcgtgcgcatcgcgctggacgatttcggcaccggctattcctcgctcagctacctcaagcgcttcccgttcgacaagatcaagatcgaccgctgcttcgtcgccgatatcgcggaggcgagcggctcgcccgtcatcgtgcaggccgtggtgaacatcgccgcggccagccgcatgaccaccgtcgccgaaggcgtcgagaccgaagcgcagcgcgagatgctgcgcacgctcggctgcaccgagatgcagggttatctgttcagcgcgccgaagccggccagcgaggtgcgaaagctgttcggcggcgataccgggccggtggcggcggtggcttga

SEQ ID NO: 7036 - DNA, 1086 bp, BradyrhizobiumColbertium
atgatgatcctctcaggcgatccgccgcgcagccgcgttctgacgctcgttctcattctcatcatcctggcgctggcagcgacgccgttcctgtttccgggggccaaggccctgaacgtcgcggccaagatctgcgtcttcgccgcgctggtcgcctcgtacgacctcctgctcggctataccggctcggtgtcgttcgcccacaccatgttctacggcatcggcagctacgccatcgcgatcgcgctgtacggaatggggccgaactgggcggcggtcgccaccggcatcgtcaccggcctgccgctggccgccctgctcgcgctcgcgatcgggctgttctcgctgcgggtggccgcgatcttctttgccatgatcacgctcgcggtcgcctcggctttccaggtgctggcctcgcagctgtcctggctgactggcggcgaggacgggcgcagcttccagctgcccgagctgcttcgccccggcacgatactgatctccaagaacctgttcggcttcgagatcaacggccgcatcctgacctactatctggtcttcgccgtctcggcgctgatgatcctcgcgctgctgcgtgtcgtgaactcgccattcgggcgcgtgctccaggccatccgcgaaaatcgtttccgcgccgaggcgctcggcttccgcaccgtgttccacctcacctacgccaattgcatcgcggccctcgtcgccgccagcgccggcatcctgaacgcgctgtggctgcgctatgccggccccgatacgtcgctgagcttctcgatcatgctggacatcctgctgatggtcgtgatcggcggcatgggcacgatctacggcgcgatcatcggcgccaccatcttcatcctggcccagaactatcttcaggcgctgatgggtgccgcctccacggcagcgggcgaagcgggcctgccgctgctgccggggctgctgcatccagaccgctggctgctgtggctcgggctgctgttcatcgccagcgtctatttcttcccgaccggcgtggtggggcggctgcgcaatcccgccggagacaagagcggcggcagatcgcattaa

SEQ ID NO: 7037 - DNA, 1011 bp, BradyrhizobiumColbertium
gtgactgaacttgccgcaaccgatccgctgccgaaaccgaagcgcgatctcgcgccgatcctgctgccggtggcgctcgcgcttctcatgatcccgctgatcggatcgccgagctcctggctgaccttgaccgccgccagccttgccatgggcatgatgatcttcatcatggcctcgggcctgacgctggtgttcggcctgatggacgtgctcaatttcggccatggcgccttcatcgccgtcggcgcctatatcgcaaccctggtgctggccccgttcgcggcttccgtgcaggccgactcgctctggatgaacctcgcggtgctggggccggccgcgctgctctcgatggcggtttcgggcgcgctcggcctggtcgtcgagcgcgtgttgatcctcccggtctacggccagcatctgaagcagatcctgatgacgacgggcggcctgatcgtcgccgagcagacgctgtatgcgctgtgggggccgcagatcatcccgatgccgctgccgacgtcgctgcgcggctccttcatcataggggacgtcgccatcgccaaataccgggtgctggcgatgctgatcgggctcgccgtcttcatcgccatccagctcgtgctcaaccgcaccaagctcggcctcctgatccgcgccggcgtcgagaaccgcgagatggtcgaggcgctgggctatcgcatccgccggctgttcctcggcgtgttcatgacgggatcggcgctggccggcctcggcggcgtgatgtgggcgctctaccgcgagcaggtgcacgcctcgatgagcgacgagctcaccgtgctcatcttcatcgtcgtcatcatcggggggctgggctcgatcggcggctgcttcatcggcgcgatcctggtggcgatggtggccaattacggcggcttcctggtgccgaaactcgccctcgtctccaacatcctgctgatggtcgccattctgatgtggcggccgcgcggcctctatgcggtgaccagccgatga

SEQ ID NO: 7038 - DNA, 723 bp, BradyrhizobiumColbertium
atgagcgatctgttgaaactctccggggtgcacacccatatcggtcgctaccacatccttcagggcatcgatcttgcagtgccacaaggtcaggtcacgatgctgctcggccgcaacggcgccggcaagaccacgacgctgcgcaccgtcatgggtctctggcaggcatcaagcggcgaaatcagccttgccggcaagcgcatcgagagccttgccaccccggacatcgcgaagctcggcgtcggctatgtgccggagagcatggcggtgttctccgacctcacggtcagggagaacctgttgctggcggcacgcgacgggccgctcgacgatgcccagctcgactggatcttcggcttcttcccggcactgcgccggttctggctgtcgcgcgccggaagcctctccggcgggcagaagcagatgctgtccatcgcccgcgcgatcgtcgagccgcgcaagctcctgctgatcgacgagccgaccaaggggctggcgccggcgatcgtcatggcgctgatcgagtgcctgaaggagatcaagcgcaagggcgccaccatcctgctggtcgagcagaatttcttcgccgcccgcgagcttggcgacaatgtgctggtcatggacaacggcaccatcgtccatcgcggcgagatggcggcgctcgccgccgacgtgccgctgcaggagcggctgctcggcctgagcctggagacgcatcagtga

SEQ ID NO: 7039 - DNA, 777 bp, BradyrhizobiumColbertium
atgccgctcaccctcgaaacccgcgacctcaccatccgcttcggcggtcatgtcgcggtcaacaatgtctcctgcacgtttcgaccgggcgagctcacggccatcgtggggccgaacggcgccggcaagaccacctatttcaatctgatctcgggccaattgcgcgcctcgaacggcagcatcctgttcgacggcgccgacatcacccagcactccgcgccgatgcgcacgcgcgcgggcctcggccgcgccttccagctcaccaacctgtttccgaacctgtcggtggaagagaacgtgcgcctcgcggtgcaggccgctagcggtactcactacgacatgctgcgaccctggatggtgcgtcgcgacctgatcgcacgggccgacgccattctcgaccaggtcgcgctcggcagccgccgcggcggcgccgcaaccgcactgtcgcatggcgaccagcgcaagctcgaggtggcactgatgatcgcgctggagccgaaagtgttcatgttcgacgagccgaccgccggcatgagcatcgacgaggtgcccgtcgttctcaacctgatcgcgcagctcaagcaggacaagagcaagatcattctcctcgtcgagcacaagatggacgtggtgcgctccctcgccgaccgcatcatcgtgctgcataacggccagctcgtcgcggacggcaagcctgccgaggtgatcgcctcgccgatcgtgcaggaagcctatctcggcgtcgcacccaagaatgccaccgagggtgcagcatga

SEQ ID NO: 7040 - DNA, 1185 bp, BradyrhizobiumColbertium
gtgcgtcgatcactcatcttaacaacaaccattctcgcgctcgccgcgggctcctccgcacgggccgaggatctcaagatcgggctgatctatggcaagaccggcccgctcgaggcctatgccaaacagaccgagaccggcctgaagatgggtttcgaatacgccaccaaaggcagcatgacgctcgacggccgcaagatcgtcatcatcaccaaggacgaccagagcaagccggaccttgcgaaggccgcactcgccgaagcctatcaggatgacaaggtcgatatcgcgatcggcacgacctcgtcggccgccgcgctcgccattctccccgtcgccgaggagaacaagaagatcctgatcgtcgagcccgcggtcgcggaccagattaccggcgagaagtggaatcgctacatcttccgcaccgggcgcaactcctcgcaggacgcgatctccaacgcggtggcgatcggcaagcagggcgtcaccgtcgcgacgctggcgcaggattatgccttcggccgcgacggcgtcgcagccttcaaggaggcgctcgccaagaccggcgcaacgctcgcagccgaagaatatgccccgacctcgaccaccgacttcaccgctgtcggccagcgcctgttcgacgcgctgaaggacaagcccggccgcaaggtgatctgggtgatatgggccggcgccggcaatccgctggccaagcttcaggacatggacccgaagcgctacggcatcgagctctcaacgggcggcaacatcctgccggcgctcgcggcctataagagcctgcccggcatggaaggggcgacctactactactatgaaatcccgaagaacccggtgaacgactggctggtcgccgagcaccagaagcgcttcaacgcaccgccggacttcttcaccgcaggcggtttcgccgccgcgatgtccgtcgtcgccgccgtcaccaaggcgaagtcgaccgacaccgagaagctgatcaccgcgatggaaggcctggagttcgacacgcccaagggcaagatggtgttccgcaaggaagaccatcaggcgctgcagagcatgtatcacttcaaggtcaaggtcgatccgaacgtcgcctgggcggtgctcgagcccgtgcgcgagctgaagatcgaggacatggacgttccggtcaagaacaagcggtaa

SEQ ID NO: 7041 - DNA, 2025 bp, BradyrhizobiumColbertium
gtgagccatcacccagctctgccctatctgcgcaattccgagaagggcaaggtcgtctcggcggccgaggccgtcatgctgatccgcgacggtgacaccgtcgcgaccggcggcttcgtcggcatcggctttgccgaggagatcgcgatcgcgctggaggagctctatctgtcccatgagggcgatgcgccctacacgcagggcaagccgcgcaatctgacgctggtctatgcagccggacagggcgacggcgggcagcgcggcctcaatcatttcgcgcatgaaggactggtccggcgcgtgatcggcgggcactggggccttgcgcccagactgcagcagctcgcgatcgcgaaccagatcgaggcctacaacctgccgcagggcgtgatcacgcatctgtttcgcgacatcgccgcgcgccggcccggccacatcacccgcgtcggcatgggcaccttcgtggatccccggcacggcggcggcaagctgaacgcacgcaccaccgaggacatggtggagctgatcaagatcggcggcgaagactgcttgctctacaagacgtttccgatccaggtcgggatcatccgcgccaccacgggcgatcccgacggcaatctcaccatggagaaggaggcgctgacgctggaggcgctggccattgccatggcggcgcataattccggcggcatcgtcatcgcccaggtcgaacgcgtggcggaggccggcagcctcaatccgcgccaggtgaagattcccggcatcctcgtcgactgcgtcgtggtgtcgaggccggagaaccactggcagactttcggcacgcagtacaatccggctttttcgagcgagatccgcgtccgcgcggcctcgctgccggtgatgccgatcagcgagcgcaagatcatcgcccggcgcgccgcgctggagctgaaggccaacagcgtcgtcaatctcggcatcggcatgcccgaagggatcgcctccgtcgccaatgaagagcggatcatcgatctcatcacgctgacggcggagccgggcgtgatcggcggcatcccggcgagcggcatcgatttcggcgcggcgatcaacacgcaggcggtgatcgaccagccctatcagttcgacttctacgacggcggcggtctcgatgccgcgttcctcgggcttgcccaggtcgatcgcgccggcaacctcaatgtcagcaagttcgggccgaagcttgcgggcgccggcggcttcatcaacatcagccagaacgccaaggaggtcgtcttcgtcggaacgttcggcgcgggcaagcagcgcatcaaagtgaatgacggcaagctcgtcatcctcgacgaagccaagtcgcgcaagttcgtcgatcgcgtcgagcacgtcaccttcagcggtccgtttgccgccgcgcgcaagcagcgcgcgctgtacgtcaccgagcgttgcgtgttcgagctcagggcggacgggctcgagctcaccgaagttgcgccgggtatcgacatcgagcgtgacattctgcggctgatggatttcaagccgctgatcccgcgcgacccggctatgatggacgagcgcatcttccgcgaaggcctgatggacctgcgcgagcgcctgctcaccatcccgctcgaccagcgcttcacgctggacgagcagcagaacctgttcttcgtcaatctggaacgctatccgctgcgcagcaaggccgagatcgacaccatcgccgccatcgtcgaggcccgcctggcgccgctcggacgccgggtctacgccatcgtcaattatgacaatttttccatcctgccggaactgatggacgattattcggcgatggtgcgcagcctcgtcgatcgcttctattccggcgtgtcgcgctacacgacgtcgggcttcctgcgcatcaagctcggcgaagctctggagaaacgcggcgtcgcgccgcacatcttcgagagcgcggaagaagcgcagtcggactggcgccaagtcgaggctggcgcagcgaggcaggcccaaagatga

SEQ ID NO: 7042 - DNA, 1443 bp, BradyrhizobiumColbertium
atgtccgctccctcctcctcgatcagcgatcccgcctatctccgtgcacgcgcgatggagacgctgttcgagcggctggagaagctctgcgagggcgcgattgcgatcgatcgcagcggacgcgtcgtctacgtcaacgaaaaataccttgctgcgctcggtctcaagcagaccagcgaggcgatcggacgatcgatcgaggaggtcatcccgaacagcttgatgcggaaggtggccgagaccggcgagccgatcctgctcgacatcatggagctcggcggcgagcagctcgtcgtcacgcgcatgccgatcgaggacgagaacgggacggtgatcggcgcgatcggcttcgtgctctatgatcacctcgaaagcctgaagccgctgctcgcccgcgtcacccagctcgagagcgatctgcggctggcgcggcggcaattgtcgagcgcccgcgccgcgcgtttcaccttcgccgatttcgtcggctcaacgccgggaatagcgcgagccaaggagctcgcgagccgtgcggcgcgacagagcgtcaccgtcctgctcaccggcgagaccggaacgggaaaggagatgctggctcaagccattcacaacgcctcctcacgtgcagacaagccgttcgtcagcgtcaacgtcgccgccatccctgacacgctgatcgagtcggagttcttcggcaccgcgccgggcgcctataccggcgccgaccgcagggggcgcgagggcaaattccgcatcgccgacggcgggacgctgttcctcgacgagatcggcgagatgccgctgcaattgcaggccaagttgctgcgcgtcctccaggagcgcgagatcgagccgctcggctcggacaagatcaccaaggtcgacgtccgggtcatcgccgcgaccaatgtcgacctgcgcaagcgcgtcagcgacggcgcatttcgcgccgatctctactaccgtctcaacgtgctctcgatcgatctgccgccgctgcggcactgcctcggcgatctccccgacatctgcgcccggctgctcgacgacatcagcgcgtcgggcgactacgtcaaggcgaagatcacaccgagcgcgcttgcagcgctcgcccgctacgactggccgggcaacgtccgcgagctccgtaacattctcgagcgcgcgctgatcctcagcgactccgggcgactgaccggcgaggatgtcgcccgcatccttcctgtcggtgccgaggtcaggccggcggcgcccgcacgctccgcggcggccgtcgtgccctatgccgaagccgaggctgagttcgagaagcacacgctcgagcaggcgctcgctgccagcaacggacagatcaccgaggccgccaggatgctgcggatctcgcgcgcgaccttttacaagaagctcgccaagttcggcctcgcctccgggtcggctcccgtctga

SEQ ID NO: 7043 - DNA, 1746 bp, BradyrhizobiumColbertium
atgacttctatgaacgacaatagctattccggcgcgaccgaagccgaactcggttttctcaaggaaatcgttagaatgctgccggccggcctcaccgtgcaggacgcgcagggtgagcttctgctggtcaacgatgccgccgccgcccagctcggcatcgacggcagccgtcccttggccgacctcgcaccgcgacgcgaagcctgccggcaggcactgagcgccggccaggcggtcgtgacggaggaagcgcttcacgccggcgccgcgcggcaggtgctgctcacgacccatcgtcccgttcgcctcgccgggcgcgagctcctgatctcggcatcctccgacatcaccgagcagaagaatttcgaagaccagctgttccgctcggcatatttcgacgagttgacgggattgccctcgcggcgcgtgatcgagcatcgcgccaacaatctgctggcgagggatcgcggcggggagcgattcgcgctggcctttctcgacgtcgacaatttcaagcacatcaacgactattacggtcacgccgtcggagacgcgctgctggtcgaactgtcgaagcggctcgggcgcgacctgcgcgattccgacatgctgtcgcgcatctccggcgacgaattcctgctgctgctctccccgatccagagccaggaggaagtcgccgaattcatgcaatcgacactggagcggctgaccgcgccgttcttcatcgacaattcggagatcttcgcctcgacctccgtcggcatcagcctctatccggaccacggacgcagcttcgagacgttgcggcagaacgccgacatcgcgatgtaccgcatcaagaacaacggcaaggggctggcggccttcttcgacgccagcatggagcgcgaggcgcaggcgcggatgaaggtcgagcagtcgctgcggctcgccatcctggaaaaacgcttctgctgcgccttccagtccaaggtcgacatccgcacgcaggccgtaaaaggcatcgaggccttggtgcgcctgcgcgacgacgaaggcgtgatccaggcgcccggctcgttcatcaatcttgccggagagctcgggctgatcgacgagctgacccatctcgtgctcgccgagatcgtcaaatcgatcgacctgatcaacgacacattcggcgcggaagcgaccatcagcatcaacgtcgccgccaagcaggccggcaatcccgagttcatgcgcagctttgcgcaggcgctggacgagaccggctttccccagcgtttcatgatcgaggtgacggaagacgccttcgtcgccaagaatcatttccagaccgagatcctgccgatgttccgcaagctcggcgtcggcatctccatcgacgatttcggcaccggctattcctcgctctccgcgctcgccgacatcaccgccgacgagatcaagatcgaccgctccttcatcaccgacatccataagcgcccgcgcagccagggcatcctgcgcgcgatcgagtccttgagcgaagcgctcggcatgacggtgatcgccgaaggcctcgaatcccacgaggagctcgcctatctccaggcggcaacgaagatccgctacgcgcagggctattacttctcccggccgatcttcctggaggagctgaagctcgcaacgccggcctccagcgaggcgcggatcagcgtggcgagccggccggtgcaacacaatcgccagggctattcccgggcgagcgggtatcgaaggtag

SEQ ID NO: 7044 - DNA, 966 bp, BradyrhizobiumColbertium
atggggaagctgatcgaagagtttcgcaaaggctggcagggcgccgcaccgccctcgctcggtttgagcatctcctttgcggtgatctgcctgttgggcgcgaccctggtgcgctggggtctcgctcatgtacgccccgacatctactttacgccgtacttcccggccgtcttctttgccgctgcgctaggcggattccgtatcggcgtggtgacggcgctggtcggcggcgtgctcggagtcgtcctgaatttcggtgatgcctttgccgatcgtgcgcggttcgctctgctcgcgctttactgggccgtctgcgcgatgaccatctggggagtcgagcactatcgcaccatgctggctgagcagcgccggatctccaaacgcctgatcgaggaggaagagtatcgcaagctgctggtcgacgagcttcagcaccgcttgaagaacaagctgtcgacggtgcatgccgtgctgcatcaggtcctgcacgaccagccgcaggtctgggcgcggatcgatccccggctgcgctcgctggccgcaaccgacgatttgatctcgcggatcgacaaggccggctgcgacatccgcgacctcctgatctccgagctcggcccttacggccatgtccgcttcacgctcaacggcgatcgattgttcctgccgccgaagctcgcggtcacgctgtcattgatgtttcacgaactcgccaccaatgcgggcaagtacggcgcattctcctctccgcgcggtctgctgcaggtgtcctggaccgtcagcgaggaccgcctgaccatcacctgggacgaaacagaggggccgagcgtggacaaggtgtccgagcccggcttcggcaccaagctgctgaagtcggcgctttccgccttcgaaggcagaacagagatctcctacctgaagaccgggctccattgcatcatgcaatgccggatcccgcgaagcggctaa

SEQ ID NO: 7045 - DNA, 840 bp, BradyrhizobiumColbertium
atgggcaggctggacggcaaggttgcggtgatcacgggcgcgaccagcgggatcggattgcgcactgcggaagtcttcgttgccgaaggtgccaaaattgtgatcgctgggcggcgtctaccggaaggcgaggcgctggcgaagcagctcggagccaactgcatcttccgtcagaccgatgtcacggtcgaagcgcagatgcaggcgctgatcgcgatcgcagtggataaattcggcaggatcgattgcctgttcaacaatgccggcgggccggcgcagaccggcggcatcgaaggcctcgaggccgagcggttcgatgcggcaatggcgacgctggtgcgcagcgtcatgctcgggatgaagcacgccgcgccctacatgaagaagcagggggcgggcagcatcatcaacaatggcagcatcgccggccgcctcgccggcttctcgtcctcaatggtctacagcgcggcgaaggcagcggtgatccatctcaccaaatgcgtggccatggagcttggcgagtccaacgtgcgcgtcaactcgatctcgcccggcgcgattgcgacaggcatcttcggcaaggcgctggggctctcgaccgatgcagcggagaagacgccggcggtgatgcgcgaggtctacaagaccgcgcagccgatcccgcgtgccggccttcccgacgacatcgcccatgccgcggtgttcctggccagcgacgagtccagcttcgtcaacggccacgacctcgtcgtcgacggcgccatgaccggcggccgcaactggagccagcagcagcagggttacgtggcgctgcgcaaggcgttcgatcagggcgcgtag

SEQ ID NO: 7046 - DNA, 1377 bp, BradyrhizobiumColbertium
atgtcgatgcagaatgtggccgcccctgcgtttccgttcaccccgccgcgacgcaatgagctgacccacatccccggggacgaaggctggccgatcatcggcaagacctttcaggtgctcgccgatcccaagggccatgtcgaagcgaacggcgccaaatacggcctggtctaccgcactcactttttcggcgagaccaatgtcgtgctgctcgggcccgaggccaacgagctcgtgctgttcgaccagcagaagctgttctcctcgacgcacggttggaacaaggttctcggcctgctgtttccgcgcggattgatgctgctcgacttcgacgagcaccggctgcatcgcaaggcgctgtcggtcgcgttcaagtcggggccgatgaaatcctatctcggcgatctcgatcgcggcatttccgcgcgcgtcgcgaagtggaaggcacgacccggcgagatgcagctctatccggcgatgaagcagctcacgctcgatctcgccgcggcttcgttcctcggcactgatatcgggccggaggtcgacgagatcaaccgcgcctttgtcgatatggtcgccgcctccgtgtcgccggtccgccaccccttgcccggcacccagatggcgcgaggggtgaagggacgcaagcgcatcgtcgcctatttccgggagcagattccgctgcgccgcggcaatcacggcggcgacgatctgttctcgcagctctgccgcgccacccatgaggatggcgcgctgctctcggagcaggacatcatcgatcacatgagcttcctgatgatggcggcgcacgacacgctgacttcgtcgctgacttccttcatcggcgagctcgccgccaaccctgaatggcaagacaagttgcgcgcggaagtgctcgcgctcggccttgcgccggatgcgccgagcagcttcgacgatctcgaaaagatgccgctgacggagatggccttcaaggaagcgctgcggatcaagccgccggtaccctcgatgccgcggcgtgcgatgcgcgatttcaccttcaagggcttcaaggtgccggccggtaccgccgtcggcatcaatccgctctatacacaccacatgaaggacatctggccggagccggagcgcttcgatccgctgcgattcaccgaggaagcgcaacgcaaccgtcaccgcttcgctttcgtcccgttcggcggcggcgcgcacatgtgtctcggcctgcacttcgcctatatgcaggcgaagtgcttcgcgcggcactttctgcagaacatggaggtgtcgctcgcgcccggctacaagccggactggcagatgtggccgatcccgaagcctcgggatgggctgcgggtgagcgtgaagcctgcttga

SEQ ID NO: 7047 - DNA, 1236 bp, BradyrhizobiumColbertium
atggcgcgcctgaagttcggagccttccttgccccgcatcatccgatcggggagcatccgatgctgcagttccggcgcgatctggacctcgtcgagcagctggacgcgctcggctatgacgagttctggtgcggcgagcatcattcctccggctgggagatgatcgcctcgcccgagatgttcctggctgcggccggcgagcgcaccaagcgaatcaagcttggcaccggcgtggtgtcgctgccctatcaccatcccttcaacgtcgcgcagcgcatggtgcagctcgaccacatgaccggcggccgcgccatcttcggctccggaccgggcgcactcgcctcggatgcgcacacgctcggcatcgatccgatgacgcagcgcgaccgccaggacgaggccatcggcatcatccgccgcctcttcaacggcgagcgcgtcaccgccaagagcgactggttcacgatgaacgacgccgcgctgcagatcctgcccttgcaggaggagatgccgttcgtggtcgcctcgcagatctcgccgtcgggcatgacgctggccggaaaatacggcatcggcatcatctcgctgggatcgatgacgacgcaggggctgatgtcgctgcagcagcaatggcagttcgccgaggatgccgccaagaagcacggcaccacggtgagccgtgccgactggcgcgtgctgctgaccttccacatcgccgagacccgcgaacaggcacgcaaggaggcgggcgccgggctgatgcgctggcacaacgaatataacgtcggcacgctgcagcggccgggcctcacggcattctcctcgcccgacgaggccgtcgacaagaccgccttcgtcgaaggcgcggcatccacgatcggcacgcccgacgatctcgtcaagacgatcaagaacgtgatgcaggtttccggcggcgtcggcgccatcatcggcttcgtgcacgactgggccaatccggagaacacccgcaggagctgggacatggtggcgcgctatgtcgtgccggagatcaacggctacatcgacggcctgcgcaggtcgcagaaattcgtgatcgagaaccgcgcgatcttcgaacgcgcagggcaggccgtgatggcgaagatcatggagaacgagaaggccgccgaggcactgaaggtcaccggccccggccgtgtcgccattcccgccgtcaacgcgccggatctgcaaaaggaagcggcgaagcgatag

SEQ ID NO: 7048 - DNA, 1413 bp, BradyrhizobiumColbertium
atgcaccagatcgtcacaaggcaaatcgattcgtcctgccgctggtgggtgctggccatcgtcgtggccgcccagttcatgttcggcgtcgatgccttcgtggtcaacgttgccattcccacaatcgccatcgacctgcacgcgacgtcggcagagatcgagtccgtcgtggcgatctatctgatcgcctatgcaaccctcgtcgtcaccggcggccgcctcggcgacattcacggcaccaagaacctgttcctggcgggcgtgctcggcttcaccctgacctcgctgtggtgcggcctcgcgcaatccggcctcgaactgatcatcgcgcggctggcgcagggcgccaccgcggcgctgatggtgcctcaggtgctggcgatgctgcatctgctgttcactgacgaggcgcgcaatcgcgccttcgccgtttacggcatcgtgctcgggcttgccggcgccgcgggcttcctgctcggtggccttctgctcacggtcgatctcgccggcaccggctggcgctcggtattcttcatcaacgtgccgtgcggcctcgtcatcgcggccgcggcctggcgcatcatgccatcgacatcgcgccgcgccgacacgaagctcgacatcaagggcagcgtggtgctgttcgcgggactgttgtgcctgatcggtccgttgctgttcgggcacgatgtcggctgggcgccctggctctgggcgatgatggccatcggcggcttgattctcattgcgttcctgaagctggagcaggcggtcgcacgcgccggcggcatgccgctgatcgatctcgcgctgctggcggacgccgccttcatgcgcggtctcggcgccgtgttctttttcttcttcgccaatctctcgttctatctggtgatgacgctgttcatgcagcgtggcctgaacatcccgccgctcgcagccggcatggcattcattccgctcgcgattgcattcgtcgcggcttcgcgccacagcggggtgcgggcgcgccatcgcggcaccaaggttctgctcgaaggctgcgcacttcagatcgtaggcctcgcggcgctcgcgatcgtttcggtccatgccgagcagccgacggcgcttgcgctggcgcttaccatgatcatcttcggctatggtcagggtctggtgatggcgccactgtccggggccgtgctttcgaccgtaaaacctggtgccgcaggctcggcctccggcatgtacggcacgacggcgcagatcggaaatgcggccggtgtggccgcaatcggcgcggtgttcttcgcgggcgaagcgctgcaatcagcgcgcgcgggattcctggtatcgctcgccctctttgtgacattcatcatgatctgcgccacgtttctgctgtggactcgccgcgccggagcaagaagttga

SEQ ID NO: 7049 - DNA, 1185 bp, BradyrhizobiumColbertium
gtgtcgctagccaagaacatcgatctcttgagacgcctgcccaggctggacggactgcgttttgccgggccaggccgcagcccggattcatccagtccgctgcaagaggtcacggatttcggtgacaatcccggcgccttgcgcatgttcgcgttcgtgccggccgaatggcagaagccgcgcgcgctcgtcgtcgtgctgcatggctgcggacagacggcggccgcttacgacctcggcgcgggctggtcgacgctggcaagacactatggctttgcgctggtgatgccccagcagcagcgcgccaacaacgccaacacctgcttcaactggttcaatcctgaagacaccgcgcgggacagcggcgagccgcgctcgatccgcgagatgatcgcgtacatggtgaaagcgcatcgcatcgaccccaagcgcgtcttcatcaccggcctgtcggccggcggcggcatgacgtcggtgatgctcgcgacctatccggaagtctttgcggccggcgcggtcattgccggactgccctatggcatcgcctccaatctgcgcgaggcgctcgacggcatgttccattcgcccgcgcgtccggcgcgcgagctcggcgacctcgtgcgcagcgcctccgatcatcgggggccctggccgaaggtctcggtctggcacggcagcgccgaccgcaccgtcaatcccggcaatgccaatgagatcgtcaagcaatggctggatttgcacgatctgtccgttgacgcgccgatggcggagacgatcgtcgacggctatccgcgccaggcgtggtgggacagggacggcgagacgctggtcgagtcctatgccatcaccgacatggcgcacggcacgccgcttggccttgccgacaacgatcagcgctacggcgtcgaaggcgcattcctgatcgaggccggcatttcctcatcctaccatatcgcaaagttcttcggcctcaccggctggattgccgacgccgcaaaggcggaagccaaacccgcgacaaagcctgcaaccaagccggcgctgacctccgcgccgcatctcgcccgctcgatccgcaccacgattgccgaagcgccggtcgagccgcagcgcgagaagacaggcggcttggatatcggtcagatcatcacgcgggcgctgacggcagcgggcttgatgaagtag

SEQ ID NO: 7050 - DNA, 669 bp, BradyrhizobiumColbertium
atgaccgagcaaaacgacaccaaagccaaggcgggcgcgatcatcgttcccgtgacgctgttcgagcagaactgcaccatcatctgggacgagccttccaagaaggccgtggtgatcgatccaggcggggacgtcccgaagatcctggacgcgatcaagcagaccggcgtcaccgtggagaagatctggctcacccacggccatatcgatcatgtcggcggcgcggccgagctgcgcgatgcgctgggggtgccgatcgaaggtccgcatgccgcggacaagttcctgctcgacaatgtcgtcgcgagcggagcgcgcttcggcatgaccggagggcgcgatttcacgcctgatcgctggctcgacgagggcgacagcgtgtcgatcggcggcctgcagttcgacatcctgcattgcccgggtcattcgcccggcagcgtcgtgttcttcaacaaggatttgcgctttgcccatgtcggcgatgtcctgttcgccggctcggtcggccgcaccgatctgcccggcggcagtcacgccacgctgatcaactcgattctcaccaagctgctgccgctcggcgacgatgtcggtttcatctgcggccacggcgccggctcgagcatcggccaggagcggatgaccaatccgttcatcaccggcgagatgtaa

SEQ ID NO: 7051 - DNA, 162 bp, BradyrhizobiumColbertium
gtgagccatagaccacccgaaatctgccgccttgcgcgagagaacgccacagcaacgccccggttcaaattgcagggccaattgggacggccctgtgacatttgttccggaagagcggtccgaatcttttgcttggcggcccggcaaaaatcggcattgtga

SEQ ID NO: 7052 - DNA, 1602 bp, BradyrhizobiumColbertium
atggctcacggcaacgagaattggtggcgcgacggcatcttctatcagatctatccgcgctcgtttcaggactccggcggtgatggcgtcggcgacctcgccggtatcctgcgtaggctgccttacgtgaaatcgttgggcgtcgacgcgatctggctgtcgccgatctttccctcgccgatggccgatttcggctacgacatctccgattatatcggcatcgagccgctgttcggcacgatggccgacttcgacgcgttgctcgcggccgctcatgacaatggcctgaagctgatcctcgacctcgtgccgaaccacacctcggaccaacatccctggtttgtcgaaagccggtcctcgcgcgacaatcccaggcgcgactggtacatctggcgcgatccggcacaaggcggcggcgtgccgaacaactggctgtccgagttcggcggcagtgcgtggcagttcgacgagaccacgggtcagtattactatcatgccttcctcgcccggcagccggacctgaactggcgcaatccggacgtccgcgccgccatctacgacgtgatgcggttctggctggacaagggcgtcgacggttttcgcgtcgacgtgatctggcacctgatcaaggacgccgaattccgcgacaacccgccgaacccgcattacgtcgagggccggccgccgaacgaaagaatcctgacgcagtactcgaccgaccagccggaggtgcacgatgtcatcgccgagatgcggcgtgtcaccgattcctatggcgcgcgcgtcctgatcggcgagatctatctgccgctgcatcgcctcatggcctattacggcaacgatctcaccggcgcgcagatgccgttcaatttcgcgctgctctcgaccttctggagcgcgcgctcgatcgagaagatcatcgaggattacgagaaggcgctgccgcgcggtgcctggccgaactgggtgctcggcaatcatgatcgcccgcgcgtggcgagccgcgtcggtcccgagcaggcccgtgtcgccgcgatgctgctgctgacgctgcgcggcacgccgacactctattatggcgatgagatcggcatgcatcagctcgtgatcgcgcccgaggacgtgcgcgatccattcgagaagaacgtgcccggcatcggtgtcggccgcgacggctgccgcacgccgatgcaatgggattcgtcgaacttcgccggtttttcccaagtgcggccatggctgccgctgccggaggatcatatcagcgagaatgtcgccaatctggaagccgattcgcggtcgattctcaatctctacaagcgcctgatcgcattgcggaagggctgtccaccgctggtcgccggcgattatcatccgatcgccgcgcagggcgatctcctgatctaccgccgcgaggccgaaggtcgcgcggtgatcgtggcactcaatctcggtcctgaaccggtttcggtgaccaccagcgcgatgcgtttcggcagcaggatattgctgtcgacgttcctggatcgcgaagatgagcgaatcgaaggcgtgctggatctgcgcggcaatgagggcgtggtggtggcgccgccaagctag

SEQ ID NO: 7053 - DNA, 525 bp, BradyrhizobiumColbertium
gtgcgcgccgacggaatcggttatcctgcctccatggacaacaccgcccgcaacatctcgctcgtgccgcctccggaccgccgtcaatccgagaccgcgcttgcggtcgcgcgcggcacggcgcggctattgaggtcgctcggcttctcctgtatcagcgaattgccgctgccctcaggccggcgcgccgatctcgtggcgctgaacgagcgcggcgaaatctggatcgtcgagatcaaatcctcggtggaggatctgcgcgccgatcagaaatggcacgaataccgcgcccattgcgaccggctgttcttcgccttcacgcaggatctgccgtgcgagatcttccctgaagacaccggcctgatcatcgccgacgcctatggcgcgcacctgcattgcgaggcgcccgagcacaagctcgctgccgccacgcgcaagcagatgacggtgcgctttgcgatggccgcagccttgcggatcaaccggttggtcgatccgcaaggtcacgcggatttctgggaatag

SEQ ID NO: 7054 - DNA, 990 bp, BradyrhizobiumColbertium
atggttcaccccacgccactgcttgcattgctttgcttctggaccgtacgcgcgattgccgtcgccgtcatcgccgtagccgcaccgggtgcggggcgcgcgcagcaagcctccccgccggtctggacggtgccggaagtcggcgcgctgcctgatgacgctcatggccggctcgtgcggcgcgggcgcgacctcatcacggcgacttacgcccatatcgggccggaggtgccggacccagccaagcgttatgccggcaacaatctcgcctgcagcaactgccatctcgaagctggcacgaaaaaattcggcttgccgatctttggattggtcgagctcttcccgcaatacagtgcccgcctcggcgccgagatcacgatcgaggatcgtgtgaactcgtgcatggcgcgcagcatgaatggccgcgcgctgccgctcgacagtccggaaatgcaggccttcgtggcttacatcaagttcctctcgtccggcgtgccggccggcaaggcattgtcaggactcggcaccggatcgatgcctgagctcgatcgggcggccgaccccgttcgtggcaaggcgatctatgcgaacgcttgtctctcctgtcacaacgaggacggctccggaatacgccgcagcctgccgagcgtcgatctcggctacatggtgccgccgctctggggcccggacagtttcaatgacggtgccggcatggcgcggctgattaccgcggcgaacttcttgcacttcaatatgccgcacggcacggactacctgaatccgcagctcacggtcgagcaggcgtgggacgtggccgcctatatgatctctcaaccgcgtccgagaaaggccggtctcgacaaggactatccagacctgtcgaagaagccggtcgatacgccttacggaccgtacgccgatggattcgatcagcagcagcacacatacggacccttcggtccgatccgggcggcgcacgccaggaagtag

SEQ ID NO: 7055 - DNA, 114 bp, BradyrhizobiumColbertium
atggacatcggcagccaggccgaatttgcccttcaggccgatgagctgccgggcttcgcagctcccggcgcgtacgctcctcgctcaacacgcctgaagccggtctgcggctga

SEQ ID NO: 7056 - DNA, 555 bp, BradyrhizobiumColbertium
ttgaacgccatcgccgaactgaacgaacagaccgaccgctcgctgctcatcgtggaagacgacaagccgtttctggaacgcctgtcgcgcgccatggagacccgcggcttttcagtgacgtcatgcgataccgtttcggacggacttgcgcagatcggcaagtcggcgccggcattcgccgtggtggacttgcggctcggcgacggcaacggccttgatgtggtctcggcgctgaagaagaagcgcccggacgcccgcgcgatcgtgctgaccggctatggcaacatcgccaccgccgtcaccgcggtgaagatgggtgcaatcgattatctctccaagcctgcggatgccgacgacgtggtcgcggcactgctctcgaccaatgcggagaaatccgagctgccgagcaacccgatgtcggccgaccgcgtccgttgggagcacatccagcgcatctatgaaatgtgcaaccgcaacgtctcggagacggcgcggcggctgaacatgcatcgccgtacgctgcagcggattctggccaagcgcgcgccgcggtaa

SEQ ID NO: 7057 - DNA, 1428 bp, BradyrhizobiumColbertium
ttgccgttcttctgctattgcagcgaagagcgcaaggcttgtaatcctggatggttccgcgagccgcgcgtttgtgatcgagaagggaccgccgcattggcagccatgaccgaaattgccgcttccgacttccgccacgcgcagcggaatatccggctggacacgatcctgcggctgcgctggctggccgtgctggggcagctcgctgcgatcttcatcgtggcacaggggctcgagttcaacgtcgagatcgttccctgcgtcagcatcatctttctgtcggcagcgctcaacctggcgctccagaccgcagccaatcccatgcagcggctggagccgatgcaggcggccgggctgctcgcgctgaacatcgtggagctggccggcctgttgtactttaccggcggattgcagaacccgttctccttcctgttcctcgcgcccgtgctgatctccgccaccgcgctgccggcccgctttacgttcggcctcggcgtgctcgcggtcgcctgtgcctcgatcctgttcttcttccatttttcactgccctgggattccgacgatccgctggtgctgccgccgatctatctcgtcggcgtctggctctcgatcgtgctcgcgatcggcgtcaccagcctctactcgttccaggtcaccgaagaggcgcgcaagctcgtggacgcgctggctgccaccgagctggtgctgacgcgcgagcagcatctgacccagctcgacggccttgctgccgcggccgcgcacgagctcggcacgccactcgcgacgatcttcctgatctcgcgcgagctggaaaagacggtgaaggacccgagcatcgccgccgatctgaagacgctccgcgaacagacccagcgctgccgcgacatcttgagcaagatcacccagctctcctccaccggcgcgccgttcgatcgcatgaagctgtcggagctgatcgaggaggtggtggccccgcaccgcgatttcggcgtcgagatcaaggtgcggatcgcggtgaccgccgcggccgagccggtcggctcgcgcaatcccgcgatcctctacgggatcggcaacatcgtcgagaacgcggtcgatttcgcccgcacgacagtcgaggtgaacgcctggtggaacaaggatcatatcgaactcgtgatctcggacgacggacccggtattccccctgatattctgaaccggatcggcgagccctatctgtcgcggcggcgcacccaggatgacggcggcagcgtacgccgcgggctcgggctcggcgtcttcatcgcgcgcaccctgctggagcgcaccggcgccaaggtctcgtttaccaaccggacgttcccggaccacggcgcggtggtccagatcacgtggcccagggagcgttttgaggctatcgagagcctcgaagaaacaataggatag

SEQ ID NO: 7058 - DNA, 804 bp, BradyrhizobiumColbertium
atgacggagaatgacgaggcttcaagcctgccgactgtcgcggatcgcagcccgcctgcggccatcgcgatcgatcacctcgtcaaggtctacaagcagacccgcgccgtcgacgacatctccttctcgcttccgcgcggcagcatcaccggccttctgggcggcaacggcgccggcaagaccacgacgatcgccatgatcatgggcctggtgctgccgacctccggccgcgtgcaggtgctcgggcatccgatgcccgaggacagcgcgtccgtgctggggcggatgaatttcgagagcccctatgtcgacatgccgatgcggctcaccgtgcggcaaaacctcaccgtgttcggcaagctctatgcggtgaagaacctgtccgatcgcatcgccgagcttgccgaggatctcgacctcaccgacttcatcgaccgcgccaacggcaagctctccgccgggcagaagacccgcgttgcgctggcgaaggcgctgatcaaccagcctgagctgctgctcctggacgagccgaccgcttcgctcgaccccgataccgcggactgggtgcgcgcgcatctggagcggtatcgccgggacaacgacgccaccatcctcctcgcctcgcacaacatgctcgaagtcgagcggctttgcgaccgcgtcatcatcatgaagcgcggccgcgtcgaggacgacgatacgccggaggcgatcatggcgcgctacaaccgcaccacgctggaggaggtgtttctggacgtcgctcgcggccgggtgaacggcgcgaaggaggcggcgcggtga

SEQ ID NO: 7059 - DNA, 819 bp, BradyrhizobiumColbertium
atgaccgacacctccctccaccgcggcatctccgtccatcgcatcggcgcgatgatcctgcgctattggtatctgctgctgtcgtcctggccgcggctgctcgaactcttgtactggccggcgctgcaggtcatcacctggggctttctccagctctacatcgccgagaatgccagtttcttcgcgcgcgcaggcggtacgctgatcggcgccgtgatcctctgggacatcctgttccgtggccagctcggcttctccatctccttcctggaggagatgtgggcgcgcaacctcggcaatctcatgatgagtccgctgaagccgatcgagtttctcctgtcgctgatggccatgagcctgatccggctcgcgatcggcgtgattccgatgacgctgcttgcgctgttcctgtttcacttcaacgtctatgccctcggcctgccgctgatcgcgttcttctgcaacctgatcttcacgagctggtcggtcggtatcttcgtctcgggtctcgtgctgcgaaacggcctcggcgccgagagcatcgtctggaccctgatgttcgcgattcttccgctcgcctgcgtctactatccggtcagcgtgctgccggcctggctgcaatacgtcgcctgggcattgccgccgacctatgccttcgagggaatgcgcgcgctcctcatcgagcacaccttccgaaccgatctgatgctggaggcgttggccatcaatgtagtgcttttgggtgcatctttttgggcattccttgcccttttgcgcagcgccagggagcacggctcgctgctggcgggcggcgaataa

SEQ ID NO: 7060 - DNA, 1329 bp, BradyrhizobiumColbertium
atgcccattggtgagtttggcggcgcgccgcccctggctgcagaaggcagtccggtcctgacgacgccgatgtactggatgtacgagatggctcatgccgctctcaatccggcacgtgcggtcaccgacgcgaccaagctgttgtttcagaatcccctcaatccctggacgcgcaccgaggtcggcaagtcagttgccgcggcctgcgaattgttcgagcgcaccacgcgccgctatggaaagcctgaatggggcctcaacgataccgaggtcaacggcatccgcgtccccgtcgagatccgctcggtgtgggagaagccgttctgcaagctgctctacttcgatcgcaagttcgcccgtccgttacgcagcccgcagccgcgcgtgctgatcgtggcgccgatgtccggccattatgcgacgctgctgcggggcacggtggaagctttcctgccggcgcatgaggtctacatcaccgactgggccgatgcccgcatggtgcccttgagcgaaggccgcttcgatctcgacgactacatcgactacgtgatcgagatgctgcacgtcctcggcggcaacacccatgtgatggcggtgtgccagccttccgtgcccgtcgtcgcggccgtctcgatcatggaagcgcggcgcgatccgttcgtgccgacctcgatgacgctgatgggcggcccgatcgacacccgccgcaatccgaccgcggtgaacaatctcgcccaggagcgcggcatcgactggttccgaaatcacgtcatcaccaaggtgccgttcccgcatccgggcatgatgcgcgatgtctatccgggattcctgcagctcaacggcttcatcagcatgaatctcgaccggcacatggatgcccacaagcagctgtttgccaatctggtgaagggtgacggcgatctcgtcgacaagcatcgcgacttctacgacgaatatctcgcggtgatggatctctcggccgagtattacctgcagaccgtggacacagttttcgtgaagcactcgttgccgaagggcgagatgactcatcgcggaaccctcgtcgatccttccaaggtcaagcgcgtcgcgttgatgacggtcgaaggcgagaacgacgacatctccggtcttggtcagaccgaagcgacgcacacattgtgcaccgcgattcccgatcatcgccgcgttcattacgtccagaagggcgtcggacattacggcgtgttcaacggctcgcgcttcaagtcggagatcgtgccccgcatccatgacttcatggtttcggcggcgaatccgagctcgttgcaggccctcgcggccgaataa

SEQ ID NO: 7061 - DNA, 597 bp, BradyrhizobiumColbertium
atgcccccgcgcggcaccttggccgaggcaaaggactttgcgcaacggcacggcgcgtggatcgcggcccgtctcggccgcttgccgaaggcagcaccatttcaaccgggcacggtgataccgctgcgcggcacgccgcatcgcattgttcatcgcgccggccagcgcggcacggtatggaccgagacgcgtgacagcggtgaacgcatcctctgcgtcgccggcggcctcgagcatgtcgaccgccgcgtcagcgacttcctcaagcgcgaggcgcgccgcgacctgcagcgctcggccgaagcctacgccgccgaactcggcgttcgcgtcaagcggctttcgatccgcgaccagtccagccgctggggctcctgtacctctgccggctcgctgtcgttctcctggcgtctgatcctcgcaccgcccttcgtgctcgactatctcgccgcccacgaggtcgcccatctcgtcgagatgaaccactcggcacggttctggcgcgtgtgcggcaagatctgcccgtcgatggagcgcgccaagaagtggctcgacacgtatgggaacgatctgcaccgctacggtgtcgaggattag

SEQ ID NO: 7062 - DNA, 2217 bp, BradyrhizobiumColbertium
atggcgtggggaaagaagaagggtgcgcggaaggagccgctgttcggcttgcccgccgcgctcgccgatctgcgcctcactccggccgaccgcattcccggcggtgacgacaagccgaagaaatcttccaagacatccgccaagcgcaagagcgacgatgccggcaacgagccgccgcgcgagcgcaaggcacccgccggtcgcagcggcgccaagcgccgcacgaagtcgcgtggaggcttcggcctcggccgactggtctattggggcgcggtgctgagcctgtggggcgtcatcgcagtgatcggcgtcgtgatctatgtcggcgcccatctgccgccgatccagtcgctggaaatccccaagcgcccgccgacgatccagatcgtcgggatggacggcagcatcctggcgcagcggggcgagatggccggtgccaatgtcgcgctgaaggatttgccgccgtacctgccgaaggcgttcatcgccatcgaggaccgccgcttctactcgcatttcggcatcgatcccgtcggcatcctgcgcgcgctggtcaccaacgtgctccatcgcggcgtctcgcaaggcggctcgacgctgacgcagcagctcgccaagaatctgttcctgacccaggaacgcaccatgcggcgcaagctgcaggaggtggagctcgcgatctggctggagcgcaagcattccaagaacgagattctggagctctatctcaaccgcgtctatttcggctccggcgcctacggcgtcgaagcggccgcgcagaaatatttcggcaagtcggccaagaacgtcaccattgccgaggccgcgatgctggccggcctcgtcaagtcgccgtcccgccttgcgccgaaccgcaacccggaaggtgccgaagcgcgggcgcagatcgtgctcgctgcgatggcggatgcgcagttcatcaccgacgcgcaggcgaaggcctcgatcggccacccctcctacaacgtgaagcccgtcggcgccggcacggtgaactacgtcgcggactggatcggcgaggtgctggacgatctggtcggccagatcgacgagagcatcaaggtcgagaccacgattgatccgaagctgcagagcgttgcggaagccgcgatcatcgacgagctcgcggccaagagcgtgaagttcaatgtcagccagggcgcactggtggcgatgacgcccgatggcgcagtgcgcgccatggtgggcgggcgaaactattcagacagccagtacaaccgcgcggtcaccgccaagcggcagcccggctcctcgttcaagccgttcgtctatctgaccgcgctcgaacaggggctgacgcccgacaccgtccgccaggacgctcccatcgaggtcaagggctggaaacccgagaactacacccacgaatatttcggagcggtgacgctgacgcaggcgctggcgatgtcgctcaacaccgtcgcgatccgtctcgggctcgaggtcgggccgaagaatgtggtgcgcaccgcgcaccggctcggcatctcctccaagctcgagccgaacgcctcgatcgcgcttggaacgtccgaagtctccatggtcgagctggtcggcgcctacgcgccgttcgccaatggcggcctcgcggtggcgccgcatgtcgtgacgaggatcaggacgctcagcggcaagctgctctacatgcgccagccggaggagcgcaaccaggtcatcgacacccgccatgtcggcatgatgaacgcgatgatgcgggagacgctgatatcaggcaccgccaagaaggccgagatccccggctggccggcggccggcaagaccggcaccagtcaggattatcgcgacgcctggttcatcggctacactgcaaatctcgtcacgggcgtctggctcggcaacgacgacaactcgccgaccaagaaagcgaccggcggcggcctgccggtcgaagtctggtcgcgcttcatgaaggcggcgcatgagggcgtgcccgtggcggcattgccgagcgtgcccggtggctggggcctgtcgaacctcgcgcacgcggcctcgcaggtgtcgccgccgacgccggccgcgcccggaccagctccgtccagcaacggcggctatcgtccgccgcccccgacgcgcgcgaatgtgcggcccgaaccggcggcagggctcgacgggtggctgatggatcggctgttcggcggaaaccgatag

SEQ ID NO: 7063 - DNA, 426 bp, BradyrhizobiumColbertium
atgggccacatcgacccgaccaaggagatcttcgcgcaattccgggagaacgatcgccccggcccgatccacatgctcaatcttgtgcgcttgcggaaagaagcggcctaccccgatggccgcaaggccagcggcgcggaagcctatgcggcctatggccgcgagagcggcccggtgttcgaacgccttggcgggcgaatcgtctggcagggaaaattcgagttgatgctgatcggcccccaggaggaacgctgggaccattgcttcatcgccgaatatccgagcgtcgctgccttcgtcgagatgatccgtgaccccgtctaccgcgaggcggtgaagcatcgccaggccgcggtggaggattcccggctgatcaggcacgctgtgctgccggtagggaagaactttggggagataccgaagtag

SEQ ID NO: 7064 - DNA, 690 bp, BradyrhizobiumColbertium
gtgctctaccagaacgacgacatgggccgcgactatctcgccggcctcaagagcggccttggcgacaaggccaacatgatcgtcggcgaggtgtcctatgaggtgaccgatccgaccgtcgactcccaggtggtcaagctgaagtcgatgggcgtcgacctgttctatgacgcctcaacgcccaagttcgcggcgcaggccatcaagaagctcgccgacctcggctggaccccggtgcatatcctcgacatcaacgcgagcccggtgtcggcgacgctgaagccggccggcctcgacatttccaaaggcatcatctcgacgaactacggcaaggacccgggcgatccccaatggaaggacgatccaggcgtgaaggccttcttcgccttcatggacaagtacttccccgaaggagacaagctcaacaccatcaacacctacgcctattcggtggcagaactgctggtgcaggtgctcaagcaatgcggcgacgacctgacgcgcgagaacgtcatgaagcaggccgccaacatcaagggcttcacgccgagccttgcgctgccgggtatcaagatcaacaccggccccaacgactaccgcgtcaacaagcagatgcagatgatgaagttcaacggcgaacgctgggagctgttcggaccgatcatcgaggactcgggcccgtcgggctag

SEQ ID NO: 7065 - DNA, 366 bp, BradyrhizobiumColbertium
gtgaccgtcaccgtcaccgacggtcacggcgcgagcgatacggtcaacctgatcttcaacctgtccgaacaaggcccggtcgaccttgccagcacgaccggcaaggacgtgctgttcgggtccggctaccaggatcagttcgtgttcgaggccaattcgaaccacgacacgatcctcgattttgcgcacggtcaggaccacatcgacctgacggcggtcgtggcgacagatatcgacgcggcatggatagcccagcacgtggcgccctcagggacggataccctgatcacgctgagtgcgacggacaccatcctcctgaagggcgtcgcgaacgtccagccaagcgacttcatcgtccatgcctga

SEQ ID NO: 7066 - DNA, 2232 bp, BradyrhizobiumColbertium
atgaaacgtctcaaactcctgcggctttggtttgcgcggaagctcggcttcgcacggctgatgtgcctggcgctgctggtcctgttcgccggcgcccgtctctgggatccgccgccgatccaggaattgcggctgcgcaccttcgacatgtttcagttgatcgatccgcgccacaaggcggcgcggccggtcaccatcgtcgacatcgacgacaagagcctcgccaggctcggccagtggccgtggccgcgcacgcgcatcgccgacatgatccagaacctcaccagcaacggcgcggtcgtgatcggcttcgacgtggtgttctcggagccggaccggctcaatccggatctggtcgcgagccagatgcgctatctcgatgacgccacccggatcaagctccgcgagctgccgagcaacgaccaggtcctcgcggatgtgatcaagcgctcgcgcgtggtgctgggcgagaccgggcttccggaggtcttgtccgagctggacaagtcgcttccgttcacgggcgtggcgaccgtcggcgaggacggggccgaacgcttcctgttcgaattccccggcttgttgcgcaacgtgccgatcatcgagaaggccgcggccggccgcggcctgttctcgatcaggaccgagcgcgacggattgattcgccgcgtgccgatgatcctgcgcgcccagggcaacatcatgccctcgctcagcctcgagatcctgcgcgtcgcgaccggcacgccgacgctgctggtccgtaccgacaaggccggcatcaggggcgtccgcctcaagggcgtggaaattccaacggaccggaacggccagctctgggtccactatgcccgccgcgatccctcgatctatgtctcggccgccgacgtgatcgacaataccgtgccgccggccatgctcgcgggcaagctggtgctggtcggcacctccgctggcggactcaacgacatcaagaccacgccggtctcccgcgccatgccgggggtcgagatccacgcccaggtgctggagagcgtgctgagcggcgcggtgatctcgcagccgaattatgcgttcggtgtcgagctgatcgcggcgctgatcatcggcctgctcgtcatcatcttcacgccgaatctcgggccggtacgcctcgtgctcgccggcgcgacctttgccgccatcctgatcggcgtgtcctggttcttctatacccagtaccgctacctcatcgacttcacctatccgctgctgtcgaccaccgcggtctacctgacgctgatctttgcgagcttcgtgcgcgagcagcgccagcgcgtgcagatccgcggcatgttcgcgcagtacatgtcgccggtgctggtcgagcagctggcacagtcgccggaaaagctcgtgctcggcggcgaggagcgcgagatgacgatcatgttctcggacgtgcgcggcttcaccacgatctcggagagctacaagcacgatccgcaaggcctgatcgcgctgatgaaccgcttcctgaccccgctgaccgacgtcatcatcgagcgcaagggctacatcgacaagtacatgggcgatgccatcatggcgttctggaacgcgccgctcgacgacccccagcacgaggtcaatgcctgcgaggctgcgatccagatgctggagcagatcgatctggtcaacaaggagcgcgagcaggaagctgccgacggcggccacgtctacatcccgctcaatgtcggcatcggcctcaataccggcgtcggcgtggtcggcaacatgggctccgacctgaagaagaactattcggtgctgggcgacagcgtgaacctggcctcgcgcctggaagggcagaccaaggaatacggctttccgatcatcgtgggatcccgcaccgcgctcgcggccaaggacaagttcgcgatcctcgagctcgacttcatcatggtcaagggcaagaccgagccggaggtcatctatgccatcgcgggccgcgaggatgtgatgcattcgggtgcattccagcgcctgcgcaacatcaccatcgagatgctcggctgctaccgcaaccgcgactggcagggcgcattggacgcgatcgagcgcggccgccgcagcgaagacgccgacacgctggagaagctgttcaggctgtacgaggcgcggatcagggaattccagatcaatccgccgcccgagaactggaccggcgcctatgcgctgctgaccaagtag

SEQ ID NO: 7067 - DNA, 1782 bp, BradyrhizobiumColbertium
atgattaattttgatgcaatggtatgcaatgcctatgccaaggagaaactttttctgcagattgcccctgcggcgacaagtccttgtggatcgccggaaggcaaaaccaaggcgctgcctattctggcatcaagattgcaggtttggcccgaactcccccttcaattccccttggagctttgggccatgcgtcttcgtctatcgacctgtctcgccgtgcttgcgctggcgttctccgcagtttcggcgtgcgccgaaactgttgtgcgctacggcatctcgatggcggacatcccgctgaccacgggccaacccgatcgcggcgcgggcgcctatcaattcaccgcctacacgatctacgatcccttggtggcctgggagatggacgtggccgaccggcccggcaagctggtgccgggcctcgccaccgaatggaaggtggacgatgccgacaagaccaaatggcgcttcactttgcgcaagggcgtgaagtttcacgatggcagcgagttcaacgccgatgcggtgatctggaatctggacaaggtgctcaacgacaaggcaccgcagttcgacaagcggcaaagcgcgcaggtgaagacgcgcctcccctccgtcgccagctacgccaagatcgacgactccaccgttgagatcaccaccaaggcggtcgattcctttttcccgtaccagatgctgtggttcctggtgtcgagcccggcccagtatgaaaagctcggcaaggactgggacaagttcgccagccagccctcgggcaccggccccttcaaattgacgagactggtgccgcgcgagctcgccgagctgaccaagaaccctgactacaggaacaagaagcgcattccgaaggccgacaagatcgtgctggtgccgatgcctgaggcgctgacacgcaccaacgcgctgcttgctgggcaggtcgatctgatcgagacgccggcgccggacgcggtgccgcagctgaaagccgccggcatgaagctggtcgacaacgtcacgccgcatgtctggaattatcacctcagcgtgctgccgggctcgccctggaccgacattcgcctgcgcaaggcgctgaacctcgcgatcgatcgcgacgcggtggtgggcctgatgaacggattggcgaagcccgcgaagggacaggtcgacccgtcgagcccatggttcggcaagcccagcttcgaattgaagtatgatcttgccgccgcgaagagactggtcgaggaagccggctactccaaggccaagccgctgaagaccaccttcatcatcgcgcaaggcggcaccggccagatgctgtcgctgccgatgaacgaattcctgcagcagagcttcaaggagatcggcatcgacatcgacttcaaggtggtcgagctcgagacgctctatacgcattggcgcaagggcgcggcggacgagatgaatgccggcatcaccgccaacaacatcgcctatgtgacctcggacccgctctatgcgatcgtccgcttcttccattccgggcagatcgcgcccgtgggcgtcaactggggcggctacaagaacccgaaggtggatgcgctgatcgacgaggccaagcagaccttcgattccaccaagcaggacgcgctcctggcgcaggcgcatgcgctgatcgtcgatgacgccacgctggtctgggtcgtccacgacaccaaccctcacgcgctgtcgccgaagatcaagcggttcgtgcaggcgcagcactggttccaggatctcacgacgatcggggtggagtga

SEQ ID NO: 7068 - DNA, 1659 bp, BradyrhizobiumColbertium
atgtttattaagaagaatacgcgtgcggcactgttcgcggtgcttgctctaacgacaaccgcggcctggccgcgcgtcgcaagcgcggagaccgtgctgcgcatcggcatgaccgctgccgatattccgcgcacgctgggccagcccgaccagggcttcgagggcaaccgcttcaccggcctcaccatgtatgacgcgctcaccggctgggacctgtcctccgccgagaaggcaagcgtggtgattccgggccttgccaccgagtggaaggtcgacgatgccgacaagaccaagtgggtcttcaagctgcgccccggcgtcaccttccacgatggctcgccgttcaacgccgatgccgtggtgtggaacgtcgagaaagtcctgaagcaggatgcgccgcaattcgacgccagccaggtcggcgtcaccgcctcgcgcatgccgacgctggcttctgcgaagaagatcgacgacatgacggtcgagctcaccaccaaggagcccgacagcttcctgccgatcaatctcaccaacctgttcatggcgagcccggcgaagtggcaggcgttctacgacaaggccgacggcgccgacgccaaggcgaagtcgcaggccgcatggaccgccttcgccaaggacgcctcgggcacagggccgtggaagatggcgagcttcacgccgcgtgaacggctggaactggtcaagaacgcgaactactggaataaggatcgcgtgcccaaggtcgacaagatggtgctcctgccgatgccggaggcgaatgcgcgcactgcggcgctgctctcgggccaggtcgattgggtcgaggcgcctgcgccggacgcgctccccgagctcaagcagcgcggcttcaagctctacgccaacgagcagccgcatgtctggccctggcagttctcgcgcgtcgaaggctcgccctggaacgacatccgcgtgcgcaaggcggcgaacctctgcatcgatcgtgaaggtctcagggacgggctgctcgccggcctgatggtgccggcgaccggcaccttcgagcccgggcatccctggcgtggcaatcccaccttccagatcaagtacgacaaggcggccgcacaaaagctgatgcaggaggccggcttcggccccaacaagaagctgacggtgaagactcagacgtcggcgtccggttcgggtcagatgcagccgctggcgatgaacgagtatctgcagcaggcgctggccgaatgctatttcgacgtgaagctcgacgtcatcgagtggaacacgctgttcaccaactggcgccgcggcgccaaggatcccagcgccaatggctcgaacgcgaccaacgtcacctatgcggcgatggacccgttcttcgcgctggtgcgcttcctgcaatcgggtatggcgccgccggtctcgaacaattggggcttcatcaacaaccccaaattcgacgagctggtgaagaaggcgcggcagaccttcgatcccgccgcgcgcgattccgcgctcgccgagctgcacgcagcctccgtcgacgatgcagccttcctctacgtcgcccacgacgtcggcccgcgcgcgatgagcccgaaggtgaccggcgtcatacagccgaagagctggttcatcgacttctcgccggtgtcgatcaagcagtag

SEQ ID NO: 7069 - DNA, 147 bp, BradyrhizobiumColbertium
atgaggggttgtttccgcggctacaccatttcaaacgagagagagtccctccgcggagagagacccctcacccggcttcgctgtcgcgaacccaccctctcccacaaggggagaggatgcactgagcaagcttcgactactgcttga

SEQ ID NO: 7070 - DNA, 954 bp, BradyrhizobiumColbertium
gtgctcgcctatatcgcccgacgcatcgtctatgtcgtccccatcgtcatcagcgtggcgctggtgtgcttcctccttgtgcacatcacgccgggcgatccgctcgtcgccgtgctgccggccgatgcctcgcaggagctcgccgcgcagctgcgcaccgcctatggcttcgaccgcccgctgccggtgcagttcgggctttggcttcttcgtgcccttcacggcgacctcggcaactccatcgcgacggggcgtccggtgctcgccgaggtcatgcgcgcagtgggcaacaccgtcacgctggcgattgctgcggccatcatcggcttcaccatgggcattctgctcggcttgatcgccggctatttccgggagacctggatcgacaaggtcgcgacctcctttgccatcgccggtgtttccgtgccgcattactggctgggcatgctgctcgtcatcatcttctcggtgcagctcaactggctgcctgcggtcggcgccggcccgagcggctccaattcctgggcctgggactgggcgcacctgaaatatcttgtgctgccggcgatcacgacctcggtgatcccgatgggcatcgtcacgcgcaccgttcgcgcgctgaccggcgacatcctcagccaggacttcgtcgaggcgttgcgtgcaaagggcctgcgcgaaaccggcgtgttccgacatgtcatcaagaatgccgcgccgaccgcgcttgccgtgatggggctccagctcggctacatgctcggcggctccatcctgatcgagaccgtgttctcctggccgggctcgggcttcctgctcaattcggcgatattccagcgcgacctgccgctgctgcagggcacgatcctgatcctggcgctgttctttgtcttcctcaacctgctggtcgacatcgcccaagccgcgatcgacccgcgcatcaagcggggctag

SEQ ID NO: 7071 - DNA, 903 bp, BradyrhizobiumColbertium
atgagcgagcttccgttgtccgccaccagcgacgccgcgcttcaggccgcgcccgcgaccaaggcacgcggctattgggccaccgtcggccgccgcatcatgcgggacaaggtcagcatggcctgcgcgctggtgctgctgctgatcttcctctcggcgatccttgcgccatggctcggcctggaagatccctacaagggctcgatgatccgccgccttcgtcacatcggcaccccaggctaccccctcggcaccgacgagctcggccgcgacatgctggcgcgtctcgtctatggcggccggctgtcactggtcatcggcatcctgcccgtgatccttgctttctgcatcggcacctcgctcggtctcgttgccggttatgtcggcggcaagctcaacaccgcgatcatgcgcacagtggatgtgttctatgcgttcccgtcggtgctgctggcgatcgcgatctccggcgcgctgggtgccggcattctcaactccatcgtgtcgctgacggtcgtgttcgtgccgcagatcacccgcgttgccgagagcgtcaccaccggcgtgcgcaacatggatttcgtcgaggccgcgcgcgcttcgggggccggcgcctttaccatcatgcgcgtgcacatcctcggcaatgtgcttggttccatcttcgtctacgccaccagcctgatctcggtctcgatgattttggctgccggcctctccttcctcggtctcggcaccaagccgccggagccggaatggggtttgatgctgaacaccttgcgcaccgcgatctacatcaatccctgggtcgccgcgcttccgggcgcgatgatcttcgcggtttcgatctgcttcaacctgctctcggacggactgcgcagcgccatggacatcaggaactaa

SEQ ID NO: 7072 - DNA, 1059 bp, BradyrhizobiumColbertium
atgagcgagagcacatccgtcgagatgctggagccggtcgaggaccgcggcggcgtcgcgcagccgctgctgcaagtcaacggcctgaccaagcatttcccggtgcgcggcgggttgttcgccgccaagcgcaccgtgcgcgccgtcgacaacgtttccttctcagtcgcgaagggcgagaccgttggcatcgtcggtgagtccggctgcggcaagtccacgactgcacggctgctgatgcatctgatgccgcgcgatgacggcgacatcatctatgacggcatgacggtcggccagtcgctgagcttgcgtgagctgcgccgcggcatgcagatggtgttccaggattcctacgcctcgctcaatccgcgcctgacgatcgaggaatcgatcgcgttcggccccaaggtccatggcatggccgatcacgcggcgcgcacgctggcgcgcgagttgctcggaaaggtcggcttgcgccctgaaaactttgccaatcgctatccgcacgagatctccggtggacagcgacagcgcgtcaatatcgcgcgggcgctcgcgctgtcgccgcggctggtgatcctcgacgaagcggtctccgcgctcgacaaatccgtcgaggcgcaggtgctcaatctgctcgtcgatctcaagcgcgagttcggcctgacttatcttttcatcagccacgatctcaacgtcgtccgctacatctcggaccgcgtgctggtgatgtatctcggcgaggtcgtggagcttggtccggtcgaccaggtctgggatcagccggcgcatccgtatacgcgcgcgttgctggcagcgatgccgtcatccgatcccgatcgtcgcaccgagacgccgccgatcaccggcgatccgcccaatccgatcgacccgccctcgggatgccgcttccatacccgctgtccgtttgcggagccgctctgcgcaaatgcgacaccaaaactcaccgcgctcgatagaatgggccacgaggccgcgtgctacatggcgataccgggttcgggccatagccgcgcgcccaggggagaaaccgcatga

SEQ ID NO: 7073 - DNA, 198 bp, BradyrhizobiumColbertium
atgacgagacccacaccgaaagagatcaagccgatcgcgcaaattgccggcgttcccgtcgatgacgagattgcaacgcgcatctccaatgccatcgggcctgccttcgaaggcttcgccgccattgccggtacgttgccgttcgacctcgagccggccggctatgtgctcgcccagacgcagaaggtgtcgaaatga

SEQ ID NO: 7074 - DNA, 1416 bp, BradyrhizobiumColbertium
atgagcaccgaacccgcattgatgacgctcaccgaggtcgcgcgtgcgatcgcggcgaagcgggtgtcttcgcgcgaagcaacccgcgcgttgctgcatcgcatcggacaatggcagccgcatctcaatgccttcatgtcgatcgaagcggaggcggcactcaaggcggcggatgccgccgacgccgagctggccaagggcaatgtccgcggtcctctccatggcgttccgctcgcgcacaaggatatgtattacgaggccggcaaggtcgcgacctgcggctctctcatccgccgcgatttcgtgccgaccgtcacttccacggccttgcagcggttgaaggacgccggccaggttcgcctcggcacgctgcatcttgccgagttcgcctatggccctaccggccacaacgcccattacggcccggtgcgcaatccatggaacgtcgcgcacatcaccggcggctcgtcctcgggctccggctccgcggtcgccgcgcgcctgacctatgcggcgctcggctcggacaccggcggctcgatccgcatgcccgcgcatttctgcggcgtcacggggctcaagaccaccgtcggccgcgtcagccgcgccggcgcgatgcccctgtcgcaatcgctcgacaccgtcggaccgctggcccgcaccgccgaggattgcgcgttgttgctggcgttgatggccggcccggatcccgccgattcgacctgcagccacgagccgctgtcggactacgtcgcggcgacgaaaggctcactgaagggcctcaagatcggcgtgcccgcgtccttctatgtcgatgatctcgacggcgaggtcggccgcgtgctggacgagaccatcgcggtgctcaagcgcgagggcgccgacatcgtcaaggtcgagttgccggaccagcggcaattgtcgtcggcgagccagctggtgctcgccgtcgaagcggccgccttccacaagcgctggatgatcgagcgaccgcaggattatggcccgcaggtgctgatgcggctgcagaacggcctcgccgttcccgccatcacctatctcgaggcgatgcgctggcgcgggcctgcgctcgccgcgcacaacgcggccactgccggcgtcgacgcggtgatcgcgccggcctcgcccgtgccggcgccgacgatcgaggagagcgacgtcggcggcggcccgaatgcgccggcgctgctgcagcggctgacgctgttcacccgtccggtgaacttcctcggcctgccgtcgctcacggtgccgtcaggtttcaccaaaaccggcctgcctgtcggcatgcagctgatcggccgctccttcgatgaggcgaccctgctcaccatcggcgccgccttccagcgcgtcaccgaccatcacgatcgattgccgaaactgccgtcatga

SEQ ID NO: 7075 - DNA, 978 bp, BradyrhizobiumColbertium
atgaccaagctcgtcgagatctcaggcctcaacatccgcttcaccggcgagcgcacggtctatgccgtgaacgacctcagcctctcgctgggcaacagcgaggtgctgggcctgctcggcgagtccggttcgggcaagagcgtgaccttgcgtgcgctgatgcggctgttgccgaagaagcgcacgcagatatcaggcacggtcaacgtgctggggcaggacgtgctcgccatgaacgacgagcaactgtcgtcgttccgcggccagaccgtctcgatgatcttccaggagcccgcgctcgcgcttgatccggtctacaccatcggcgcgcagatcgccgaaagcgtggtgcgccacgagggcaagagctttgcggaagggcgggcacgcgcgctcgaaatgctcgaggtcgtgcgcatcccctcggccaagcggcggctcgacgcctatccgcacgaaatgtccggcggcatgcgtcagcgcgcgatgattgccttggcgctggcctgccggccgaagatcctgctcgcggacgagccgaccacggcgctcgacgccaccgtgcagatccagatcctgctgctgctgcgcgagctgcagcgcgagttcggcatgtccgtcatcttcgtcacccacgacatcggcgtcgccatcgagatctgcgaccgcgtcgcggtgatgtatgccggccagatcgtggagcagggcacgctgcgcgacatcgtccgcgcaccggtccacccctacgccaagggcctgctcgcctccaccatccacggcgctaagcggggcgagcgcctggagaccattcctggcacgccgccttcattggccgagaggccgcacaattgctcattcgcgccccgctgcaaattcgtcgagccgcgctgcctggagcaactgcctgccaacgtggaggtcgggccgggctgggcggcacggtgcgtgctggcggagccggcggtcgcgtcatcgtaa

SEQ ID NO: 7076 - DNA, 270 bp, BradyrhizobiumColbertium
atgcacatttccaacgaaggcctgctcgtcatcctgttcgtcggcctggtcgccggctggctggccgggaaggtcgtgcggggcgccgggtttggcatcatcggcgacatcgtgatcggcatctgcggtgcgctggtggcaagcctcctgtttccgaggctcggcattcggctcggcaccggcctggtgtcggagatcgtctattccgcgatcggcgcggttatcctgctggtggtggtgcggctggtgcgcggcggcggccggctttag

SEQ ID NO: 7077 - DNA, 1749 bp, BradyrhizobiumColbertium
atggcagccatccctggcgtccgccgttcagagctcggtgacgccttgcgcgcctgtcgcacggcgttcatcggcgtcggcttgatgagctgcatgatcaacctgctctatctgaccgggtcgatcttcatgctggaggtctacgaccgggtgctgccgagccgcagcattccgacccttgtcggcctcatcatcctcgccagcttcctctacatggcgcagggcatgctcgacatgatccgcaaccgcatcctggggcggatcggcacctcgctcgacgaggccctcaacaagcgcgtcttcgacaccatcgtgcgcctgccgctgatcgtcggcaatcgcaacgagggcctccagccgctgcgcgatctcgacaatgtccgctccttcctgggcggcatgggcccgagcgcgttcttcgacttgccctggctgccgctttatctcgccatctgcttcgccttccacgtcctgatcggtgtcactgcactggtcggcgccatcatcctggtcgggctcacgctggttaccgaattcatgtcccgccagccggcgaaggaggcgatgggcctcgccgcccagcgcaacgatctcgcccaggccagccgccgcaacgccgaggtgatggtgtcgatgggcatggccgggcggatgaaccagcgctggagcgaggccaacgaaaagtatctcgccggcaatcagcgcgcgagcgacgtcgccggcggtctcggcgcggtcgccaaggtgctgcgcatgatgctgcaatcggccgtgctcgcggtcggcgcctatctcgtcatccaccaggaggcgaccgccggcatcatcatcgccggctcgatcctctccgcccgcgcgctcgcgcccgttgatctcgccatcgcgcactggaagtccttcgtcgcggcccgccagagctggcaccggctcacccgcctgctggagcagatgccggcgcagccgatgccgacccagttgcagccgcccaccagccggctctcggtcgaaggcatcgcgatggtgccgcccggcgatcagcgcctcgtcgtgcaggacgtcaccttcgcgctcgccgcgggcaacggcctcggcgtgatcgggccgagcggctccggcaagtcgtcactgatccgcgcgctggtcggggtctggcagccggtgcgcggcaaggtgcggctcgacggcgcggcgctcgatcaatggtcgagcgacatgctcggccgccacatcggctatctgccacaggacgtcgaattgttcggcggcaccatcgcccagaacatcagccgattcgatcccgaggcgacctccgacggcatcatcgcggctgcgaaagaagccggcgtgcacgagatgatcatcaagatgcgcgaaggctacaacacccaggtcggcgagcagggtgccgcgctgtccgccggacaggcgcagcgggtcgcgctggcgcgcgcgctttatggcaacccgttcctgatcgtgctcgacgagcccaactccaatctcgacaccgaaggcgatgaggcgctgacccgcgcgatccgctcggcgcgcgagcgcggtgcgatcgtggtcgtggtggcgcaccggccaatcggggtcgaagcggtcgatcagatcctggtgctgcgcgacggccgcatgcaggcgttcggcccgaaggagcaggtgcttgcccaggtgctgcagccgcgcgcgacgccgcccgcaccgatcaagatcgtcagcgaaggcggagtggccaagccatga

SEQ ID NO: 7078 - DNA, 1335 bp, BradyrhizobiumColbertium
atgagcacattggcaataggcggcccgaagcccgccgcggcgaagaccgtgcgcgattcgatcaagttccacctgatgctcggcctcgcgatcgtgctggtcctggtcgtcggcctcggcggctgggcctccacggtgctgatctcgggcgcgctgatcgcgccgggacagatcgtggtcgaatccaacgtcaagaaggtgcagcatccgaccgggggcgtggtcggcgaggtgcgcgcccgcgacggcgatcgggtcaaggccggcgatatcgtggtgcggctcgacgacaccgtcaccaaggccaaccttgcgatcgtcaccaagaacctggacgccgcgcaggcgcgtgcggcgcgattgcaggcggaacagcgcggcctcgaccggatcgagtttccgcaggttctgctcgatcgcgctggcgatcccgacgtcaaggtgctgctctccgcagagaccaagctgttcgacgtccgcgtcaatggccgcaccggacaaaaggcgcagctgcgcgaacgcatcacgcagctcaacgaggagatcgcaggtctcagcgcccaggaaaaggccaaggaccaggagatttcgttggttcagaacgagctcaccggcgttcgcgagctctacgaaaagcgcctggtgcagatctcgcgcctgacccagctcgaacgcgactcggcgcggctcaacggcgagcgcgcgcaatacatcgccgcgcgggcccaggccaagggcaagatcaccgagacggagctccagatcatccagatcgacaaggacgtggtcagcgaggtctcaaaggacctgcgcgagaccaacgacaagatcggcgagctgatcgagcgcaaggtcgccgccgaagaccagctccgccgcgtcgacatccgcgcgccgcaggacggcatggtgctgcaatcgacggtgcacaccgtcggcggcgtcgtcaccgccggcgacaccttgatgctgatcgtgccgcagaccgacgatcttcaggtcgaggccaaggtcaacccggtcgatatcgacaagctccagatcgggcagaagacgctgctgcgcctgtccgccttcaaccagcgcaccacgcccgagctcaacggcctcgtcagccgggtctcgccggacgtcaccaccgaccagcgcaccggtcagagctactacaccatccgcgtctcgatgccgccggaagagatcgcccgtctcggcgacgtcaagatgatccccggcatgcccgtggaagccttcgtccagaccggcgaccgcaccatgctgtcctatctgatgaagccgctgcacgaccagcttatgcgggcgttccgggagaagtga

SEQ ID NO: 7079 - DNA, 1470 bp, BradyrhizobiumColbertium
atgcagtccccttcctccattgccaccgaatccttcacggacgcgagccttgccgtcgcccgcctcgaagagatctacgagcgcaacacgaagttcctgcgcgaccggttcgaggcctatgtcggcggcgaagcgatcacgacgcgggtgcgcgctttttatcccttcgtccgcatcaccactgcaactcatgcgcggctggattcgcgcctcgcttatggcttcgtcgccggccccggcgtgcacgaaaccagcgtgacgcggcccgacctgttccgcagctatctcaccgagcagatcggactcttgatccagaaccacggcgtgccggtcgagatcggcgagtccgccgagccgatcccgatccatttcgcctatcgccgcgacatcaacatcgaggccgccatcaccaccagcgagaactcggcggtgacgcggtcgctgcgcgatgcgttcgacgtgcccgttctcgccacgatggacgattccatcgccgacggcacgttcgagctgcagcccggagcgcccgagccgctgtccctgttccgcgccgctcgcgtcgattactcgctgcgccgcctctaccactacaccggcacggatcccgaatacttccagaatttcgtcatcttcaccaactatcaattctatgtcgacgcctttgcggagctttgccagcaacggctccaatccggcgaagccggcctcgatgctttcgtcgcgcccggcaacgtcgtcacgcgcagcggcggcgcgagcagcggcaccgcgcctgctcgtgcgccgcagatgcccgcctttcacctgaccacgcctggttatcgcggcatcaccctgatcaatatcggcaccgggccatccaatgcgcgcaacgtcaccgaccacgttgcggtgctgcggccgcacgcctggctgatgcttggccactgcgccggcctgcgcaacacgcaacggctcggcgattacgtgctcgcgcacggctatgtgcgggaggaccacgtgctcgaccgcgagctgccgctgggagtgccgatcccggcgctggccgagatgcaggtcgcgctcgagcaggcggtcgaggatgtcacggggctcgagggcttcgagctcaagcgcctgatgcgcacgggaacggtggcgagcgtcgataaccgcaactgggagatttccgggcccgatgtgatccgccgcctgtcgcaatcgcgcgcggttgcgctcgacatggaatcggccgccatcgccgccaacggctaccgcttccgcgtcccctacggcacgctgctctgcgtctccgacaagccgctgcacggcgagatcaagcttgccggcatggccagcgaattctaccgccgccgtgtcggtcagcatctcgagatcggcctgaaggcgctggagcggctcaagcagcaggaatcggagcggctgcattcgcgcaagctccgcagttttgccgaagtcgcgttccagtag

SEQ ID NO: 7080 - DNA, 276 bp, BradyrhizobiumColbertium
atgccgctgacacgcgacaggatcatcggccatgaccgcgaacggctggcctttcgcttcaccatgctgagcgacggggaggtcgtgcagtgccagatcagcgacgccgcgatggacgagctcgcaggcatgcagggcaccgaaagcagcgcgcgtcaggcccagttcctgtccctgcgtgaaaccatcgagcggatcgcgtcagacctctacgacgaggcgccgcgggtgaaggggcatgtggtgcggatattcacgcggcatttggggcggtaa

SEQ ID NO: 7081 - DNA, 483 bp, BradyrhizobiumColbertium
atgaaagaactcgtcggcatcgcggaaaaggtcgcggcacagctgatcgcccgcaaacagaccatcgccgtggccgagtcctccacgggcggcctgatctcggccagcctgctcgcggtgcccggcgcctccgcctacttcctcggcggcgcggtggtatacacccgcgatgccaggcgcatgctgatggatatttcggatgacggcatgaagggctttcggtcgtcttcggcgccctatgcgcaattgctggctgagcagatgcgaacgcgcttcaacagcgactggggcctgtccgagaccggcgcagccggcccaaccggcaaccgctacggcgatgccgccggccatagctgcatggcagttgcggggcctgcgtcagaggtgatgacgctggagacgggaagcaacgaccggctcgcaaacatgcaggctttcgccgcgacggcgctgaacctgctgctgagaaagctggaggcgtga

SEQ ID NO: 7082 - DNA, 1059 bp, BradyrhizobiumColbertium
atgacgtccccgatcgccggcggtgtagattgcgacgtgcatccggccttgccgcatctgaccagcctgctgccgtacctgaacgactactggcgcgatcaggtgacgacgcgcggcatggtggacctcgtctcgcaatcctatccgcagaactcaccgatcacggcacggccggattggcgtccggagaccggcaagcccgctgagagcctgtcggacatgcagcgccatgtgctcgatccgttcaagctcaagcatgccatctgcaatccgctgtacggcgtgcagatggtgttctccgaggacatgcaggccgccttctgccgcgcgctcaacgattggctggcgaaggaatggctcgatcgcgatccgcggctgcggggctcgatcgtgatccccacgcagagcgtggagaaagcggttgccgagatcgagcgttgcgcacaggacaagcgcttcatccaggtgctgatgctggtgatgggcgacatgccgctcggcaagcgcgtgctgtggccgatctatgaggcggcggagcggctcgaacttccagtcggaatccacgccggttccgcctatcacaatccgccgaccgcggtgggctggggatcctaccacatcgaggattatgtcggtcaggcccaggccttccaggcccagctcacgagcctgatcgtcgagggcgtgttcgccaaatatccgcggctgaaaatggtgatgctggaatcgggcgtctcctggatcgcgccttatctctggcgtctgcacaagttctggcgcggggtgcggatggagacgccctgggtcgatcgcgcgccgctggagattgtgcgcagcaacatccgcttctcgttacagccatttgatgcgccgccggaacctgagacattaattcgcctgtttgagcatatgcagtcggacgaattggtcttattctccaccgactatccgcactggcagttcgatgaccaggacgcgctgcccgaaggtctgtcccccgatctcgtgcgcaagatcatgatcgacaatccgcatgcaacctatccccgcctgacgtga

SEQ ID NO: 7083 - DNA, 1110 bp, BradyrhizobiumColbertium
atgaatattcagttccgcgagagccaagaagctgaatcccccctgaccgtcaaacccgcaatcgcggactgtgacatccacccggcacgcgccagccgcaccgagctctatccctacctcgccaaacgctggcagcatcacctcgaagtctacggcgtccatgcctatcagggcatgatggagggcccgccctatccgaaggcgcagcccaacgcgtcgcgccgcgatgcctggccgccggaaggcgggccgcagggctcctcgctgtccttcatgcagaagcagctgctcgatcccaacaatgtgcagctcggcgtgctcaatccgctcaacaccgggcagggcatccgcaatcacgagctctcggcggccttatgctcggcgatcaacgactggcagatcgacaaatggacctccaaggacaagcggctgaaagcgtcaatcgtcgtcggcaatgaggacgggctctcggccgccgctgagatccgcgagcgcgccggggacaagaatttcgtgcaggtgctgctgctcagccgcaatgtcgagccgctcggccagcgccgctactggccgatctatcaggcagcggaagaggccggccttcccgtcggcgtccacgccttcggcttcggcggcaacccgatcacgccgtcgggctggccgtcctactacatcgaggagatggtcggacactcgcagtgccagcaatcggcgctggccagtcttgtcctggagggcgtgttcgagcgcttcccgaagctgaagatggtgatgatcgaggccggcttcggctgggcgccgtcgctctgctggcggctcgacaaggtctggcagcggctgcgcagcgaggtgccgcatgtgaagcggccgccgtcggaatatatccgggagcaggtgtggtggaccacgcagccgatggaggatccggagcgacgcgaggacctgttcgacgtgatcaaatggatcggctgggaccggctcctgttcgccaccgactatccgcattgggactatgacgaaccgtctcgcgtcttgccggcgggcgtcagcgaaactaatcgcgaggcgttctacctcggcaacgcgaagaagctttacggcgtttcctga

SEQ ID NO: 7084 - DNA, 414 bp, BradyrhizobiumColbertium
atggcaagacacgtcatcgcgccggtcgacgagcttccgccgggcacgcgaaagtttctggagatcgacgggcggccgatcgcaatcttcaacatcaagggcgagtatttcggcctgatgaaccgctgcccgcatcaaggcgcggcgctgtgcgaaggtccgctgatcgggctggcgcagtcgagcaatcccggcgagatcgaatacaccaagttgggtgagatcatccgctgcccctggcacggctgggagttcgacatccgcaccggccagtcctattgcgatccccgccgcttccgcgtgaaggcctatccggcccatgtcgagccgggcgcgagcgtggtgaaggggccttacatcgctgagacgattccggtgagtgtcgagagcgactacgtggtggtcgagctgtag

SEQ ID NO: 7085 - DNA, 888 bp, BradyrhizobiumColbertium
ttgccctctttgaacggattgcgggcgttcgaggccgccgcgcgccatctcagcttcacgctggcggccagcgagctcaacgtgacccagaccgcgatcagccatcagatccggcgcctggaagaggagctcggcattcgcctgttcgtccggcagaaccgcgcactggcgctgacgccggaggcgcgcgactacctgccgggcgtccgcgccgccttcaacgacctgcgcctcgccaccgatcgcctgctgcgcagggacgacgacaaggtgctgacggtgtcgacgctggcctcgctcgcggcaaaatggctgctgccgcgactcgccgatttccaggagcagcaccccggcatcgacgtgcgcatcaccacctcgaccagcctggtcgacttccagcgcgacaacgtcgatgccgcgatccgctatggccgcggccagtgggcgggcctgcgcgccgactggctgatggcggacgagctgtttccggtgtgcagcccgtcactgctgcgcggcgacaagccgctgcgccggccggaggatctgcgcaaccacgcactgctgcacacctcgaacgcgaacagcgacgattggcggctgtggctgactgcggcgggcctgccctcggacatcgcaagacagcccggcatcaccttcgacatgatcttcatgacgatccaggccgcgatcgacggcatcggcgtcgccatgggacggacgtcctacgtccaggacgacatcgccaaggggcgcctcgttgtccccttcaagatcgcactgccggccgatgccgggttctacctggtcgcaccggaggggcgccgcgaggcgccgaagcttgccgccttcaggcaatggctcctcgctgcaacgcaaaataaggcctga

SEQ ID NO: 7086 - DNA, 204 bp, BradyrhizobiumColbertium
atgtctattctgacccagaattcgatgacaaatcatcatgcggccggcctgctccagcagatcggcgagatcctccacgtctggcacgagcgctatcgcacccgccgcgagctcaccaactggaccgcgcgcgatctccacgacgtcgggctgtcctggtccgacatcgcctacgaggccgacaaacccttctggcgggcctga

SEQ ID NO: 7087 - DNA, 624 bp, BradyrhizobiumColbertium
atgagcacccttcgcctcgaagacctccagcaatattccgagactctgcgcacccggctcggcgaggtgatgaatgtccgcttcgtcgagcctcgcgatagggacgagatccagcattatttccgctcgctctcgacccgctcgcgctacaaccgcttcttcggtgcgatcagcgaactgccgaagggcctgctgcaggagttcctcgaggtcggcgagcgcgatcgtttcacgatcgttgcgacaatgatggtcgacggcttcgacactatcgtcgctgaagcgcgctatgccttgaatgtcgggaccgcgacgctcgagttcggcctctcggtcgacgaccgctggcaaggccacggcatcgccaccgcgttgatgaacaacctcgaatgccgcgctgcagcacttcgcgccgaacacatgttcggcgacacgctgcgttccaacgaggccatggtctcgctcgcgcgcaaatcgggctttggtttcgtcaaccatcccgacgactggaagctcgtgcgcttcgagaaggagatcagcgtctcgccggaagacattccgtgcgcgaactggcgtctcgctgctctttcccgtcaggccgacagcccctcagcctcggcctga

SEQ ID NO: 7088 - DNA, 126 bp, BradyrhizobiumColbertium
atgcgcagcatcgagcccggaatgacgctggagagagagaccacgaaggcaaaaaaggcccggctctgggatgaccaggccgggccgcagtcatgtcaggccgaggctgaggggctgtcggcctga

SEQ ID NO: 7089 - DNA, 831 bp, BradyrhizobiumColbertium
atgaccacggaaaccaccatcgacaccggtacccacgagctcctctgcgtcatccgcgaccgcgtcgccatcatcacgctgaaccggccggaggcgcgcaactcgctttcggatgcgctgacgcccgcgctgcgcacgatgatccgggcctgcggcgagaatcccgctgtcggcgccctgctgctcaccggcgcgggcgaggccttctgcgccggcggcaacgtcaagggcatgggcgcgcatcgcgacaaggcaaagctcgacatgtccttcgacgacagggtcgccgatctccaggagcgacaacggctgctgaccggcgcgctggtgtcggtgcgcaagccgaccatcgccgccctgcccgggcccgcggtcggcgccgggctcgccatcgccatggcctgcgacatccgcattgccgcgctatctgccttcgttgcgaccggctatgcccgcatcgcgctctccggagattacggcatcgcctggctgctcacccgcctcgtcggcaccgcgcgggcacgcgaactgatgttcacgggtgatcgcgtcgatgccgcgcgcgccgaagcgatcggcctcgtcaaccgcgtcgtgcccgacgacaaattgcagaccgaagccttcgcgctcgccaagtcgctggccgaaggcccgcgcctggccctgcgctacatgaaggacaatctcgacgaggccctgctgttcgatttcgaaacggcgcgcgaccacgaagccgaacggctggtccgcctcaccacgacggccgatcacaaggaggcggttcaggccttcatcgagaagcgcaaggcggtgttcacggggaagtag

SEQ ID NO: 7090 - DNA, 702 bp, BradyrhizobiumColbertium
atggaacacccaacatacaagatcgccctcatcgtcggcgtcggcgaaggcctgagcgcgtcgctggcgaggctgctctcagcccagaacattcgcgtcgcccttgctgcgcgcaagatcgagaagctgggcgcgctctgcgccgagaccggcgcgaaagcctatgcctgcaacgccaccgatcccgaggaggtcgagcggctgttcgggctcgtcgagcgcgagatcggaacgccggacctcgtcgtctacaacgccagcggccgcacgcgcgggccgctcgtcgacctcattccggccgacgttgcgcaggcgattgcggtcagcgcctatggcggcttcctggttgctcagcaggcagccaagcgcatgctgccgaacaagcatggcgcgatcctgttcaccggggcttcggccagcgtcaaggggtatgcgcagtcggccccgttcgcgatgggcaagttcgcgctgcgggggctcgcgcagagcatggcgcgcgaattgtcgccgctaggcatccatgtcgcgcatttcgtcgtcgacggcggcatcaggagtgccgcgcgaagcgaaccggcggacaagccggattcgatgcttgatcccgacgcgatcgcgcagagctactggaatgtgttgcagcagccgcgcagcgcctggagctgggagctggagctgcgaccctgggtggagaagttttga

SEQ ID NO: 7091 - DNA, 132 bp, BradyrhizobiumColbertium
ttgggccgcgcgatcacagttccgcagagcgaattgctcctccgcggcgatcatgccgccctgacaatttgcggctttatcgctatccgcgcctggagcatgatcgacatcatcgagcgcggcaagccctaa

SEQ ID NO: 7092 - DNA, 1785 bp, BradyrhizobiumColbertium
atgcacaagccggtcacagcgcagccacaagatatcgcggccgcaccatccggcctgctggcgcccgatacgtcaggcatgaatttctaccgtgccgatccggcgctgacggacctgctccgcatccatctaccggaccatctgttccgccacatcgagccgcatctcgatcgtctcggcgagctcgccggcggccggctcgacgaatgcgcgcggcttgccgaccggcacacgcccattctgcaccagcgcgacaagttcggccgcgacgtgcagtggatcgaataccatccggcctatcgtgagctggagaacgccgcgttcggcgaattcggcatccacgcgctctcgatccgcaagggcatcatgggctggccggacaaatatcccgtggtggccaagcacgccttcaccttcctgttcaaccagaccgaattcggcatgggctgcccgatcaacgtcacggatggctgcgcaaagctgctggcgaacttcggcagcgacgcgctgaaagcgaagtatctggatggtctgacctcgaccgacatgagcaagctgactcagggcggccagttcatgaccgagaaggagggcggctccgacgtcggcacgctgaccacgcgcgcggtgcaggagggtgaccattggcgcctctatggcgaaaaatggttctgctcgaacgccgatgccaaggtggtgatgctgctcgcgcgccccgaaggggcgggccccggcacgcgcggcgtcggcctgttcctgatgccgcgcttcctcgacgacggcacgcagaaccactaccggatcgtgcgcctcaaggacaagctcggcacgcgctcgatggcatctggtgagatcaagctcgaaggcgccatcgcccatgccgtcggcaagctcgaccgcggcttcgtgcagatggcggagatggtgaactcgtcccgcctctccaacggcgtcaaatccgccgcgctgatgcgccgcgcctatcatgacgcgatgaccgtggcgaagaaccgcgtggtgttcggtcaacgcatcatcgatctgcccctcgggcgacgacagatgctgaagatcatgctgccggtcgagcaggcgctgtcgatgagcttcttgacggcggatgcgctcgatcgcgccgaagcgggcagtcaggatgcggcggcgctcctgcgcatcctcaccccgacgctgaaattccgcgccacgcgcgatgcgcgaaaggtctgcggcgatgcgctcgagatgcgcggcggcatcggctatatcgaggagttcgccaccgcccgcctgctgcgcgatgcccatcttgggtcggtctgggaaggcaccggcaacatcgtcgcgatcgacgcgctccgtcgcgcggtcggccgtcatggagcggaatctgcgctatcagctgatcttcatgcccggctcgatgacagtccgtccgtgccgcaggcctggcgcgacaggctgcgcggcctggtcgatcgtgccgtgggttttgcgcgcgaggtcgccggaaaggccgagaacgaggcggatgcgcgtcgcgccacgagcgtcctctatcacgtcgccagcgccgtggcattcgcctgggaggcgcatcgcatccacgccatgcgcggcgacgcgcgccgcttgctgctgtcacgcctcgtgatcgatcatcgcgtgctgccgagcgatccgttccggctggcggaaaataccgcgcaagcgcagattgccgcgctgctgcttggcgacagcgcggccggcatgagcgaggttggcgaactggttctggcggcgtag

SEQ ID NO: 7093 - DNA, 1089 bp, BradyrhizobiumColbertium
atgaaggccgccgtcctctacgaagtcaaccagccgctcgtcatcgaggacatcagcctgccgaagcccggcccgcgcgaggtgttgatccgcaccgcggtcgccgggctctgtcactccgacctgcatttcatggaagggctgtatccgcacccgctgcctgcggtgctcggtcatgagtcggctggcgttgtcgagcaggtcggctcggatgtgacttacgtgaagccgggcgatcacgtcgtcacttgcctctccgtgttctgcggcacctgcgacaattgtacaacgggccgcaccgtgctctgcaccgacaccacggtgaagatgctgccgggcgcctccaaccggatgcagtggtcgaagcccgagaagctgcaccagttcctcaatctctcgtccttcgccgagcagatgctcgtgcacgagaacgccatcgtcaagattcgcaaggagatgccgctcgatctcgccgcgttgatcggctgcggcgtcatcaccgggtacggcgcggtggtgaacacggcgaaggtgacggccggcgagaccgtggcggtgatcggctgcggcggcgtcggcatggccgcgatcaacggcgcgcagatcgccggcgccggccgcatcatcgccatcgacaccaatccggccaagctgcagctcgcgaccaagctgggcgccaccgacatcatcaatccggccgacggtgacgtcgtgaagcaggtgcgcgatctcaccaatggcggcgtgcatcattccttcgaggtgctcggccgcaaggagaccgccgagcaggctttcgcgatgctcgcttccggcggcaccgccaccatcgtcggcatgatcccgttcggtcagaagatcgagctgcacggcttcgacttcctgcgcgagcgcaggatccagggctcctcgatgggctccaatcatttccgcgtcgacatgccgcgcctggtcgatttctacctgcgcggacgactgcacctggaagactggatctcggcgaaattgaagctgtccgagatcaacgagggctttgccaacatgaaagccggcaagacgctgcgcagcgtgatcgtgttcgacaactga

SEQ ID NO: 7094 - DNA, 1473 bp, BradyrhizobiumColbertium
gtggccaaatcggaatggagtttcaagagcgcggtcgagctgtctgctgcactgaccgcaaagaaggtctcggcggtcgagctcacacgggatgcgatcgagcgcatcgaacggcacgacggcaggatcaacgcgatctgcgtgcgcgatttcgatcgcgcgcttgaggcagcacgcgcggcggacgcggcgctggcgcgcggcgagcgcaagccgctgctcggcctgcccatgacggtgaaggaatcctacaacgtcgccggcctgccgacgacctggggcattcccgcgcaaaaggacttcatcgccaaggaggacgcgctgccggtcacgcgggtgaaggacgccggctcgatcgtgatcggcaagaccaacgtgccgctcgggctcggcgactggcagagctacaacgacatctacggcaccaccaacaacccctacgatctcggtcgtacgccgggcggctcctccggcggctcgtcggcagccctcgccgcaggctacggtccgctgtcgatcggctcggacattggcggctcgctgcgcgtcccggcctttcattgcggcatctacgcccacaagccgaccttcaacctcgttgcgatgcgcggccacacgccgccgccactgccgcctctgccgttcgagcgcgacctctccgtgatcggcccgatggcgcgcagcgcggtcgatctctcgctcgtgctcgacgtgatggcgggacccgatccgctcgatgccggcatcgcctaccgtctcgaactgccgccagccaggcacaccgcattcagggatttccgcgttctggtgatcgacaccgatccggtgatgccgaccgacgccgtggtacgcggcagcatcaacgcgctcgcagacaagctcgccaaggcaggcgtgaagatcgggcgcagcagcccgctgctgccggattttgccgcgtcgtctcggctctatatgcgcatgctgatgtcgttcctgggcgcgaccttcgcacccgacatctatgccggcgccagggcggccgcagccgcgctgccggagagcgacaacagtctcgccgccgagcggttgcgcggcatcgcgctcagccatcgcgactggcaggccgcaaacggcgggcgcacgcggttgcgcgcgcaatggcgcgagctgttcaagagctttgatgcggtgatctgcccggtgatgccgacgccggcctttccgcacgaccatgcgccggaccaggagcagcgccgcatcagcatcgacggcacggcgcatgtctacaccgaccagctcgcctggccgggcatcgcgaccctgcccggtctaccctcgaccgcgatcccgaccggctttgcgcccgacggcctgccggtcggcgttcagatcgtcggcccctggctggaggaccgtacgccactgaagctcgcagagctgatcgagcgcgaattcggcgggttcaagccgccgaggatgttcgatgattag

SEQ ID NO: 7095 - DNA, 972 bp, BradyrhizobiumColbertium
gtgaagacttttgccgatctcaccgagcgcgaggtgctcgcggtcgcaatctcctccgaggaggaggacagccgcatctacatgaccttcgccgaggatctgaaggagcgctacccggactcggcgaaactgttcgagcagatggccgaggaggagcgcggccatcgtcacatgctgctggaattgtacgagcagcgcttcggccagcatctgccgccgatccggcgagaggacgtcaagggcttcctgcgccgccgcccgatctggctgaccaagaacctgccgctcgacacgatccggaaggaagtcgagaccatggagctcgaggccgagcgcttctacgccaaggcggccgagcaggccgaggatgtcaacgtgcgccggctgctcggcgatctcgccgaagccgagaagaaccacgagcataccgcagccaggctgaccgacgagatcctcaagcccgacgtgcgcgccgaggaggaccggacgcggcggcgcatgttcgtgctgcaatatgtgcaaccgggcctcgccggcctgatggacggatcggtttcgacactggcgccgctgttcgcggccgccttcgccacgcaccagaactggcagaccttcctggtcggcctcgccgcttcgatcggcgctggcatcagcatgggctttgcagaagcgctatccgatgacggttcgctcacgggacgaggctcgccctggctgcgcggcatcacctgcggcgcgatgacgacgctcggcggcctcggccacaccgcgccctatctggtgcccgacagctgggccaacgcgttctggatcgcgacggcaatcgcctgcgtcgtcgtgttcttcgaattgtgggcgatcgccttcatccgctcgcgctacatggacacgccgttcctccaggccgtgttccagatcgtgctcggcggcgccatcgtgctggcggtgggcatcgtgatcggggcggcgtag

SEQ ID NO: 7096 - DNA, 1149 bp, BradyrhizobiumColbertium
atgaccgcactccccgacattcccctgcccgccggcatccgctcgcgttatgtcgacggcatcaacggcctgcgcgtacatgtgttggaggccggcttcgagaccaagggccgaccttgcgtcctcctgctgcacggctttcccgagcttgccttctcctggcgcaaggtgatgccggcgctagctgcggccggctaccacgtgatcgcgccggaccagcgcggctatggccggacgaccggatggagtgcggattacgacggcgatctcgcgccgttctcgctcctcaacctcgtgcgcgatgcggtcgccctggtgtcggccttcggttaccgacaggtcgatgtggttgggcacgatttcggcagcccggtcgcggcgtggtgtgcgctgatcaggccggacgtgtttcgttcggtgacgatgatgagcgcgccgttcgggggcccgccgccgctgccgtttggcacagtcgatgcgccggccacgcctgcgatcgaagaccccgtgcatcgcgacctcgcggcgctaccgcggccgcgcaaacactaccaatggtactattcgacacgcgaggccaatgccgacatgcagcaggcgccgcaaggcgtgcatgatttcctccgtgcctattatcatcacaagagcgcggactgggccgacaacaagccgtatccgctgcaatcgtggtcggcgcaggagctggcgaagctgccgacttattacgtcatggaccagaaggagacgatggcggagacggttgcgaaggagatgccgtcgccggccgcgatcgccgccaaccaatggctgcctgagggcgagcttgcctattacagcgccgagtattgccgcaccggattccagggcgggctgcaatggtatcgctacggcacgtcggggacgctgaacaacgagatgcaattgttcgcggggcgcagcatcgacgtgccctcctgcttcatcgcaggcaagcaggattggggcacttatcagcgtccgggcgtgttcgaaacgatgcaggcgcgcgcctgcacaaagatgctcggctgccatctcgtcgacggcgccggacactgggtgcagcaggagcagccggccgaggtgagccggctgctgctcgatttcctcgccagggccggcacggcctga

SEQ ID NO: 7097 - DNA, 870 bp, BradyrhizobiumColbertium
atgagcctcaagttttcggtcggcgatctcaccatccatcgcgtcatcgagcaggaaacatcgttcgtcccggcgctggagatgctgccgggattgacagcggaagtgctggccgagaaccggggctggatgcgcgaggcaagggcgctggacgagcaggatgtgctgctgctctgcttccagtcctacgtcgtgaagactccgcaccacaccatcctgatcgacagctgcatcggcaacgacaagccgcggccgcagcggccgaaatggaacatgaagaccgacgacgcctatctgcgtgcgctcggcgccgccggcttcacagtcgacgacatcgacttcgtgatgtgcacgcatctgcatgtcgaccacgtcggctggaacacgcggctgctgaacggccgctgggtgccgaccttccccaaggcgcgctacgtcttcgccagacaggaattcgatcactggtcggcgcagaacgcgaagacggagatcccgcccttcgtcgacagcgtattgccggtggtcgaggcagggcgccacgagctcgtcggcaacgatcaccagatcggcgaccacgtgcgcatcctgccgacgcccggccacacgccgggccatatcgccatcacgatgggccgcagcaaggacgatgcggtgttttccggcgacctcatgcactcaccgctgcagacgctccatccggagctgtcgatcaagttcgacgtcgatccggccgcggcggcgaagacgcgccgcagcttcctggagcgctattgcgacaccgacacgctgtgctgcaccgcgcattttccgtcaccgtcggtgggaaagatcaggcgcaagggcaacgggttcgtctgcgctgcggtgtaa

SEQ ID NO: 7098 - DNA, 612 bp, BradyrhizobiumColbertium
atgaagctcaccttctcccccgcctcacccttcgcccgcaaggtgcgcattgccgcgatcgagctcgggttgatcgacaagatcgagttcgtgcccgcggcggtcacgccgggcaccgccaacgaggactattcgcgcatcacgccgctgaagaagctgccggtgctgatcaccaacgacggggacgtcatcctggattcctacgtcatcgtcgaatatctcaacgagatggccggcggcagcctgatcccggattacggcccgcggcgctggaaggcgaagaccaaccactccctgatcaacggcatgctcgattccatgctgctgtgccgctacgagaagatggtgcgcccgcaaggcctgcaatggcaggcctggtcggacgaccattggaacagggcctggaccggcatggcgcgtttcgagaacatgccggaggtgctgaacggcccgttcgacatctcgcagatcggcctcgtttgcgtgctcggctatgccgacttccgcttcgccgattgcggctggcgcaaggcctatccgaagctcgatgccttccaccagaagatgctggagcggccttccgttaagatctcggtcccgccggcggcataa

SEQ ID NO: 7099 - DNA, 117 bp, BradyrhizobiumColbertium
atggagagtatcccacaattgaacgttttgcttcgtcattgcgaggagcgaagcgacgaagcaatccagagtgtcgccgcagagggattctggatcgcttcgcttcgctcgcaatga

SEQ ID NO: 7100 - DNA, 843 bp, BradyrhizobiumColbertium
atgaagcttgttcgttacggcgagaagggtgcggaaaagcccggcctgatcgacaaatccggccaattgcgcgacctgtcggcgcatgtgaaggacctcaccggcgaggcctattcgccggaatcgctgaagaagctggcggcgctcgatcccgcctcgctgcccgccgtgtccggcaagccgcggttcggcgcgcccgtcaccggaatctcgaaattcgttgcgatcggtctcaactacagcgaccatgccaaggagaccggcgccgagattccgagcgagccgatcatcttcatgaaggccaacacttcgctgtcgggcccgaacgatccggtcgaaaagccgcgcggctccaccaagctcgactgggaggtcgagatcgcagcgatcatcggcacccgtgcgaaatacgtctcggaagccgacgcactcaaccatgtcgccggctactgcgtctgcaatgacgtctccgagcgcgccttccagatcgagcgcctcggccagtggaccaagggcaagtcgcacgacacgttcggcccgctcgggccgtggctcgcgaccaaggacgagatcaaggacgtgcagaacctgtcgatgtggctcgacgtcaacggccagcgccgccagaccggctcgaccaagaccatgatcttctccatggccaagtgcatctcctatgtctcgcagttcatgacgctcttgcccggcgacatcgtcaccaccggcaccccgcccggcgtcggcctcggcatgaagccgccgaccttcctcaatgtcggcgacgtcgtcacgctcggcatcgaagggctcggcgagcagcgccaggagatcatcgcggcttag

SEQ ID NO: 7101 - DNA, 849 bp, BradyrhizobiumColbertium
atgcagtggaaggtgggcagggtcaaaatcaccaaagtggtggaattggagacggtcggctcgacccgcttcatcctgccgctcgcgaccaatgaggaaatctgcaagctgccctggctgaccccgcatttcgccaccgaagaaggccggttgaaaatgtcgatccattcgctggtggtggagacgcccggcaagcggatcgtggtcgataccggccttggcaacgacaagcagggccgcaacgtcccgacctggaacaaccgcagcacgccgtttctggagacgatgacggtggcgggctttccgcccgacagcatcgacaccgtattgtgcacgcatcttcatgtcgatcacgtcggctggaatacgaagctgtccggcggcaaatgggtgccgaccttcccgaaggcgcgctacgtcttcggcaagagcgaatacgaacattggcgcgaccattcgaccgagcccgacaagcaggccgtgttcgccgattccgtgcagccgatcgtcgatgccggcaaggccgatctggtctcaagcgatcaccggctctgcgacgagatcagcatgatcccgaccgcgggccacagccccggccatatgagcattctgatccagtcggacggcgagcaggccctgctcaccggcgacgttgcgcaccatccctgccagatggcgcatctcgactggtcctcgaccgccgattccgaccaggcgcaatccgccgcgacgagggcggccctattcggccgctttgcggatacgccgacgctggtgatcggcgggcacttttcggctggacacatcaggcgcgagggcgaggcgttcaggttcgtggcgctggggtga

SEQ ID NO: 7102 - DNA, 540 bp, BradyrhizobiumColbertium
atggatcatctgacgcgatgcggcgttatcgcgggaaccgaggaagacgccgaagagagagccatgcccgaactgacgatttccgctgagaaggtcgccttcatcatcgagaaggcgcgcgaattcgacgtcaaggagggggagtccgatccggattccggctcgaacccgagcgatgacgatgcgctcgatgttctcgaggatgatggctccgaccctgtggtcaacgagcttggaagcttcatgatcgccttgaacgaggacgagcaggttgatctcgtcgcgctgacctggcttggtcgcggcgacggcacgatcgatgattgggacgatctgcgggcccgcgccgtcgaggcgcggggtgagtatcgcagcccgcgacgtgaaacggtgcactatctgctcggcgatcccatgctgggcgacctgctcgccaacgggctcgaggagttcggcatcgactggaccggcgagcgcaccacggccgattcgtccggtcccagccagcaggacgaagacgagccgaccaagcagcggtga

SEQ ID NO: 7103 - DNA, 783 bp, BradyrhizobiumColbertium
gtggatcttgggatcaagggtcgccgcgccatcgtctgcgcatccagcaaaggcctcgggcgcgcctgcgccttctcgctggcggaggccggcgttcatgtcacgctgacggcgcgaggcgccgaagcgctgaagaaaacggccgatgagatccgcaaagcctatcccgaggtgacggtcaccgagatcgtcggcgacatcacgacgccggccggacgcgaggcggtgctgaaggcctgccccgagccggatatcctgatcaacaatgccggcggcccgccgcccggcgatttccgcaactggacccgcgacgactggatcaaggcgatcgacgccaacatgctcactcccatcgaactgatcaaatcgactgtggacggcatgatggatcgcaagttcggccgcatcgtcaacatcacctcggcggcggtgaaggcgccgatcgacatcctcggcctctccaacggcgcgcgcgccggcctcaccggcttcatcgccggcctgtcgcgcaagacggtgatcaacaacgtcaccatcaacggcctgctgccgggcccgttcgagaccgatcgcctcaccaccaccgcaaagggcgaagccgacaagcgcggcgtcacgccgcagcagatcctggccgagcgcgccaagctcaacccggccggccgcttcggccagcccgacgagttcggctatgcctgcgccttcctgtgcggcgccaaggccggcttcatcaccgggcagaacatcctgctggatggtggtgcgttcccggggacgctctga

SEQ ID NO: 7104 - DNA, 513 bp, BradyrhizobiumColbertium
atgaacagtttcgatcttgccgtctatgccgcgctcgccgtcgcggtcggattcggcttcaggaccggcctgctgcgcagcgccatgaccatcctcgcctatctcatcgccgcgccgatcgccgtggcgctgatgccgctgatcgcgccgcagattgcaggcaatccgaactcgccgatgcttcagaactggatctggttcttcggcatcttcgtgatcgtcggcatgctgttcggccatatcggccgcgtcgcgctgaacgacaccatcggtgaggccgggatcggcgaccggctcggcggcgccgcgctcggcgccatcagggtgggcctcgtcgccaccacgctggtgctggtgttcgaccagatcgtgccggccaaccgccagccgccgtttctcgcgggctcgcatctgcggccgatgttttcggccgccggtcagatgggcttcaagtcgctgccgccggaggccgccgctgcgatcgaccggctcaagcaggagcggcgcatctga

SEQ ID NO: 7105 - DNA, 762 bp, BradyrhizobiumColbertium
atgtcagacttgttcgacgtcagtcaagaaaccatcctcgtcacgggcgcgagccaggggctgggccggcaatttgcccgggtgctcgcggcgcatggcgccgccgtcgcgctcgccgcccggcagaccgagaagctgaagagcctggaggaggagatccgcggcaagggcggccgtgccgttgcggtcgcgctcgacgtcaccgacacgggctcgatcgccaaggctgtcgatgccgtcgaagctgcgctcgggcccgtcaccgtgctgatcaacaatgccggcatcgccatcgagaagctcgcgaccgagcagaccgaggcggactgggacgcggtgatcggcgccaacctcaagggcgcctatttcctcgcgacggaagtcgcccgccgcatgatcgcgcgcaagcagcccggcaacatcgtcaacatcgcctcggtgctcggcaccggcgtgctcaaggcggtctcgccctacgcgatctccaaggccggcatcatccaggcgaccaaagcgatggcgctggagcttgcgggccagaacatccgcatcaacgcgcttgcgcccggctacatcgacaccgaaatgaaccatgcgttctggtcgacgccggccggcgagcgcctcgccaaacgcatcccccagcgccgggtcggtgccgagtccgatctcgacggcgcgatcctgctgctggcgtcacgggcgtcgcggtacatgacagggagtgtggtgacggtggacggcggattcctgctgaattga

SEQ ID NO: 7106 - DNA, 1593 bp, BradyrhizobiumColbertium
ttgactgacacattcgatttcgtcgtcgtgggcgcgggctccggcggctgcacggttgcggggcggctgtcggaggatgctgggacatccgtggcgctgctcgatgcgggcggacgcaacgacacatggcggatcaccacgccattcgggctcgccttgccatacagcgcggccaactgggccttcgacactgtgccgcagaagggattgaacggccgtatcggctaccaaccgcgcggcaagggcctcggcggctcatcggcggtcaacgcgatggtctacatccgcggcaacaaatgggactacgaccattgggccgcgctcggcaacgccggctggtcgtatgcggacgtgctgccttacttcaagcgctctgagaacaacgccgatttcgacggcgaatatcacggcaagggcggcccgctgcatgtcaacaagctgcgctcggacaatccgatccatgacgtcttccatcaggcggcgcgcgaggcgcagttccgcatccgcgaggacttcaatgccgaggaccacgaagggctcggcagctaccaggtaacccagcacaatggcgagcgctggagcgcggcgcgcgcttatcttgatccccacgttgccaagcgcacaaatctgcgcgtcgagacgggcgcgcacgccacgaagatcctgttcgaaggcagccgcgcggtcggagtcgaatatctgcagggcaagcagacaaagcagttgcgcgcccgccgcgaggtgatcctcgccgccggcgccttccagtcaccgcaattgctgatgttgtcgggcgtcggcgacggcgatgcgcttcgagcgcacggcattggcctcgtgcatcatctgccgggtgtcgggcgcaatctgcaggaccatccagatttcgtattcgtctacgcctccgactatccccacttcgttcacgcctcgctcggacggctgccgtccctgctgcgcgcaatccagcgatatcgccgtgaacggcgcggcttgatgaccaccaatttcgccgaatgcggcggcttcctgaagacccggcccgacctcgacatacccgacattcaacttcacttcgtcatcgccatgctcgacgaccacggccgcaagaagcacaaggaggcgggcttctcctgccatgtctgcctgctcaggccgaagagccgcggcagcgtatggctgaagagcgcagatccgctcgcagcgcccatgatcgatccgaatttcctcggcgaggaagaggatgtcgaggcgatggtcgcaggcttcaagacgacgcgacggctgatggagacgcctgcgctgcgcgcactgcagaagaaggacatgttcacgtccgacgtgagaaccgacgacgatatccgcgccatcctgcgcgcgcgcgtcgacaccgtctatcaccccgtcggcacctgcaggatgggggcggacgcgatggctgtggtcgatccggcgctgaaggtgcgcggggtggagggattgcgcgtcgtcgacgcctcgatcatgccgacgttgatcggcggcaacaccaacgcgccgacgatcatgatcggggagaaggcggcggacatgatccgggaggagatgcgatag

SEQ ID NO: 7107 - DNA, 1434 bp, BradyrhizobiumColbertium
gtggacaaatccctgacgagcgccccgctacgggccctcgaagaggccttccacaccatggtcgcgcggtcgcgagacgagccggcgccgggcctcgccgaacgactcgaccggctggcgcggctgcgcgcggtcgttgccgacaacgaggagcgcttccggcaggcgatctcggccgatttcggccaccgctgcgcggtcgagaccaccatcgccgagaccatgctggtgttctcggagatccggcatgccacaaagcacctgaaagcctggatgacgccgcagcgcgtcgcgaccgcgctgcagttcctgcccgcgcgcaaccggctgatgccgcagccgctcggtgtggtcggcatcatcgcgccctggaattacccgctgcagctgacgctcgcgcccgcgatcggcgccattgccgccggcaaccgcgtcatgatcaagccgagcgagcttgtgccccatttctcggcgctgctgaaggagacggtcgcgcgacggttcgacgcgacggagctgctggtgaccggcatcgaggacgagatcgcaaaggctttcgcaagcctgccgttcgaccacctcgtgttcaccggctcgacccgggtcgggcgcctggtcgcggaggccgcggggcgcaatctcacgcccgtcacgctcgagctcggcggcaagtcgccggcgatcatcgacgcctcggccgatctcgacgaggcggccgagcgcatcgcctacggcaagctgctcaatgccgggcagacctgcatcgcgccggactacgtgctggtgcctgagagctccgtgcaggccttcgccgagaaggtccgcgcgcagatgcggcgcatgttcggcgccgatcccgccaacaaggactacacctccatcatctccgataggcattacacgcggctcgaaggcctcgttgcggacgcggcgcagcgtggtgcgaaaatcctgcagccggcgaaacctgacgatcccaactggaaggcccaccgcaaattcccgccgacgctgatcatcggtgcgaccgaagcgatggcggtgatgcaggaggagatcttcggcccggtgctgccggtgctcggcgcgcgcgatccggccgaggcgatcgccttcgtcaaccgccgcgaccgcccgctggcgctgtactggttcggcaaggacgcaagcgcgcgggacgaggtgctggcgcgtaccgtctccggcggcgtcacgatcaacgattgcctgttccatttcacgcaagtgaaccagccgatgggcggcgtcggcgcgtccggcaccggcgcctatcacggcgaatggggcttcaagacctttagcaagctgaagccggtgttctatcgctccaagttcaaccgcctcgccgatctctatccgccctacggcggcaagatcgcagggctggagaagttgatgcggtttatgtcgtag

SEQ ID NO: 7108 - DNA, 74 bp, BradyrhizobiumColbertium
cgcggggtggagcagcccggtagctcgtcaggctcataacctgaaggtcataggttcaaatcctatccccgcaa

SEQ ID NO: 7109 - DNA, 1119 bp, BradyrhizobiumColbertium
gtgaccatgcgcttcgacaacgtgtttcagctcggcgtcaaggaattgcgcggcctcgtgcgcgaccccatgctgctcgtcctcatcttctattccttcacgctcgcgatctatgccggggccaaggcgctgccggaaaccctgaaccgcgccgcgatcgccatcgtcgacgaggaccgttccccggtttcgagccgcatcgagctggcattcacgccgccgtacttttccgagccgcgcctgatctcgcaatatgaaatggaccggcggatggacgcggggctcgacacctttgcgctgaacatcccgccggagttccagcgcgacctcttggcccggaagtcgccggcgattcagctcaacatcgacgcaacgcggatctcgcaggccttcaacggcggcggctatatcgagcagatcgtcaacgcggagatcgcggagttcctggcgcgggcgcgcaatgcgcagaccgcgccgatcgagctggccttgcgggcacgcttcaacccggagctgaagaaatcctggttcggcgccgtcgacgagctcattacctcgatcaccatgctctcgatcatcctgacgggcgcggcgctgatccgcgagcgcgagcacggcacgatcgagcatctgctggtgatgccggtcacgccgctggagatcatggtcagcaaggtgtggtcgatggggctggtggtgctggcggcctccgcgttgtcgatcgtcttcgtggtgaagggatggctggcggtggcgatcgacggctcggtcgcgctgttcctgctcggcgcggcgctgcagctgtttgcgaccaccagcatgggcatcttcctcgccaccgtcgccggatcgatgccgcagttcggactgctcctgatgatgaccctgctgccgctgcagacgctctcgggcagcatgacgccgcgggagagcatgccgcaattcgtccaggacatcatgctggcggcgcccaacacgcatttcgtgatgctggcgcaggcgatcctgttccgcggcgcgggcctggaatcggtgtggccgcagctcctcgcgctcgccgtgatcggcagcgtcttcttcgtgatcgcgttgcggcggttccgggcgtttctgacctag

SEQ ID NO: 7110 - DNA, 2775 bp, BradyrhizobiumColbertium
atgaccacgactgccgcagccgaagcaccggctgccgccggcagggtggtgcatctggacggcgtgggcctgagctatggcaagagccgggcgctggagtccatcacgctcgacctgccgtccggctgcatggtcgggatcatcggccccgacggcgtcggcaagtcaagcctgctcgccctgatcgcgggcgcgcgcgcgatccaggagggccgtatccacgtgcttggcggcgacatggccagcgcgcggcatcgccgcaccgtctgtcccgagatcgcctacatgccgcagggtctcggcaagaatttgtatccgacgctgtcggtgttcgagaacatcgacttcttcggccgcctgttcggacacggcagggcggagcggcacaggcgcattgccggcctgctgcgcgataccgggctcacgcccttctccgaccggccggcggaaaaactctccggcggcatgaagcagaaggtcggcctgtgctgcgccctgattcacgatcccgagcttttgatcctggacgaaccgaccaccggagtggacccgctgtcgcggcgccagttctgggaattgatcagcgcgatccgcaacagccggcccggcatgagcgtgatcgtctcgaccgcctacatggaagaggctgcgcagtttgatttcctgatcgcgatgaatgccggccgcgtgctggcgaccggcacgcccgccgaactgaagcgacagaccggcgccgatacgctcgaccaggccttcatccgtctgctgccggaagcggatcgcggcaaccatagcgacgtcgtgattccgccgcgcggcccggatcatgatgagatcgcgatcgaggccgatcacctcacccggcgcttcaacagcttcgttgccgtcgacgacgtcagctttcgcatcaggaagggcgagatctttggcttcctcggctcgaacggctgcggcaagaccacgaccatgaagatgctgaccggtctcttgcccgtcagcgaaggcaccgcgcggctgttcggcaagaccatcgatgccggcgacatgtcggtgcggcggcgcatcggctacatgtcgcagggcttctcgctctattccgagctaacggtcgcgcagaacctcgatctgcatgcgcgcctgttcgagctgccggcggacaccatcaccgcccgcatcgacgagatgatcgcccggttcgatcttgccgacatcgcagacgccctgcccgatgcgttgccgcttggactgaggcagcgattgtcgctcgcggtcgccatgatccatgcgcccgacatcctcatcctggacgagccgacctccggcgtcgatcctgtcgcccgcgaccgcttttggcagatcctggccgagctctcccgcaaggacaacgtcaccatcttcgtctcgacccatttcatgaacgaggccgagcgttgcgaccgggtctcgctgatgcatgccggcaaggtgctgacgtcggactctcccgcagcaatcgtggctgcgcacggcaccgagacgcttgagcaggccttcatcgcctgcctggaaggggcgatcgccgatacagcggagccggcggggcagcaggctgcagccccgccgccgcccccgccggcagtcgccgcgccgccccggcgccgcaacgctgctttcaatccgacgcgcatgctcgcctattcccggcgcgagacgctcgagctgcggcgcgacccgatccgcgccacgctcgcgatcctcggcagcgtgctgctgctgttcgtgctcggctacggcatcagcatggacgtcgagaacctgactttcgcagtgctcgaccgcgacgacacagcgatcagccgcgactacagcctgcagatcgcgggctcgcgctatttcacccagaaagctccgatcgcggactacgccgatctcgaccgccgcatgcgcgccggcgagatcggccttgccatcgagttgccgccgggatttggccgcgacgtcagccgcggccgccatgtcgagatcggcgcctgggtcgacggcgccaacccgacgcgggccgaaacgctgcggtcctacgcacaggcgattcatgctacgtggctcgcgcagaagggccgcgaactctatggcgaggcggcggtcgccggcgcctatcaactccagttgcgctaccgctacaatcctgatgtcatcagcgtcgtcgccatggcaccgggcatcatcccgctgctgctggtcctgatcccggcagtgctcgccgcgctggccgtggtgcgcgagaaggagctgggctccatcgtcaatttctacgtgacgccggtgacgcggctggagttcctgctcggcacgcagctgccttacatcgtgctggcattcgccaatttcctgctcctggtcggcttcgcgctcaccgtcttcggcgtccccttcaccgggagcttttcgacctacgcgctcgccgcgctgctctacgtcacggcaaccaccggcatggggctggtgatctcggccttcatgaacagccagatcgccgcactgttcggcaccgtcctgatcacgctgattcccgccatccaatattccggcctgattgatccggtctcgtcgctccagggcctgggagccgcgatcggacagctctatcccaccacctacttcgtcacgatctcgcgcggcacattctccaagggcctcggcttcgacacgctccacaacgatctgctggcgctcgccgtcatggtgcccattctggtgatcgccggcgcaatgctgctgaagaaacaggcccggtga

SEQ ID NO: 7111 - DNA, 1068 bp, BradyrhizobiumColbertium
atgaacttcagaccgggtcgcgtcgtcgccgtgctcgccttcctgctcgcggccggcggttactattattggcagcaccgcgacgccgacgcgctgccaccgggtttcgctcgcggcaacggccgcatcgaggcagtcgagatcgacatcgccacgaagaccccgggacggattcgcgagattctggtgaacgaaggcgatttcgtcaccgccggccaggttctggcacgcatggataccgagcagctgcaggcccagcgccgccaggccgaggcgcagctgcaacgcgcgacaatcaacgtcgagactgcgaagagccttgtgaaccagcgcgaagccgaacgcagggcggcggaggccgtggtcgatcaacgcatcgcccaactcgacaccacgagccgcaagctcgatcgctccgagcagttgatcaagtccaatgccgtgtcccagcaggtcctggacgacgaccgctcagcaaacgccacggcaaaggcggcgctcgcagctgcgcaggcccaggtcgcggcatcggaagcggcgatcagttcctcccgcgccatggtgatcgatgccggcgcggcggtcgatgcggcaaaggccgcgatcgaaagcatcaacgccgacctcgacgacagcgtgttgaaggcgccgcgcgacggccgcgtgcaatatcgcgtgtcgcagcctggcgaggtgctcgccgccggcggccgcgttctcaacatggtcgatctcggcgacgtctatatgacattcttcctgccgacggccgctgccggccgcgtcgcgatcggcgccgaagtccggctcgtgctcgacgccatcccgcaatatgtgatccccgccaaggctaccttcgtcgccgacgtcgcgcaattcacgccgaagaccgtcgaaacggaggaggaacgccaaaagctgatgttccgcatcaaggcgcacatcgcccccgatttgctgcgccagcacatcgagcatgtgaagaccggcctgcctggcatggcctatgtgcggctcgacccgggcgcgcaatggcccgacaacctcaagatcaggctgacgcgatga

SEQ ID NO: 7112 - DNA, 1206 bp, BradyrhizobiumColbertium
atgtgccggattattatgcgggccgcgttggcggccgcactcacagcggtcgcgatcagcccatccttcgcccagcaagcaccgctcaagatcggcgtgctcgccgacttctcgtccgtctattccgacatcggcggcatggggaatgtcgaagccaccaaaatggccatcgaggacttcggcggtcagatgttcggcaaagcgatcgagatggtcagcgccgacgtgctcaacaagcccgacgtcgcctccaccatcgcccgcaagtggtgggagaccgaaggcgtggacatgatcatcgacctgccgacctcggcgaccgcgctcgcggtgatggagctgtcgaagcagtatgagaagatcatgatcgtgacggatgcggcgagctccgatatcaccgggaaatcctgctcgccctacaccgcgcactggacctacgacacctacgccaacgcgcacacggtcggcagcgccatcgtcaagaacggcggcgatacctggttcttcctgaccgccgactacgtgttcggccattcggtcgagcgcgacaccggcgatgtcgtgaaggcctccgggggcaaggtgctgggcagcgtcaagcatccgctcaacaccgccgatttctcctcgttcctgcttcaagcccaggcgtccaaggccaagatcatcggcctcgcgaacggcggcggcgataccatcaatgcgatcaagcaggccggcgagttcggcatcgtcgccggggggcagaacctggccgcgatcgtgatgttcatctccgacgttcacagcctcgggctcaagctggcgcaaggcctgatcgtcacggaggcctattattgggacctcaacgacaagacccgcgccttcggcaagcgcttcatggaacgcgtcaagcgcatgccgaccatgaatcaggccgccacctacagcgccacgctgcattacctcaaggcagtgcaggccgccggcacccgcgacaccaagacggtgatggcgaagatgcgcgagctgccggtgaaggacgctttcaccgaacacggcgtgctgcgcgaggacggccgcatggtgcacagcatgttcctgttccaggtcaagaaaccggaggaatcgaaggggccgtgggattactacaagctgctcgctgaagttcccgccgaccaggcgttccggccgctgaaggacggcggttgcccgctggtgaagtga

SEQ ID NO: 7113 - DNA, 117 bp, BradyrhizobiumColbertium
ttgcgtaacggcgccacgtccccggccgaattgacgcggccgatcgtgccgactacgtttcgcgcaagcatcggaagctctcgattgcaatggccgagccactgctgtcggcggtaa

SEQ ID NO: 7114 - DNA, 1614 bp, BradyrhizobiumColbertium
atgaccggcgacaccgcagccaccatctcgaaagcgcgcgagcattcgatcggcgatctgctgcgccgatcggcgggccgcgagccgaacaagctcgcggtgagctgcggcgatgtgagctggacctttgcggaaatggacgcaatctgcaaccggcttggccgcggcctgctcggcctcggcgtcaagaagggcgaccgcgtcgccgtgctctcgcgcaattcgcatgccttcgcggcgcttcgtttcgcactggcgcggatcggtgcggtactggtgccgatcaacttcatgctcaatccggacgagatcaatttcatcctgaaaagctccggcgccaagctgctcgcgacgggtcccgatttcgtcgagcccgcgcgcgcggccagcgccaaggattgcgccgtcgagaagatgatctggctgccgggcgaggatccggccgctgcgcctgcgggcctcaccacattcgccgatctcctcgaccccgacggctcgtttctggacgcgtcggtcgacagccgcgatctcgcgcagatcgtctacaccagcggcacggaatccctgcccaagggcgcaatgctgacccatgaagccgtgatgtggcaatatgtcagctgcatcatcgacggcggcatgaacgctgaggacaagttcctgcatgcgctgccgctctatcactgcgcgcaactcgacgttttcctgggcccgcagatctatctcggtgcatccggcgtcatcacgggcaagcccacggccgataatattctggccctcatccaggcgcacaagatcacctcgttcttcgcgccgccgacgatctggatcgcgatgctgcgctcgccgaacttcgacaagagcgacctgtcgacgttacagaagggctattacggcgcctcgatcatgccggtcgaagtgctgctcgagctccagcgccgcctgccgaacgtcaagttctggaatttctatggccagaccgagatcgcaccgctcgcgaccgtgctgcggccggaggaccagttgcgcaaggccggctcggccggcaagccggggctcaatgtcgagacgcgagtggtcaacaccgcgatggaggacgtcaaggtgggcgaggttggcgagatcgtgcaccgctcaccgcacctgctctcgggctattacaatgatccggtgaagaccgcagccgcgttctccggcggctggtttcactctggcgatctcgccaccatcgatgaggaaggccacatcaccgtggtcgatcgcgtcaaggacatgatcaagaccggcggcgagaacgttgccagccgcgaggtcgaggagatggtctaccgcatccctgaggtttccgaggtcgccgtggtcggcctgcccgatccgcgctggatcgaggcggtgaccgccatcgtcgtggtcaagagcggcgagacgctggacgaggacgccgtcatcaagcattgcgccgcccagatggcgcatttcaaggtgccaaagcgggtcatctttgttgatagtctgccgaagaatccgagcggcaagctgctcaagcgcgaactgcgccagcgcttcgtgggtggcgagacgctcgacaaggcggtgcagacgagcttcggcacctga

SEQ ID NO: 7115 - DNA, 1008 bp, BradyrhizobiumColbertium
atgaaagcctggcagatcgcgagcgactggtcgatcgaaggaatggagctggccgatcttcccgagcctgcgcccggatccggccaggtcgcggtgcggatgaaggcggcctcgctcaactaccgcgacctgctgaccgtgcagggcaagggcagcgtcaccagattgcccctgatcccgttctcggatggcgcgggcgaggtggtcgccgtcggcgagggcgttacgcgcgttgcggtgggcgatcgcgtctgcccgatgttcttccagtcctggatcgacggaagagtttccgcgaccagccgccgttacgcgctcggtggcacgcggccgggggttctgcaggaagtgatggtgctcgacgccgagggcgtcagccacattccatcgcatctgtcgttcaaggaagctgcgacgctgccctgcgccgggctgaccgcctggcgggcgctgtttgaagaagcaaacgtcaagcccggtgacaccgtgctggtgcagggcaccggcggcgtctcgattttcgcgctgcagttcgcgaagctcgccggcgcagccgtgatcgtgacgtcgtcgagcgacgagaagctcgaacgttcgagggcgctcggcgccgaccacaccatcaactatcgctcggttccggaatggggcaaagctgcggcagcgtggaccggcggcggcgtcgaccatatcgtcgaggtcgggggcaaggacactttctcccaatcactggaggcagcgcgcgtcggtggcaccattctggtgatcggcatactcacgggcgtctcgcagcagatcgcgatctcgagcctgttcgccaagaacctgcacgtcatcggcctctcggtaggcagccggcgcatgttcgaggccatgacggctgcgatcggacgcaacagcgcgaagccggtgattgatcgggcgttcagcttcgataccgttccggacgcgctgcgtctcatgcagcagggcggacacttcggcaagatcgtggtcgagttcgcctag

SEQ ID NO: 7116 - DNA, 690 bp, BradyrhizobiumColbertium
atgggccaacgtccgctggagatcgcggccggcgacatcaccataggcgacccctcgatcaagggcgcccgcgtcacccagatcgagcatggcaatttccagaccgcgctcctgccgcgcaaggcgctgttgcgggtgtgcccgaacgccgaagacctgattgcgcaatcgatccccggcgcgagccccatcgcgtcgatgttcctgcgatactatgatctcgcgcatgcttatgcccgcgagctcgcgcccgcggagctcgatgcggtctcacagcatctgttcgacctgtcggtgctgatgatcggagcccgcggcgatgtcgctgaggaagctcggacgcgcggcctcgccgcggcgcgcctcgaaaccctcaaggccgatatcctggcgcagctggacagccctgcgctgtccctctccgtcctgtcagcagcgcaccgtgtcagtccacgcacgatccaactgctgttcgagcaagccggcatcacctatagcggcttcgtgctggagcagcggttgctgcgggccgaacgtctgctgcgaaaccctgccatgcgcacgtgcaagatcatcgagatcgcgcatcttgcgggatttcacgacgtctcgtacttccatcgcgtgtttcgccggcgcttcagacaaacgcctgacgatgtcaggaagctcgctggcgacgccggctag

SEQ ID NO: 7117 - DNA, 852 bp, BradyrhizobiumColbertium
atgacacgtcgtgtgcgcaatctgttgccggttctgctggcgcttggtcttggtgcggtttgcgccgccgatgcatccgccgccgatcttgcgctgaaggcgccgcctgcgccgccgccggccgccttcagctggacgggcttctatgccggcgttcacgccggatacggctctggcgaggggaatgctgcgtcagtcgatccaggcgcgcttctggcgctgtttcccggggtgaacaatctgacctcgacggcatcggccccgtttacgttcggcgtcgaccggtccggttggctgggtggattgcaggctggctacaattggcaaaccggccattttgtcgccggtgttgaagccgacgtcagcgctgccgggattggcgcacgcgaatcgagctcgtatgcgttgcgcccggttttcctcgtcggcgatttcgacaactacaccggtacggtgacggtgacccagaacgtcgattatctcggtacgctacgcggccgccttggctacgccagccacaactggctgttctacgcgacaggcggcctcgcctgggcgcatgtcaaggcaagtctcgacagcacgcatgtcagattgaccaacaatttcccgatgccggggcttccgggcgcactggatggtcatgcctcggcaagcggttacaaaatcgggtacgcagtcggcggcggcggagagtgggcgttcacgccgcattggtcgctcaaggcggagtatctttatctcaaccttggtcgtcagctctccttgtccattcccgggaccagcctgatgcccagcgacatcgagcttcacaccttcaggatcggtttgaatcggcagtttgcgccgtga

SEQ ID NO: 7118 - DNA, 1200 bp, BradyrhizobiumColbertium
atgacatcgcgcccttcctcgtcccgcatctggcccctgttcgcgctcaacttcttcatggccgacatgcagtcgggcatcgggccgttcgtgggggtctttctccaggaacgcggctgggcgaccggcctgatcggcacagcgatgacgatcggcaacgttgcgggcatgctggtgacgacgccgatcggcggcttcatagattccagtcgcaacaagcgaatgtgggtcgtcatccccggcatctgcgtggtctcggcctctgcgatcatcctgatctcgcagaatttctgggcggtgacgttttcgcaagtcgcacaatcgctcgcgagcgccgcgatcgtgccggcggtcaccggcatcacgctcggcattgccaagcagaagggcttcaacgagctcaacggccgcaaccaggcctacaaccatgccggcaatatggtcggcgccgcgctgtcgggctacctcggctacaaattcggctatgtcgccgtgttcgcactggccgccgtcttcggcgccatcgcgatcgcctgcgtcatgatgattccggccaagacgatcgacgaccgtgccgcgcgtggcagcaaggaggatgatccggacagcgcgccggacgcgttcacgatgctgctcaagcaccgggcgctgctcgtactggcactctcgctggcgctgtttcacctcggcaacgcagccatcgttccgctctacggacttgctgcggtggcggagggacaggccaacggtcccagcttcgtcgcgaccaccgtcgtgatcgcacagggcgtgatgatcgtgacctcactgattgcaatgaaggccgcgagcaggcgcaactactggccgatcatcctgttgtccttcatgttcctgcccatccggggcgtgctcgccttcttcgtcacgggatggtggggagtcgtgccgatgcaggtgctcgacggcatcggcaccggactgcagacggttgccgttcccggcatggtcgcgcgcgcgctcaacggcacgggccgcatcaatctcggccagggcgccgtgatcaccgtacagggggtcggcgccagcttgagccctgcgctcggcggctggatcgcgcaatggatcggctacggcccgaccttcctgctgctcggcggcttcgggctcgcctccatggcgctatggctggcgttcggagcggcggtgaagaaatactga

SEQ ID NO: 7119 - DNA, 612 bp, BradyrhizobiumColbertium
atggagccgagctttgcgatcgggcagcgcgcgctgctggtgcctcaaaacgacggctgcgtgatgtgggattgcattccgctcgagaccgacgacgccatccgatatgtcgcagcactcggcgggctgaaggcgatcgcgatctcgcatccgcattattatggcgcggtcgccgactggagcgacacgtttggcggcgtgccggtctatctgcatgccgacgatcgcgccttcgtcacgcgacctcatcccgcgatcgtgcattggaccggtgaccatcatcgcatttccgacgacgtgctgctgctgcgcaccggcggccatttcgccggcgccaccgtgctccactatgcacacggcgccgacgggaagggcgcgctgctcaccggggatatcgcgcaggtgacgatggaccggcgcttcgtcagcttcatgtactcctatccgaactacatgccgctcaatgccgctgcggtgcggcgggtcgcggcagccgtcgagccgcttgcgttcgatcggatctacggcgcctggtggggccgcaacatcgctggcggcgccaaggcggcgtttgctgcgtcggtcgcacgttatctggccgccattgcctga

SEQ ID NO: 7120 - DNA, 1017 bp, BradyrhizobiumColbertium
atgacggcacagcgggactacgagatattcgatgccggccacgtcgcactccggtcggggaccgtctttccgtcgctgaagctcgcctacaagacctacggcacgctgagccccgccagggacaacgtcatcctctacccgacctcgttcagcgcgcagcacaccgacaccgaatggctgatcggacccgatcgcgtgctcgatccgacgcggtacttcatcatcatcccgaacctgttcggcaatggcctgtcatcttcgccttcgaatacgcccgcgacctttcccgaggtgacttatcacgacgccattgcggtccagcaccggttgctcacggaaagcttcggcatctcaaagctggccctcgtctatggctggtcaatgggcggcatgcaggcctatcactgggcggcgctgcaccccgacatggtcgagcgcgccgcgatcgtttgcggcagcgcccgctgcgcgccctacaatcacgtcttcctggaaagcgtgaaggctgcaatcaccgccgatcccgccttccgcgacggacgcttcgccgaaaggcccgtcgccggctatcgcgccatgggtcgcgtctacgccggctgggcgatgtcgcacggcttttatcgcgacgagctctggcgcgaggcgggcttcacttcgctggaggattatctcgtccgcgcgtgggacgcgacttttgcgcggcgcgatgccaacgatctcctggcgcagatcggcatctggcagaatggtgacgtcagccggtgccggacattcgggggtgatctcgatcgtgccctggcggcgatcaaggcccacatgctgctgatgccgggcgcgaccgatcgctatttcgacctccgcgacaacgaggatgagctcggccggctggtcaatgcgaggtcggcggtgctgcatccgatcccgtcactgcacggccatcgcgccggcaatcccgtcaacaatccgcgcgatcaggctttcatcaaggccgaaatcgccgagcttctgagcaggtag

SEQ ID NO: 7121 - DNA, 948 bp, BradyrhizobiumColbertium
atgagcgacgcaaccgttccagacactggtcatcgcctcaagccgctgacgccggccatgctacgcgaattgtcggtgcgctcaaacctcaggggggcggcgcagagcctaggccattacggcgtgatcttgctgatgggcgcgctgatctggaagatttcctcgagctggggcgtgctctgggctctgcccctgatggtggtgcagggctatgtcgtcgccttcctgttcatggcggtgcacgagaccgcgcacaagaccgcattcaggagccgcggcctcaatcttgccgtcggccatctctccgccttcatcatcggtctgccttacgaatattactgcctgtttcactgggatcatcaccgctacacccaggatccggccagggatcccgagctgatcgtcggggtgaagccgacgtccgacacgcagcttgcgctggcctatagcggcctgctccaggtcgcgggccggctgcagctgatgctcggccatgcgctcaccggcaaggtcaccgtgccgtggatccccgagagcaagcgcgcgacaatcgtgacggaggcgcgaatctatctggcgctctatgccctgctgctcgcgctttcattctggttctcctcagcgctgctgctctgggtctggatcgtgccgctgatcatcgggcagttcttcctgcggccatacctctacgccgagcataccggctgcgaccagacccgcagcgccttccataacactcgcacgacctacaccggcgggatcgtcaaatggtttgcgtggaacatgccctaccatgtcgagcaccacgcttatccatcgattccctttcacgcgcttccgaggctgaacgggatcgtcgatggcgagatcgtccatcgtggtcgcggctacatcagaacgacgcgcgaaacctgggcctggtttcggcggcagcggcagaccggctag

SEQ ID NO: 7122 - DNA, 1233 bp, BradyrhizobiumColbertium
atgagcgcgacaagaggccgtcttctggtggtggacgatgatctggtgcagcgggttctgatcagcaagatcggctcgaagctcggctatgattccgtcgttgttccttcatacgaggctgcaatcgagcttctggcgcgcgaagccttcgacatcatggcattggacctgtcgctcggcgagcgggacggcgtggagctgttgcggttcgtcgccgagcgggatctccgcgcgatgtcgatcgtgatcatcagcggttgcgacgatcgcatcatgaaggcaacgcgccgggttgccacaggactgaagctgtcgctcggcggatgtctgaccaagccgctcgatctcaaccgcctgcgctgtgcactcgaattgccgcggcgcttgccgctggctgcggcgtcggcctcgccagcgcctcggatcacgcgggacaggattgcgcgtgggctcgccgagcgcgagttcttcgtggagtatcagcccaaaatcgcccttcagaccgggagagtcgtcggcgcggaagccctcgcgcgctggcgtaccgccgagttcggcatggtctcgcccatggtcttcattccgatcgccgaagaggctgggctcatgggcgaggtgaccgattgcatactctcatcggcgatgtcgcagggccgcaagctgatcgagcgcaatcccggtttcaccatcgccgtcaatatctcgggttcattgatgtcggatctgaccttgccggaacggatcgaggcgatcctgcgccaggagggcgtgcctccgtcctcgctgacggtcgagatcaccgagaccaccgcaatggccgacgtcgaccgtgccaacgacattctggtgcgtctgcggctgaagaagatcggcaccgctatcgacgatttcggcaccggctattcgtcgctggctgccctggcgcgactgccgttcagcgaactcaagatcgaccaatccttcatcaaaggttgcgaagccgatgacgacatgatgaagatcgtcgatgcctccgtcgcgcttgcgaaggcgttcaatatgaaggtcgtggccgagggggtcgagagctcgcacgcgcttgaaatcatccgtcgggcaggctgcgacgtcgcccagggctactacttcgcaccctcgctacggcgttcgcgcgccgaacgatggatattggagcgcaattctcttgcggacgagcaggctgcgtccgcaacggccgctgctctagcgagctga

SEQ ID NO: 7123 - DNA, 255 bp, BradyrhizobiumColbertium
atgtttcgtaagcttgcacttggtctgatcgccgctgcttcgctcggcgttgccgctctcgcccccaccgccgcttcggccggcggcttccatggtcacccctggggtcatcatcactactggggtcccggcttcgggttcggcggtctctacgtcaacaccggcatcagcaattgctaccaggagcgcctggtccggacccgtcatggcctgcgcgtgcgcgtcgtgaatgtctgcgcctacgggatctactga

SEQ ID NO: 7124 - DNA, 975 bp, BradyrhizobiumColbertium
atgcgcgcgagccggatgctgtcgatcctcaccactctccaggccaggggccgggtcaccgcgcccgaactggcggacgcctttgaagtctcggtgcgcacgatctaccgcgacatcgatgcgcttgccgcgtcaggcattcccgtttacgccgaccgcggcgcggacggcggctatcgcctgctcgatggctatcgcgtgcggctgaacggcctgtcgcagagcgaggcaggcgcgctgttcctggcgggattgccgggcccggcagcagcgctcgggctcgacgcggcgatgctcgcagcgcagaacaagctgatggccgctctacccgccaatttgcgcgaagacgccggtcggatgcaggggcgttttcacctggacgcaccgacctggttcggcgaggcggaaaacccaaagcacctgcgcgcgatcgccggggccgtgctgcgagacacgctgatcaagatccgttatcggagctggcgcgcggagaagcagcgccggatcgggccgctgggcctcgtcctgaagggcggcagctggtatctcgccggcgatgtcgacggcagcgtgcgcacctatcgcgtcgcgcgcgtgctcgactgcacggcgctcgacgaccgcttcgatcgtcccgccggcttcgatctcgccgcctattggcgggccgcgacgctgcggctcgaggccgagatgcatcccaatgtcgcgaccgtccggctgtcgccgttcggcgtcaaactgctcgacgcgctgagccagccttacgtcaaggcacgcatgcagcttgaagagactcccgatgcagatggctggcgcatcgcacgagtgccggtcggcaagacctcgtggcacgccgcggccgaattgctccggctcggccccgaggccgaagtgctggagcccgccgatctgcgcgacaagatggccgagctgatcaaggccatgggcgtgcgctatcgcgcggtgcaataa

SEQ ID NO: 7125 - DNA, 645 bp, BradyrhizobiumColbertium
atgaccgatccaaaccgcatcacgctgtactattcgccgcagacgcgggccaccggcacacggatcctgctggaggagctgggggctccctacgatctccacgttctcaacatgaaggccggccagcagcgcgagcccgcctacctcgccatcaatccgctcggaaaggtgccggcgatccgccacggcgaggcgctggtgaccgagcaggtcgccatcaccatccatctcgccgacctgtatccgcaggcaggcctcacgccggcgctgaacgatccgctgcgcggcccgtatctgcgctggatcgcctattacgggtcatcgttcgagccggcgctgatcgacaagttcatgcagcgcgagccggcgccggtcacgcagtcgccctacgcggactacgacaccatgctggctgcgctcgaggcgcagctgtcgaaggggccgtatctgctcggcgagcgaatgaccgccgccgacgtgttgtggggcgtcgcgttcagctggaccatgatgttcggcatcgtgcccaagaaggacgtgttcgtccgctacgccgaccgcatgacggcgcggccggcgttccagcgcatcaatgcggaggacgcggagatggcggcgcagcatgccaaggcggcaggtgggtag

SEQ ID NO: 7126 - DNA, 786 bp, BradyrhizobiumColbertium
atgtcggacacagcggacgcggcgacaggcccgctgctcgaaatcatcggcgcacgcgccaccatccgcctcaatcgaccccaacacctcaaccggcttcaggcggaggatctcggcgaactgacaagactgttcgaccggatcgagaccgatcctgatattcgcgtgctggtgctgaccggcaccgggcgggccttctccgcgggttacgacctcaattcggtggcggagcgcgcggtcagtgcgaacgagcagcagagcgcgggttccgctttcgaggtggtcgtcaaccggctcgaggatctcggcgtaccaaccatctgccgtctcaacggcggtgtctatggcggctcgaccgacctcgcgctcgcctgcgatttccgcatcggcgtcgataccgcggagatgttcatgccggcggcgcggcttgggctgcattattacccgagcggcatcaaacgctacgtgagccggctcggcctggacagtgcgaagaagctgttcctgaccgcgcagaagatcagcgcgccggaaatgctgcgcatcggctatctcacggccatggtgccgttggaatctctggacgaggaggtcgacaagctcgctgccatcctcgccggcaacgccccgcaggcgatgcgcggcatgaagcgcgcgatcaacgagttcgcccgtggcgagctcgatgagcgagccgccgaccagcgtcaccgcgacagcatgcgcggcgacgagatcaaggaaggcatcaaggcgtttgccgagaagagagcgcctcggttttga

SEQ ID NO: 7127 - DNA, 219 bp, BradyrhizobiumColbertium
atgcgtgcactcctcatcatcctccttctggcaatgctggcggccgccggctacttcgcctattccgcaatggtgggcgaaggtgagccgattccgacggaaggctacgtggcgctggcgctgggcgcggggttttccgtcatcgtcggagtcgggctgatggtgctgctgttcttcagcagccgccgcggctatgacgagccgccacatttcaggtag

SEQ ID NO: 7128 - DNA, 1389 bp, BradyrhizobiumColbertium
gtgatcaagaccaatcagcagcaggtcttcctctacgtcgtgctgaccctgctgttgtcgttcgccaccgtctgggctggccgctccttactgcacaattcggaaacgctgacctttgccgtcggcgctcccaacggtgacgaggcgctgttcgcggccaagctggccaccgtggtgcagaacaacgcttcgcgcttgcggatcaaggtcgtcaacaacgcagacaatgccaaggcgctcgtgcagttcgaccgcaagcaggccgacctcgccgtcctgcgcaccgacgccaagatcccgctgcgcgcacgcacgctcgcgattctcgagcatgatctcgtcctcctgttcggtcccggcaacaagaagatcaagtcgttggcggagctgaagaagaagaaggtcgcggtggtctccgacaacgaatcctcgctcgccttcgtccgcagcatcctcgacgtcgccgacggacccgatgccacgaggatccaattggcaccgcagggcgcaacgctcgacaagttgttcgccccggcaaacggctttggcgcggtgatcgccatcgtccacgcgtcgcgggcggtgcgggacaaatcgtatgagcaggccgccaagcgcggcggcttcacgctcaacgccatcgacgaagccaagacgctggcgcgtaaattccccggcatatccgacgagacgctgacggcaggcacggtatcggcgtccccgcagattcccaacgacgatctcgatacgatcgggctcgaatggctgctggtcgcgcagtccaggatgtcgccgaccacggcaggcgagctcgcccgcattgtctacgaaaacaagtcggcgctcgggctcgacaacggcttcgccaccaggatcgaaccggcctccgtcgagaaggacgccttcgtgatcgcgcatcggggcgcagccgactacatcaacgacgacacgaagaccttcgtggacaagtacagcgacctgatgtatctgggcgccgccgcgctcagcgtcatcggctcgatcttcgcagcgatctacgccaagatcacccgcatcgcccccgagaaggccagcgagctctccaccgccatcctcgacatcggcgagcggatcgagcacgcccactcgctcgaccagctcgaatgtctccaggacgagttggaggccatcctgcgcggcgcggtgatcggcctcagggacggcacgatcagcaccgacgggctcgacaccttcaagctcgggtacgagttcgtccgcgacgagatcagcatgcgccgcgactatttgaagcgtcatgccggcgaagccgaaaagccggcgcgcgatggcggcgcgcccccatcggacgacagcaatgtggtggtggtgaagaccgcccatagcgcctga

SEQ ID NO: 7129 - DNA, 348 bp, BradyrhizobiumColbertium
atgttgctgctcaccttcaagcacatcatcgccgatttcgtgctccagaccgcgtggatggcgcacggcaaggaccagaagcacggctgggccctgccgcttctggtgcactgtctcgtccacctcgccgtcgcgctgcccctcatcctgatcgtcgcaccgagattctggttcgtggccttcattgacttcgcgatccacatcacgatcgaccgcgccaagggattcgtctccgccaatttcggtgtcgacctcgcgcatccctggttctggaccctgatcggcgtcgaccaggcgctgcatcacctgaccggcttcggcctctccatcttcatggcggcgaactga

SEQ ID NO: 7130 - DNA, 123 bp, BradyrhizobiumColbertium
gtgcttgcgccatggctgcgaatcggaggcgtattgatgcttgcccgtcattccgcggcgcgcgaggcgaaaaccggaaatctcgagattccgcgcccggcgctgcggaccgccccggagtga

SEQ ID NO: 7131 - DNA, 399 bp, BradyrhizobiumColbertium
atgtttgcaagccgcgacacctttgaaggcgattcctgtccggtccgcgacgagctccttggcgagatgtatcgcgccagcgagagtggcctgccgaggctggttgagagtgtttcccctgacgcgcgtgccaggctggcgctgttttgctaccgccgcagtcatttgcattcgctggcggtcgcgattgcagcaagctgcagcgagcgtgacctgatcgagaacggcggccgcgttggctcgacgctctacgcgctgtcgcgcgaaagctcggcgaaatcctcgccgtcgctctcgggcgggcgcaagccgatcacgctgtcgaccaagccgctttcggtgctcgcaccactcgatgacgagctcgacgacgagaccagcgaagccgttcccgcctag

SEQ ID NO: 7132 - DNA, 318 bp, BradyrhizobiumColbertium
atgatgcaagagaccgacctgtcgagctgctgccagggttgcggcgcctgctgcggctattcgcagaactggccgcgcttctcgatcgagagcgacgaggagcttgcggcgattcccgaaacgctggtcaacgcgcgtcagtccggcatgcgctgcgagggggatcgctgctcggccctgcagggaaagatcggagagatgacgacctgcggcatctatgaactgcggccagaggtctgccgcacctgcatgccgggcgacgccgaatgcgcgatggcgcggcggaagttcggcctgccgatcatagaggccgcctag

SEQ ID NO: 7133 - DNA, 699 bp, BradyrhizobiumColbertium
atgagacgcgccgaccggctgtttcaaatcattcaggtgctgaggcgcacgcgcaagccgctgacggcggacgcgatcgcggccgagcttgagacctccaagcgcaccatctaccgcgacatcgcaaccctgatcggtcaacgcgtaccgatccgcggtgaagccggcatgggttacatcctggaaaagggttttgacctcccgccgctcatgctgacacccgacgagatcgaggcggcggtgctgggcgcgcaatgggtcgcgggccatgccgactccgcgctggcacgcgcggccgaagacttgatggccaagatcgccgacacggtcccagaacgcctgcggcctttcgtgctggagccggcgagccgggcgcggccgagctggaacagagagccggaccgcctggacatggtgcgcacccgcacccaaattcacgaaggcaagaagatcatgcttcgctatcgtgacgagcacggccgccccagcgagcgcatgatctggccgatctccgtcggctatctcgaagccgtgcgcctgttggcggcctggtgcgagctgcgcggcgacttccgcagcttccgcaccgatcgcgtggtcgaggcgacctatctcgacgagaaatacccggagcggcgcgacgtgctgcgcgcaagatggcggcagagtctggtctggggtccgccgaaggacacttga

SEQ ID NO: 7134 - DNA, 261 bp, BradyrhizobiumColbertium
atgatcattccaacccatttcggcccggccgttccgatgctgcgggcacaggcgtggtccgcagcggtgttcggccgcctcgtttcgctcgatctcgtggccgtcgacctccggtttgccctcgcaagcgccgtgatacgcccgctggtccgggttgccgacgcgctggtccgccacttgatgggccgcgcctggcggggagcccgcttcgcagaagatatcatggctgctgccaccatggtggcagcagcccgccgctag

SEQ ID NO: 7135 - DNA, 729 bp, BradyrhizobiumColbertium
atgatcacgctttacggcttcggcgccggcttcggcctgccggaaatcagccccttcgtcaccaagacggaggtgcagctcaagatggcagggctgccttaccgtaaggagcgggcgatgccgccagcttcgcccaaggggcagctgcccttcatcgacgacggcggcgaggcggtggccgattccaccttcatccgcgcccatatcgaacgccgctacggcttcgatttcgacgccgggctctcgttgcaggagcgcgcgcaggcctgggcgttcgagcgcatgatcgagcatcacgtctattgggcgctggtcggcgcccgctgggtcgatccggtgaatttcgccaaggggcctgcgcacttcttcgacggcgcgccggagcacaatcgcgagaagctgcgggaggatgcgcaattccgcgtcgccgagaactatctgctctccgggctcggccgccatgggcccgatgacgacgtcgatctcgcggtccgctcgctgttcgcgctgtcggttcagctcggcgacaaggcgtacctgatgggcaaaaagccctgcggtgtcgacgcaaccgccttcggcgcgctcgccggcatcctgacgccgttcttcgaatcggccttgcgcgaacgcaccgaggcatttccgaacctcaccgcctatgtcgaccgcatgatggacgactactatccggagtttgcgtggaccccgctgcggcaggcggcgtga

SEQ ID NO: 7136 - DNA, 1152 bp, BradyrhizobiumColbertium
atgaaacgtttttatttgaccgctgccatcactgcggccgcgctggcgctgccggccctgcccgcgctggcccagaccagcgaagtcaccatcggcatcaccaccgctacgaccgggccgggcgcggcgctcggcattcccgagcgcaacgcgctggaattcgtaccaaaggagatcggcggcgtgccgctgaaggtgatcgtgctcgacgacggcggcgatcccaccaccgccaccaccaacgcgcgccgcttcgtcaccgaatccaaggctgacatcatcatgggctcggcgctgacgccgccgaccatcgccgtgtccaacgtcgccaacgaagccggcatcccgcatttcggccttgcgccgttcccgatcacgcccgagcgcatgaagtggtcggtggcgatgccgcagccgatcccgatcgtcggcaaggtgctgtacgaccacatgaagtccaaaggcgtgaagacgctcggctatatcggctattccgattcctatggcgatctctggttcaacgacctcaaggcgcaggccgtgcccatgggcatgaccatcgtcgacgaggagcgctttgcccgtcccgacacctcggtgaccggacaggtgctcaagctcgtcgccgccaatcccgacgcgatcctggtcggcgcctccggcaccgcggccgcgctgccgcagaccgagttgcgcgaacgcggttacaaggggctgatctaccagacccacggcgccgccagcatggacttcatccgcatcgccggcaaagcggcggaaggtgtcctgatggcctcgggccccgtcatggcccccgaggaacaaccggatagcgcgctgaccaagaagcccggcctcgcgctgaactcggcctacgaggccaagtacggcccgaacagccgcagccagttcgccggccattcctacgatgcgttcgagatcctcaagcgcatcattccggtggcgttgaagacggccaagcccggcacgcctgagttccgcgaagccatccgccaggcgctgctgacggagaaggaattggccgcaagccagggcgtctacaacttcaccgagaaggaccgctatggcctcgaccagcgctcgcgcatcctgctcacggtgaaggacggcaagtacacgctggtgaagtaa

SEQ ID NO: 7137 - DNA, 420 bp, BradyrhizobiumColbertium
atgttcgtgaaccggcgcgaggtccagattcagtggggcgactgcgaccccgccaatatcgtctattacccgcgctatttcgcgatgttcgatgattcgacctcgaccctgttcgaggtcgccggcttatccaagcaggatctggtccgcaaatacggcctggtgggcattcccatggtcgacacgcgggccaagttctacatcccctcgacctatggcgactggatcaccatcgagaccaggatcgagagcatcaagcgctcgagcttcgaggtgaagcacaacgtctacaagggcgaggcgctggcgatcgagggtttcgagacccgcgtgctggtcggccgcgatcccgttaacccagacaagctgaaatcggcaccattcccggcggaaatggtagccaaattcacggggagttaa

SEQ ID NO: 7138 - DNA, 762 bp, BradyrhizobiumColbertium
atgttgttgaaggatcaggcagccatcgtgaccggcggcgcatcgggactgggtgcagcgactgcgcgaaagctcgcggcccagggggccaaggtcgccgtgtgcgacctcaacaccaagcttgcggaaacggtcgcggcggagatcaagggtgtcgccgtgacctgcgacgtctccgatgcggcctccgccgaagccgcgatcgcgcaagcgacgaaggcccatggcccggcccgcgtgctggtcaattgcgccggcatcggcgttgccaagcgcgtggtcggtcgcgacggcccgatggcactcgccgatttcgacaaggtgatcaaggtcaacctgatcggcagcttcaacatgctgcgccttgccgcgaccgagatgtccaagctggagccgcaggcgaccggcgagcgcggcgtcatcatcaacaccgcttccgtcgccgcctatgacggccagatcggccagtccgcctattcggcctccaagggcggcatcgtcggcatgaccctgccgatcgcgcgcgagctcgcgcaattcggcatccgcgtgctgaccatcgcccccggcctgttcctgacgcccctgctcgcgaacctgccgcaggaagcccaggactcgcttgccgccgcaatccccttcccgcgccgtctcggcaatgccgacgagttcgccgcgctcgcgctgcacatggtcgagaacgcctatctgaacggcgaagtggtgcgcctcgacggctcgctgcgcatggcgccgaagtaa

SEQ ID NO: 7139 - DNA, 1884 bp, BradyrhizobiumColbertium
atgagtgcgcagccgtcctcttccagcatggaacgcggcgcgagcactttcccgctgcggccgatctcgttcggcgatcccgccgtcgacatcgagcgccgcgacgacggcacgatctatctcaggccgaagcagccgctcggcgactatcccgtccgcatcaccgagcgcctgcatcattgggccattaccacgccggaccgcgtcttcatggccgagcgcgaaggtggccgcggctggcgcaagataacctacgccgagctgctcatcgcgagccggcacatcgcctcgggcctgatcgcacgcggattgtccgcagagcgcccggtcgtcattctctccggcaattcgatcgaccatgcgctgctcgccttcggcgcgttctatgcgggcgtgccgttctgcccggtatcgccggcctattcgctggtgtcgaaggattacggcaagctgtcctacctgatgaagctgctgacgcccggcctcgtcttcgccgaggatgccgacaagttcgccgatgcgctcacggccaacgtctcactcggcaccgagatagccgcatcctatggccacgtgcatggccgggacgtcacttcgctcgcggacctgatggcgacgccgatccgcaccgatctcgacgaggtccatggcaggatcggccccgacaccatcgcgaaattcctgctgacctcgggctcgaccggcaatcccaaggcggtcatcaacacccaacgcatgatctgcgccaaccaggtgatgctgcgcgagacgctcgcctttctcaaggacgagccgcccgtcatcatcgactggctaccctggaatcacacctttggcggcaaccacaatatcgggctgacgctctacaacggcggctcgatgtatctggatgccggcaagccgatgcccggcggcatcgaggagaccgtgcgcaatctccaggagatctcgccgacggtgtatttcaacgtgccaaagggctacgaatctctgctgccttacttgcgcgacgaccagggcctgcgcgcaaagttcttcgaccggctgcacgcgatgttcttctcgggcgcggcgctgtcgccgttcgtctggaacagcctcgacgagctcgcggtgaaggaaaagggctaccgcgtgccgatgctgacgggcctcggggccaccgagaccgcgccgttcttcatgtcggtcaatccgcgcaccagccgctccggccatgtcggcctgccggtctcgggcaacgacgccaagctggtgccgaacaatggcaagctggaagtccgctgcaaggggccgaacgtcatgcccggctactggcgccagcccgacatcaccgcaaaatccttcgacgaggaaggcttctacaaactcggcgatgcgctgaagccggccgatcctgatgatctcaatgccggcttcgacttcgacggccgcgtcagcgaggatttcaagctggcgagcggcacctgggtcagcgtcggccccctgcgcgcgcgtttcgttgcggcctgtgcaccgctggtgcgcgacgtcgtgatcgccggcatcaaccgcgacgaggtatccgcgctggtcgtgctcgatctcgatggctgccggctgatcaacccgacgctgccgatcaacgacctcgtcgtcgccacgcgcgaccgcctggtgcgcgaggccttccgcgaacggctgacgcgtttcctcagccaggccacgggctcctcgacacggatcacgcgcgcgatcctgatggacacgccgctctcgatcgacaagggcgaagtcaccgacaagggctcgatcaaccagcgcgccgttctcgagcatcgcaccgagctgatcgaggagctctatgctgccaatccgtcgaaccgtgtgatatcggtcggctag

SEQ ID NO: 7140 - DNA, 810 bp, BradyrhizobiumColbertium
atgacacagggaaacgccgagaccgccagcgcgggcgcctccgggctcttgaagatcgagagggcggaccgggttctgaccgtgggtctgaaccggccggcgaagcgcaatgcgctcaacgacggcatcatcctggaaatcggcgagtgttttgcgtccctgcccgacgacgtcggcgcagtcgtcatccacggcatcggcgatcatttctccagtggcctcgacctgtccgagctgaccgagcacgacgccacgggcggcctgctgcattcccagatgtggcaccgggtattcgaccgcattcagtacagccgcgtgcccgtgatcgcggcgctgcgaggggcggtgatcggcggtgggctggagctggcctgtgcggcgcatatccgcgtcgccgaaccttcgacctatttcgcgctgccggaagggcaacgcggcatcttcgtcggcggcggcggctcggtgcggctgccgcgcctgatcggcgtcgccagaatgatggacatgatgctgaccggccgcgtctacagcgcgaccgaaggcgcgtcctacggcttcgcgcaatatttgacggaagccggcaacgcgcttcccaaggcgatggaactcgcgaccaaggtcgcctccaacgcgccgctgacgaatttcgccgtgctccaggcactgccgatgatcgcggaggccaatccgcaaaccggtctgctgatggaatcgctgatggcgacggtggcgcagagcgacaaggaggccaagcgccggatccgcgaattcctcgagcacaagaccgcaaaggtgaagccgaagtcatga

SEQ ID NO: 7141 - DNA, 462 bp, BradyrhizobiumColbertium
atgaccacaccgacgctgcaaaccaaatacgtcttcaccatcaccgcccgcatcggcgacgtcgtcaccgccggcgagaccggaatcggcgttcgccgcatcatcccgatcatcggcggcgaggtgaaaggcgcgatcgccggcaaggttctgccgttcggcgcggacttccagaccatccgccccaacgagctgatcgatctcgaagcgaaatacgccttcgagaccgacgacggcgccgtcatctatgtcgagaacaagggcatgcgcttcgggcccgtagagctcctgcagaagctcaagcgcggcgagccggtcgatcccaagctgatctatttccgcaccgtgccgaagttcgagaccgggcatgagaagtatcgctggctgatggagcacatcttcgtcggctcggccgcgcgtcatgcggatcgggtggtgatcgacgttcatcaggtaatgtga

SEQ ID NO: 7142 - DNA, 1320 bp, BradyrhizobiumColbertium
atgagtaccgacgccgtcgccgtcctcggcttcatctccctgttcgccttgatgctgttgcgcgtgccggtcggcatggccatgggcctcgtcggcgtgtgcggcttcagctatctcgtcggctcgacaccggccctcaagatggtcggacaggtcaccatgcggacggtgaccgactacactttcggcgttattccgatgttcctgctgatgggctccttcgtcagcaattccggcatgagccgcgagctgttccgcgccgccaacggcttcgtcggccatctgcgcggcggactcggcatcgcaaccgtaggcgcctgcggcggctttgccgcgatctgcggctcctcagtcgcgaccgccgcgaccttctccgcggtcgcctatcccgagatgcggcgcttcggctatccgcagtcctttgccacgggcgtgatcgcggccggcggcacgttgggcgcgatgctgccgccctccaccgtgctcgccgtctacggcatcatcaccgagcaggacatcggaaagctcttcatcgccggcatcatcccgggcttgctcgcgatgaccatgtacatgctcacgatcttcctgatcggctatttccgacccgacttcctgcccaagggcaaggtcacgccgtggcgcgagcgcttcgccggattgaaggacatctgggccccggtcctgctgtttctgttcgtgatcggaggcctctacggtctgcccttcctgccgcgtttcaccccgacggaggctggcggcgtcggggccgccggcgccttcatcatcggcgtgctgacgggccgcctcgaccgcgagaaggtgctggcctcgctgctgcaggcaacgcgcaccgcggccgccgtgttcaccgtgctgatcggcgcgctgatcttcggctatttcctcacggtgacgcagacgccgcagaaggtcacggagttcctcaccggccttggccttgggccctacggcgtgctggggctgatcttggtgatgtatctcgtgctcggctgcctgatggacgcaatggcgatgatcatcctgaccgtgccgatcatcttccccgtcatcatccatctcggctttgacccgatctggttcggcatcatcatcgtcatgaccgtcgagctcggcctgatcactccgccggtgggcatgaacgtgttcgtcataaaaagcgtggtgaaggacgtctccttctccaccatcttcaagggcgtgagcccattcgtggcaacggacctcgtgcgcctcgtgatcctgatcgcctttccgctgctggcgatctggttgccgacgcggatgatggcgcattga

SEQ ID NO: 7143 - DNA, 510 bp, BradyrhizobiumColbertium
atgaagcgctcctggatggaccgcatcatcgattcgatcgaatggatcgcagccggcttcgtcggcatcgtcgcgctggacatcttcctgtcggtgctgctccgcaacacgatgaactattcgatcccggacagtttcgacatcggccgcatgttgctcggcatcctgattttctggggcatcgccgcaacctcctatcggggtacccacatcactgtggacctggtctgggccaatgtcggcccgcgctaccagcgcatgatcgacgtgttcgcgaccctggtgctgctcttcgtcgtgacggtgcagacctggacgctgttcgacaaggtccggctgacctacaacgacaatgtgcagaccttcgacctgcacatgccgacatggccgttcttcctcgtcgcctggatcggcgacgtctgcgccgtgctgctgatcgcgatccgtacgtaccggttgatcttccatcccgaagacatgcatgaacccaagatcaaggtgacggagtga

SEQ ID NO: 7144 - DNA, 1017 bp, BradyrhizobiumColbertium
atgaggaaagcctgtctggcattgctgctggcagcaagcgtgagccccgcgctcgcgcaggacaagaccttcgacttgaagatctcgcattgggtgccggcctcgcacccgctgcagaaatcgctggaggactgggccgccgcggtcgagaaggattccggcggcaccatcaagagcaaggtgtttccggcccagcagctcggcaaggccttcgaccattacgacatggcgcgcgacggcatcgccgacgtcacctacgtcaaccccggctaccagcccggccgcttcccgatcattggcgcgggcgagctgccattcctgatctcggatgccaagggcggctcgatggggctggatgcctggtaccgcaagtatgccgaaaaggagatgaaggacgtcaaatactgcctcgccttcgtccactcgccctcctctttccattcgcgtagcaagaagatcgtcaaccctgaggacgtgaagggcatgaagatccgcccagcgcacgccacgatggcgaacttcgtcacgtcgctcggcggcaccaacgtgcagtcctcggcgccggaggtgcgcgacatcatcgagcgcggcgtcgccgacggcgtcaccttcccctggggctccctggtgctgttcggaatcgacaaggtgaccaagtacgacatggaggcgccgctctacaccacgaccttcgtgttcgtgatcaacaaggacaagtacaatgcgatgtccgacaagcagaaagccgcgatcgacaagaactgctcggtcgaaacggctggtgcggtgggcgagcattggggcaagttcgaggatgccggcatcgccaaggtgaaggcggaatccggccacgaggtctacaagctgacggccgagcagactgccgcctggaagaaggccgcagagccgctggtcaagacctggagcgacggcgccaagaaggccggcgccgatccggacgcggcgctcgcggatctcaaggcatcgctgaagaagtacaacgcactggcggagtaa

SEQ ID NO: 7145 - DNA, 1170 bp, BradyrhizobiumColbertium
ttgcggacaaaagtcgcaatcatcggggcagggccggccggattgttgcttgggcaactgctgcacacatatggcatcgacaacgtcatcctggagcggcagagcccggattacgtgctcggtcgcatccgcgccggtcttctggaggagggaaccgtcgcgctgctcgatcaggtccgcgccggcgcgcgggctcatgccgaaggtttggtgcatgaaggcatcgagcttgcgttctcaggccggcgtcaccgcatcgacatgaagggcgcgaccggcaagaccgtgatgatctacggccagaccgaagtcaccctcgacctgatgaatgcgcgcaaggctgccggtctcgtttcggtctatgaggccagggacgtgcagccgcacgatttcgacggcagtcacccgcgcgtgacctacgtcaaggacggcgtcacccacacgatcgattgcgacttcattgccggctgcgacggctttcacggcgtcagccgcgccagcgtccgggccaatgcgatcgaggagttcgagcggatctatccgttcggctggctcggcattctttccgataccccgccggtcagtcacgaactgatctactccaaccacgcccgcggctttgcgctgtgcaccatgcgctcgaccaagcgcagccgctattatgtgcaatgctcgctcgacgaccatgtcgaccaatggccggacgaccgcttctgggacgaattgaagcgtcggctcgaccagaaggcggccgacagcctcgtcaccggcccctcgatcgagaagagcatcgcgcccttgcgaagcttcgtcgccgagccgatgcgcatcggcagaatgttcctgtgcggcgatgccgcccatatcgtgccgccgaccggcgccaaggggttgaacctcgcggccagcgatgcgcattatttgtcgagcgcgctgcgcgaattctacgatgagagatccagctccggcatcgacgcctattctgccaaggcgctggcgcgcgtctggaaggccgtgcgattctcctggtggatgacctcgatgctgcacaaattccccgacaccggtaccatcggagcgcgtattcagctcgccgagctcgattacgtcacgcagtccaaggccgccatgacgtcgctgtcggagaattacgtgggactgccgttttga

SEQ ID NO: 7146 - DNA, 885 bp, BradyrhizobiumColbertium
atggaccgcctcgaagccatgcacgtcttcgtcaccgtggccgatctgcgcggctttgcgccggcggcgcgcaagctgcggctgtcgccttcggcggtgacgcggatgatcgcaggcctggaggagcatctcggcgcgcggctgttgcagcggaccacccggcaggtgcggttgaccgacgtcggcacccgctacctggaacgcgcccggcgcatcctggccgacgtcgaggaggccgacggctcggcgcgccaagaacgcaaccggccgagcggacggttggtggtgtcggcgccggtcggcttcggccggctgcatgtcggaccggtcatgaccgcctatctcaagcgttaccccgaggttacctgcgaattgcggctctccgaccatctcgtcaacctggtggaggacgccgtcgatgtcgcggtgcggatcggccatctcgccgattcctcgctcgttgcgcgtcaggtggggcagatgcggcggatcgtggtggccgcacccggctatctcaagcgccatggcgagccgaagacgccggacgctctatgcgagcaccagacgatccagttcggcccctggtccgagtggcgcttcctgcaagacggccgcgatatcgaagtaacaccgagcccgcgctttaccagcaacagtgccgacgcggcgctgcaatatgccgaagccggcggcggcgtgacccgcgtgctggcgtaccaggccgccgagggcctgaagcgcggacggcttaggatcgtgctcgcgaattacgaacagccggcgctgccgatccatatcgtttatccgacctcgcgcctgctctccgccaaggtgcgcgcgttcatcgatctcgtggtggagacgacggactggaggtttgggtga

SEQ ID NO: 7147 - DNA, 630 bp, BradyrhizobiumColbertium
atgacgacagcagcccacgcctttgcgagtgacatcgccttctcaccggcggtgaaggcaatccaggcgcgaaaaggctcgcgcgaagcctatgctcgcagcgagcagcgcggctggcgcaccgaggtcgacgataacctcgcagcctttctggcggacgccaacagcatctatttcgcaacggccgcggcggacggccagccctatatccagcaccgcggcggtccgaaagggtttctcaaggtgttggacaagcagacgctcgcctttgccgactatgccggcaaccagcagttcatcacccaaggcaatctgtcggagaatcccagggcgtatatcttcgtgatggactacgcccatcgccgtcgcgtgaagatctggggcgacgcgcgcatcgtcgaggacgatgaggcgctcacgacgtcgctgatgccgaaaggctaccgtgcgcgacccgagcaggtaattctgttcaagatcgtggcctgggacaccaactgcccgcagcacatcccgcagaagttcgatgccgcagacgtggcggcggcgctggcggcgagagatgcgaggatcgcggagctggaggctgaggtggcggcgctgaagggggcgaaggcggcaacttcgtaa

SEQ ID NO: 7148 - DNA, 732 bp, BradyrhizobiumColbertium
atgagcgcactgttgtccgtatccgacgcccacgtcgcctatggcaaggtcgaagccgtgcgctcggtctcgctcgaggtcggcaccaacgagatcgtcacgattgtcggcgccaacggcgccggcaagaccacgctgctctccgccatcatgggcattctgccgctgaagggccgcgtcgcctttgccggccaggatctcgcccagctcgacatcgaggaccgcgtcgcgatgggcctcggtctcgtccccgagcaccgcgagttgttcgtgacgatgaatgtcgaggacaacctcgagctgggagccttccggatcgagcggagcaaggccaaagcctcgatggaacgcgtctacgcgctgttcccacggctgaaggagcgccgcaagcagctcgccggcacactctccggcggcgagcagcagatgctcgcgatgggccgcgcgctgatgggggagccgaagctcctgatgctggacgagccgagcctcggccttgccccgatcatcgtcgccgacatcttccggatcgtcaccgaactgcgcgccgccggcgtctccgtgctgctggtcgagcagaacgcgcaggctgcgctcaagatcgcagaccaggcctatgtgatggagctcggcgagttcgtgctcagcggcaaggccagcgacatcgcggcgaacgaacgggtggcggcgagctatctcggcttccagcacgaaggcgagagtgcagtctaa

SEQ ID NO: 7149 - DNA, 1770 bp, BradyrhizobiumColbertium
atgcaaggccggcttcccattctcgtcttcgcagcggtcatggcggcgatcccgttcatcccgggcattcccccgttctggatcgtgctgctcgacaatatcggccttgccgcgctggtcgcgatgggcctcgtgctgctgaccggcgtcggcggcctgacctccttcgggcaggcggcctttgtcggcttcggcgcctacaccacagcggtgctgtcgacggcctacggcgtatcgccgtggctgaccctgccgctgtcgctcctggtcagcggcctgttcgcggtgctgctcgggctgatcaccgtccgcctctccggccattatctgccgctcggcacgatcgcctgggggctgggtctgttctatctcttcagcaagctggagttcctggggaggaacgacggcatctcggcgatcccgccgctgtcgatcggctcgctcaagatgctctcgcccggctcgatctactacgcgatctggatcgccgtgatcgtttcggcgctgctgacgatcaacctgctggactcccgcaccggccgcgccatccgcgcgctcaggcgcggccacattgcggcggaagccttcggcgtgcacacgccgcgcgcaaagctcctggtgttcatccatgccgccgtgctcgccggtctttcgggctggctctatgcccacctgcagcgcgcggtgaacccgacgccgttcggcgcgcatatgggcatcgaatatctcttcatcgcggtggtgggcggcgccggctatgtctggggcggcgtgctgggcgcggcgatcgtcgtgatcctgaaagaggcgctgcaaagctatctgccgctgatcctgcccggctccggccaggtcgagaccatcgtgttcggcatcatgctggtggcgctgcttcagttcgcgcccggcggcctctggccctggctgatgtcgttcttcccggagcgcaccggtggcaagaagcccgacacctcgctgaagctggaacatcgcgcccgcgcggctgccgagtccggcgtgctgctccaggtcgagaaagcacgcaagcagttcggcggcgtggtggcggtcaacaacgtgtcgttcgacgtccaggcccgcgagatcgtcgcgctgatcggcccgaacggcgccggcaagagcaccacattcaacctgatcacgggcgtgctgtcggcaacctcgggctcgatctcggtgctcggcaagaaggtcgacaacgcgccgccgcaggagatcgtcaagctcggcatcagcaggaccttccagcacgtcaagctcgtgcccgacatgaccgtgctggagaacgtcgcgatcggcgcgcatctgcgcggccattccggccctgtcgcctcgatgttgcggctcgaccgcgctgacgaggccaggctgctcgccgaagccgcgcgccagatcgaacgcgtcgggctcaccgagcagatgcatcagctcgccggcagcctctcgctcggccagcagcgcatcgtcgagatcgcccgcgcgctgtgtgtggatccgatgttgctgttgctcgacgagccggccgcgggcctccgtcacatggagaagcagcggctcgcaacgctgctgcgtgacttgcgcgacggcggcatgagcgtgctgctggtcgagcacgacatgagcttcgtcatgaacctcgccgaccgcatcgtggtgctcgatttcggcaccaagatcgcggaaggcacgcccgccacgatcaagaccaaccccgaagtgatcaaggcctatctcggagtggcggcatga

SEQ ID NO: 7150 - DNA, 117 bp, BradyrhizobiumColbertium
atgggaagccggccttgcatcgcgcgtcagtccttctcttcctcgaccgcgggcgcggcgagcgagcgcagcagcagcacggggatcagcaacatgaagacgatcacctccttgtag

SEQ ID NO: 7151 - DNA, 963 bp, BradyrhizobiumColbertium
ttgaataccaccatcatgctgttcctggtgcaggacggcatcaccaatggcgccatctatgcgctgctcggcctggcgctggtgctggtgttcgccgtcacccgcgtgatcctcattccccagggcgaattcgtcacctacggcgcgctgacctatgcctcgctggcggccggacagatgccgggcacggcaaagctcgcgcttgcgctgggcatcggcgccttcgccttcgacctgttcgaggcgcgcaaggcgctgcatgggcggctgatcgtgcgcggcctcatcaccaacatcgcgctgccggccatcgtgctggcgctgaccctttacttcgccgcgcagaagccgccggtggcgatctgcatcgcgctttcgctggtgatcgtggccatgatcggcctgtacatctaccgcatcgccttccagccgctggcgcacacctccgtgctggtgctgctgattgcgtccgtcggcgtccatcttgcgctgcaggggcttggcctgttgttcttcggcgccgaaggccagcgcggaccggccttgctgtccggcgccttcaccgccggcgcgctgcgcttcaccgggcagagcatcaccgtctacgccatcaccatcgccttcatcgtcggactctggctgttcttcggcctcacgctctacggcaaggcgctgcgcgcgactgccgttaaccggctcggcgcgcggctcgccggcatccgtaccacgttgtcggggcagatcgcctttctgctggcgtccgtcatcggcgcactgtccggcatcctgatcgtgccgatcacgacgctctattacgacagcggcttcctgatcggcctgaagggcttcgtcgcggcgtcatcggcggcctggtcagctatcccctcaccgccgtcgcggcgctggtcgtcggcatcgtcgaggcgttctcgtccttctatgcctccaactacaaggaggtga

SEQ ID NO: 7152 - DNA, 519 bp, BradyrhizobiumColbertium
atgaccgtttccaaaaccgctgaaaagtcctccgaaaaagcggccgacgccaagggccgcaaggatgcgggcgacgtccacgccgaagccctccagctcggcgaactctccgagcagctcggctacgtcctgaagcgggcgcagctcaaagtgttcgagaacttcttgcgctgcatggcctcgctccagctgacgccggcgcagttttcggtgctgctcctggtcgagaagaatcccggccgtaaccagaccgagatcgcctccacgctcggcattctcaggccgaacttcgtggccatgctcgacaatctggagagccgcgacctttgcgcgcggatccggtcaaccaacgaccgccgctcccacatcctggtcttgaccgacaagggcaaggccgtactggcccgcgccaagaagctcgtcgccaccaagcacgaggcccggctgaacgatctgctcggccaggccaaccgcgaagccctgatcgggatgctcgcgaagatcgccaacgagttttga

SEQ ID NO: 7153 - DNA, 1284 bp, BradyrhizobiumColbertium
atgaccgaccgccgccctctgctccgcgcgctctatggcgccgccgtggccgccgcccatccgaacacaatcctcgcaccgcatctgcgtgccgcgcccaagggacgcgtgatctgtctcgccgccggcaagggcgccggtgccatggccgcggcggccgagcggcattatctcgacgcgcaggggctggcgccggagcggctggtcggcatcgccaccacgcgccacggctatggcgtgccgacgcgccgcatccgtgtggtcgaggccggccatcccgtgcccgacgaagccggcctgaagggcgcggccgatacgctcgcactggcgggcgaggccggtcctgacgatctgctgctggtgctgctcaccggcggcggctcggcaaactggatcgcgccggtggacggcgtcagctttgcgcagaagcaggcggtgaacagggcgctgctgcggtcgggcgcgccgatcggcgagatgaacatcgtcaggaagcatctgtcgcgcatcaagggcggccgtctcgcgcgcgccggcaggaacgccgccgagatcgtcacgcttgcgatctccgacgtgccgcacgacgatccttccgcgatcgcctccggccccaccgtaccggatccgaccacgctggcggatgcacgcgccatcgtcgcgaagtacaagctcgacatcgacgaggccgtgcgccgcgcgctcgacgatcccgccaacgagagctgcaagcccggcgacacggcctttgcgcacgcgcatttcgagctgatcgcgcggcccaggcaatcgctcgcggcggctgtgaagctcgcacgcgaagccggttacgagacgatcgacctcggtgccgatctcgagggcgaggcgcgcgaggtcgccgccgatcacgccaggctggcgcttcaggcccgcgcgcagggcaagcgcatcgcgatcctctccggcggcgagctcacggtgaccgtgcgcggcaacgggcgcggcggaccgaaccaggaatacgcgctggcactcgccggcctgttgcaggacacggcgggcatcgcggcgctggccggcgacaccgacggcgccgacggcggtgccggcaaccccaccgaccccgccggcgcattgatagacgcgacgacgttcgcgaagatgaaggcgcaggggctgcagccgcaggcctatctcgacgacaacgacgcgaccgcgttcttcgaggcgacaggcgatctgctcacgccggggccgacactgaccaacgtgaacgacatcagggtgatcttggtggattga

SEQ ID NO: 7154 - DNA, 1230 bp, BradyrhizobiumColbertium
atgcctgctgttaccggcaagcttgcggccgcatcattggcgctcgcgctcattgcgacttcgacatcaactgcatcggcccagaagaaatacgatagcggcgcgaccgacaccgagatcaagatcggcaacatcatgccctacagcggaccggcctccgcctacggcgtgatcggcaagaccgaggaggcctttttccgcaaggtcaacgcagaaggcggcgtcaacggccgcaagatcaacttcgtgacctatgacgatgcctattcgccgccgaagaccgtggagcaggcgcgcaagctggtcgagagcgacggcgtgctcttgatcttcggctcgctcggcacctccaccaatggcgccatccgcaagtacatgaacgagaagaaggtgccgcaattgttcgtggcgagcggcgcgtcgaaatggaacgatcccaagcaatatccctggaccatgggctggcagccgaactacgccagcgaggcgcgcatctatgccaagtacatcatgaaggagaagccaggcggaaagatcggcgtgctctaccagaacgacgattacggcaaggattacctgaagggcctgaaggacggcctcggcgccaaggccgcaagcatgatcgtgctggaagaaagctacgagacgtcggagccgaccatcgacaatcacatcgtcaagctcaaggcgacgggcgccgacgtcttcatcaacatcaccacgccgaagttcgcggcgcaggcgatcaagaagaatgccgagatcggctggaagccgatccacttcctcaacaacgtctccgcctcggtcggaagcgtgatcaagccggcagggttcgataacgcgcagggcatcatctcggcggcttacttaaaggacaccaccgacgcgcaatgggccaatgatgcgggcatgaaggcgttcctcgacttcatgaccaaatacttccccgaaggcgacaagaccgacggcggcacggtcgtcggctacggcgtcgcgcagacgctggtccaggtgctgaagaactgcggcgacgacctcacgcgcgcgaacgtgatgaagcaggccgcaagcctgaaggacttccgtaccgaggtgctgctgcccggcatcaagatcaacacgtcgccgaccgacttcgccccgatcagctcgctgcagctgcaacgcttcaagggcgagcgatgggagctgttcggcgatgtgatcaacgccgaagccggcggctag

SEQ ID NO: 7155 - DNA, 912 bp, BradyrhizobiumColbertium
gtgctgctgatcttcaactcgctcggcacgccgccaaactcggcgatccagaaatacatgaaccagaagaaggtgccgcagctgttcgtcgccaccggcgccaccaagtggaacgatccgcagaactttccctggacgatgggctggcagcccaactaccagagcgagaccatcatctacgccaagtacatcctgaagaacaagccggacgccaagatcgcggtgctctaccagaacgacgactacggcaaggactatctgaagggcttcaaggacggcctcggcgccaaggcggcctcgatgatcgtgatcgaggacagctatgaggtctccgagccgaccatcgactcgcacatcgtgagactgaaggccaccggcgccgacgtgttcatgaacatcaccacgccgaaattcgcggcgcaggcgatcaagaagaacgccgagctcggctggaagccgctgcatttcctcaacaacgtctcgggctcgatcggcagcgtgatcaagccggccggcttcgagaacgcccagggcatcatctcgtcacaatacttcaaggatccgaccgacgcgcaatggaagaacgatccggcgatgatcgcctggaacgaattcctggataagtactatccggaggcgaaccgagccgacgcttcggtcatgtacggctacatcgtcagccaaggcctcgttcacgtgctcaaggcctgcggtgacaatctgacgcgcgagaacatcatgaagcaggccgccagcatcaaggatttcgagccggcaggcctgttgccgggcgtcaaggtcaacacctcggccaccgatttcgcccccctctcgcagctccagttgatccgcttcaagggcgagcattgggagcgattcggcgaggttctgagcggcgacgtcggcggctga

SEQ ID NO: 7156 - DNA, 1113 bp, BradyrhizobiumColbertium
atgccggtgccatttgcggatctcagtctccagtaccagtcgatcaaaggcgaaattgacagtgcgatcgccgcggtcattcgcgacagcgccttcatccgtggaccatatgtcgaggccttcgaacgggagttcgcggctgcggcgagtgtcaagcattgcgtgtcctgcgcaaacggcaccgatgcgctctaccttgcgatgagagcgcttaaggtaaggtcgggggacgaggtcattacggcggcgcattcctggatctcgacctccgcgatgatcacgcacgccggcgcccgagtcgtgttctgcgacaccgacggcgagactttcacgatcgaccccgcggcggtcgaggcggcgatcacgccgcgtaccgtcggtatcattccggtgcacctctacggtcaacccgcagacatggatgcgatcctggaagtcgcccgcaagcacggtctttgggtcatcgaggactgcgcccaagcgcaccttgcgcgctataaggaccagccggttggaacgttcgggacggctgctaccttctcgttttaccctggaaagaacttgggtgctatgggcgacgcaggggcagtcgtcaccaatgatacaatccttgcggagcacatcgccatgctcgcccgccacggcggattggtgaagcatcagcatcacatcgagggcatcaacagccgattggacggtcttcaagcagcgattctgtctacgaaactgccgcatctcgccgactggacaagagcacgacaagccgcggcgaacttttacgatgacgcgcttcataaaatggagcaggtgcaaacgcccaaagtcgctgcagggcggacgcatgtctatcatctctacacgattaagcatcgtaatcggggcgcactagcaaatcacctaaatcgacgaggtatcgagactgtcatcaactatccaaccgccctcccgcttctgccttgttatcgctaccttgagcacaggccagagcagtttcccaatgcatatgctgatcagaatactatcctctcgctccccttgtttgccgagattagccacgagcagcaggaggaagtggttaccgcgtttcgaagctttgtggataccgtttgttag

SEQ ID NO: 7157 - DNA, 438 bp, BradyrhizobiumColbertium
gtgcgcgacgtcaagttcggtcaacgcgtcaagatggttgagccttgcaatctctatggctgcgagattgccgatgactgcttcgttggccctttcaccgagatccaggccaatgttgttatcggagcgcgaacacgcgttcagtcgcatgccttcatttgcgaacttgtctcgattggagaagattgcttcgtcgggcatggcgtcatgttcgtaaacgatacgttttcaaccggcgggccggcgcgaggacgtcgcgaattgtggcgcgcgacaaaaatcggcaaccgggtttcgataggctcgaactccacgatcatgccggtctcaatcgctgacgacgttgtaatcggagctggctcagtggtcacgaaagatttagcggcgcctgggacctatgctggaaatcccgctcgcctcctcaagagcagcagctaa

SEQ ID NO: 7158 - DNA, 954 bp, BradyrhizobiumColbertium
ttgaagcctcgggccgacgcgctcgctaccaaattcggtgttgatgcctacgatgatatagacaagtttcttgcgcgcaaggacatggacgccgtggctgtcttgacgcccagcgggatgcatgcgcagcacgcgatagcatgcgcacgcgcgggaaagcatgtcgtcgtcgagaagccgatggcgcttcggctgcaggatgctgatgacatgatccgcgcctgcgacgaggccggggtgaagcttttcgtcgtgaagcagaatcgtttcaacgttcccgtcatcaaggcccgcgaggcgttcgaggccggaaggttcggccggctcgtcctcggcacggtcagggttcggtggtgccgggaccaagcctattacgatcaggacacttggcgcggcacctgggcatatgatggcggagtgctaaccaaccaagccagtcatcacattgacatgctggaatggttcttcggcgatgtggtcagcgttcatgcccgagcaacaaccgcgctagtgaaggtcgaaaccgaagatacggctgttgctacccttaaatttcgcaacggcgcgctaggaatcattgaagcgaccaccgcagtgcggccgagggatctcgaaggctccctttcgattctcggtgagaaaggcgtcgtggaaatcgcgggcttcgcagtcaaccaaattaggcattggagttttgtcgatacgttgccaagcgacaagctcgtcgtcgagaagttctcggtcaatccacccaacgtctacggcttcggacaccaagcctattatcagcatgtggtcgactgccttttgcatcagcgtgcagcgctggtcgatggcctgcagggccgcaagagcctcgaattgatctccgcgctctacgaatcgatcgagacggggcaggaagtcgcgcttcgattcgagccgcgacgtagcaagctaggtgtgctcccgtga

SEQ ID NO: 7159 - DNA, 264 bp, BradyrhizobiumColbertium
atgtactacgtcgagaatgggtcctatcccagtcccagcgccggcctcagagccttggtcgaagcgacgccggaagcgcctcgctggaacggtccctatttgaagaacgccaagacacttctggatccgtgggggcggccgtaccagtacacggtttcggagcagggcgagtacaatgtctactcgctcggtcccaccgggaagggaacgaagaagccgacctctgctgcgaatgcgggccggtcatgggccgacaacgggtaa

SEQ ID NO: 7160 - DNA, 219 bp, BradyrhizobiumColbertium
ttgtttgggggcgtcgtcatgaccgtcgacacgagtaaatcttcagcgtctcggtgcttcaagaaaccgcgttacgacaagcgccggtcggcggtagcgggctatacgttgctcgagttgctcgtcgtcatgggcatcctcgcagcgctaaccgccatggcgactccgcaggtgatgggctattttggaaaggcgaagacacaatccgcgcagctgtaa

SEQ ID NO: 7161 - DNA, 2373 bp, BradyrhizobiumColbertium
atgacgaacgaagccgacacttgccgaaaattcgtcgtccccaaacttcagtccgccggctgggacgacgagccgcactctatcgccgagcagcgcaccatcacggatggtcgtgtaattccggtgggaaggggctttgtccgcaagccgcccaaacgggtggactatctgctgcgctacgcgcgggattttccgcttgccgtggtcgaggccaaggccagctacaaatccgcaaccgacgccgtgcagcaggcacggagctacgcggagattctcggcctcaagtatgcctacgccaccaatggcaccgagataatcgagatcgattatttccaggggacagaaacgctcgttgctgacttcccctcgcctggagacctctggcggcgctatcagttgggcagcgggatcaatacgcccgagcgcgtcgatcatctgatcgccccttacaacacagtcggcggcaaaccgccccgatactaccagcagatcgccatcaaccgggcgatcgagtccatccttgctggaaagcaacgcttgcttctcacaatggcgactgggacgggcaagaccatcgtcgctttccagatttgctggaagctctggtcaagccgctggaatagtaccggggagcatcgcaagccgcgcatcctgttcctcgcggatcgcaacatcctcattgacgacccgaaggacaagaccttcacccccttcggggacgcgcgccacaagatcgaatccggcgagatcgtcaaaagccgggaaatgtatttcgctatctatcaggcgctggcggaggacgaacgtcgcgcaggactcttccggaattatccgccagatttcttcgacctcatcatcgtcgatgaatgtcatcggggtagcgcacgggacgatagctcgtggcgcgccatccttgagcacttcaagcccgcctaccagcttggcatgacggcgacgccgctgcgtgaggacaatcgcgacacctacctctacttcggcaacccgatttacgagtacagcctgcgccagggcatcgacgatggcttcctcgcgccctaccgagtgcatcgcgtcatcactcaatgggacgcggctggatggcgaccgagtaaggacgaggttgatcgctttggccgcgcgattcccgatgatgaataccagaccaaggacttcgagcggaccatcgccttgcgcgcccgcacgcaggctatcgcccatcacttgaccgattttctcaaaaagaccgaccgctttgctaagaccatcgtgttctgcgtcgatcaagagcacgcctcggaaatgcggcaggctctggtcaacctcaatgccgaccttgtggcgcagtatcccgattatgtggcgcgcgtcaccgccgacgagggtgcaatcggacgcggccacctatcgaaattccaagacctcgaaaccaagacaccgactatactcacgtcgtcgcagttgctgacgaccggcgttgatgcgccaacgtgcaagaatgtcgttctggctcgtgttgtcggatcgatgagcgaatttaagcagatcatcggacgcgggacacgcctgcgtgatgattacggtaagctctggttcaacatcctcgactacactggttccgcgacccgcatgttcgcagatccggacttcgacggcgatccggcccggatcacggaagaagaagtaaacgacgcgggagaaatcacctcgacgacggagacgctccccgaagggcaggaaccggagcctgccacgccggaggaaggcgacaccggcgtgatcgaaccgccgaccggcgagccgcggaagttttacttcgacggaggccaggtcgaagtcgtggcccatttggtacacgagcttgatccgaacggcaggcagcttcgcgtcgtcaaatacactgactatgctgccgaaagcgttcgttcgcttgcgccaacttccgccgagcttcgcaagcgttgggcggacgctgaccagcgcggcgagatcatcaccgcgctgggcgagcgcggcattgactttgacgtgctggccgaagagacaggccaaaccgacgccgaccccttcgacctgctttgctatctcgctttcaatgcgcctcttcgtacccggcgtgagcgggcgcagcgcctcaaggccgagcgcaaggactacttcgagaagttctctcctgaagcgcgtcaggtattggacgagcttctggaaaaatatgcggaacacggcgacgcacagtttgtcctgccggacgtgctcaaggttccaccgatctcaacccacggccaacctgccgaaatcatcaagctgttcggcggccccgatgagcttcgccgggccgtaaacgacttgcaaggattgctctatggctcgaactaa

SEQ ID NO: 7162 - DNA, 1332 bp, BradyrhizobiumColbertium
atgagtgcgaaagtacctttgcttatcggcgaagtcttcgttgacttcacgatcaccccgcccggatcggagaacaaattgcgccttggcggcgttgcccatgcagctcgcggtttttgggccttaggacaacctttccgcgccgccattgtctcgccgagctatttggaaggcttggttcgcgattacttcgcgacgctcggatgtgtcgagctaataatcctgggcatagtaacgggagctcccaacgtcacattgattttcgacgcaatcgaggtcgccgaccagggctacgatacgccgctacgggacgaaaaggctgtccagcttatcgacgtctcgcagaagttcgagcaggcggaagaggtgctgatatttccgggcacattctgcttgtcagatgtgtgcgcgatgttaccagctactgctcgcttacacatcgatatcgcttataacgttgagacgccgatggcactcgccggaatcggcaggccaattgagactatcctcctttcaacctcgtcgccgctgtttgccaagatcaaagaccaaaccgtgactggcattgctacggcttttgcgggatgtaagccgagatacgtaatactcaagcaaaatcgaggtggcagcgaattgctggataactcgaaggcctcccaatccatcgagacgcttcctgcacaacttggaacaacaattaactcggtgggggtcggagatgtcttcgcagccgtattcttaactgcgttgccaagcggtgcagcaactgctggctggcgggcaacctacgctgctgccgcctattctcaaaccacctatcccgacattttcaaaaagtacgtcgaacgcgatcaacgtctctcattacaggagatgacgtcacttggaggcacatttcttccgtggaacatgcgaccgcaagcgcagatctattttgctgcgcccgactttgcgaacgccgatcgtgcggctatcgataaggctctaaaagcgctagcgtaccacaacttctcgcctcggcgacccgttgtagagaatggtgagcttccgccaaactcaaacgccgctactttgcgggccatttatgagaaggattgcgagcttcttaagaagtgcgcacttgtgtttgctgtgccaactgaacgcgaccccggtacccttgttgaaatcggactcgctattgaggcgggcattcctgtcgtgacatatgacccaagcagaaaaaacaacaatacgatggtgatcgcaggctcttcattctattcgtccgacctcgatgcctgtctcaacgcagtgtttcaactgctcagccaaagaagaggtgaggcttga

SEQ ID NO: 7163 - DNA, 621 bp, BradyrhizobiumColbertium
atgagcgcattgcttttgtgttccggtgggcttgattccacgacggtcggctattggttggttgagaagcgaatctcgtttcaaccggtgttcctcgactacgggcaacactgcgtcgagaaagaatgggagacggtgcaagaagtactgccggccacggaccttgcatcgcccgtcaagcgaatcgacatctcaagcatctaccaggactcaacgtccagattgatcgctgagccggacctatggtcggagcacgtcgaggacgatgagctctatatcccttatcgaaccctgctgttcttctctataggcgcctgcatcgctcaaacgcgcggcctcgacaccgtctattcgggctttatcaacagcaatcacgccaaagaattggattgttccgctacttttcttaacggtttagactcgctttcccgtaatcttggacccatcagattcgagttgccgtttcgagattggagcaaggccgacgtcgtcaggcttgcaagcgaattgaaagtccctatcggcagaacatattcatgtcagctcttcagtgacaccccttgcggggcatgtcccaactgcgttgagcgactcacggcaattgagtctctatacacatga

SEQ ID NO: 7164 - DNA, 231 bp, BradyrhizobiumColbertium
ttggattttatcgcagtcgatcggcatatcagagcgtttgctaacgatgccggcgtgaagtcggaagactacgattttctgaagctcgtcgtttcctatgcagcagacctcattggtgtttctcggcgacattttgatgcggcgatttggacttatgtatctagtcagaagggcctacaagcgaagactgctttggcgctgccattggctgcttccatcgcggtcgcataa

SEQ ID NO: 7165 - DNA, 1296 bp, BradyrhizobiumColbertium
gtgacaaaaaagtatcttcagcattttcctaagcccattttggaggatttcgtcagaggccgctggttaccgatcatcggtgccggtatgtcactgaacgcaatcttgcctccatcggcgaagatgccgctttggtccgagcttggcaaactatttgccgacgagcttcgggattattctccgaacagcgtcttggacggcatctcggcttatgagcatgaatacgatcgcgcacggcttgttgaacggctagtcgaatttctgcatctcgacgcagctcggccaggtccagcccatcgggagttttgtactcttccgtttgacgtcgtctgtacaacaaatttcgattttctactggagaaggcctacgatattgagcgtcaggataagcgaacagttcatcccgtagtcgacgaagatcaactgtccatcaacgtcggcacctcggggacactgctgcttaagctgcatggggacacacgtcatcctaaacggcttgttgtcaccgaggccgactacgacgctttcctgactgactatcccttaatggcaacgttccttgcgaatttgctgataaccaaaacggcggtccttatcggctacagcttagacgaccccgatttccgccaaatctggcaggttgtgacgactcggctcggcaaatccaggcgcacggcatatgcgattttggtcggtgccaagccgggtgatatcgcgcgttacgagcgtcgaggcgtaaaggtcgtcaatctgccgggtacacgcaatagctacggtactgttctcgccgaaacgttcgcggaattgcgcgaataccgtcgtgaacatgccggacctacgttgaagcccactgaagaaaaaccgcttgagcagctgttgctgccacggagtgccatgacgcggctttgcttgtttgcgacgccgctggacgtgttgccattttatcgggaacacattttcccgttagcggaagaagcaggctttgttccggtaaccgctgcggacgtagttgatctagctgagagcgtaagcgccaagatcgatactctaatcgaccgatccgctgtagtggttgttgatgcaacgtcgaccgcgactcagatcgagctggggctcgcgctctcgcgtttgaggcgggagtccgagcggctactgttcgacgtgatcatcgtagtaagcgatttgtcccaactgccgacgccctggcccttcgtgtggatcaatcgattgagcgcgatctacgatgataccgatttcgttgaagaaatcggcaagcgcttaatcgcggctgggtaa

SEQ ID NO: 7166 - DNA, 177 bp, BradyrhizobiumColbertium
atgtcgatgcgccaacttctcgattatgcgcgcgaacggcaactcattgatgatccggagacaattttggaatggaacaggattcgcaatgatgctgtgcacggaggcaggccggtgacacgagcccaggcgaaaattatcgtcgaaggcgttgaacgaatcgtcgacagggggtga

SEQ ID NO: 7167 - DNA, 1074 bp, BradyrhizobiumColbertium
gtggatcgcagaaagcgggttttcgtagcggccagggcggaatttggtgcgctcaaccacgatttctcgttcttccagcttaggttcgggatgatagccaagcgctcgatcgaaagtgcgcgggggccgaataaatccgccatcggcatccttctgcgcttcggtgacatggccgtcgtgagcgacccaacacaggcgcttctcgcgccgcacactcgcttggcggtccgggtgcttgcggtgcacggcatccacgccgacgacgccgtcgatatccggccggcggcggacaatttcattgaccgcgctcgtttcgtcatgaattgcttccaaccgcgagaggatgttgccgatcacggcggcatgatcgtcataggcccgaagcaactcggcagcctcgacttccacggcatggcgcgcggcctccacacggtcgcgcaaacgatgttcgctagcaatacgttctgcctcggcttcggccgcgagcgcttcggcgtgcgccttttcaagatcgtcgaggcgcgcggcggcgcgatcggcagcgcgccggtgaagttcatattctgcttcggccttctgatgggcagcatcatccatcaagccgagaccggccagtgctgcgccgcgcttggtaagagcagcgtcatgctcggcgcgcgccttctcgatttcggcagcgatattggtggaagtaatcggcttcttgccgaagagggacttcagaatgctcatagtgcttgggctcaaggggttaaatcaacgccgccaatagtccgcgacggcttccgcgccggggtctcgcggtgctacggtcgatgctttcggggcaggcttcagagcggacttcggtgcactggcagcgaatgcttcatgagcgccgagccagcggtgataggcgacatgctcgcggctctcggcgaacatcagattgtgcgcgattccgtgccggacgttgaaacgctccgccgcaagctgccgctgagccgttgcgtaatctgcggacgccgcattgaggtcggcgagaagcttggcgcggctcattgggcatctccgccggctgcaatccaggtttga

SEQ ID NO: 7168 - DNA, 171 bp, BradyrhizobiumColbertium
gtgtatctctcgcgcacccaggccgcaaagcgggtcggccgttgcgcgaagaccctccgcaacctcgccaagcgtggcgatggccccccgtttctgttgatcggcgaccggcctgcttatccggccgaacagcttcaaacctggattgcagccggcggagatgcccaatga

SEQ ID NO: 7169 - DNA, 114 bp, BradyrhizobiumColbertium
atgcgagcggaaaagcgcgcggccgtgctggccgagcacgatgctcgccttactcgcatccccgccaacgacaatgtgaagcagtcgctcggcagtgaagcttcggcgacttaa

SEQ ID NO: 7170 - DNA, 153 bp, BradyrhizobiumColbertium
ttgttcgactccaatatcgatcagcgcgctaaaagtttggggaatgctcattcgcatcttgagggcgagcgcagtgagttcacccgcgagttcgggatggggcagtacttcaagcgtgggaacggggacaaggccgtacccgagagtcgctaa

SEQ ID NO: 7171 - DNA, 207 bp, BradyrhizobiumColbertium
atgaacgtcatggcgcaaggagtcgaccacgacgacatcgtgatgtcttgcgcgcagagcacgacacacatgacggcctatgaaaccttcgccaccagtcacgacgacacgcattgttacctcgttacagtcaagcccgacgccgaaccgcgtcgttggtgtcgcaagccgaaagccagccgcaaaaacaccgcggaaatcttatag

SEQ ID NO: 7172 - DNA, 117 bp, BradyrhizobiumColbertium
atgctgttcgacgaactcgacggcaaggcaatcgcccatctagagggagtttgtggagccaaagcgcccgcaacgcggcaatttgtctttgaattgaaacgggcgggatcgcaatga

SEQ ID NO: 7173 - DNA, 1083 bp, BradyrhizobiumColbertium
atgggtgtcgttccgccgattcatgttgctgccacctttatccgcgatcccgataacgggtacagctccggacatatatatggccgcacggacaataagaccgtgcagctcgcagaggatctgatcgccgccctggacggcgccgaggaggcccttcttttcggctccggcatggcggccgcaacgtccgtatttctcgctctggggcagccctcccacatcgtcgcttccgaagtgatgtattggggtcttcgttcctggctccgcgagatccatcgctacggacacgacgtaacattcgtcgatacctcagatttatctgctgtcgcttccgcgattgtagccgggtcgaccaagctcgtttgggtcgagacccccagcaatccactctggacgatcacggacatcgaggcggttgcggacctggcacacgccgccggcgccattctttgcgtcgactcgacgattgcgactcccgtgttgacccgaccgcttgcgcttggagcagacattgtcatgcattcggcaaccaaatatctcaacggacactccgacgttgttgccggctcgttggcgactttgaggaaagatcgtttctggaccgagatcagaaaagttagagaaacccacggcagcacgctcggggcctttgaggcgtggcttctaacccgcggaattcgaacgctcgatgtgcgagtccgcgaacagtgtacgtcggcgtttcagctggctcaccgactggcgcgtcaccctgccgtgagtgcggttctctatccgggcttgcctgggcatccaggacacggtgtggcgttgcggcagatgataaatggcttcggaggcatgctatcgttcagactggccggaggagaaagcgccgctatctgcgcggccgctcaagtcaagctctggaagcgtgcgacctcgcttggcggcgtcgagagcctcatcgagcatcgatcgtcgatagaaggcgcaggttctccctgccctcccgatctgctgcggctgtcggtgggtctagaaaatgtcgatgaactctacgcagatctggaacatgcctttttgtgcctgcggacggattga

SEQ ID NO: 7174 - DNA, 261 bp, BradyrhizobiumColbertium
atgttcggtgagtacggacttttttgcgacggcaaggtcgtcgcgctggtctgcgacgacgagctttttgtaaaaatcacccccgccggaaaagcgttcggaggcaaattgccaaaggctccggcctactcaggcgccaaacccagcctactcgtttcggccgatcggtgggacgatccggaatggatgtcgcaactcgtccgcgtcgcagctgcagagctgtctgcgcctaagaaacgtccgccaggcaaggctcaatag

SEQ ID NO: 7175 - DNA, 339 bp, BradyrhizobiumColbertium
atgttctacgagaaagctttttgcttaagagtccgcttcgttcacgaaagcaagcgctacgccgaattggacaccggtagcgtgacgctcgcattcgctggggagctgatggcgaaaatgaatgagcttgccatccgccccaaccgcagcgccgacgcagcagccggtttcgagattgccttcgtgtgtgacgatcccgatgacgcttacaagaaggcagtcaccgccggcgcaataggggtgaaatcgcctgcatcgaaaccctggggacagacggttggctacgtccgcgatctaaacgggtgtctggtcgagctctgttctccaatgcccggatag

SEQ ID NO: 7176 - DNA, 279 bp, BradyrhizobiumColbertium
gtgtctgttgccgaactcgccaagatgcaccaggtcgatgagcgcaccgtgaggcgccgcgtcaaggagagtacgggcctcacgccaaaggccctctcgatgattctgcagtttcatcgcgctctcagactggttcgcgacgttggccttgatccggtcgatgctgcaaccgaggccggttatgccgaccaggcacacatgacgcgcacgtttcgcgcacttggcggcttcacaccagccaatattccagatgtcacgctcgcgggtttgcctctgtga

SEQ ID NO: 7177 - DNA, 273 bp, BradyrhizobiumColbertium
gtgacggagcggcaccatctgatacgtcctcgatgggccggcgatcaacggctcaacattcccgattgcgccggcatcatcgaactcaaatcgaagaataaggtcgcttcgaccgtcgggcaaaacgcgatgttcgccgttctttcgggcaatgcaggtccacacggcctcgatgctgccgccttgatcgtggttgtaggaatgctctcggtgttcggcgggaagaagcatggcgtgtctgctttggagcggggcgaacgtggcaagcgatga

SEQ ID NO: 7178 - DNA, 1164 bp, BradyrhizobiumColbertium
atggacgcaacacaaaacgtaaggcattcgcccaagattgatggttgcgcgcctccgcccaggcagatcgtgcttgtgcttcaaggaggcggcgcgttgggatcatatcaggccggcgtctatgaagcgctgcacgaggcaggcgtccaactggactggatcatcggcacatctatcggcgcgatcaatgccagcctgatcgccggcaacgcaccggagaatcgcgtttttcgtttgcgagagttctggcaacggatgtcgcggccttcggcgtggagctatgcacggtacttccccgcaattggtgaagcggcaatgtattggtcgacagtggcgaacggcttgccgggttttttcaagccaaatccgctggctcacgccggcatcaaccatgtgctcgggccggagcaagcgggctactacaatgcttcgccgcttgagcagacattacgcgagctcgtcgacttcgacatgattaatcaaggcccgcttcggctcaccgtcggagccgctcatgtgcggaccagccaaatgcgctatttcgacagccgggacgaggccataaccgtcaaacatgtgcaggcctcgggcgccctgccccccgccttccccgcggtgcggatcgatgacgagctctactgggacggtggaattctgtcgaatacgccaacggaagctgtcttcgacgacaaccctcggcgcgattcgctgattttttcagttcatctttggaacccgcaaggcgccgagccggaaacaatggccgaggttctcaaccgccagaaggatgtgcagtactcgagccgcatcgcaagtcaaatcgcgcgtcagcaacaaatccacaaactgcgtcacatcatcagtagtctagccgcgcgcctgcccgatggcatccgtgagggagccgacgtccaggaactggcgagctatggatgccagacgacgatgcacgtcgttcgcttgctcgcgccgcagcttgacagggaaacgcacaccaaggacatcgacttcagcacggagggagtcgaacaacgctgggcggccggatacgctcacacgaaatctgtgctttcgtccaggccctgggaacagagcgtcgacccgctgacgggcgtcgtgtttcacgagcacatggagctggtaccaaaagccgccgacatatga

SEQ ID NO: 7179 - DNA, 888 bp, BradyrhizobiumColbertium
atgaaccacggccgcgactccacgacggcatttgtatttgccggtggcgggagcctgggtgcgatacaagtcggcatgctgctggcgctggcgcaagccggcgttgtggctgacatggtcgtcgggtccagcgtcggcgccatgaacggcgcgtattatgcgggggagcccacctttcagaacgtgcagcgcctggcggagatctggcgcaatcttcgccgccaggacgtatttccggtcacgatccggacgatgctgggtttcctttggagacgcgattttctggtatcgcagacgggcgtgcggaagctcatccggaacaatctgccctaccgaaatctggaagacgcgaaaattcctgtccatgtggtgacgacggatatcgcctctggagatacggtggtgctgtcgaccggatcagccgaagatgccattactgccacgaccgccatccccggcgcttttcctccgttgctttacaatgagcggtacctttccgatggcgcgatttccagcaacacgccggtccggatcgcgatgctgaaaggcgccaatcgtttgatagtgcttcctacgggatacgcgtgcgccaaccaggcgccgcccacgggcgcggtcgcgaacgccctgcacgcgttgactttgctgattgcgagacaactgatccaggaagtcgaagctgtcggggacgacatcgatttccacatcgttcccccactctgcccgctgtcggggtcgccttacgatttttccatgactgaccaacacatcgctcgctcatacgaacacacgatgctgtggatcgagagtggcggcttgaagcgcgacgaggtaccggtgcagcttcggccgcatcagcacttcggagctcgcgtccatgcggaatag

SEQ ID NO: 7180 - DNA, 762 bp, BradyrhizobiumColbertium
atgatcatccatggcgtttggggacaggtcatgactatgcaaggcgttgccgcaaaaccaggtgcatcaagcaagacaggcgggaagccacaactcaatccacggcggctgcacccgtggccgatccgagtgatgcactggatcaatgcggtcacgatgttcatcatgatcggcagcggatggaaaatctacaacgacgaggtaattttcggttggctgcatttcccggattatttgacgatcggccattgggctcaacacgggttacaatggcactttttcgggatgtggattattttcttcaacggcctggcgtatctcgtttacggagttctgacaggccgcttccgcaggatgctgttgcccattggaagacgcgagcttctgtacaccgttcgagacgctctgcggttcaagctcgcccacgaagagacgaccaaatacaatgcggtgcagaaactgttgtatttgggtgtgattgcagccggaataggtgtcgttctgtccggccttgccatttggaaaccagtgcagttttccgaactttacgtcctattccacgactttcaaaccgcgcgcttggttcattttctctgcatgaccgcgatcgttctgtttctggtcgtgcacgtcgcgctggccttgcttgtgcccaaaacgctcgtggcaatggtgacgggcgggcccgtgctggatgatgatggcaccgctgcgaacatgagacttgatgtgagtacgacgatcgaggagaacctcaaatga

SEQ ID NO: 7181 - DNA, 567 bp, BradyrhizobiumColbertium
atgccgctgcgtcgctccctcagcgccactgcgttgatcctaaccagtctcgccgcaagcgctatgacatcgctcagcgctgaggcgccacaggacctcaagacgcggcttgaggtcgccgccactcggaacactgcaccagatttcgtgggcatcaccaagtggttcaattccgtacctctcgacatggctaatctgcgcggcaaggtagtcctggtcgatttttggacctatggctgcgtgaactgcgtcaacacgctgccgcacgtcactgcgctctacgagaaatacaaaggccgcgggctcgtcgtggtcggagtgcatacccccgaattcccgttcgagcgttccgcaagcaacgtacaggctgcgctgaagcggcatggcatcacctacccggtggctcaggacaatgattcgaagacctggaacgcgtaccgcaaccagtattggcctgcgcagtatatcatcgaccagcacggcagcatcgtgttccagcacgccggcgaaggccagtacgagcaaatcgaacggaccatagcaggtctgctcgacgccagtagctaa

SEQ ID NO: 7182 - DNA, 690 bp, BradyrhizobiumColbertium
atgcttgacgtggttcttgccttaattgcaggtcttattacggtcgctgcgccttgtacgttgccgatgctgccgatcgtcttaggggcgtcggtcggccagaccagcaaaacacgacccgtgatgatcgcggccggattcgtattttccttctcggctgttgcgctcgcgctaaacgctatcgttcgcgtgtccgagttcgaccccgatgtactgcgcagcgcggctgcgatcctgctcgccggcttcggcttattgatgctatggcctctgccgctcgagcggctgatgagccacctcagtggctttaccaacgtcagcgtttcggcaaactaccgcgttttcggcggtttcgtgctaggaaccacgctggggttggtctggacgccttgcgctggtccggtgctcggctcgatcctcactgtcatcgcgacgtcgaccgataccaggtgggcgagcacgctacttgtgacttacgcggtcggggctgcgatcccgatgctggctatttcctacggcggacaggtcctcaccacccggctgcgcagctttacgcggatcgcgccgcgtctgcagcagggttttggcgtggtcgtgatcggtttggccgcgctttcctacttccaatacgacacgctgatagtggcgtggctgacccacttctatcccaacggccagatcggcctgtaa

SEQ ID NO: 7183 - DNA, 159 bp, BradyrhizobiumColbertium
atgagcaccgcactggccgtccatctcgagcgcagtggcgggaattcctgtcgaacgccgcaacaggataagcgtcggcaatcactcgcaaacgcacatcatcacaaacgcacagtcatggacgagcagatgcgattgatcggcgcgatcttccaatag

SEQ ID NO: 7184 - DNA, 717 bp, BradyrhizobiumColbertium
ttgcgatccggcgcgctgacgctcgctcaagcgggcgtgccggacgtttttgtcgacgaaccgacgcttctgttctttcctcgcgcgcgcgaacatcgcttcacgggaagtgcaaaaggcggcgctgatcttatctgcgcgaccgtggaccttggagcttcgatcggcaatccgatcggcgaaggcctccccgatctcgtcatgatgccgctaagccgccaccctgcgctcgcgccgatctgcgggctgctggtcgaggagggattgtccgagcatgaaggccgccaggtggcgctcgatcgtcttttcgaataccttctgatcttgatcgtgcggcacgtggtgtcgagcggagcagttgctggcggtgtgctcgcgggtctcgccgacccgcgattgggaagagcattgacggcgctgcacgccgctccgcgtcgcgcctggtcggtcgaagacctggccgagtctgccgggatgtcgcgtacacgatttgccacacacttccgcgccgtcgtgggacgggcaccgatggactatctgacagtttggcgcatgaccctcgcccgccagctgctcgccaaaggcaagccggtgaagagcgtcgcggcagaagtcggttatgacagcgcggccgctttctcccgcatattcagccgcgtaacccgtcagacaccacgtgaggcagcggtgtcgcgcaaaggcaaagagggagcatag

SEQ ID NO: 7185 - DNA, 546 bp, BradyrhizobiumColbertium
atgtcccgtattgctccgaccgatcccgccaccgccgactccggtgttcaggcggtgctcgccgccgtcaaggccaagatcggcatgacaccgaatctcttcagaacattcgctcgcgcacccgccgtgctgaatggctatctcgcgttctccgaggcgttgtcggccggcgccttgaccgcgaggcagcgcgagattttggcgcttgccgtcgcgcaagccaatagctgccattattgtctgtccgcgcacacgctgatgggcaagggtgtcggcctctcgacggaagccattgaggcggctcgacgcggcaccgctcatgacggcaccgataaagcccttgtcaccctcgcgctccgcattgtcgagacccgcggtcaaatcaccgatgccgacctcgcttctgcgaggcttgctggtcttagcgatgcgcacgtcgtggaggttgtcgggcaagtcgcgctgaacgtgctcaccaactttaccaacaatgtcgcgctcaccgacatcgattttcccaaagttgacccggcggtcgcggcctga

SEQ ID NO: 7186 - DNA, 906 bp, BradyrhizobiumColbertium
ttgttcgaacagacgctcgagcgcgaggtggccatggctgaagatgctcttttccaggacgtcattcgaaggcggcgcagcgtacggaagttcgaggcgggtcggagcatcagtcgcgacgtgctgcaacgcattgtcgattgcggccggtgggctccctccggcgcaaatgtgcagtgctgggattttgtggttgtcgacgaccctgatgtgcgcgaccgcgtgatggccgtgttcttgcgccaggcgcagcgtctggtcgatcatgccaaaggctttccggccgtcaaaaaaacctatctggctaatacgatcgcaatcgtcttcgtgcttggcgacccgcgttggaaggcctgtttcccgcaagccacaaccgatgaatgggacgcggagtatcgcgcaaacaacgaggccatttttctctgctcgcttggtgccgcgatacagaacatccagctcggcgtcgccgccgagggccttacgtcggcttggttgtcgggaggtggcgaggaagaaaccaaccgagagcttgccgacgtgttgggttatccggcgtggatgcgggcttatggcactattccgattggctatccggcggtcgatcagagacgccgctaccgtcgtccgctggggcaagtgctgcactggaactgctaccagacaagccagtaccggtcgcacgcgcaagtggatttctatgaaagtacgttgcggccttttgcgatgtatcgcgacgacgaatctatggacagctggcccgaccgggatgagctgctgggagattggaaggaagcatttaccggcgagatcaccaacagccacggcgttctggaggcggaggccgacttctcaaagcccagggtgatcggccaggcaacgaagcgccggaagatcctccagacgtga

SEQ ID NO: 7187 - DNA, 681 bp, BradyrhizobiumColbertium
atgattcgattctacttcaatctttccccgaacccgaccaaggtcgctctttttcttgaggaagcggggttgacctatcagcctgtaccgatcgacacccgaaagggtgagcagttcacgccggatttcctggccatcaatccaaacggcaaggtgcccgcgatcgaagacgacggtgtcatcgtgttcgacagcaatgcgatcctgctgtacctcgccgagaagacaggaatgttcctgccgcgccctgagagccgcggcgcgttgctgtcctggctgatgtttgttgcgagcggcgttggtccgttctcggggcaggccgttcatttcaagcattttgcgcctgagaaagtggcctacgcccataaccgctaccagtacgaggcgatgcgtcattacactgtactcgacggccacttggcccaccgtcgctacatggtggacgataactactcgattgtggatatggacgtgtggggatgggcgcgcatgatcccattcattgtcggcgaggaggcgtggacgaaattgccgaaccttaagcggctgcatgacgaggtcgcggcccgtcccgccgtggctcgcgcgttggagctgaagaataagtttactttcaagccggagatggatgacgaggcgcgtcgtcatcatttcaagcatctcgcgctgcaggtcgcctga

SEQ ID NO: 7188 - DNA, 561 bp, BradyrhizobiumColbertium
gtggagacgggctttgccctacatgccaagcgcgtcggcgaccgcgcgccggacatcgtcttgccggatgcccacggtcggcctttcgacgtcggctcgcttttgcaacacggacccgtggtcgtcacgttttatcgtggcggggggtgtccctactgcaacctcgagctcaaggcctatcaggatctgctgcctcacattgttgcagcgggtgcaaatctggttgcgatcagcccggagaagccggatgattctctcgacacggcggaaaaaaatgctctcaccttcacggtgctcagcgatgcaggacagaggatcggaaaggcttttggcctcgtctactcctttactgatgagttgcgcgccgtttacacgtcactgaacatcgatataccggaaagaaatgctacgcccgatgattggtctttaccgttgtcggcaacctacgtcatcggccccgacgggcgaatcatgttcgccgacacgagtgtggactatcgttaccgcgccgatccattggatgtgttgcaggttctgcaatcccgcgccgcggcagagtag

SEQ ID NO: 7189 - DNA, 156 bp, BradyrhizobiumColbertium
gtggaatctttcgaatcgcggctcctcgccgccggcgggttcatttcgatctcggaagcaagcggtcacattgtcgcattcggggaatgggtgctgcgccctgcctgcaaggcgcggcggcctggctgggctgccggcagagcagctccaccttga

SEQ ID NO: 7190 - DNA, 894 bp, BradyrhizobiumColbertium
atgcgcgcttcctccacgctaccgcccctccatgcactgagagccttcgaggccgttggccgtctgctgagctttcgccgtgcgggcgaagaactgctgatcacgcaaagtgccgtcagtcatcacatccgccagcttgaggggacgctggggatccagctgttcgagcggaaggcgcgcactgttgcgctcacccccgccggcgaacgctatcacgaagtcgtcacgcgcgcgttcgcaggcttggccgagggtacggccgagctgacctcctctcgcgtccgccagaccgtgcgggtaagtctactcccatcgttcgcggccaactggctggcgccgcgattgacccgcttccgcgtggcgcatccaacggtcgacctggagcttgatccgaccctgcgcctcgctgatctcaacgccagtgaagccgatctcgccttgcgctatggcgatggacgctggcctggagtgcgcgccgagctgctcatcgcggagcaactcaccccggttctcagcccggtactggccgcagtgcggccgctgatcgagcccaccgacgttctcgcgtttccgctattgctgaccagacgtccgttcgactgggacatctgggccgaagccgtggggctagacctccggtcggcgcagacgatccggctcaccgactacaacatcgtgctgcaggcagcgatcgatggccaaggcgttgcgcttggccgcaaaactctcgtcgatgaccgcttgcggacgggcgctttggtcgctccctgtcctcgcatcatatcctcgccgcttgctgggcattggttgctgacgcctgagcggcgtcggctcacatccggagcccgagccttcgtcgattggatcagaagcgagacgcgtgatcacccttga

SEQ ID NO: 7191 - DNA, 1227 bp, BradyrhizobiumColbertium
gtgaccgttggccatacttcgctggacgtagccgtcttgcgtgcggcgacgccgggtgccgagatggtcgcgcacttcaaccatgccggcgcctcgctgatgtccgagacgacgctcgccgccataaccgatcacctccagcgcgaggcgctttacagaccgcacgaagcggcggcggaggtgcaggggcgcatcgagcaagcgcgcgccgatgcggcgacgctggtcggggcgacacccgaggagatcgcgttcacctcgagcggctcggcgggctggggacttaccttcgccgcgcttccgccgctgcgcgcgggtgaccgcatcctggtcggtcgacatgagtggggcggcaatctcgcaccgatgcggagcgccgccgattacgtgggagcgcaggtcgaggtaattccgtgccacgaggatgggacagtcgatccggaggctctcgcggcgatgctcgaccggagggctcgtctggtctcgctcacttggctgccggcgaatggcggtctaatcaatgacgccgccgcgataggccgcgtgacccgggcggcggccgtgccgtacttcatcgacgccggtcaggccctcggtcagctgccggtcgacgtcaaggccctcggctgcgacatgctgaagggggcgggtcgcaagcatctgcgggggccgcgtgggacggcgatcctctacgtccgtcgccccttcttgggcgccctgcagcccggctttctcgacgttctctccggctcatgggtggacggtgcgccggccccgcgcaacgacgcgcgcttgttcgaaacgagcgagattccggtcgcgctgctgctagggctcggggcggcgttgcgccaggcgctcgccctcggcgtggatgcgatccgcgcacgcatcgccggcctcgcggagactctccgcgcaaggctggccgacatccccggggtgaacgtcgccgacctcaggtccgaacgctcgggcctcgtcgcgttcaccgtctcgggcttcgaggcgcaggacgttaaggccgcgctcgggcggcggaagatcaacgtcggcgcgaacggcgtcgcccacaccccgctcgatatgacagcgcggggtctcgacgggatcgtccgcgcctcgctccacgcgttcaacaccgaagacgaactcgaccgcttggtcgcagcagccggcgcgatcgcggcggctcaaccggccgtcaaactggagattgcctcatga

SEQ ID NO: 7192 - DNA, 435 bp, BradyrhizobiumColbertium
atgactttcgacctcgttaaacctgcggtgctcgccgccgccatgctcgccatgggcgcagcccatgccggacccgccgagcggaccgccgcggcggagaacgcgacgctgagcgaggacgccccggtctattttgtcattcaccagcacatcaccgacgagaagcgcttcgacgcctatgtcgccgccgtcactccgctgatcgcggcgcgcggcgcgaagctagtcgcggcgggcaccccagagacgatcgcgggcgacagccggttcgagcgcactgtcgtcttcctgtggccgtcgcagcgggtcttccgcgccttctggacctcgccggaatatgcggaggttcagaagcttcgcgccggcgcggtcgagtggaacgcgcagctcgtgcctgctctgcccgaggcgaacaccgcgagcacaggccgatga

SEQ ID NO: 7193 - DNA, 369 bp, BradyrhizobiumColbertium
atgagcgagaatccgaccgaggcggccgcgatcgcagcgatactggcgcgctacgccgaagccggccggacggggcgcgccgagctcgtcgcgcaggatttcgatccgggggctcgcattcgcggccggctgcacggcgcgcttatcgatcggaatcgcgaggagttcctggcgttcatggcggaagcgcccgcaggcgggttgcgcaccgagctcggcttcgtcgacatcgccggcgacgcagcgatcgcacggctggaatgccacgactggaacggtgtccgatacaccgacctgctcacgctgctgcgccacgacggcgtgtggcggatcgtcgccaaggcttttcacgcccatgccgatgcctga

SEQ ID NO: 7194 - DNA, 150 bp, BradyrhizobiumColbertium
atggggcgcgaacggccaggtaccgtcaaacgtctcgtcggggctgatcatggaaggcctttcggtcgggcttgggagggaggttgcgaagacgggggcggcaggcgcgaggatggcgaggccggtcaagaggacggcgcgacggtctag

SEQ ID NO: 7195 - DNA, 846 bp, BradyrhizobiumColbertium
atgcactatgttgacgagggcccgcgcgatgcagaggtgatcctttgcctccacggcgagccgacctggggctatctgttccgcaagctgattcccccgctcagccgcgaccgccgcgtcgtcgtccctgaccatatgggcttcggcaagagcgccaccccggcggaccgcagctactggctgcaggaccacgtcgacaacctggagaagctgacgctcgcgcttgacctcaagaacgtcacgctcgtgatgcacgatttcggcggacccgccggtatggcgctcgctgcgcgtcacccggagcgcattcgccggatcgtctcggtcaatgggccgacgccgttcgggcaaagcgacctcgtcgaccgggtcaccgccaacgtcggtgtatcgccctggttccaatggatcctgaaggccgagcaggatggcgtgcttgagcaggttctgggccagctgggctacaacgtcctcagcactctgaagctcaacggcttcgagacaaacgcgctgatcacgccgagctggctccgcgcctatggggcccgcttccagacgcccgcagacgcgctcggcccgatcggttgggccaagggctacgcgaccggcgcgcaccacttcgagacgcccatctccgccgcggcgcaggcgatccgcagccggcccgccatggcgatctggggcgccgccgaccacacgctccacgccaagcacttcctgccgctgttcacggccatcttcccgaaggcgcccgtccatctgctcccgggcgtcgggcattacagcccggaggacgcgcccgacacgatcgtgacgcttatcgacaacttcatcaggctgacgtga

SEQ ID NO: 7196 - DNA, 894 bp, BradyrhizobiumColbertium
atgcagcttgttactctggctcagtttctcgagattgtccgaaccggctccattcgcaaggcttccgaggagctcaacatcgcggcctctgcgctcagccgtcaggtcgcaaatctggagcatttcgtcggcgctaaactgttcgagcgcaaagctgacggaatgagtctcacggtggaaggggcggcgtttctgaagtacgctcaacggactgtgcgagacattgacctcgctcgatccgaaatcgacgagatccgggggctccgccgcggacgggtgcgcatccattcggttgagggagcgatcgcaggttacgtattcccggcgatctcggagttcaggggaaaataccctggtgtgaccttcgaagtcgtcgcagcaggaaatgatctggtcattgaagctctgattcgggacacggctgacatcggcatcggcttcaatcctgctcccgacatcaatgtgcgggtctgtgcaaaggttacgaaggaaatagtggtcgtcgtttcaccttatcatcctatggcggaaaaatccgagctggcgctatcggaccttgccggagtcgagatcgcgatgcttgatgcttcgtttggaacgcgccgactttttgatcgggctttacggaatgcggacctctcaataccgttcgctctgacggtaaacgcgatcgaaatcgcgaagtcgttcgccaagcgcaaccacggaattgcaatcgtgcctgcgttcgctgcccgctacgagtgcgagcacggcgaactcgtcgctgtcccgttgtccgaacctagcctgaagcgggcgaccgtcgcattgtgcgtgcgccgagaccgcgagttgccccgggcagtcgcggcttttctgaagctgcttcaggacaaggtcgccctactttag

SEQ ID NO: 7197 - DNA, 1227 bp, BradyrhizobiumColbertium
atgataatcgaccgtcgaaatttcatttctgcttccgccgcagctgtgacgttgcctttcctgccaaaagccgccatggcggagaacgaaatcgtcatcggcggtcttcacgacatgacgggcgtcatcgacctgattggcaggcccatggctcaattgatggagttcgccgttcacgagatcaacgcggcgggcggtctgctcggcagaaagctgcggttacaggcatatgatccgcaatctaatcaacagttgtacgcgcagctcgcacagaagctggctgttcaggacaaggcgtcagtcgtgcacggcggcatcacgagttccagccgcgaggtcatgcgtccggccctgcgtcgcgccaagactttgtatttttataacaccctttacgagggcggagtctgcgatcgcaatgagtttacgaccggcactacgccggcccagacggttgccaacctcgttcgttatgcgatgaccagattcgggaagcgagtctacatcgtcgctgccgactacaacttcggtcagatcagtgcggcctgggtcaagaagtttgtcgaattggcccggggggaaattgtcggaaccgaattcttcccattagacgtcgataatttcggattgtcgatatccaagatccagacggcgaggcctgacttcgtgatgtcgatcctcgtcggcgcggctcatctctccttttacaggcagtgggccgccgccgggttgatcggcaaaattccgatggcctcatcgaccttcggagcgggtggcgtggatttcgtgatccttcgcccggaagagtgtaacgggttggtcaattgttcgacctacgtccaaggcatagattctccccgcaatagacagtttctttctgcactgaggcagtatttcggagatcgtacgcccgtagtcgcagagatttcctgcaccacctacgagggggtctggctatgggccaagggcgtggagaaggcgggctctgtcgagcggacagcggtgatcgaagcactcgagagtggcctcgtgctcgagggaccctccggcacggtaaccgtcgatccgttgacacaccattgcgttcgcgatgtgcatattgccgagctgcgcgatcgtgagtggaaggtcttggagactatccgacaagtaccgccatccgatacatcggcggtctgtgacttaaagaaggatccaaactcaaccattcagcacaacatccgattctga

SEQ ID NO: 7198 - DNA, 867 bp, BradyrhizobiumColbertium
atggaatacgcggttgtgctgctcatagaaatgttgggcgctgtcagcggcctcttcatcatctcgataggtctagcagtgatcttcgggatgatgcgggtaatcaacatcgcacatggtgaatttgtcgcggtcggcgcctacgcgaccatcctatcctggaaggcaggcgtcaatgtgtggctcgcgatcctgctctttgctccactgagcggagcgattctcggtgtgcttgtcgagcgatttctaatccgcttcctttatggccggcttttcgactcgctgctggctacgtggggattgagcctgctcttgatcggcgccatcactacactcctcggcaatacagtcgagggaatgccatccccattgggtagcgtttcgatcggatcgtatcagttgtcgttgtacacgctgtttctcacggcggtaggcgtggctctgatcttgttgtcatactctgtgttgcggttcacgagcttgggcctgatcgctcggggtaccatgcagaatccggaggtcgcggcttccctcggcgtcgcgccaaaccaagtgtacatggtgacgttcgcgttgggcgcagggctggcaggtctcgccgggggagtgttcgcgccggtaatggccattgtgccgaccatgggaacggccttcgtcgcgaaggctttcattactgtgatcggcggccccgccgccgtagtcgccggctccgcagcgtccagcgttctgttcggtagcatcggaaacgtggccaccgtggtcgctggcccggtttggggcgacgccgcgatgttgttgggcgcaatcgtgttgctgcgggcgcttccagaaggcattacaggacgcatttggaggtcggcacaatga

SEQ ID NO: 7199 - DNA, 927 bp, BradyrhizobiumColbertium
ttgaacgtctcactttcgatttttgcgctgagtctcgcctacctgtggggttacggcggcgtcctaagtttcggacatgctgcgttcttcggtctgggcggctacgcgtttgcggtcgtcgcgctcaacacgctggacgcctggatggcgctcggtgctgcgataatgtgctcggctgttttcgccgccgggttgggttggttcatgttctacggtcgccttaaccacgtgtacctcagcgtcgttacgatggtggcctctctgatcctgttcaaggttatgagccataccgcaggcccagactacatgatcggccgggtcgctctgggcggctataacggcatcaccggactgccggggctctacattccgtttgcgccggacgatgcgctcgacgaccgggctctcttccggctctcagtggctgtcctcgtcgtcagctatctccttctcaaggtcctccaaagcacatcattcggccacttgactatcgccattcgcgaaaacgaaacgagggctgcgctactcggatacaatgtgaggatgcataaggtcctagtgttctcgctgtgtggcgggctcgcaggactggcaggcggtatgtttgctagtcagcaggccttcatcgatccgaatgcgctcgctctgccgctttccgcgcaatgccttgtatgggtaatcatcggcggacgcggcgcgatgatcggtcctgtgctcgcaagcgttgttctccagcaaattaccgccaagctgagtgaaaccaccgccatggacagcaatctgcttctcggaggcatgttggtaatctcggtccttgtactccctggaggtttggtcgcagccttcggtcatttggtctttcgagttgcggatctgatccgccggagggcaccttggagccgagataaggtaggagcactcacgtga

SEQ ID NO: 7200 - DNA, 648 bp, BradyrhizobiumColbertium
ttggtcgtgcaatccggcgaactgcgctgtctgatcggccccaatggggctggcaagacgacgttcttcaagtgcgtcgctggtttgcttcgaccaacgtccgggacggtcgaagttcttggagagaacgtgactgaggcggagagcttcatgatcgcgcgtctgggagtcggcatcaagacgcaagtgccgagcttgttcgggggactttccgtctgggagaatctttggttggcagcacgaaaatgcggcgacagggccgcccaacggcggggcacgcaacatgcgttggagcgggtcgggatcacggagataagctacaatcaggtcgatcggctctctcatggcgaacgtcagcttgtggagctggccatggtgatggcgtcagaacctcgtttgatcctgttggacgaaccagcggccggaatggcattcgacgaaagcctgcgcctggcggagatcataaaggagttgactaggaacgcggccatcgtcgtggtcgagcatgacatgcgattcatgcgtgcgctgagcggggttgcgacggtctttcaccagggagccatccttctggaaggtagtttgcaggacgttctcgatcatcctgtggtgcgcgacgtctatctcggaaggagtgtcgaggcatga

SEQ ID NO: 7201 - DNA, 153 bp, BradyrhizobiumColbertium
ttggattttctgcgtgcggtgacggatcgcgtccttgtcatgcagaaggggtcgctgatcgctgaattgtcgccagaactgttgggcgacccggtgcgtagcacggcggcgctcggtatcgtctttggatccaaagaaggggaaaagccatga

SEQ ID NO: 7202 - DNA, 1557 bp, BradyrhizobiumColbertium
atgatcgtgaaaccacccacccccgtcgttttgaaagaaacggcggctgaaatcggcttgtccctttccgacgacgacgttcgatcgtttgtcggactgatgcaggggcacttcgacgcctacaatgtagtggacgctcttccggactacttgccggaggtacgctatccgcgaacgccaggccaccagccgccggcagagcaaaactcgcacaatgcctggtacgtgaagactgatattgtgggcgctccagaggggttgttgaaaggcaagtcgattgcgatcaaagacaacgtgatggtggccggcgtaccgatgatgaacggcgcatcgatcctcgagggttacgttcctgatatcgacgcgactcttgtcacccgacttttggatgcaggggcgacgatcgcgggaaaagcgcactgcgagtactattgcctgacgggcaacagtcatactgggagcaagggcccggtccacaatcctcatcgcaaaggttactcagccggcggttcgtcttcaggaagtgcgactctggtcgcgctcggagaggtggatatggccgtcggcggagatcaaggcggatcgattcggatgcccgctgcctactcaggcgtggttggactcaagcctacgttcggcctcgttccatataccggtgtcatgccgatcgagccgacagtcgaccatgtagggccgatgacgcggaccgtacgggacgccgcgctgatgttacaggtcatcgcgggtccggacggtctggatggtcgccaagcactgcaccagggggtgccgaaatattccgaacttttgggttcgggagttcgcgacttgaagatcgcggtcgtcagcgagggatttgcgtggcccaattcggagccagacgtcgacgagcgcgttcgcgaagcggccgacttgttccgaaagctgggtgctacggtagaggaagtgtcgatcccgatgcaccggataggtatatcgctttgggttccgatcgccatcgatggtctcacgcacacgatgatgtggggcgatgcttacggcgcgagtcggagcgaactctatgtgaccgggctgatggatcaccatcgccgttggcgggaacgtgctgacgagttgtcggagtccacgaagcttttcacgctcatcgggacctacgtgcgcaaccgtcacggacttcgtttctacggtaaagcgatgaacctgatgcgcaagctgcgcgctgcttacgactccgtgctgcgcgagtatgacctgcttctgatgccgaccgttccgctcaaggctaccaaattgccggaagcgaacgcgacgcgagaggaatacatggcgcgcgcgcatgaaatgctcgcgaattgtgctccattcgacagcacccatcatccctcaatctcagtcccgtgcggctttagtgaagggctcccggtgggtctgatgctgactggccggcactggcaggatgcaaccgtcctacgcgcggcctacgcctttgagagtgccggaggcttcgaactcggtagcgatgccgacgcggatcgtcgcaggaaggaggccgtttaa

SEQ ID NO: 7203 - DNA, 609 bp, BradyrhizobiumColbertium
atgccgacggccatggagcgcctgatctggggatttggagacggttcgaccttgccgatcttcgagacgcctttcggcaaagtgggaagcgtcatctgctgggagaactatatgcctctcctcagaatgacgatgtactccaaaggaatccagatctactgcgcgcctaccgccgtggaccccgacagctggcagtcgacgatgcagcacatcgcgcttgagggtcggtgtttcgtattgtcgtcgtgccagtatctcacccgcggcgactgccccccggactacgctgcggctcaaggcgaaaatcccggcatcgtattgatgcggggcggcagtgtaatttattcgccgatgggtgaagttctcgcggggccaaacttcgacggaccaacgatactctacgccgacatcgacggcggcgagattgcccgcgccaagttcgatttcgatgtagtcggtcactatgcgaggccggacattttccggatgcaagtcgatgagacgccgcgcaatccggtcgtccacgaaatggctgacccgacgcggcacggcctatcggacgggcagggtcagaacgccgtgaaatcatcagagggtctgaccgcctaa

SEQ ID NO: 7204 - DNA, 978 bp, BradyrhizobiumColbertium
atggctgctctcgccgttctcctggttggcggattttgcgccttcctgatgggctttgccgccaaccagggcggcacctgtgcggtagctgcagcacgagaggttgtggaacgcggtcgtgcgcgtctgctggccggcttcatgcttgcggcgtctaccggaggcatgatctatctgccggccgcctgggcgtgcggcggtagcgcccatgtggtgggccaggtcaccatcgggctcccgttgttggccggcgccgtgctgctcggggtcggcgcgatggtcaatggcgcctgtttgttgggatcgctctggcgacttggcaacggcgaattccgactgctggcgctgcctgccgggctcgcaatcggggatgcaatcgttgttcgtgcctttcctgcgctgctgccggagctgcaggctaacgcctgggaaaggcccggcgtcggcggagcgctcttcgtagccgccatgctgccgctattgatcacgagccggttctggctacgccgccgcgaggccccgtcggcgtctggtcgttggcacctctcaaatgcgatggtctttatcggtctatccggcgcactgcttttcctgctgcagccgagcgcaacctattcggatctggtccggcgcagcatcgccccgtccatggtcacgacggtcgctggtctaggcggctatgccgctgcggccttgactgtggtcggcgccatgatgtcggcaatccgcgtcggcgccttcaggccgcggcggccggcctgcgccgcgcttggccgcacgatcgcaggtggcacgctgatggccgccggcgcgaatcttatcccgggtggcaacgacgcgctgctgctggccgcaatcccgggcggctcttcgtcgggtactgtcgcctatgcgatcatgaccaccacggttctaggcctcgttttcatattgcgacaatcagccaaaatccggaaaaaagtcgccgcccgcccctaa

SEQ ID NO: 7205 - DNA, 723 bp, BradyrhizobiumColbertium
gtgtccgcgttcggaattgcgctcgccttcgtggcgggactgctgaccgtgctcagcccctgcgtgctgccgatcctaccgatcgtgttcggcgccgccgcgagccagcaccgcttcggccccgttgcgctggcgcttggagttgccagcgccttcgccctcgccgggatattgctcgcgacgcttagcgcgtcggcgggattcgatgcagagcgcttcaaaccagcgttcggtgggttgctcgttctttttggcctggtgctgctggtgcctacacttcaacacggcgcggagcgtatgttggcgccgctggccgcgatcggtgcacgtggtgccgacacggtcatggcgcgggggcttgccggccagttcgggctcggggtcctcatgggtttggtctggagtccgtgcgtcggtccgaccctcggtgcggcctcggtgcttgcaagccaaggcaaggagcttgggatagtgtggctggtcatgatgactttcggcatcggggcagcgctgccgctgcttgcgatcggccttgcctctcgcgccttcctgacgcgctttcgcgcttctctgatcggtggcggccaatgggcacgccggctgatgggcgccggcatgacggcggtcggactgatcgtgctggcgggcctggatcgccgactcgaaagcttgctgctcgacttcacacccgctgtcatcatcaatctgaccacccaggtttag

SEQ ID NO: 7206 - DNA, 387 bp, BradyrhizobiumColbertium
atgcgctttacaacttcagttgcctttgctgctcttctgttcatcacggcaccggccgaggccggtcctattcaggcctattcgagcgagtcctttgcgcgagccaaggccgcaggcctgccgatcctgatcgacgtccacgccgactggtgtccgacctgccgcgcgcaggaccccatcattctcgagctctcgcgcgatccagccttcgaggatctcgtgatcttgaagctcgacttcgacagtcaggtcaacgaacgtcgtgcgctaggcgtcagccagcaaagcactttggtcgtctatcggggcaaagccgaacgcggccgcgggaccggcgtcaccgaccgtgggcagatccgagcgctcgccgccaccgcgctcaagtaa

SEQ ID NO: 7207 - DNA, 1269 bp, BradyrhizobiumColbertium
gtgatcgtcggcgccggtttcggtgggctcgcggcggccaagtcgctcggccgacgcaggatcggtgtgacattgattgacaggcgaaaccaccatgtgtttcagcccctgctctaccaggtcgcaaccgcggcgctgtcgccggccgacatcgccgcgcccattcgaacgattctgaaggattatctcactgtccatgtgcgcatggacgaagtcgtcggaatcgaccccgccaagggcgtggtgcttacggccaacggcgcggagatcccctacagcgctttggtgctcgcaacgggcgcgcaacacagctatttcggcaatcaccgatgggccgcgcatgcatccgggatcaagacgcttgacgatgcggttcacgtgcgccgcgatattctcctggctatggagcgcgccgaaaccatgcgccagcaggacgcggtccaccgctcgcttccgatcaccttcgcggtcgttggcggcgggccgaccggagtcgagatggcgggtgcgattgccgagctcgcacgccacgcggcggcgatggacttccgttttatttcgccgacctgcgttaaggtcgtgatcatcgaaagtcgcgagcgcttgctcgcgactttccctccgaaactcagctccgcagcgaaggcaagtctagagcagctcggcgtcgaggtccgactatcggcgcgtgtcaccacaatcgacggcaaaggtatcgaggtgaacggcgaacgcatgctcgccgccgccaccatctgggccgccggcgttcaggcttcgccggccgcgcgatggcttggcgtcgagccagatcgcagtggacgggtgccggtcacggcggcgctcgaagtgccgggcctgtcgaacgtgttcgccatcggcgacacggctgccgtgaaggatgaagggggtcggatggtgccggggatcgccgcggctgccaaacagcagggacaatacgtggcccgtgcgatcgccgcccggctgaatggcgggcagcccccaccgtttcgatatcgccattacggtagcttggcgacgatcggtcgacgtcacgccgttgccgatttcggctggatgcacctgcagggttttgcggcctggctgctgtggtccacagcgcatttgtatttcctggtgggctttcgaaaccgctttatcgtagggctgaactggatctggaactatctcactttcgaacgtggcgcgcgactgatcaccggatatgacccgacgccaccatctgctagtcaggccccaaaagtatga

SEQ ID NO: 7208 - DNA, 141 bp, BradyrhizobiumColbertium
atggccatcattgcgccgattccgactgcgaaggccaggactaacaatgcgacaaaagcagtcgcggtaccgaacaagggaatgaaagccgaagcgcggctcgcggttgtgacgggggtttggcgcatgacaatctcctga

SEQ ID NO: 7209 - DNA, 2007 bp, BradyrhizobiumColbertium
atgcccgatatcgtcaatgtccttctgtgctgtgtggtcgcgggcgcgatctggattcccatgggcttcggcttggctgcggtggtgatgccgcgccgtctggcttatttcacggctccgaccatcggctgggcctgccactccatcatggtcgctacactgtttcgcgtcttgccgatgacggcgacgacgatctgcatttcgattcttttgggctacggaacttcgatttggatgttggtacgcgacgccaactttcgtagcatcccgattgcgttcagcggtgtttttattgtcctccttgcaagcgctgccgttctcgcatggatgatcgccgccgccattctgccccatgcagatggcagtggagtcacgttcgcgggccccatcttcgatcattccaaggttgcgatcgtcgatgaatttctccgcggcgggctcccgctgacaaatccatttttctacaaagcgggaagctcgacgtcgcttccatactattatctttggcatttcagcgcggctgaaatcgcgcggctgacaggtgcgtcggcgtgggaggccgatgtcgcgatgacctggtttacctccttctcgtccctacacatcgtcatgggtctggccttctggatatcgcggagctatcgcgcttgctttggcgccattgccgtgtgcacgacggcgtcgttgcgtccttacatcggccagctgtttaattatgacgtggcctacgatctcacgggatacccaaccgggtttggcgggtggctctttcaagccgcctgggcgccccagcacattcagtcggctggatgcagcgttgtagccctgctaatgatcgcacgcgtcgcatgtaaccgatattggaccagcgtgacgcttggactcgtcgtcgcagcggcctatgcatcgtccttatgggttggcggaattgttctgccgatacagcttgcgctggcgtttattttcatgctcaaggcaggcgaaagcaccccgatccggctagtctggtctctgagccttgccgccgcgatcgcggtcgtttttgcctcgccgttgatcgtcgagcaggtcttggcgatgtcggccaggcaaggaggctttccgatctcgttttcgtcggtcatggtcctcggtgacgtcattcccgaatggtcgcgaccggtactggatccggtggcgttctacctggtttacctgacggtcgaactgcaggtttgctatgttatcggcctaccgatgctcgcccggcttgtcgccgcccgaagcgcgcacgcgggtcgtagcgaccaaattctcgttttggcagccgcggtcgtcgtatcgctgcttgcaaccggttttctgagcagtaccgtcacagccaacaacgacctcggatggcgggccgtacttcccgctatcctgatacttgttgcgatctcgggggccggcctggcagctgccatccggcagcgagtcacaatccgacgtatcctgatgtttgctgtatttctgctcgccgcatttcaagcggtgctggtgctgtcgtcgaacctatttcccacgccgactgcatcgggtcgtgaattcaccggctccatcgaattgtggcgagacgtcaggtccgtctcaagcccgctgcaacgcgtcgtcaacaatccggactatcttggcgaagtcacgccgtggcctgtcaacatctcctgggcgcttttgtccaaccgccggtcttgctatgcggctcgcaatctggtcgaggctcttgtccctttgccgcgagacgaactggacgaaattgatgcacttttccgacgtgttttcacaaaacggcctgagaccggtgaccttcgtcgtctggcctttgagtttggatgcgagattgccatcgtgaccgtagacgaccccatttggccgaccgaccctttcgctgaaaattcagcgtatgaacttgttgttgcacggcgtgatcgctggcgaatttaccgccgtcgcaacgaagccatgccatcgtctacggcacagccctag

SEQ ID NO: 7210 - DNA, 117 bp, BradyrhizobiumColbertium
atgtatgctcagatggtgcgcggcaccttcgactttcaaggaacatgtcttcttgggaccaggcttttcggcctatttcggggtgtggacggccgcattgtcaccgatctttcctaa

SEQ ID NO: 7211 - DNA, 876 bp, BradyrhizobiumColbertium
gtgcgttaccaggacatctacccatcggaagctttgctccggagtttcgacatcgttcggccccgcgccgcagagctgctcaacctcgagtatttcgaagcggagccggcggcgatgcctgctgcggtgttcgaccaacaccatttgttactcaacctcaagaacgaaccgcaccgcgtagagaactggcgcggcggcgcgcaccgcgatttcacattcgctctgaacgagatcgtgctgacgccggccggaatcgagagcggctggcgctggcatgcaaagagtcgcgtgatcgtcatcaccatcgatccgcagcggctgcggcgcttcgcggaaggcgagctcggcgtgatcctgagcgatcggcagcttcgcgacgtgccgcaggctcacgatgcggagctatgccatgccggggaagtgctccttgatgcgcttcgccaacggggcatcggctccgaagtcatgtatgaatcgctggcgcgcgtgttcctcgttcagctcatccagcggtacggcgaggaacgcaccgccgcgctgaatttcggcgcaggcttcacggccgcgcagtataagcgtgtcctcgaccatgtcgcggaacattacggccagccgcttacaatcgaggatctcgcgcgtgtcgcggggatgagcaccgcgcacttctcgcggctgttcaaggcgacggtcggcgacacgccttatcagttcctgatggattaccgcgtcgagcaggcccgcaaattgctcggggagcccgagcgcgctctcatcgacatcgcgctcgcctgcggcttcgccgaccaaccgcacttcacccgcatcttcaagcggttgaccggccaaacgccgcgcgagtttcggcagggcaggtag

SEQ ID NO: 7212 - DNA, 957 bp, BradyrhizobiumColbertium
atgaagcctctggttttcgccaccgcgatcgcggctgctgcgcttgccgtgccagcggacgccgccacctcgcgccccgtgaccttcgacagcggcggcgagcgcatcgtaggcgagctgttcctgcccgatggctacaaggagggcgacaagctgcccgcgatcgtcgtaacgggggcgtggatgaccgtgcgccagcagatgcccgccgtctacgcccgccagctcgcagatcggggcttcgcggcgctgaccttcgacttccgcggctggggcgagagcgccggcgcacgccgccagttcgaggaccccaaggcgaagatcgccgacatcaaggctgccgtcgcttatctcgcgacgcgacccgaggcggattcggcccggatcggcggtctcggcatctgcgccagctcgggctacatggtgaccgcggcggccgagaccccggcaatgatgtcggtggcgctggtcgcgccgtggctgcaggacgccgaggtggttgccgcgacctatggcggggccgcaggcgtcgccaagctcgaagctgtcggcgatgcggccgagtcggcctatcgcaagagcggcaagcagaccttcgttccggccgcgagcctgacggacgatcaggccatcatgttcaaggcgccttattatacagaagccgatcgcggcatgatcccgcaatggcgcaacgaggccgacccggctttctggcgcggctggttgtccttcgatgcgattcaggtcgcgccgcgcctcaggcagcccttcttcctggtgcacagcgaagccgcggcgatcccgcagggggcacaccgcttctacacaaacctggcgtcgccgaagcacgagttgtggctcgacaacgtcggccagctcgacttttacgaccgccccgcgccggtgaagacggcctcggacgccgtggccgcgcacttcaaggcgacgctcaagtga

SEQ ID NO: 7213 - DNA, 939 bp, BradyrhizobiumColbertium
atgtccacgacactcgcacctcagccggtgcaggccggctctgccgccgcgctgacgcccgattccgctgcgatcgagaccgtaatccggagcatcgccacgctggccgaccggcacgacttcgacgccttgtcgcagctttatgccgacgaggtccggctggactacacctcgctatcgggcggcgagcccgaagtggtcagcgcgaccgagctgatgaaccgctgggcgggcgtgctgccggggttcgatcgcacccaccacgccatcagcgacgtgcgggtcaccgcgatcgagggcggccgtgcgacggcgaccgcctcggtcgtcgccgatcactggctgggcccgatgcactggcaggtgcgcggacgttacgactacgagctggtgcgacaggaccgcgactggcggatgaccgcgcaccgcttcactgtcatcggcgaggagggaagccgcgacatcctcggccccacgaccgaggccgccaaggcgcaccctgtcgcctgggtcaagcggcagcaggcgcggaaagtggtgctcgatttcctgaaggggctggaggagaaggacatggcgcgggtcaacggcgtctgggccgaggacgctgtccaggacatgccctatgcgccggagggcttcccgaagaaggtcgtgggccgcgacgccttggtcaggcactacgccgaatggccgcagaatagcggcaaggcgcgcttcaccgacgagatcgtcttctatccgacacgcgatccgagcatcgtcttcgccgagtatcacggcgtcagcgagatcgtcccgaccggtcgcgtttacgaccagcgttacggtgggctgttccatgtcgagaacggcaagatcacgatgttccgcgaatatttcgacccgaatgtcttcgcccacgccttcggtttgaacgagggtggccggttcaactga

SEQ ID NO: 7214 - DNA, 546 bp, BradyrhizobiumColbertium
atgttcatcactcgcatcctcgcagtatcgctcgtgacattcggcctaggtgtcggagcgcctgctcgttcgcaaaactctggcccagccaccacgcaggggcaggccgcgcaggagcgggcgaacatccagctgatccgggattattaccaggcctatgccacgggcgatcccgaagccgtgcggccattcctggcgccgagcgtcgtctggcgcatccccggccatcacccgctcgcaggggagaagcggggtcccgacgaagtcatcgccttctttcgcggcctggccaggggcaagttcaaggctgagccggtcttcttccaggcgcagggcgacttggtggtcgacgtgcatcgtggctggtcgaacgtcggctccggaccggaggtcgatcaggtctacgcgctgatgtttcggatccgcggcggccgcatcgtcgaggctcagaacttcgtctccgacccgtcccagtcagatgccttctactgggcgcacttcccgctccgtccgttgccggatcggctcgcccccgaggccaggtag

SEQ ID NO: 7215 - DNA, 397 bp, BradyrhizobiumColbertium
tcgatgtcggctcatcacatcctggggctggagaaggtcccaagggttcggctgttcgccgattaaagtggtacgtgagctgggttcagaacgtcgtgagacagttcggtccctatctgccgtgggtgttggaatgttgagaggatttgcccctagtacgagaggaccggggtgaacgtacctctggtggagctgttgtcgcgccagcggcagtgcagcatagctatgtacggacgggataaccgctgaaagcatctaagcgggaaacccacctcaaaacgagcattcccttgagaaccgtggaagaccaccacgttgataggccggatgtggaagtgcagtaatgcatgcagcttaccggtactaatcgttcgattggcttgattgctctcatttt

SEQ ID NO: 7216 - DNA, 120 bp, BradyrhizobiumColbertium
cggcctggtggttttagcgaagagcctcaacccgatcccatcccgaactcggccgttaaactcttcagcgccaatggtactatggcttaagccctgggagagtaggtcgctgccaggcct

SEQ ID NO: 7217 - DNA, 597 bp, BradyrhizobiumColbertium
atgccagtattgcttcgtcccgtcctcactgctttcggccttgcgtgcctcttgtccgcagcatcgcttcaactatccggtgccgcattcgcgcaggccaagcagcagcccgcgccgggacagcaagctgcgcccgcagagcaacgagctcccgcgctgaagcagatcgcactcacagacaagcagctcgacggcgtgctcgccgcgcaaaaggacatggacgcgatcacggagaaacttccggagaatacggcgcccgatcagaaagtcatggcgcagctcgaggacgtcgcgaagaagcacggctttgccagctttgacgactacaacaacgtggtggacaacatcggtctcgtcatcggaggcttcgatcccgcgaccaagaagtatgttggcccggaagcggtgatcaagacgcagatcgcgcaggtcaaagccgacaagaagatgccggccaaggacaagaaggaagccctcgacgagctcaaccaggccctaaagacggcgccgctccaggtcgagaataagggcaatatcgatcttgtcgccaagtactacgacagactgattgccgcgttgggggacgagcagaactga

SEQ ID NO: 7218 - DNA, 1089 bp, BradyrhizobiumColbertium
atggaacgtcgtaagtttctgaaggcgggcggactgggccttgccgcgagcgcaatcgctgcgccggctgtcgcgcaatcgatgcccgaggtgaaatggcggcttgcggcgagctggccaaaatcgctggatacgttgtatggcggttgcgaatatttctgcaagcgcgtcgccgagatcactgacaaccgctttctgatccaacccttcgccgccggcgaaatcgttccgggcctgcaggttctcgacgccgtgtcgaatggcacggtcgagatgggcaacactgccctgtattattattggggcaagaacccggcattcaccttcggtacatcgctgccgttcggactcaacacccgccagcacatctcctggctgttgtggaatggcggacaggagatgctcaacgatctcctgaaggagcacaaggccatcggcgtgccgacgggctcgaccggcgctcagatgggcggctggttccgcaaggagatcaagaccgtcgatgatctcaagggcctcaagtttcgcgtcggcggtttcgccggcaccatcatctcgaagctcggcggcgtgccgcagcagatcgcagccggcgacatctatccggcgctggagaagggaacgatcgacgcagccgagtgggtcgggccgtatgacgacgagaagctcggcttcgtcaaggtggcgaagtactattactatccgggctggtgggaaggcaccggccagggccataacatcatgaacctggacaagtggaatgcgctgccgaagcactatcaggctgccatcagcgcggcgtcgctggacacattcacctgggtgacgggcaagtacgattcggtcaacccgcccgccctgaagcggctgctgtcttccggcgcgatcctcaagccattcccgcaggaggtgctcgaagcctgctacagcgcggccaacgagatctacgctgatctcgccaagagcaacccgcatttcggcaagatgtatgcgagcctgaccgcgtttcgcagcgagtcgctcgcctggatgcaggtggccgagctcagcttcgacaccttcatgatgcggatgcggacgaggacgtag

SEQ ID NO: 7219 - DNA, 1314 bp, BradyrhizobiumColbertium
atgaacctcttccgcctcctgcaggcccgtgccgccgccggcaagccggtccgcgttgcgttgattggcgccggcaagttcggctcgatgtttctggcacaggtgcctcacacgccgggactggaggtcgctgtcatcgtcgacatcgaccgcgaccgtgcgcgcgaggcgtgccgcaccgtcggctgggagccagagcgcatcgccgcgaccgccttcaccgatgacggtgtgcgcgcgatcgccggcgacgcgatcgacgtggtggtggaagcgaccggcaatcccgccgccggcatcaggcatgcgcgcgccgcgattgcggcgggcaagcatatcgtgatggtcaatgtcgaggccgacgtgctggcgggccctttgctcgcggatgaagcgcgcgaggcgggcgtggtctattcgcttgcctatggcgatcagccggccctgacggcagagatggtggattgggcacgcgccaccggctttcgcgtggtcgcggccggcaaggggacaaaatatctgccggcctatcacgacgtgacgcccgacggcgtctggcagcattacggcctgacggcgggcgaggcacagtcggcaggcatgaacccgcagatgttcaactccttcctcgacggcaccaaatcggcgatcgagatggccgcgatcgccaacgcctgcgacctcgatgtgcccacggacggcctgatgtttccgccctgcggcgtcgacgacctgccgcacatcctgcggccgcgttcgcggggcggcgtgctggagcggccgggactggtggaggtggtttcctcactcgagcgcgacggccggccggtgtttcgcgatctccgatggggcgtctacgtggtgctggaggcgccgaacgattatgcagccgattgcttcagacaatatggcctcaagaccgatgggagcggccgctatgcggcgatgtacaagccctatcatctgatcggcctcgagctgaacatctcggtgctgtcggccgcgctgcggggcgagccgaccgggcagcccggcggctttcgcggcgatgtcgcagcggtggcgaagcgcgagctgcgggcgggcgagatgctggacggcgaagggggctacacggtctggggcaagcttgtgccggcggcagccagcctgaaggccggcgcgctgccgatcggcctcgcgcatcgcgtgaggctgaaacgcgccgtcggccacggcgcggtgctgcgttggagcgatgtcgagttcgacgcgggcgacgaaacggtgaagacgcgcaaggccatggaagccgccttcgcagcgcaacattga

SEQ ID NO: 7220 - DNA, 801 bp, BradyrhizobiumColbertium
atgaaactgtctcaggagcaattggagttcttccatcgcgagggctggctgttcctgcccgaattgttcagccaggaggaggtcgacctgctcgcgcgcgaggcggtcggcatctacgacgccaaccggccggaggtctggcgtgagaagagcggcgcgccacgcacggcctttgctgcgcatctctacaacgaagcgttcggcatcctcggcgcccatccgcgcatgatcgagccggtcgaacaggtgttcggcgagcctgtctacatgcatcagttcaagatcaacgccaaatcggccttcaccggcgatgtctggcagtggcatcaggattacggcacctggaagcgcgacgacggcatgccggagccgcgggcgatgaatattgcgatcttcctcgacgaggtgatgccgatcaacggcccgctgatgctggtgcctcgcagccagaacgccggtgatctcgaagcctcgcacgacctcgccaccacgtcctatccgctgtggacgcttgacgaggatacggtgacgcgcctcgtcaagcagggcgggatcgtcgcgcctacgggcaagcccggcggcatgctgatgttccacggcaatctcgtgcacgggtccagcggcaacatcacgccttatccgcgcaagatcgtttatctgacgctgaatgccgtctcgaaccacatccgtaaccccacgcggccggactacattgcgcatcgcgactttacgccgataaagacggtggcggacgacgcgctgctgcggctcgcacgtgcgccgcgacaagcggcggagtaa

SEQ ID NO: 7221 - DNA, 678 bp, BradyrhizobiumColbertium
gtgatccctctcgacccgctcccgaatctgatcgaccaggtctacgcccggatcctggaggcgatctccgaccgcacgctgcgccccggccagcgcatcaggcagaacgaactcgccgacaggctcggcgtctcgcgccagccggtatcgcatgcgctgcatctgttgcaccggcagggtctcgtggccgagagcggcaagcgcggcttcgaagtcacccagctcgacccctcacgcatccgccagctctacgaggtgcgcggtgccatcgatgctctcgcggcccggcttgccgcggagcgcgcgggcaccgacgctgcggggcgcgcgcggctgaacggggcgctcgccgcaggacgcagcatcgacggcgacaccacgctggccgatctgatcggcctcgacgtcgattttcatcgcgcgatctaccaactggccggaaatcccgtgatcgaggagaccatcgcgccgcaatggccgcatatgcggcgctcgatggcgacggtgctgtcggagctcgactatcgcggcagcgcctgggcggagcatgccgatatcgccggacgcattctcgcgggtgacgcggatggagccgaacgcgccgcgctggcccatgcgcagacggcgggacggatgactgaggtgcggttgcgggcggcggacgaggcggcggcgtag

SEQ ID NO: 7222 - DNA, 858 bp, BradyrhizobiumColbertium
atgaccgaacagatttttctcgctgaacagttcgaggccagccgggaccatttgcgcgcggtcgcctaccgcatgctaggctcgcgcgccgaggtcgacgatgccgtgcaggaggcttggctgcgggtcagccgctacgacatgtccgacgtcgcgaacctgcgcggctggctgaccaccgtggtcgcgcgcatctgcctcgacatgctgcgcgcgcgcaaatcgcgccgcgagagcccgatgggtccgcatgtgccggaaccggtagacgagacgcgggagcgcgaggcggagatggctgattccgtcggcgcggcgctgctcgtcgtcctggaaacgctgcagcccgcggagcggctcgccttcgtgctgcacgacatgttcgccgtgcccttcgaggagatcgcgccgatcgtcggccgctcggtcgaggcgtcgcggcagctcgcgagccgggcacggcggcgcgcgcagggggcgccggtgcccgagaccgacctgtcacggcggcgcggtatcctcgatgccttcctcaaggcatcgcgtgagggcgatttcgaagggcttttggccgtgctcgatccggatgtcgtcttccgcgccgatcaggccgcggtgcggctcggcacgctggcagaagtccgcggcgccgaacgggtggcgcagctctataaaggtcgcgcccaggccgcgcggacggcgctggtcgatggtgagatcggtgttgccgtcatccttgggggacagctgcgcgtcgcgctgcgcgtggcattcaagggcgaccgcattgctgggatcgaggcgctggccgatctggagcgaatcgccgcgctgcatgtggaggtgctggagggctga

SEQ ID NO: 7223 - DNA, 471 bp, BradyrhizobiumColbertium
atggagaccaaagcgatgcacgcccgcatgaaacaccctgtcatggtcctgcccgaggccatgaatcttcttcagtcccttggcggtctgaccaagcagggcctgccggaaaagcttctggaactggtgcacctgcgcgccagccagatcaatggttgcagcgtctgcgtcgacatgcatcccaagaccgcccgcaagctgggcgaaaccgacgagcgcttgtttgccgtgtctgcctggcgcgaggcgccctatttcaccaaccccgagcgcgccgcgctggccctgaccgaggcggtcacacgcctcgccgaccgcgaggacccggtgccggacgcgatctgggacgaggccgcgaagcatttcgatgaacgcgaactcgcgacgctgattctctcgattgcgaccatcaatgtctggaaccggctgaacgcgaccatcaagatgccggtcggcgtgtggaaggtatga

SEQ ID NO: 7224 - DNA, 813 bp, BradyrhizobiumColbertium
atgcagagctttcgtgtcaacggttacgacatggcctatctcgaagtgggaagcggcccgccgctggtttgcgtgcacggcacgctcagtgatttccgcacctggtatccggtgcttgggccgctatcgaagaaccatctcgtgatctcggtcagcctgcggcacttctttccggagcattgggacgccgtcggcgacgactacaagatggcccagcatgtcgctgatacgatcgccttcatcgagcaggtgcggcccgcccccgtcgatctgatgggccattcgcgcggcggccacatcgctttccgcgtcgcgcagacgcgcccggatttgctgcgcaagctcgtgctggccgagcccggcggcgatctcgatgccagcctgccgcccccggaaggcacgcccgcgcacccctcacttgctgcacgcaccgtgcgctcggtcgaaatgatccgcggcggcgatgtcgagggtgcgcttcagaatttctatgaaggcatcgaaggcgatggctcctggcggcgtgtgccggccgccgcgaagcagcaactgcgtgacaacgcgctgaccttcctcggccaggtcaacgagcagcgccggccctacacgctcggcgatgcgcaggcgatcaggacgcaaacgttgctgatcggcggcggtgccaccaccggcagcctgtcggtgttgtggcgcgtgctggccacgcacatcgcaggtgccaagacggccgtgattccgaacgccgggcattggatgttcgagcaggacccgctggggttcgctgaggtggtgagcaggttcttggcggaatag

SEQ ID NO: 7225 - DNA, 819 bp, BradyrhizobiumColbertium
atgcagagcgtccacgtcaacggttacgacatgttctatctcgacgtgggcgaagaccgaggccggccgcctctggtgtgcgtgcacggctcgctcaacgacttccgcgtctggggctgtgttctcgggccattgacgcagcgacaccgggtgctcgcggtcagcttgcggcacttcttccccgaccattgggacggcgtcggagacacctattcgattgcccagcatgtccaagacgtcatcgctttcatcgaaaagctcgacctcggcccggtcgacctgatgggccattcaagaggcgggcatatctccttccgcgtggcgcagcagcggccggatctgctgcggcggctgatcctggccgagcccggcggcgagctggatgcgagcctcgatccggattacgtgggcggtccctcgccgctgctggcccgcttcaccgcctcggcggagaagatcgcgtccggcgatatcgacggcgggcttgccgtcttcgtcgacacgctggagggtgccggcacttggccgcggctgccggcaatggtgaagcagaatctgcgggacaacgccatgacgctgatcggccagatccgcgacaaccgcccgccgttctcgaaggcggatgcggtgtcgatcaagatgccgaccctgttcatcctgggcgcgaggaccaaggggctgctgccgaaggtgctgcacgcgctcgcggcgcatgtgccctattcgaagacggcgatcatcccgaacgcgacgcatccgatgttcgagcaggcgccgcagaaatattccgacgtcgtgctggacttcctggcgagctga

SEQ ID NO: 7226 - DNA, 543 bp, BradyrhizobiumColbertium
atgaccgaccaccattttgccctgttcgacacccgcattggcctctgcgccatcgcttggggcccgcgcggcatcaacggcacgcaactgccgatgggcggcgaagagaagatccgcaccagaatccaccagcgccatgccgaggcgaccgaaaccgagccgacggtcgaggtgcaacaggccatcgaccgcatcgtcaagctgctcgcgggcgagccggatgatctcaccgatatcctgctcgatctcgacggcgtccccgagttcaaccgcggcgtctatgacatcgcccgcgcgataccgcccggcaagaccgtcacctatggcgacatcgccaagcagcttggcggcgttcagctgtcgcgcgacgtcggccaggcgctcggccgcaacccgtgcccgatcgtcgtgccatgccatcgcgtgctggcggccggcaacaagcccggcggcttctcggcgaacggcggcgtggtgaccaagctgaagatgctcgagatcgaaggcgcactagtgaaccacacgccgagcctgttcgactga

SEQ ID NO: 7227 - DNA, 1545 bp, BradyrhizobiumColbertium
atgacccatccgtccgtctacgcaaagaccacgccaagcaagatcgcctaccagatggccgggaccggcaaagcgatcacctatcgcgagctcgacgagctctcgaaccagggcgcgcatctgttccgctcgctcggcctcaaggccggtgaccacatcgcgctattgatggagaaccggctcgccttcatggagatctgctgggcggcacagcgcagcgggctctactacacggcgatcagccgctatctgaagcaggacgagatcgactacatcatcaaggattgcggcgccaagctcgtgatcaccacaccgaaatgcgccgatcagatcaagggcctgatcaggggtactcccggtgagccgatcttctacatgatggacgagccgctgccggggttccgctcctacgacaaggaagcggctgcgcagccgatcacgcccatcgccgacgaggtcgccggctacgatatgctgtactcatccggcaccaccggccggcccaagggcatcaagaaggcgttcgagggcaacaggatcgacgtaccgaatgccttcctgcgcgtgctctgcgccgacatgtgcggcatgaatgccgacagcacttacctctcgccggcgccgctctatcacgccgcccccttgcgcttcaacatgatggcaatcgtgctgggcggcacctccatcatcatggagcacttcgatgccgaagaattcctgaggctggtcgagaaatacaaggtaacgcagtcccagctggtgccgacaatgttcgtgcgcatgctgaagctgccggatgaggtgcgcaccaagtacgacgtctccacgctgaagggcgcgatccacgccgccgcgccctgccccatcgaggtcaaggccaagatgatcgaatggtggggaccgatcctgatcgaatattatgcaggctcggaaggcaatggcgtaaccgtttgcaactcgcagcaatggctggagcatcgcggcagcgtcggccgcgccgtagtcggcaagatcaagattctggacgaaaacgacgaggagcagccggtcggcgaaatcggcacagtctatttcgccgacgcgcccgcgttcacctatcacaacgatcccgagaagacgaaaaaggcctacaatgccaagggctggtcgacgctcggcgatgtcggctatctcgacaaggacggcttcctctatctcaccgatcgcaagtcctacatgatcatctcgggcggcgtgaacatctatccgcaggagaccgaggacgtgctgatcacgcaccccgacgtcgccgacgtcgccgtgttcggcgcgccgaacgaggagatgggagaggaggtgaaagcggtggtgcaaccgcacgacctgagccgcgcgggcaaggagctcgaggccgacctgatcgcctattgcaagacccgcctctcagctatcaagtgcccgcgctcgatcgatttcgaagccgagctgccgcggacgccgacgggcaagctggtgaagcggcatctgcgcgacaaatattggccgaagacggccgcgaagatctag

SEQ ID NO: 7228 - DNA, 1173 bp, BradyrhizobiumColbertium
atggccgaggcatacatcgtcgccgctgcgcgcactgcgggcgggcgcaaggggggccgcctcgccggctggcatccggctgatctcgccgcgaaagtgctggacgagctggtcgatcggaccaaggtcgatcccgccctggtcgaggacgtgatcatgggctgcgtgatgcaggtcggcgagcagtccaacaacgttgcgcgtaacgccgtgatggcctcgaagctgccggaaagcgtgcccggcacatcgatcgaccgccagtgcggctcctcacagcaggcgctgcacttcgcagcgcaagccgtgatgtcgggcgcgatggacgttgtgatcgccgccggcgtggaatcgatgacgcgggttccgatggggctgtcctcgcagctgccggccaagaacggcttcggcaattacaagagcccgggcatcgagaagaagtatccgaacatcgtgttcagccagttcaccggcgcggagatgatggccgagaagtacggcctctccaaggatgagctcgacgaatactcctacaacagccatcagcgcgcgatcgcagcgacccaggccggccacttcaagaaggaaatcgtgccgctcgagatcacgcgcgccgatggcagcaaggacacccaccatatcgatgaaggcatccgcttcgacgtcagcctcgacggcatcaagggcgtcaagctgatcgccgagaatggcaagctcagcgcggccagcgccagccagatctgcgacggcgcctctggcgtgatggtggtgaacgaacgtggtctcaagcaactcggcgtcaagccgctcgcccgcatccatcacatgacgatgacgggcggcgatcccgtgatcatgctcgacgctccgctgcacgcgaccaagcgcgcgctggagaaggccggcatgaagatcggcgacatcgacctgttcgaggtcaacgaagccttcgcgtcggtgccgaccgcgtggctgaagaccaccggcgcagatccggagcgccttaacgtcaacggcggcgccatcgcactcggccaccccctcggtggctcaggcaccaagctgatgaccacgctggtccatgccctgcatcagcgcggcaagcgctatggcctgcagaccatgtgcgaaggcggcggtatggccaacgtgacgatcgtcgagcggctctaa

SEQ ID NO: 7229 - DNA, 597 bp, BradyrhizobiumColbertium
gtggccgcgagcgagctgatgatcgaacgctcttcgatcgagatctccctgtccgatatcgcgcagaagtcgggcgccaacgccgcgctggtcaagtatcacttcggcaacaaggacggtctccttctggcgctgctcgcgcgggatgctgcgaccgagatgtcgaacctcgaatttctcctggcgcaaccgatcacgtcgacggcgaagctgaagctgcacatcgccggcatcatccgcgcctatcaccggtttccctacatgaaccggctgatccactatctgctgcacgagaccagcgcgagctctgccgatgaagtctcgaaattcttcgtggcgccgttgctggacttccaccgccgcctgctggccgagggcgtcagtcgaggcgaattccgccagaccgatcctgtgttgttctacaccagcctgatcggggcctgcgatcatctgttcttcggccggcatgcgatgtcccgcgcgaccggtgtcggcccggtcaccgacgaagtctgccgacagtacatcaagcatatggaaacgctgatctgtggcggcatcctcacgcaagccgaggaagctgccgcggccggataa

SEQ ID NO: 7230 - DNA, 759 bp, BradyrhizobiumColbertium
atgcagttgaaggacgtagccgttctcatcaccggtggtggttcgggcctgggtgccgcgaccgcccgcgccatggccgcgaaaggtgccaagatcggcgtgatcgaccagagcaaggaaaacgccgagaaggtcgccgccgaggtgaagggcgttgccctccacgccgacgtcaccagcgaggagcagatcaaggcggcgattgcgaaggcggaagccgcgcacggcgtcgcgcgcgtgctgatgaactgcgccggcatcggcggctcgcagcgtatcgtcggccgtgacggcgtctacccgctcgagaagttcgcgcgcatcatcaacgtcaatctgatcggcaccttcaactgcttgcggctgttcgccgagcgtctcgtcactgcggagcccatcggcgaggagcgcggcgtcatcatcaacaccgcttcagtcgccgcttatgaaggtcagatcggccagatcgcctattcggcttcgaaggggggcgttgtcggcctgacgctgccggccgcacgcgatctcgccagccagaagatccgtgtcaacaccatcgcgcccggcctgttcttcacgccgctgctgatgggattgaacgaagaggctcgcaagagcctgggtgcgcaggtgccgcatccctcgcgtctcggcgatgccaacgaatacggcatgctcgccgtgcacattgtcgagaacccgatgctgaacggtgagaccatccgcctcgacggcgcgatccgtatggcgccgcggtag

SEQ ID NO: 7231 - DNA, 807 bp, BradyrhizobiumColbertium
atgtcccaaccgctgctgatcgagcatgacgacggcgtcgaccgggtgacgctcaatcgtcccgagagtctcaatgcgctcgatcatgcgctgatcgatgcgctcaacgactatttccagggcctgcagcgcaatcgcgacacgcgtgtcgtcgtgctaaagggcgccggcaaaaacttctgcgccggtctcgatctcaaggcggcgatggcgcgccgcgccgggcagcaggaaccgcctggtgtgacggagtcgctggactcacaaaggcgtatcgccgatatcgtgatgctgatgcggcgctgcccgcagccaatcatctcgctggtgcagggcgcggcagccggcggcgggtttgcactggcgctcgcctcagacatccgtatcgcgacgaaatcggcgcggatgaactgcgccttcatcaagctcggcctcggcggctgcgacatcggcaccagctactttctgccgcggctcgtcggcgtctccgtcgcatcggagctgatactgacgggacgcttcatcggtgccgagcgcgcgatggcggtcggtctcgtctcggaggtcgtggacgaggacaagctcgatgcggcggccgagccctacgtcgaggcgatgatgatggcgtcgcccgtgggcctgcgcctgtccaaggaatgtctcaacatgagtgtcgatgccggatcgctggaagcggcgatcgcgatggaggaccgcaaccaggtcctgtgcagccgctcggaagagttttcggaaggaatcagggccttccttgagaagcgaaagcctgtctatatcaagcgctga

SEQ ID NO: 7232 - DNA, 1872 bp, BradyrhizobiumColbertium
atgagtggaagcgcggcggcggtgatgacgaagcccgcctttcgcaaggtcgaatggctcaagcgcgacatcgatgtcgagcgccgcgccgacggcacggtggtgctgaagtcgcgcattcctcttcaggtctacgaggagcatattccggcgtcgctagcgaaatgggcgcgggaaacgcctgagcgcatctggctggcgcagcgcggcggtccaaaccgagaatggcgcaaggtgtcttacggcgatgccaagcgcatcgtcgatgcgctgacgcaagcgctgctggacctcaagctcgagggacggcccgtcacgatcctctccggcaactccatcgagcatgcgctgatgacgcaggcggcgatgcaggcgcgttcgcccgcggctccggtgtcgccggcctattccctgatgagccacgatcacctcaagctgaagtacctgttcgacctgatcaagccagccgtggtaatggtccaggacggcccgaccttcgagaaggcgctgaaggccctcgacctcagcggcgtcaccgtcgttcatgtcgcgcggccctgcgatggcatcaagagcgtcagctttgccgagcttgccgcgacgcctgtcaccgccgatgtcgaggcctcgattgcgcagatcacgccgcggaccgtcggcaagctgctgttcacgtcgggctccacgggcatgcccaaggcggtcatcaacacgcaggagatgatgtgcgccaacgcggcaatgatgatgcaggtgcggccgcgcgatcccagcggcccgatcccgaccatgctggactggatgccgtggaatcacactatgggcggcaacgcggctttccacccgatcctggtcgatggcggcacgctctatatcgatgatggccggccgatgccgggtcagttcgaggaaacgctgcgcaacctccgtgagatctcgccgacctattacgccaacgtgcccgccggctacgccgcgcttgcggcggcgatggagaaggacgacgcgctctgtcgctctttcttcaagaacctgtcgatcatggcctatggcggcgcgcggctgccggatgatctctacgatcggatgcaggcgctggcggtgaagaccaccggcgagcgcatcgtgttctacaccggctggggttcgaccgagaccgcgccgacctcgaccggcacctattgggacaccgagcgcgtcggcctgatcggcctgccgtttccgggcgtcgagttgaagatggtgccgtgcggctcgaaatacgagctgcgcctgcgcggcgtcaacgtcacgcccggctatttcggccagccggagctgaccaagaagatgttcgacgacgaaggcttctactgcatcggtgacgccgggatcttcgtcgacgattccgatccggtgcagggcatcatcttcgccggccgtgtcgtggaagacttcaagctcaccaccggcacgttcgtgcatgtcggctcgctccgcaccgacgcgatcgcggctgcgtctcctgtcgtgcacgacgcgctggtcgcaggccaggatcgtgcctttatcggcctgctggcctggccgaacctgcatgcctgccggcagctcgtcggcaacgccgatatgagctttgcggaggcggtgcagcatcctgaggtgatcgcctgcttccgccgtgggctggaagcgcacaacagagaatgcgaaggcgccagcagccgcatcatcgcgcgcgcgatgctgatggtcgagccgccctcgatcgacggcaatgagctcaccgacaaggggtacatcaaccagcgcgccggcttggagcgccgcgctgcgctggtggagcggctctacgcggatcagccggatcaggatgtgattgtgctgaaatga

SEQ ID NO: 7233 - DNA, 1128 bp, BradyrhizobiumColbertium
atgaacttcgatttctccgacgaccagaagcagctccgcgaccaggcacgcaagttcctcaccgagaagtgttcgtccaaggcggtgcgtgtcgtgctcgacggcaaggcgccgtatgacaaggagctgtggaaaggcctcgccgagatgggtttccttggcgtcgcaattccggaagagttcggcggcgcgggcgccggccatctcgagctctgcgtgattgcggaggaaatgggacgggccaacgcgccggtgccgttctcctcgaccgtgtatctcgccgccgaggcgctgctgatcgccggcagcgacgcgcagaagaagaaatggttgcccgccattgcttccggcgaagcgatcggcactctggcgctgttcgagggcaagggcaatccgtcgccgaagaacgtcaagctcacggctgcgaacggcgtgctcaacggcgtcaagaggccggtcgccgatggtgctgtcgccgatttcgcggtggttgccgcgcgcacggcatcgagcgggcgtgacaacgacatctcgttgttcctgattgacctcaaggccggcggggtcgaagtgaagagcctcaccaatctcgatccgacccgcgggcaggccgagatgaccttcaaggactgcaaggcggagccgctcggcgcggtcggcgaaggctggagcatcctcacccaggtgctcgaccgtgctgcggtgctgtgcgcgttcgagcaggtcggcggtgctgatcgcgcgctggagatgggacgggactacgcgctcgaccgcatcgcctttggccggcagatcggctcgtttcaggcggtcaagcacatgctcgccgacatgtatgtctcggcgacgctggcacgctccaacagctattacggtgcctgggcgctctcgaccaatgcggccgagctgccggaagccgcagccgctgcgcgcatcagcgcgacgcaggcgttccagcattgcgccaagaacaacatccaggttcacggcggcatgggtttcacctgggagttcgactgccacatgtactatcgccgcgccaatgcgatggcgcttgggctgggtagcttgtcctactgggaggatcagctgatcgaccgcatgcggaagaagaacgcggcgtaa

SEQ ID NO: 7234 - DNA, 1248 bp, BradyrhizobiumColbertium
atgaacttcgacgacactccgcaggaagccgaattccgcgccaccgcccgcgcgtggatcgccgcgaatgcgcccaagcaatatgaggaggagctgcgcaaatcctcgctcggccgcacgcaactgaagagcgccaacattctggaggtcgcaaaggcctggcagaagaagaaggccgatgcaggttgggcgtgtctgcactggccgaaggaatatggcggccgtggctcgtcgcccatcgagcgcgtgatctggcagcaggaggagggcccgttcggcaagctctcgcagatgttcatcatcggccacggcatgtgcgggccgaccatgatggcgttcgcgcgggaggagcataagcgcacctatctgccgccgctcgcgtccggcgagaaggtctggtgccagctcttctccgagcctgccggcggctcggacgttgccggcctgcgcacgcgtgccgagaaggacggcgacgactgggtcatcaatggccagaagatctggacctcaggcgcgcattattccgactacggcatcctgttgacgcgcacagatccgaccgtgcccaagcacaagggtctcaccatgttcttcctcgacatgaagagtccgggcgtggaggtcaggccgatcaagcaggcgagtggcgcctccgacttcaacgaggtctacttcaccaatgtccgcattcccgatcaccagcgactcggcgaggtcggtgacggctggaacgtttcgctgaccacgctgatgaacgagcgcatgtcgatcggcgccggtgttgcgaccggctttccggagctgttcgagtactgctcgagcctgatgctcgatgacggcccggcgatcgaggatcgcgcggtgcgctcgaaattggcgaactgggcggtgaaggcgagcggcctgcgctataccagcatgcgcgcgatctcggcgctgtcgaagggcgagcgcccgggacctgaaaattcgatcggcaagctggtggcgggctcgatgatccaggatgtggcgacatacgcattggatttgcagggcgcggcgggcgttgtcagcggccccgaagacgccgaagtggccggccgtttccaggccatgctgctgcgcgcgccaggcacccgcgtcgaaggcggtaccgacgagatcatgcgcaacatcatcgccgagcgggtactgggcttgcccggcgatatccgggtcgacaaggacgtgccgttcaacaagatcccgacgaagggaagagggtag

SEQ ID NO: 7235 - DNA, 1245 bp, BradyrhizobiumColbertium
atgaatttcgatgacaccccgcaggaagccgcattccgcgagaccgcgcgcaaatggatcgaggccaatgcgccgaaggagctccatgccgagctgtcgaaatcctcgctcggccgcatccgcctggccaatcacgacatcgtcgatgtcggcaaggcctggcagaagaagaagttcgagggcaattgggcctgtctgcactggcccagggagtatggcggccggggtgcgacgccgatcgagaaggtgatctggcagcaggaggagggcgtctacggcaagctgacgcaaccatttcagatcggcgagggcatgtgcgggccgaccgtgatggcgttcggcagcgaggacgccaagcggcggtacttgcccaagctcgcctctggtgaggagatctggtgccagctgttctccgaaccgtccgccggctccgacgtcgcgggtctgcgcacccgcgcggagaagaagggcgacaactggatcgtcaacggccagaagatctggacctcgggtgcgcattattccgactatggccttttgatcgcgcgcaccgatccgaacgtgcccaagcacaagggcctcaccatgttcttcctggacatgaagagccccggcgtcgaggtgcgaccgatcaagcaggccaacggcatgcaggagttcaacgaggtctacttcacagatgtcgtgatccctgacagccagcggctcggcgccgtcggcgagggctggaacgtctcgctgaccacgctgatgaacgagcgcatgtcgatcggcgcgcggctcgcgaccggtgtccccgagatgttcgagttctgctccaacctgatgctcgaggacgggcttgccatcgacgatcccgccgtgcgctccaaactcgcgacctgggcggcgaagtcgaatgggcttaaatacaccagctaccgcacgatctcggcgctgtcgaagggcgagcggcccggcccggagaattcgatcggcaagctggtctccggcatgatgctccaggacatcgcgacctatgccatggacctccagggcgcggccggtgttctcaccggcaatgacgaggagactgtgcagggccagttccagcagatgctgctgtccgcgccctcgatgcgcatcgccggcggcacggacgagatcctgcgcaacatcatcgccgagcgcgtgctgggcctgcccggcgacatccgcgtcgacaaggacgtgccgtacaacaagatcccgaccaaagggcggtga

SEQ ID NO: 7236 - DNA, 714 bp, BradyrhizobiumColbertium
atggacgccaaagggcccaacgccaactactccaccgaagaccgcatcggcgtgctcgaagagcttctcaatgagcgctactccgtccgcgcgttccttgccaaggaagtcgatcgcgcgatcatcgagcatgtgctgaccaccgcgcagcgcaccgcgtcatggtgcaacagccagccctggcaggtcgtcatcgccagcggcgaggccaaggagcgctttcgcaaggcgatctacgcggaggcctccaaggggctcggtgatgactacgacttcaccccgccgcgcgaatatgtcgggatatatctggagcgtcgccgtgagagcggcttccagctctacaacacgctcggcatcgcccgcggcgacaagatggcttatgccaagcaggcgctggagaactacaatttcttcggcgcgccgcatgtcgccgtcatccacaccaacgagccgctcggcatctacggtgcgatcgattgcggcgcctatgtcagcaatttcatgctggccgcgcaggcgctcgggctcggcacgataccgcaggccgcgctcgcgcggcattccgggttgatccgccgccacttcaatctgtccgacgatcgccgcgtcgtctgcggcatttcgttcggctatgcggacaatgcgcacaaggtcaacagttatcgcacctcgcgggcgagcttgggcgagaccgtaacgttcgtggatgtgtga

SEQ ID NO: 7237 - DNA, 549 bp, BradyrhizobiumColbertium
atgcctctcacggactccctgcgcaacgacatcttggcggccgtgcccagcctgcgcgccttcgccatctcgctcagcggcaatgcggaccgcgcggacgacctcgtccaggagacgctgctgcgtgccctcgccaacatcgactcgttccagcccggctcaaacctgccggcctggctgtttacgatcctgcgcaacctgttccgctccgattatcgcaagcggcggcgcgaggtcgaggatgccgaaggcaactatgcgaagactctgaagacgcagccttcgcagaatgcgcacctcgaattcgaggagtttcgcaccgcgctcgataagcttccgcaagatcagcgggaagccttgatcctggtcggcgcgtccggcttctcctatgaggacgcagcctcgatctgcggctgcgcggtcggcaccatcaagagccgcgtcaaccgagcccgttcgaagctcgccgcgctgctctatgtcgacggcgccgaggatttcgggcccgacgagacggtgcgcgccgtgatcggcggcagcggcggctaa

SEQ ID NO: 7238 - DNA, 771 bp, BradyrhizobiumColbertium
ttgttgcgccggtacgcgcgcgccctgacgggcagccaggcctccggtgacgcctatgtcgcagccatgttggaggccatgctgggagacccgtcggtgctcgatgagagccatgggcccagggctggcctgttccggctgttcacgcagatctggaattcggtctccgtcaacgacgatgccgaggtgacgaccctgccgatgccgccggagcggcggctgtcgaacatcacgccgttgccgcgccaggcctttctgctgctttcgctcgagggcttttcggaagaggaagttgccttcattctcgggaccgacgtcgctgagacgcggcggctcgcggatgctgcaggacgggagatggccgccgaaatcgcgaccgatgtcctcatcatcgaggacgagaccttcatcgccatggacctcgagagcctggtgaagaatctcggccacaacgtcgtcggcgtcgcccgcacccatgccgatgcggtggccctcgccaagaacaagcggcccggcctgatcctcgccgacatccagctcgcagatggctcgtcgggcctcgatgccgtcaacgagctgctgcgcaccttcgaggtgccggtggtcttcatcacggcctatccggagcgcttcctcaccggcgagcggcccgagccggcatttctgatctcaaaaccgttccagcccgcgatggtgtcggcggtcgcgagccaggccctgttcttccagcgcaactcgcgcaaccgcacgccgaaagcgccggcggcataa

SEQ ID NO: 7239 - DNA, 600 bp, BradyrhizobiumColbertium
atggaccagcggctccttgatcgtctcaccatccgcgacctcgtcgaaaactgggcggtgtggcgcgacgctggcgactgggagcgcttcgccaccgtctggcatgaggaaggctggatgtccgctacctggtttcaggggccggcgcgggatttcatgcgtgtcagccaggagggatttgccaaaggcgtgcgcatcctgcatttcctcggcggcaccagcatcgatcttgcgggtgcgcgagccatcgcgcagaccaagatgacgatctcgcagcgcgcactcgtccacgacgtgctctgcgacgtcgtctgcaccgggcgcttctatgatttcctggagaagcggcagggtcgatggggcatcgtccggcgccagccaatctacgagaaggatcggatggatccggtcgatcccgccgcgacgctgcgccttgatcagcaggcgctcgccgtgctgcccgaaggctaccgtcacctcgcctatatgcaggagctgatcggctataaggtcaagcgcgacatgccgggcctcaccggtcccgaagtcgagaagctctatgacgaaggacgggcgtggctggcgcggccggcggaatga

SEQ ID NO: 7240 - DNA, 423 bp, BradyrhizobiumColbertium
atgtcacagattcaaaaggtctttttgggtgccgtcgcgatcgtcgcgacgctgggtgccgtgcaattggcgtctgggcacgatctggccgaccgttggcaggcagtcgccgatatccccagccacagctcgatttccgcgcccagccagaacgtcaatcgcgccgcgaaggcggaccgtctcgctgggcttaagccggcgccggttgccacgcgcacggtgtcgatgcggctgaacgacctcgccgagacgtccgtgctgctgcgggtccccgcgaccatcgagaccggcaacgccaagccgccactgctgctccagaaccagaagaaggtacgcagcaagccaacgatcgcctgcgagccgatggtgagctccctgaccgaagtcgccaagcttctccagcccggccgctgcgtgacctga

SEQ ID NO: 7241 - DNA, 1878 bp, BradyrhizobiumColbertium
atgacgacgtcagacacggctgtgcatacgcagcctttccaggccgaagtttccgaactgctgcacctgatggtgcattccgtctattcggaaaccgacatcttcctccgcgagctcatctccaatgcctccgatgcgtgcgacaagctgcgctacgaggccatcggcagtcccgccctgctgggggagggcgacgccctcaagatccgcatcatcccgaacaagactgccaagacgctcacgatcgccgacaacggcatcggcatggagcggcaggagctgatcgaccacctcggcaccatcgcccgctccggcaccaaggcgttcgtgtcgaagctgaaagaggccaaggacgggctcggcctgatcgggcagttcggcgtcggcttctactccgccttcatggtcgccgagaagatcgtcgtcatcagccgccgcgccggcgagagcgacgtctggacctggagctcccaaggcggctccggcttcgagatcgcccgcgcgagcgacgaggacgccgcgcgcgtgacgcgcggcaccgagatcgtcctgcacctgaaggacgatgccaagaaatatctcgagacctacgagatcgagcgcatcgtcacggcctattccgacaacatcctgttcccgatcgagctcgtgcccgaagagggcgagccgcgccagatcaattcggcgagcgcgctatggcagcggtcgaaatccgagctgacagcggaggactacaagaaggcctatcatcagatcgcctccgccttcgacgaccccgcgatgacgctgcattaccgtgccgaaggccggtattcctacgccgtgctgctgttcgcgccctcgaccaagccgttcgacctgttcgagccgaaccgtaagggccgggtcaagctctacgtccgccgcgtcttcatcaccgatgatgccgatctgttgccgggctatctgcgctttgtccgcggcgtcgtcgacagcgaggatcttccgctcaacatctcgcgcgagatgctccagaacaatccgcagctcgcgcagatccgcaaagccgtggcgacccgtgtcgtatccgaactggaaagccttgccgagaaggacccggagaattttgccaagatctgggacgccttcggcgcggtgctaaaggaaggcatctatgaggatttcgagcggcgcgaaaagctgctcgcgctgtcgcgcttcaccaccacatcgggcgagaagcggtcgctgaagcaggtcatcgccgatttcaagccgaaccagaccgaaatatattacctggtcggcgacagcatcgagcggctgaaatccaacccacggctcgaggccgcgaccgcgcgcggcatcgaggtgctgctgctgtccgacccggttgatgccttctggacttcgatgccttcggagttcgacggcaagccgctgaaatcgttgagccagggcgatctcaatctcgacctgatcccacgcattgacgacaaggatgaggcgaagaaggaagaaccggccgcggatgaggccgccaccgtcgccgtgatcaaggctgcgctcggcgaacgcgtcagcgacgtcaaggcctcgacgcggctcaccagctcggcctcctgcctcgtcgccgacagccaggggccgagccgcgagctggagcgaatcctggcgcagcagaaccgcggcatgaagaccaagccgatcctcgagatcaatttgcggcatccgctggttaccgcggtcaccaaggcgcaagcaggctcgaaggtcgtggacgatctcagcctgcttctgctcgagcaggcgcagatcctggacggcgaattgccggaagatccggcggcgttcgcggcaaggctgaaccggctggtgttgcaagggctcggcgcgtag

SEQ ID NO: 7242 - DNA, 327 bp, BradyrhizobiumColbertium
gtgaccggcatccgtgccggcgccgtgttcgattcgaggattttttccatgcgcttgccgatactgaccgtcaccgcaattgtgaccctattcgtcgcggccgatgccagcgcccagacctatgatccgcgctatcccgtgtgcatgcatgtctatacgcccggcggcttcggcggcggcggcgattatttcgactgctccttcacctcactgccgcagtgccgagcctccgcctcgggccgctcggcgagctgtgacctgaatccctattacgccttcgaccaacccccgccgcgcccgcgcaagcgacagaggcaacagtactag

SEQ ID NO: 7243 - DNA, 174 bp, BradyrhizobiumColbertium
atgcacgtttattccggcgcgaatggcggtggcggggagtggtacgactgctccttcacatccatcccgcaatgccgcgccaccgcttcgggccgcgccgcgacctgtgacctcaatccatattatcccgtcaacgcaccgccgcgccatttgcgccgcgggcgaagcggctag

SEQ ID NO: 7244 - DNA, 1827 bp, BradyrhizobiumColbertium
atggcccgagagaacaacagcatgaccaccgctgtcatcgagcaagcgaaatccgcgcgcgcgccgtcggcgtcgaagatctggctgaaggcgatcgagctcaccgcacggatcgagacgctgccgggacgtctgttcgccgacgtcgtcgacgattgggcgcgacgccagcccgatcgcgcggcgctggtcaccgacattggcgcgctcgattacgaaggcctgtcgaagcgtatcaatcgctacgcgcgctgggcgcgctcggtcggcctcgtcaagggtgataccgtcgcactgatcatgccgaacggcatcgactatctcgcggcatggctcggcatcagccgcgtcggctctgtggtcgcgctgctcaacacaaagctggtggggcagtcgcttgcgcattgcatcgatgtcgccgcaccccgacacatcatcgtcgcgcatgatctttcggaggtgctggagagcgcgaagccgcatctgaagacgcaagccaaggtctggacccatggcgatgcccgcggcgaacgtgcgatcgacgtcgcgcttgccgtcctggacgacggcccgctcgcgccggacgagcacggcgatgtcagcatcgaagatcgcgctctgctgatctacacatcgggcaccacgggcctgccgaaagcggccagtatcagtcaccgccgcatcctcaactggggcttctggttcgctggtctcacaggcgcgacaccgcaggatcggctctacaactgtctgccgctattccattcggttggcggcatcgtcgccccatgcagcatgctggctgccggcggctccgtggtgattgcggataagttttcggcttcgaacttctggtccgacatcgtgcgccacgactgcacgctgttccagtatatcggggagctctgtcgctatctgctgaaggcgccgccgtcggaatatgagaaccgccatcgcctacggctggtctgcggtaacggcttgcgcggcgacatctgggaagactttcaggctcgtttcgccattccgcgcatcctcgaattctacgcggcaacggaaggcaatttctcgctgttcaatgtcgaggggcaacctggcgcaatcgggcgcatcccgccgctgctcgcgcatcgctttccggccagtctcgtcaagctcgaccccgatagcggcgcgccgctgcgcagtgacgagggcctctgcatggcctgcgcccgcggcgaggccggcgaggccatcggccgcatcggcaccgcggaccagggcggcggccgattcgagggctacaccgatgccgacgagaccgagaagaagatcctgcgcgacgtctttgccaagggcgacgcctggtttcgcaccggcgacttgatgcggatggacgacaagggctttttccatttcgtcgaccgcatcggcgacaccttccgctggaagggcgagaatgtcgcgacctcggaggtcaacgacgccgtgcgcgatttcaccggcgtggtcgacgccaccacctatggcgtcagcatacccggcgccgacggtcgggccgggatgagtgcgatagtcgtgaacgagggttttgacatcaccgcgctgcctgctcatctcgcacttcgcctcccggcttacgcccgcccggtcttcatccgtatctcgcgggagctcgacgccaccgaaacgttcaagcagaagaaaggcgttctcgcgcggcaggggtttgaccccagcgcgatctccgatccgctgttcatgctcgagccgaaatccggcgcctacgtcgcgctggatgccgaggtcaatgcacgcatcaacgacggcacgatcaggctgtag

SEQ ID NO: 7245 - DNA, 246 bp, BradyrhizobiumColbertium
atgtcggtaaggtcaaaggtcatcgaagccattcagcagatcgccaaggaacagcacgtcgcgcttcctgcgctctcggacgatctgtccctgcacgagacgggcttcgactcgctcgccttcgcgatcctggtcgcgcgtctcgaggacgagaccggcgtcgaccccttcaccatttccggggacgcagcgtttcccgccaccgtcggcgatttcgtgcgggcctacgaaaatgtccccgcgtga

SEQ ID NO: 7246 - DNA, 1383 bp, BradyrhizobiumColbertium
atgtccccgcgtgagatcttcgcgcttcgcgatcatctcggcgcggagctgaaaggccgcacgatctccgatgcgcacgacgtcgtgtcgctgaccgacatcctgtcgcatacggttctgggcggccggctgcgcgagctgtcgggccgcgccgtgctgctcaagctgtcggcccagctccggtcgggccttgccatgatcgaactcgacggcgtcgcccgtcgcatgctgctgtgcccgcccgatctcaacccggcgcatctcgacgcgttggtcgcggatgccggaatcgatgccgtcgtgacggacgagccggatcgttgggccggcactggcgtgccgctggtcgtcaccgcgcagttgccgcttcaagccaccgcgcggaccaggaccgaacgcgccaccgaatggctgatgctcacctcgggcacctcgggcgtgccaaagatcgccggccatacgctggaagcgctgacaggcgcgatcgttgccgaaggccccgcacgcgggcctgcgccggtatgggcgacgttctacgacatccgccgttatggcggtttgcagatatttctccgcgccgtcctctccggcggttcgatggtgctgtccgatccccatgaggcactcaccgatcacatcgcgcggctgaacgcgcgcggcgtgtcgcacatctccggcacgccctcgcactggcgcaagctcctgatgagcggctcggccgcgcagttcgccccggcttacgtccgtctctccggcgagatcgccgaccaggccgtgctcgacggcctcaaagtggcgtttccccatgcctccgtcggccacgcctatgcctcgaccgaggccggcgtcggtttcgccgtcaatgacgggctcgagggatttccggccgactatctcggcaaccgcaatggcgtcgagatgaaggtcgtggacggctcgctgcggatccggtcgacacgaacagcccacgcctatatcggccgcaacgccgcggcgctcaccgatgatgaggggtttgtcgacaccggcgatatcgtcgagctgcgcggtgatcgttattacttcgtcggccgccgtggcggcatcatcaacatcggcgggctgaaggtccaccctgaggagatcgaggcggtgatcaaccgccatcccgccgtgcggatgtcgcgcgccaagtctcgccgcagccctatcaccggcggcatcgtcgtcgccgatgtaattcttgccgagggtaccgatccggcgcacgcgaaggggatccgggatcagatcctggagcagtgccgcgcccagctcgcctcgcacaaggtgccggccgtgatccgcttcgtcgaggcgctcgatgtcaccccggccggaaaactggcgcgcaccgatgcataa

SEQ ID NO: 7247 - DNA, 723 bp, BradyrhizobiumColbertium
atgcataatattctcgtcaccggcggcagccgcggcattggcctggcgatcgccaggcggctcgccggcgccggcttcaacgtggttgcggccgcacggcgcgagagcgaggagctcaagagcgcgattgccgaatccgaggggcgcctgcatttccgctcctgcgatctcgccgtgattgatgcaattccggctttcgcgaaactcgtgcgcgacgagttcggcccgatctacggcctcgtcaacaatgccggcctcggcaccgagggcctgcttgccaccatgcacaattccgagatcgaggcgctggtgcagctcaatgtgctgtctccgatcatcctcacaaaatatgttgcgcggcagatgatggcggatggtgcggggcgcatcatcaacatctcctcgatcatcgcgaccacaggctacaacggcttgtcggtctacggcgcgaccaaggccgccgccaccggcttcacccgctcgcttgcgcgcgaggtcggcaagctcggcatcaccgtgaacgcgatcgctccgggcttcatagacaccgaactcacccacaatctctccgacgagggccgcaagcgcatcgccggccgcagcgcgctgcgccgcttgccggaaacggacgacatcgctcggatggtggaatatctgctgggggaaggcggccgcaatgtcaccgggacggtgttcaccgtcgacgcggggaatacggcataa

SEQ ID NO: 7248 - DNA, 126 bp, BradyrhizobiumColbertium
atgacgcatcagaattccggcagtcacggccatgaaatgtacccacagcaattcgtgcgcctggtcggctgtcgtgatgcgtcgctcgacagcctacgcaagcgtcaagaggacaagctgcactag

SEQ ID NO: 7249 - DNA, 318 bp, BradyrhizobiumColbertium
gtgaagatgcccgaaagactgacggcagccgtcgatgcctgggccgaagctcatggcctgacccgctcggatgcgatctgcaagctgatcgaactgggcctgaagatgacgcccccggtcgtcccgccggtacacccgacggaatcgagcgccaccaggatcgaggagatcgcagtacacgagatcgaggcgctgctcgatcccgcattgccggccgacgaacgcgaacgccgcattcgccgcctgaccgaggggccgccggaattctcacagcagcgaattgacctgccgaaggactcgccgaagcagcgaacgtga

SEQ ID NO: 7250 - DNA, 1152 bp, BradyrhizobiumColbertium
atgatttcaggcgagtctttctatcgcggcattcccgtcttcagaggcttcaccagcctgatggatcccgcgctctactcgccgctgcccgacgactggagcatcggcgttgccgatatcgtcgattcgaccagggcgatcgcggcgcagcgctacaaggcggtgaacatggcaggcgctgcggtgatcgcggcggtgacgaacgcgttggcgggacgcgaatttcccttcgtattcgggggcgacggcgcaagctttgcggtttcgccggatgatgtcgaactggcccgcgaggcgctggctgcgactgcgacctgggtgcgggaagatctcgatctgaccatgcgcgtcgcactagtgccggtcagcgccattcgtgcgcaggccctggacgtgcgcgtcgcccggttcgggccttcggccaacctgtcctatgcgatgttctcgggcggcggcctcgcctgggccgaggccgcgatgaagcgcggcgagtttgcggtcgaggcggcgcccgcgggcacgcaacccgacctgtcgggcctgtcctgccgattcgaggtgattccggcctcccgcggattgatcctatcgctgctggtgatgccgacacggggtgccgatccgcgcgccttccgcaaggtaatcgaggacgtcatcgatctggtcgagctcagtccggatggcggccgcccggtgccgccgcaagggccgccgctgaaatggccgccgcagggggtggacttcgaggcccgcaccaagcgtggcggttcgctgctcgcacgcagggtcagcgtgctcgcctacacgctgttcgcctatctgatcatgcgcttcgacctcaaggccggcggcttcatgcctggcgtctacaagcgtcaggtggctgagaactcggacttcaggaaatatgatgacggcttgcgcatggtcatcgactgtacggtcgagcttgaacgtgccctcaccgatcgtctcgctgcggcggcgcgcgagggtatcgtgcgctacggcgtccaccggcaggatgcggccatgatgacctgcttcacaccctcgctgctgcggagcgatcacgtccatttcatcgacggcgcgcgtggcggctatgcctcggcggcgacggcgttgaaggcgatgatggcagcgagctag

SEQ ID NO: 7251 - DNA, 1392 bp, BradyrhizobiumColbertium
gtgaacatgacgatcgatgcccccctagatgccgtcccgccggttgcgccggtcgtctcccccatcgccagcctgctgaccgcaccgattctcccgacgctgctgcggctcgcgattcccaacatgatcgcgatggtcggcagcacgctggttgcggtggccgagacctcctatatcggccggctcggcaccattccgctcgcggcgatcgcgctggtgtttccgttcgcgatgctgacgcagatgatgagcgctggcgcgatgggcggcggcgtctcctccgccatcagccgcgcgctgggcgctgggaatcgcgaccgcgctgcgacgctggcgctgcacgctgccatcatcggcctctgcggcgggctgttcttcacggtgatgatgctcgtcttcggccgctccttcttcgcgctcctcggcggacgcgagcaggtgctggaggaggccagcagctattcgcaggtgctgttctccggcgcggtggcgatctggctcgtcaacacgctggcctcggtcatccgtggcaccggggacatgcgcctgccttcgatgacgctgatcggagcgagcgtgctccaaatcgcgctcggcggcacgctcgggctcgggctgttcggagtgccgcaattcggcatgccgggcgtcgcgagcggccagttgattgcgttcagctgcgcggcgatcttcttcctctggtatctgttgtccggacgcagccggctgccgctggctcttcgtgccttccatttcgagcgcgcgatgttcgtggacattcttaaggtcggcgcgttggcctgtctgtcgccgctccagaccgtgctcaccatcctgatatttaccaagatcctggcgaccttcggcaccgaaacactggcgggctacggcatcggatcgcggctggaattcttgctcatcccgatcaccttcgccttcggcatagcctcggtgccgatggtcggcatggcgatcggcgccggagacgtgaagcgcgcgcggcgggtggcctggactgcggcggcggcctccggactcaccatcggcctgatcggcctcgccgttgcgctcgctccgtcgctgtgggtcgggctcttcacgcgggatcccggcgtcaccgcggcagcgcacagctatttccattgggcaggaccggccttcgtgttcttcggcatgggcgtgtcgttgtacttctcgtcacagggtgcggcgcgagtcggcggccccgtgctcgcctccacggtgcggctcctgatggtcgcgatcggcggcgtcggactgatgaccgcgcaagctccggcctggactctgttcgcgctggtcggtggcgccatggtcgtgttcggactgtcgaccgcggcgtctgtcgccttcgtgcgatggggcaaatga

SEQ ID NO: 7252 - DNA, 528 bp, BradyrhizobiumColbertium
atgagcatcgagatcgacattctgaacggtgacgcctcgtggccgatagcggagccgctgcatcaggcagtgtggggaccacatgtgattgcggacaagccctgggcgcacgtcaaatgggccaatgccgatctgcgcgttctgatcgagacgcccgaggacggtctcgtttgccatgtcggcatctacttccgaaccgtcacctggaacggacagaaggtccacattggcggcatcggcggggtctgcacgcgcgaggaccgacgcggccgcggttatgcaacgatcgcactcgacgcggccgtgcacacgatcagggccaacgaagcggtccgcttcgccctgctgttctgcgagccgcacaatttcgcattctacgaggcccgcagctggctccccttcgagggcgaggtctattgcgagcagccggaagggcggatccgctttacccagatggcgccctacgtcttcaacatcgtccgcgcgccgacgctgggcaccatcgacctatgcggcctgccctggtga

SEQ ID NO: 7253 - DNA, 597 bp, BradyrhizobiumColbertium
atgacctttacgctgcccccactcccttacgcctatgacgccctcggtcagtacatgtcgaaggagacgctcgaatatcaccacgacaaacatcaccaggcctacgtcaccaacggcaacaacgcgctcaaggggaccgaatgggaaggcaagtcccttgaagagatcgtcaagggctcgttcggcaagaacccggccgtgttcaacaatgccggccagcactacaaccacattcacttctggagctggatgaagcccaatggcggcggcaccaagctgcccggcaagctcgagaagaagatcaacgaggacctcggcggcttcgagaagttcaaggcggacttccaggcggccggcatcggccagttcggctccggctggtgctggctccaggtcaagaacggcaagctcgagatctccaagaccccgaacggcgagaatccgctggtgcacggtgctaccccgattctcggctgcgacgtctgggagcactcctattacatcgattatcgcaaccgtcgccccgactatctcaaggcgttcgtcgagaacctcgtgaactgggaatacgtggagtccctgttcgagaaggcgtga

SEQ ID NO: 7254 - DNA, 543 bp, BradyrhizobiumColbertium
gtgcgtaagccgatcggctggtcgactatcatcatcgcggtcctggtggcggtgagcgcaggccttgtctggcgtcgcgacggcaccgatggcgttctcgacattctgacccacgacctctcgctcttctccggcatcctgccgcgcgtgctggccggctgcctgctcggcgctttcatctcggagatcctgccgcacgagaaagtctcgcgctcgctcgggccgaagtccggcttgatgggtcttttgattggtaccgcgttcggcgcgatcctgcccggtggtccctttaccgcctaccccgtggcgagcgcgctgctcgcggtcggtgccgatttcggtgccaccatcgccatggtcgtgagctggaccctgatcggctacggccgggcggtggcctgggagatcccgatcatgggcaccgatttcaccttgtggcggatcgtgatctcgctgccgctgccggtgctcgcaggcgctctcggccgcttcgtctacgtgaggatgtatccgaagcccgccatcaaggacgacgagacttga

SEQ ID NO: 7255 - DNA, 501 bp, BradyrhizobiumColbertium
ttgagcgcagcgcttctgatcgacatcctgttgtggggctcggtgctaggcgtcggcctgatcgcattccgccgcggccctcccgtattcaaagcctcgcttcgagaaggcgcgatggacttcatcaacatcgtgccgcggatcgcgctcggtgtgatcggctccggctacatcgccgccatcataccgcaggaggtgatcacaggttggctcggaccggacagcggttggctcggggtagcgaccgccgtggtcgctggcgccgcgacgcccggcggtcctgtggttggcttctccatcggcacggtggcgctgaagtccggtggcggcgtgcctcaggtggtcgcctatgtcgtcgcctgggccctgttcgccttccagcgggtgatcttgtgggagatcccgttcatgccggcccgtttcgtctggttccgctgcgccgtatcggtgccgtttccattcgtggccgcggcggtcgcgatggtgatcggcaagccgtga

SEQ ID NO: 7256 - DNA, 225 bp, BradyrhizobiumColbertium
atggttcctgctgcgtcccgcgccgatcatcatgaccatgcccacagccaccctcatggctacaggcattcgcacgaccacgcccatagccatgatgaggcctcaccgcatccggcccaagcggcgccctggtcgatcctgcgcatgaccatggcgggtcgccttgcggccgcagtcggcgtctgtgccgttctctggggcatcgtcttgctggcgatgaggtga

SEQ ID NO: 7257 - DNA, 756 bp, BradyrhizobiumColbertium
atggcggccctgcacttccacaacgtcacgctcggctacgaccggcatccggccgtgcaccatctcaacggcgagattgcacaaggtgcgctggtcgcggtgatcggtcccaacggcgccggcaagtcgacgctgttgcgcggcatcgtcggcatcctcaagccgctcgacgggagcatccatctcggcggtctcgaccgcagggacatcgcctacctgccccagagcgccgagatcgaccgcagcttcccgatctcggtgttcgatttcgtcggcaccgggttgtggcgcgccacctccctgttcggtggcgtcggcaaggctgcccgcgaaaagatcctccgcgcgctcgcgtccgtcggactcaatggattcgagaaccgaccgatcggcacgctctcgggtggccagatgcagcgcgtgctgttcgcgcgcgtgctgctccaggacgctcgtctgatcgtgctcgacgagcccttcaatgccatcgacagcaagaccacggccgacctgctcgcgctggtgcagcgctggcacggcgaaggccggactgtgctcgctgcgctgcacgacatggagatggtgcgcaaccacttcgccgagactctggtgctggcccgcggccctgtggcgtggggtccgacggcggaggtgctgacgccggaaaatctgctggttgcgatgcggatgtgcgaggcgttcgatgacagcgccgcggcctgcgcagccgatgatatcagctcgcgggcggcttga

SEQ ID NO: 7258 - DNA, 870 bp, BradyrhizobiumColbertium
atgatctatgacgtgctgatcggcccgttcaccgaattcgagttcatgcggcgggcgctcgccgccgtgatcgcgctagcgctcgcgggcgcgccgatcggcatgttcctgatgttgcggcggatgagcctcgtcggcgatgccatggcgcatgcaatcctcccgggcgcggcggtcggcttcctgctctcgggcctcaatctgttcgcgatgacggcgggcggcctgatcgccggctttgcggtcgcgatcctcgcgggcgtggtggcacgctcgacgggactgaaggaggacgcttcgctcgccacgttctatctcgcctcgctcgcgctcggcgtcaccatcgtctcgatcaagggtaccaatatcgatctgctgcatgtgctgttcggcaacattctggcgatggacgaccagacgctgttggtggtggccatcaacgccacgatcacgctgctggtgctcgcggtgatctaccggccactcgtgatcgagagcgtcgatccgctgttcctgcgcacggtcagccgcgcggggggacctgcgcacctcgcgtttctcgcgctcgtcttcatcaacctggtcaacggctttcaagcgctcggcacgctgctcgccgtcggcctcatgatcctgccggccgggatcgcccggttctggtcgcgcgatctcaccgccatgatatgcattgccgtgattgctgctgccgtctcgggctatgccggcctcgtgctgtcgttccagacccgcgtgccctcaggccctgcgatcattctcgtggcgacggtgatctacgtggtctccgtgctgttcggccgcgtcggcggcatcgtccggcaactgtttcccggccggcatctggaagcgtga

SEQ ID NO: 7259 - DNA, 864 bp, BradyrhizobiumColbertium
atgcgattcatcctgctttgtacgctgttgctgatcgcctcgccgctgcaggccgcggagcggctcaacgtcgtcgcgagcttctcgattctggccgatttcgtccgcaacgtcggcggcgaccgcatcaatctgacgacactggttggcgccgacggcgacgtccatgtctatacgccgacgcccagcgatgcgaaacggatcgcggacgccaagctcgtcatcgtcaacgggcttggcctcgagggctggttgccgcgccttgtgcagtccgccggcagcaaggcgaaagtcgtgaccgcgagcgcgggcatcacaccgctgaaactgggtgcggccgccgatccccacgcctggcagtccattcccaacgccaagatctacgtcaccgatatcgccaatgcgctcgccgcggccgctccggatgacgccgagttcttccgtgcccaggcgagcgcctatctggaaaagcttgaaacgctggaccgcgaggtccggcaggccgtggtgaaaatcccgcccgagcggcgcaaggtgatctctacccacgacgccttcggctatttctccagcgaatacggtatccggttcatcgcccccctgggtgtctccacggaaaccgagcccagcgcgcgcgacatcgccgccatcatcagccagatcaaggccgcgaggatcccggcggtattcctggaaaatatcagcgatgatcggctgatccggcggatcgcggccgagacaggcgccaaggtcggcggcaccctgatttcggacggtttgaccggcgaaaaggggcttgcacccacttacattgacatggtcaggcacaatataaaggccctgaccagcgcgcttgaccactag

SEQ ID NO: 7260 - DNA, 1041 bp, BradyrhizobiumColbertium
atgtctgaagcgacctcccagaagattcccgtgaccgtgctgaccggctatctcggtgccggcaagaccacgctcctgaaccgcatcctgtccgaaaaccacggcaagaaatacgccgtcatcgtcaacgaattcggtgagatcggcatcgacaacgatctcatcatcggtgccgatgaggaagtgttcgagatgaacaatggctgcatctgctgcaccgtgcgcggcgacctcgtgcgcatcatggatggcttgatgaagcgcaagggcaagttcgacgccatcatcgtcgagaccaccggccttgccgatccggcgccggtcgcgcagaccttcttcgtcgacgaggacgtgcagaagaatgcgcggttggatgcggtcgtcacggttgccgacgccaagtggctgtccgaccggctcaaggatgcgcccgaggccaagaaccagatcgccttcgccgatgtcatcgtcctgaacaagaccgacctcgtcacaaagggcgagctcgccgaggtcgaggctcgcatccgcggcatcaatccctacgcgaagctgcaccgcaccgagcgctgctcggtggcgctgtccgatgtgctcgatcgcggcgcgttcgacctcgaccgcatcctcgacatcgagccggacttcttggaagctgacgaccacgaccatgaccaccatcacggccacgcccatgaccatcaccatgatcacggccatggcctgaagcactatcacgacgaggagatgcaatcgctctcgctcaagaccgacaagccgctcgatccgaacgtgttcatgccctggctgcagaacctggtgcaggtcgagggcggcaagatcctgcgctcgaagggcatcctcgccttccaggacgacgacgaccgctacgttttccagggcgtccacatgatgctggagggtaaccatcagcggaagtggaaggagggcgagccacgcgagagccgcctcgtcttcattggccgcgaattgccggaagaggcgatccgcaagggtttcgagagctgcatcgtctcgtga

SEQ ID NO: 7261 - DNA, 1023 bp, BradyrhizobiumColbertium
gtgatgaaagagttcgcgccggccccggattcagcctcgatcgtctccgtcaccgatcgcgtcaagcctattgggctcggcatggccgtgacctcggtgcatttcctcggcggccgtgccgccttcgtcggtggcgaggagaatgtcgcgttcgtcgatagcaagggcgagaccactacggttgccgtgcacagcggcggcattctttcgaccgcctcagacggcaagcgcctcgtgatgggcggcgatgacggcaaggtcgtctcgctcgacgccaagggcgaggcgacgctgctcgccaccgatccgaagcggcgctggatcgacgcggtggcgctgcacgccgacggcaccttcgcctggtcggccggcaagacggccacggtcaagagcggcaaggccgaggagaagtcgatcgaagtgccatccaccgtcggcggtctcgcattcgccccgaagggcctgcggctcgcaatcgcgcactacaacggcgtgacgctgtggtttccgaacatggcgggatcggccgaattcctgccctgggccggttcgcatcacgcggtcacgttcagtccggacaacaagtttctcgtcaccgcgatgcacgagccggcgctgcatggctggcggctcgccgacaacaggcacatgcgcatgacaggctaccccggtcgcgtccgctcgatgtcgtggagcgctggcggcaaggggctcgcgacgtcaggcgccgacaccgtgatcgtatggccgttcggcagcaaggacggccccatgggcaaggagcccgcgatgctcgcgccgctgcaagcacgcgtgtcggtggtcgcctgccatcccaagaacgatattctggccgccggctacagcgacggcaccgtgctgatgctgcggctggaggacggcgcggaaatcctcgtccgccgtaacggcacgccgcccgtcgccgcgctcggctggaacgccaagggcacgctgctggcctttgcggacgaaaatggggatggcggcctgctggagctttaa

SEQ ID NO: 7262 - DNA, 717 bp, BradyrhizobiumColbertium
atgcgatttctgacgacattccagcttgccgacttcgcggatacgctggccagcctgaccacggccttcgtgctgggcacgctgatcggcgccgagcggcaataccgtcagcgcacggcgggcctgcgcaccaacgtgctggtcgcggtcggcgccgccgccttcgtcgatctcgcgatgaatttggcgggcgccgacggcgcggtgcgcgtgatcgcctacgtggtgtctggcataggcttcctcggggccggcgtcatcatgaagcagggcatggacgtgcgcggtctcaacaccgcggcaacgctgtgggcgtccgccgcggttggctcctgcgccggcgccgacatgatcgcgcaggcgtccgcgctgaccgtgttcgtgatcgccggcaacaccatgctgcgtccgctggtcaatgcaatcaaccgtattcccctgaacgagaaggcgctggaggcaacctactatttcaagcttgccgttgcggccgatgctcttccggatatgcgcgaccggctcgtcgagaagctcgagaccgcgaaatattcggtggccgatatcgatgtggccgaaatcggcgatgacgttctggagatcgccgcaaaactggtcgcgaccgcagtcgaccccaacgagctgaacgcggtggcgactgacctccagcatttgccgggcgtacgacacgccacctgggaggtcagtaccaccgactga

SEQ ID NO: 7263 - DNA, 339 bp, BradyrhizobiumColbertium
gtgatcgacatggccattcaaggcgacaagcgcagactgaagctcgacctgacaattgctggttcgctgctcgcagcgggcatcgtggtcgccgtgatgtcgctcgcgcaaatccgcgccgaaaaccggatggagctggcgcaggcaacgccgccgcttcagggcacgccttccgaggatcagaacaagcccgcggaagccaagccgggcggcgatcggccgaccacgccggcgcccgagcccgcacgtccggatccgcagacgcagggcgcggcgaccaagccggcattgccgccggctcccgcggagaagatcgcgccgccgctcgagaagaagtag

SEQ ID NO: 7264 - DNA, 339 bp, BradyrhizobiumColbertium
gtgctgctgtttggccatgacaagaacgcctattggtatggctcgcagctttccatcgaggagacgcgcaggctcgcgccctaccagaacgcgaccggcctgcaggtgacctcggccgtgctcggcggcatggtgtgggcgctggagaacccgaacgaaggcatcgtcgaagccgacgagatggatttcgatcgtctgctcgaaattcagatgccctatctcggcccggtgaagggcttctacaccgattggacgccgttgacggaccgcccaggtctgtttccggaagacatcgacaccagcgatccctggcagttcaagaacattctggtgcggtga

SEQ ID NO: 7265 - DNA, 1092 bp, BradyrhizobiumColbertium
atgagccccgcctcgcaggtctacgcgaagatcaccggtcccatcgtcatggtcggcttcggctccatcggcaaaggcaccttgccgctgatcgagcggcatctcgactacgacaagtcgcgcatcaccgtgctcgatccgaaggacgagggccggaaggcgctttgcgagaagcacaatgtccgattcatccagaagggcctgaccaaggacaattatcgcgaggtgctgaccccgctgctcacggagggcggcggccagggcttttgcgtcaatctctcggtcgataccgggtcgaccgacatcatggagctctgcaacgagctcggcgccctctatatcgacaccgtcaacgagccctggctcggcttctatttcgatgcctcgaaggggccggaagcgcgctccaattacgccctgcgcgaagtgacgctggctgccaagcgggcgcgccccgccggctcgacgacggccgtttcctgctgcggcgccaatcccggcatggtctcgttcttcgtgaagcaggcgctgctcaacgttgccgcggatttgaagctcaacgcccccaagccgaagaccaaggctgagtgggcggatttgatgcggcaggccggcatcaagggcatccacatcgccgaacgcgacacccagcgctcgaagaagccgaaggagcccgatgtcttcgtcaacacctggtcggtagaaggcttcctctccgaaggcgtgcagccgtccgagctaggctggggcactcatgagaaatggatgcccgacaatgcgcgaacccatgaggccggctgcggcgccgccatctatctgatgcagcccggcgccaacacgcgcgtgcgcacgtggtgtccgacccgtggcgcgcagtacggcttcctcgtcacccataacgaatcgatctcgatctccgactacttccccgtgcgcgacgcctcaggcaggcgatataccggccaacctgccactacgcctatcatccggccgacgatgccgtgctgtcgctgcacgagatgttcggccgcgccgggaagatgcaggagaagcaccacatcctcgacgagaacgagatcgtcgacggcatag

SEQ ID NO: 7266 - DNA, 390 bp, BradyrhizobiumColbertium
atgtcccgtcgcctgatttccaccggctccccgttcgagaagaccgccggctacagccgcgccgtgatcgacggcgagttcgccttcgtcgcgggaaccacgggctatgactacacgacgatgacgatgccggccgacgtcacgagccagtcacgcaactgcttcaagaccatcgaagctgccctgaaggagggcggcttcgaaatggccgacattgtccgtgcgacctactatgtcaccgacaccagctacatcgatgtccacttcgccgtctgcggcgaggtactcggcgacatcaggccggcagcgacgttgcttgtcgtcagcgccctcgccaagcccgagatgaaggtcgagatcgaagtcaccgccaaacgccgcagcatctga

SEQ ID NO: 7267 - DNA, 534 bp, BradyrhizobiumColbertium
gtgatccgtgcggaacgtgctgccgacgtcgcgatgcgtgaagcgttgctcgatgcctgctttggcgagaaccgccatggccgcacctgccagcgcctgcgcgacggacgtgcacccgctgcaggccttgccctgtcggcggtgcgcgagggcaagctcgtgggaaccgtgcggctgtggcacgtcagcgccggaggcaggcctgccctggtcctcggaccgctggcggtggaccctgcctgccgcgagctcgggatcggcgccgcgctgatgcatcaggcgctggctgccgcccgagcgcgcgggcacgccgccgtgatcctgcttggcgatgccccctattacgcccggttcggcttctcgacggagaaaaccggtgcgctgtcgctgcccggcccgttcgagcgagaccgcctgctggcaatcgagttcgccgagggcgcactcgatggctgcgtcgggatgatcgtcccgaccggcgctgccctgcccaaacggagggcggttcgcgcacctgaggcgcgcgcggcttaa

SEQ ID NO: 7268 - DNA, 1143 bp, BradyrhizobiumColbertium
atgaccgaacgtatccaggaattcctgcgcaaccgccgcaaggatggcctcgacaccgagccgtgcctcgtcgtcgatctcgaggtcgtgcgcgacaactaccaaagcttcgccaaggcgctgcccgacagccgcgtgttctatgccgtcaaggcgaacccggcgccggaagtgctgtcgctgctcgcctccatgggctcctgcttcgacaccgcgacggtcgccgagatcgagatggcgctggccgcgggtgcgacgcccgaccgcatctccttcggcaacacgatcaagaaggagcgcgacatcgcgcgcgccttcacgctcggcatccggctgttcgcggtcgattgcgccgccgaggtcgagaaggtcgcccgcgccgcgcccggcgcgaaggtgttctgccgcatcctctatgactgcgccggcgccgagtggccgctgtcgcggaagttcggctgcgacccggagatggcagtcgaggtgctcgacctcgccaaacgcctgggtctggagccgtgcggcatctccttccatgtcggctcgcagcagcgcaaggtgaaggcgtgggaccgtgcgctggcgatggcttcgcaggtgttccgcgactgcgccgagcgcggcatcaacctgtccatggtcaacatgggcggcggcttcccgaccaagtacctgaaggacgtgccgccggtggtgacctacggccgctcgatcttccgcgcgctgcgcaagcacttcggcaaccagattccggagaccatcatcgagccgggccgcggcatggtgggcaacgccggcgtcatcgaatccgaggtcgtgctcatctcgaagaagagcgacgaggacgaggtgcgctgggtctacctggacatcggcaagttcggcggtctcgccgagacgatggacgagtcgatccgctacgccatccgcacccgtcacgacggtgcggacatgacgccgtgcgtgctcgcaggtccgacctgcgacagcgccgacgtgctgtacgagaagaacccgtatccgctcccggtcacgctggagatcggcgacaaggttctgatcgaaggcaccggggcgtatacgtcgacctactcgtcggtggcgttcaacggcatcccgccgctgaagacctatcacatctga

SEQ ID NO: 7269 - DNA, 255 bp, BradyrhizobiumColbertium
atgaacgcgcctgcctcctcttcccgccagatcgcctggccgagcgtcatcaccgtcatcagcgccgccatcctgatcggcgcggaggtgttcggcgcggccttcgccggaggttgggcgctggcgatcctgttcggactcggcgatcagggcgcgcacatcctccaggccgtgctgttcgcactgggcgtgctggtgatgacggcgttcgtccgcgccgctcagcgcatcgagcccttcaccaagcgccgctga

SEQ ID NO: 7270 - DNA, 2085 bp, BradyrhizobiumColbertium
gtgatgtcagaatcccgccaaattacggatgccgagaccaatccgctgctgaaggcctgggtgacgccgttcgcggccccgcccttcgacgagatcaagccggagcacttcctgcccgcttttgagcaggccttcgccgaccacgccgccgagatcgcggcgatcaccaacgatccggccgcgcccgacttcgccaacaccatcacggcgctggagcgctcgggcaagctcctgagcaaggtcgcggcggtcttctacgatctggtctctgcgcattccaacccggccatcctggagatcgacaaggaggtctccttgcggatggcgcgacactggaatccgatcatgatgaacgccgtgctgttcggccgcatcgcccagctgcacgaaaaccgtgccaaccttggactcacccccgagcagctgcgcctcttggaacgcacctacacccgcttccatcgcgccggcgccggcctttccgaagaggccaagacccggatggccgagatcaacgagaggctcgcgcagctcggcaccagcttcagccaccatctgctcggcgacgagcaggactggatcatggagctcggcgagggcgatcggcagggcctgccggagaatttcgtcgcggccgccaaggctgcggcagaagagcgcggcctggcaggcaaggcgatcgtcacgctctcgcgctcctcggtcgagcagttcctgaagagctcggcccggcgcgacctgcgcgagaaggtctacaaggccttcatcgcgcggggcgacaacggcaacgccaacgacaacaatgaaaccattgtcgagatcctgaagctgcgcgaggagagcgcaaagctcctaggctacccgactttcgccgcctaccggctcgaggattccatggccaagacgccggaggcggtgcggggcctgttggagcgggtctggaagccggcccgcgcccgggcgctcgccgatcgcgacgagatgcaggccctgatcacggaagagggcggcaatttcaagctcgcgccgtgggactggcgcttctatgccgagaagctgcgccttcaacgcgccaatttcgacgacgccgcgatcaaaccgtatcttgcgctcgacaacatgatcgccgccgccttcgactgcgccacccgcctgttcggcgtcacgttcgaggagcgcaaggacgttcctgtctggcacccggacgtccgtgtctgggagatgaaggggccggacggcaagcacaaggcactgttctacggcgactacttcgcccggccgtcgaagcgttccggcgcctggatgacctcgttgcgcgaccagcagaagctcgacggcgacgtcgcgccgctcgttctcaacatctgcaattttgccaagggagccggcggcgagccttcgctgctgtcgcctgacgatgcccgcaccctgttccacgagttcggtcacggcctgcacggcatgctctccaacgtgacctatccctcgctgtcgggcacctccgtgtttacggatttcgtcgagctgccgtcccagctctacgagcactggcaggagcggcccgaggtgctgcagaagttcgcccgccactaccagaccggcgagccgttgccggacgagctgctgcaacgcttccttgccgcgcgcaaattcaaccagggctttgccacggtcgaattcgtctcctcggcgctgatcgatctcgaattccacacccagccggctgccgccgcgcaggatgtgcgcgccttcgagagacgcgagctggagaagatcggcatgcccgaggagatcgcgctgcgtcatcgtcccacgcaattcggccacatcttcaccggagaccattatgccgccggctattacagctacatgtggtcggaagtgatggacgcggacgccttcggcgctttcgaggaggcgggggacatcttcgatcccaaggtcgcaagacgcctgcacgatgacatctattcgagcggcggatcggtcgatccggaagccgcctacgaggccttccgcggccgaccacccgagcccgatgcgctgctccgccgtcgcggcctgctcgacgacgcaaaggcggcctga

SEQ ID NO: 7271 - DNA, 633 bp, BradyrhizobiumColbertium
atgcgcgccctgttcggatgcctgcttgctgccgcgatgacgctggcagcgggtgccgcgaatgcgcatccgcatgtctggatcaccgcgaccagcgagctgctctacgcggcggatggctcgatcaccggcgtgcgtcacgcctggaccttcgacgacatgttctcggcctatgcggtgcaggggctcgagagcaagaccaaggggacctatacgcgggaggagctcggcccgctggcgcaaaccaacgtcgagtcgctcaaggaatacgcctacttcaccttcgcgcgagccgacggcaagaaggaacgattccaggagccagtcgactatttcctcgactacaaggatacggtgctgaccctgcacttcacgctgccgctgaaggccccggtcaagcccaagcagctggtgctcgaagtgttcgaccgctccttcttcatcgacttcaagatggccaaggacaatccggtcaagctggtgggcgcgccctctggctgccagatgaagctggatcggccgaacgacggcaccgccagcgcgcagcagctgaacgagcagacctttctcaacggcgagaactcgaatttcggcatgatgttcgccaacaagatcacggtggattgcccttga

SEQ ID NO: 7272 - DNA, 1134 bp, BradyrhizobiumColbertium
ttgaagccgcaactctccccgctcgcgcgcgggctgctcgcctgcgccgccgttctgctcgtcgttggcgtggccgatgccgcgctccatcatctgctcgcgcagacgccgttcggcgcgccgcggccggcgcaggcggccgattcggaggccggcggcctgatcggctggctgctggcgaaacagtcggaattctatcgccagatgtcggcgaccatccgggccgcgaagtccgacggctcggcggtgtggacgctgctcttcatctcgttcgcctatggaatcttccatgccgccggtcctggccacggcaaggcggtcatcgcctcctatctcgtcgccaaccgcgagaccgcgcggcgtggcatcgcgttgtcgttcgcctcggcgctgatgcagtcgctggtcgcgatcctggtcgtcggcatctcggcctgggtgctgaatgccacggccaagaccatgtgcaaggcggaggcggtgatcgagatcgcgagctacgccctgattgcggcattcggtctgagactggtgtgggtcaagggcggcgccttcatccgcgcgctccaggtcgcccaaccggtgccggcgattgcgggcgtgccgcacgatcatgatcacggtcatcaccatcatcatgatgcgcatgaccatgacggccatgatcatcatcgccacgatcagggccatgcacacgcccatcatcaccacgctcatcatcatgggaacgatcacgtccacgacgagcattgcggccactcccacggccccacccccagcgagctcgccggtccgggcggctggcggcgcggcttcgctgcgatcctgaccgtcggtatccgcccttgttcgggtgcgatcctggtcctggtattcgcgctggcgcagggcctgttctgggccggcatcgccgcgaccttcctgatgggtttgggtaccgcgatcacggtcgcggcgatcgctgtcgtcgccgtttccgccaaggacatcgccgcccgcctcagcgcggggcgcgacggcggcggcgcgctgttcatgcgaggcatcgagttcgccgccgcaggcttcgtgctgctgttcggcgtcggtctcttgttcggctacatcgccgccgaacggaccacgtgcttctag

SEQ ID NO: 7273 - DNA, 438 bp, BradyrhizobiumColbertium
atgtcgcgcgaggatttctggttctttcatccgtttcgggtgcgttattccgagatcgacggccagggcgtcgttttcaacgcccattacctgacctatttcgacaccgccatcaccgggtactttcgcgcgctcggctttgaccagtatgcggacgcgcaggcgagcggcatcgatttccacgtcgtcaagtccgtcatcgaatacaaggcgccggtccgcttcgactgggagctcgatgtcggcgtgcgcgtagcgcggatcggcaattccagcctcgtgttcgagctcgccatcttcctgaagggcggcgcggacgcgctggtgaccggcgagatcgtctgggtctacactgaccagaagacccatcgtccggtcacgatcccggcatcgatgcggtcgctgatcgcgacgcgggagcgtcatctgacggcgtga

SEQ ID NO: 7274 - DNA, 399 bp, BradyrhizobiumColbertium
atgacgctcgcagaatggtgcgtattcggagcgctgctgctttatctcgtaacgatcgcctcgatcaaatggatcaggttcggccgcttcgataattcccggccgcgcgacccagccttctatgaggatgccatcgcgcagcgcgcgctcggcgctcaccagaacggcatcgaggctttcccgttcttcgccttcgcggtgctgctcgccgagttcagagatgcgccgcagcggctgatcgacgagctcgcggcgctgttcctgatcgtgcggatcgcgtatgtgctgacctatctcggcaatcgcccgacgctgcgctcgatcctctggagcgtcggcttcgcgatcaatctcggcatcttcttcctgccggctttgaagcggttcctgccggtgtga

SEQ ID NO: 7275 - DNA, 1038 bp, BradyrhizobiumColbertium
atgaacagcgtcgccccccccgagactgcgaagccggtcacccgatccgccctgccgcgcgtcggcgtactcctggtcaatctcggaacgcctgacacggccgatgcgccaggcgtgcgggtctacctcaaggagttcctcagtgacgcccgcgtcatcgaggatcagggcctgatctggaaggtggtgctgaatggaatcatcctgcgcagccgtccccgtaccaaggcgctggattaccagaagatctggaacaacgagcagaacgagtcgccgctgaagaccatcacgcggtctcaagccgttaagctcgccgccgccttggcggaccgcgaccatgtcgtggtggattgggcgatgcgttacggcaatccctcgatcaaggccggcatcgacgcgctgatcgcaaagggctgcgaacgcattctggctgtcccgctctatccgcaatattccgcttcgacctcggcgaccgtctgcgacgaggtgttccgcgtgctcgcgcagcttcgcaatcagccgacgctgcgggtgacgccgccctattatgaggattccgcctatatcgaggccctcgcgacctcgatcgaggcgcatctagcgacgctctcgttcaagccggagctgatcgtcgcgtcgttccatggcatgccgaaagcctatgtcgacaagggcgatccctatcggcagcactgcatcgcaacgacggaagcattgcgccgccggctcggcatggacgaaacgaagctgctgctgaccttccagtcccgtttcggcaacgacgagtggctccagccctacaccgacaagacgatggagcggctcgccaaggaaggcgtgcgccgcatcgcggtggtgacgccgggcttttccgccgactgcctggagacgctggaggagatcgcgcaggaaaacgccgagatattcaagcacaatggcggcgagcagttttccgccatcccctgtctcaacgacagcgatccgggcatggacgtgatccggaccctggtgctgcgcgagcttcagggctggatctga

SEQ ID NO: 7276 - DNA, 978 bp, BradyrhizobiumColbertium
atgaaccgccgctcgtgtctggcgtttctcgggatgatcgcggcgctccccgcctcggcgccggcccagcagcggaacgtggtgcggcggctcggtgtgctctcggtcaccgccgccgaggacgcgatcggacaggcacgcagcacgatcctggccgaggcgcttgccggctacggttggaaggagcgcgacaacctcaggatcgagtggcgcagcggcggtgccgatcgcgcgcgcatcgcgcagcttgcggacgagttgatcgcgctcaagcctgacatcctgctcgcggtcggcacgccctcggtggaagagctgcgccggcgcaccaccacgatcccgatcgtgttcgccgtcgtcaccgatcccgtcagccagggttttgtcgaaaacctcgcgcatcccggtggcaacatcaccggtttcaccgattatgacggcccgctagccggcaaatggctggagatgctgacgcaggtcacgccatccgtccgccgcgtgttcgtcgtctacaatcccgccaccgcgccgttcgcgcccttgatgctgcgcacgatcgagggcgccgcacggactcttcacgtgatggtcgagcccgcgcccgtccatgacgccgcctcgatcggagcgctggcttcgcggaaggacggtgccatcctggtcctgccggacttcttcacattggccaaccgcgtgcagctgctcgcgacgatcgcacaggcgcgggtgcccgcagtcttctggagccgcacctttgtcgatgagggagggctgatgtcctacagcaccgacactgccgaacagctgcggcaggccgcctcctatgtcgatcgcatcctcaggggagcgcaggcggccgatcttccggtccagaaccccaccaagcttgagctggtgatcaacctcaagacggcgagggcgttcggcgttacgcttgcccccgccctcgtcgcgctcgcgaacgacgtcatcgaatga

SEQ ID NO: 7277 - DNA, 999 bp, BradyrhizobiumColbertium
atgagcggtttcgacatcttcgcaattgttctggtcttgctcgtcatcgtcaccctcgtcgccggcgtgaagacggtgccgcagggctacgactggaccatcgagcggttcggtaaatacacccagacgctgagccccgggctcaatctgatcgtgccctatttcgatcgcgtcggacgcaaggtcaacatgatggagcaggtgatcgacattcccgagcaggaggtcatcaccaaggacaacgccaccgtgacggtggacggagtcgccttctaccaggtgttcgatgccgcgaaagcgagctacgaggtcgccaacctcacccaggcgatcacggtcctcaccatgaccaacatccgttcggtgatgggttcgatggacctcgatcaggtgctctcgcaccgcgatgagatcaacgaacgcctgttgcgcgtcgtcgatgccgcggtctcgccctggggcgtcaaggtcaaccgcatcgagatcaaggacatcgtgccgcccgccgatctcgtcgaggccatgggccggcagatgaaagccgagcgcgtcaagcgcgccgacattttggccgccgaaggccagcgccagtcggagatcctgcgcgccgaaggcgccaagcaggggcagatcctccaggccgaaggccgccgcgaggccgccttccgcgacgcggaggcgcgcgagcggtcggcggaagcggaggccaaagcgacgcagatggtcagcgaggccatcgccaagggcgacgtcgccgccttgaactatttcatcgccgacaagtatatcaaggcgttcggccagttcgcggaggcgccgaaccagaagatcatcatgttgccgatggaagccaccagcatgctcggctcgctcgccggcatcggcgagatcgccaaggcgacgttcggcgaggctgccgcagctgctgccgcgcgccgccccggatcggtgccgccgaccggcagcacgccgccggcggtgccgccgcggcagggctag

SEQ ID NO: 7278 - DNA, 444 bp, BradyrhizobiumColbertium
atgaccgacatgttcgtatcgctgggcaactggaattggctgatactcggcttcatcctgatggcgctggaggtattggccccgggcattttcctgttctggcttggcttggctgcgctgctcgtcggtctgatctcgttcgcgcttgccgtgtcctggcagatccagctcgtgatgttcgcggtattcgccgctgccgcggtgccggtgtggcgccgcctcgcccggccgaagccggacgcgaatgccagcccgttcctcaacaagcgcaccgaagccttgctcggtcgcgagttcacgctggagaagccgatcatcgacggttccggcacggtgcgtatcgacgacaccgtgtggcgcgtggccggcccggatacgccggcggggacgcgcgtcagggtcgtgcaggtcgatggtgccaacctcaccgtcgccgtgacgtag

SEQ ID NO: 7279 - DNA, 345 bp, BradyrhizobiumColbertium
atgacgcaagaggcggcgatggcgaaagaggctgactccaagacacgcagcgtgcgcggctcgcgcaccgggcggccgatcatggcattgctcgatctgctcggccggcgctggagtctacggatattgtgggagctacgggacgagcccctcacctctcgagcactccgcgcagcctgtgacgaggcttcgccgacggtgctgcaggcgcggctgacggagctgcgcgaggcgggtttcgtcgagcttggcgacggtggtggctacggattgaccccgctcggacaggaattgtgcgagacgttcgtaccgctgcaccggtttgcggagaggtggaggaagtag

SEQ ID NO: 7280 - DNA, 558 bp, BradyrhizobiumColbertium
atgtccccattcgcgccgcgtatcgccccgctcgcgccgccttatcccctggagatccaggcgcagttcgagcgcatcatgcacggcgcaccgccgctgatgctgttccgcgtgatggccggccacggccgcgcctgggacaagttccgtgccggtggcctgctcgatcccggcccgctctccttgcgccagcgcgagatcgtcatcgaccgcacctgtgcgctgaaccgatgcgaatacgagtggggcgtgcacgtcgcgatcttcgccggaccggcaaagctcaatgaggaggaggtgcgcgcgacggtgctgggagatgcgatgtcgccgtgctggtcaccgtccgagcaggcgctggttgcggccgtggacgcgctgcatcgccgcgcgacgcttgacgacgaggagttcgccgcgctctcggctcattacgacgaggcgcagattctggagatcatgctcctgtgcggcttttatcgcacggtgtcgtacctggcgaacggcctgagattgccgctggaggagaaggcggcgcggtttccgacaccgctctaa

SEQ ID NO: 7281 - DNA, 1041 bp, BradyrhizobiumColbertium
atgggcgaaagcccctcctccctggaccagaccatgccgagttcgaaagcgctgatgaccgcatcatccggccccattccgacaagcgtcgaatccgcactccgcacgctggagacggagagcggcggcatcaacgcgctcgccgccgccctgcgcggtccgcttggcgagacctttgccagggcggtcgagctgattcgcaatgccaagggccgcgtcatcgtcaccgggctcggcaaatcaggccatatggggcgcaagatcgcggcgacgctggcttcgaccggcacgccggccttcttcgtgcacgccgccgaagcgggccacggcgatctcggcatgatcacgcccgacgacgtcatcatggcgctgtcctggtccggcgagcagccggagatgaagaacctcgtgaactattcggcgcggttcgcgattcccatgatcgcggtgacctcgaacggctcctcctcgctcggccaggccgccgacctcgtgatcgaactgccgaaggcgcgcgaagcctgcccgcacaatctggcgccgaccacctcgaccttgatgcaggccgcgatcggcgatgcgctcgcgatcgcgctgctggaggggcgcggcttcaccgcgctggagttcgcgcatttccaccccggcggcaagctgggggccatgctgaaattcgtccgcgactacatgcgtaccggcactgagattccgatcaagcccgaaggcaccaagatgtccgaagccgtggtggagatgtcggccaaggggctcggctgcgtctgtatcatcaacgatgccggcgaggcggtcggcatcatcaccgacggcgacctgcgccgccacatgcggcctgatcttctgaccgcaacggtcgacgagatcatgaccaggcagccgaagacggtgcccccgtcgatgctcgcgaccgaaatgatcgaggtgctgaacacccgcaagatcacgaccctgctggtgacggaggcgggcaaggtggtcgggatcgtgcatctgcacgacctgctgcgcgcgggcgtggcgtag

SEQ ID NO: 7282 - DNA, 1704 bp, BradyrhizobiumColbertium
ttgctgcgcgcggttttgccatgcctggcgctgacggcccttggaagcggctccgcggctgcccagagccttacgccggacctgttcaaccccaaccgcggcggctttgcctcgcccgatacgctgccgacgcgccgcacggccggcgtcccgcaggcgccgtcggatgcattgccggcgctgcccgatcccaatgccgatccgctcaaggcccgccaaaggcctgcggcctcgcgcgtcggtcaggtcccgacctacggcctgcccgcggccaccggagcgagcagctccgcttacgactcgctcaaccgcaagcggcagcagccgaagctctatcccggtcagccgaagccgaagcgacctgccggtcccggctcgccggcgccatcggtagcgccgcctgcgtcaacgctcggcccaccgcggatcgcgcccccgccctcagcgtccgcgaacagggcgcccgtgccggcggcgatggcgggcaccgtgcccggccagccgttgcgccggcgcctcagggccgatgacgatgcgtttggggccatcggcgattatgccggcagcttcctgatcaagggcgggctcgagctctccgcgggctacgacaccaatccgacgcgcctcaacaggcccgtcggttcgccggcctatgtgatcgcgcccgatctgctcgtgatgtccgattgggagcgtcatgcgctggtcgccgatctgcgcggctcgttctcgggctacaccaacgacatgccggcgagcatcaacggcttcgcttcgccgtcgccggtcgaggccaatcgcccggacttcaccggccatgtcgatggccggctcgacgtcacccgggacttcaagcttctttcgcagctgcgtctgcggctcgccaccgacaatcccggcagtccgaacgtgcaggccggcttgcagcgatatcccgtttacgccgcctacggcacgaccatcggcttcgaccagactttcaaccgcttccaggtcgccgccggcgccaccatcgatcgcaccgcctataccgattcgaagctcactgacggcacgaccttccccaacaccgatcgcgacttcaatcagtatggcggcgtcggccggttctcctacgacctcaagccggggctgaagccgttcgtcgagatccagggcgatacccgcgtccacgaccaggcggccgaccgcaacggctacttccgcgattccaacggcggctacgccaaggtcggctcgtccttcgagttctcgcgcatcctcaccggcgagatctcgatcggctattccgcgcgcaactacaccgacccgcgcctcagccagctcgccggcttcctcaccacgggctcgctgatctggagcgccagcggcctcaccacggtgaaattcttcaccgacacgcaaatcgccgagaccacgatccccggctcctccggcgtgctggtgcgcacctacgcggccgaagtcgatcacgacttccgccgctggctcaccgctgtcggcaagttcacctacggcacgctcgactaccagggccagaaccgcaacgacaagacctactcgttcgagagcaacctgatctacaagctcaaccgcaacatctgggtcaaaggcacgctgcgccacgacatcctggattcgaacgtggccgggtcgagctcgcaggggacggtgatgctggtcggggtgcggctgcagaattga

SEQ ID NO: 7283 - DNA, 267 bp, BradyrhizobiumColbertium
atggctgctcgaattaccttggacatcaattcggctggcgaattcgagctatggctcaatccgggaggtcgagaccttcttgtgaagcagctactggctctgagcgaaaccaacgagcactttcacttgatgccaagtgaagtcccatcggacgtcgaagtttcgacgcgtccctatcggccaaacgacaagcttctcgaatacggcaaggtgctgttccgacttgacgagtgggacgcgcagcactttccgcgcgtcttgggttga

SEQ ID NO: 7284 - DNA, 1452 bp, BradyrhizobiumColbertium
atgggcaagatcacgggctttctggaaatcgaacggcacgaccgcaagtacacgccggtcgccgaacgcgtgaagcattacaaggaattcgtcgttcccctctccgagaaggaggtgcgcgaccaggctgcgcgctgcatgaattgcggcattccctattgccatggcaccggctcggtcgcgcccggcacgcccggctgcccggtcaacaaccagatccccgactggaacgacctcgtctatcagggcaactgggaagaagcctcgcgcaatctgcactccaccaacaatttcccggagttcacgggccgcatctgcccggcgccgtgcgaggcgtcctgcacgctcaacatcgacgacaaccccgtcaccatcaagacgatcgaatgcgcgatcgtcgatcgcgcctgggacaatggctggctgacgcccgagatcgccgcgcataagaccggcaagaaggtcgccgtgatcggctccggccccgccggcatggcatgcgcgcagcagctggcacgcgccggccacgacgtgcatgtgttcgagaagtacgccaaggccggcggcctgctccgctacggcattcccgacttcaagatggagaagggcgtcatcgaccgccgcgtggcgcagatggaggctgagggcgtcaccttccactacaacagccatgtcggcaccgagggcaatgtcgatccgcgcgagatgctcaacgagtacgacgcgatcgcgctgaccggcggcgccgaagccccgcgcgacctgccgatccccggccgcgagctgtccggcatccactacgccatggacttcctgccgcagcagaaccggcgcgtctccgaggagccgctcggcggcgtccaggagatcctggccaatggcaagcacgtcgtcgtcatcggcggcggcgacaccgggtcggactgcatcggcacctcgctgcgccagggcgcgctgtcggtgacgcagctcgagatcatgccctcgccgcccgagcgcgagaacaagggcctgacctggccgtactggccgctgaagatgcgcacctcgtcgagccaggccgagggtgccgtgcgcgaattcgccgtgctgacgcagaagttttcgggcgagaacggcaaggtcaagaagctgcactgcgtgcgcgtcgacgacaagttcaagccgattgccggcaccgagttcgagctcgacgccgacctcgtcctgctcgcgatgggcttcgtccaccccgtgcacgagggcctgctcaagctgctcgcggtcgagctcgacccgcgcggcaacgtcaaggccaacacgctggactaccagacctcgcggcccaacgtgttctccgccggcgacatgcgccgtggccagtcgctggtggtgtgggcgatccgcgagggccggctgtgcgcaaggtcgatcgacacattcctgatggggaagacggatctgccgcgctga

SEQ ID NO: 7285 - DNA, 4734 bp, BradyrhizobiumColbertium
atgaacgggtcgcaattcgagcgcgcaaacatcgtggcagaagagctgtcgccgacggtcgcctcgaaaacgaccgatccgattcaggaacacaattcgcgccccaaggccgaaggtctgtacgatccgagcctggagaaggactcctgcggcgtcggcttcatcgccaacatcaagggaaagaagtcgcacgaaatcgtctcggacgcgctgagcatcctctgcaatctcgaacatcgcggcgccgtcggcgccgacccgcgcgccggtgacggtgccggcattctggtgcagatcccgcacgccttcttcagccgcaaggccggggagctgggcttctcgctgcccgcgccaggcgagtacgccatcggcgcgctgttcatgccgcgcgagaccgcctggcgcaacgtcatcaagagcatcatcgccgaccagatcaaggaagagggcctgaccctgctcggctggcgcgacgtgccgaccgacaattcctcgctcggcgtcacggtgaagccgaccgagccggcctgcatgcaggtgttcatcggccgcaacggcaccgcgaagaccgaggacgagttcgagcgccggctctacatcctgcgcaagtcgatctcgcaggcgatctaccagcgccgcgaccgcggccttgcgggctattacccctgctcgatgtcctgccgcaccgtgatctacaagggcatgttcctcgccgaccagctcggcaagtactatcccgatctgcacgagaaggacttcgagagcgcgctcgccctcgttcaccagcgcttctcgaccaacaccttcccggcctggtcgctggcgcatccctaccgcatgatcgcgcataacggcgagatcaacacgctgcgcggcaacgtcaactggatggcggcgcgccaggcgtcggtgagctctgagctctacggcaaggacatcaaccggctctggccaatctcctacgaaggacagtcggacaccgcctgcttcgacaacgcgctcgaattcctggtgcagggtggctactcgctgccgcacgccgtgatgatgatgattccggaggcttgggccggcaatccgctgatggatgagaagcgccgcgccttctacgaatatcatgccgcgctgatggagccgtgggacggccccgccgcgatcgccttcaccgacggccgccagatcggcgcgacgctcgaccgcaacggcctgcggcccgcgcgctatctcgtgaccaaggacgaccgcatcgtgatggcgtccgagatgggcgtgctgacgatccccgaggaccagatcatcaccaagtggcgtctgcaacccggcaagatgctgctggtcgacctcgagcagggccgactgatcccggacgacgagatcaaggccgagctcgccaggagccatccctacaaggagtggctggagcggacccagatcgtgctggaagagctgccgaaggtgccgaccaccggcgtgcgctccaatttgtcgctgctcgatcgccagcaggcgttcggctacagccaggaagacatcgccatcctgatgacgccgatggcggcaacgggcgaggaagccgcgggctcgatgggcaacgacacgccgatctcggcgctgtcggacaaggccaagccgctgttcacctacttcaagcagaacttcgcgcaggttaccaacccgccgatcgacccgatccgcgaggagctggtgatgagcctcgtgtccatcatcggaccgcggccgaacctgttcgacctgcagggcatggcaacgaccaagcgcctcgaagtgcgccagccgatcctgaccgatgcggacctggaaaagatccgctcgatctcggaagtggccgagtcgcatttcaagtcgcgcacgctggacaccaccttccactccggcctcggcgcggccggcatggaccaggtgctggacgagctctgcgcgcgcgcggaaagcgcggtgcgcgagggcgtcaacatcatcatcctgtccgaccgcatggtcggcaccgaccgcgtgccgatcccctcgctcttggcctgcgccgccgtgcatcatcacctgatccgcacaggcctgcgcacctcggtcggcctcgtcgtcgaatccggcgagccgcgcgaagtgcatcacttcgcctgccttgccggctacggcgccgaagcgatcaatccgtatctggcgttcgagaccatcatcgcgatgaaggaccgcctgccgggctcgcttgacgactacgagatcgtcaagcgctacatcaagtcgatcggcaagggcctgctcaaggtgatgtccaagatgggcatctcgacctaccagtcctattgcggcgcgcagatcttcgacgcggtcggcctcaaggccgacttcgtcgcgaagttcttcgccggcacgcatacccgcgtcgaaggcgtcggccttgccgagatcgccgaggaagccgtccgccgtcatgccgacgcgttcggcgaggctcaggtctacaagaacgcgctcgatgtcggcggcgaatatgcctatcgcagccgaggcgaggaccatgcctggaccgccgagtcggtgtcgctgctccagcacgccgcgcgcggcaattctcaggagcgctatcgcgccttcgccaagatcctcaacgagcagtcggagcggctgctgacgctgcggggcctgttccggatcaagagcgccgaggaagagaagcgcaagcccatcccgctcgaccaggtcgagccggccaaggagatcgtcaagcgtttcgccaccggtgccatgtccttcggctcgatctcgcgcgaggcgcacaccacgctcgcgatcgccatgaaccggatcggcggcaagtcgaacaccggcgaaggcggcgaggaagccgaacgcttcaagccgatgccgaacggcgattccatgcgctcggcgatcaagcaggtcgcttccggccgcttcggcgtcaccacggagtatctcgtcaactccgacatgatgcagatcaagatggcgcagggtgccaagcccggcgaaggcggccagctgcccggccacaaggtcgacgcgaccatcgcaagggtccggcactcgacgccgggcgtcggcctgatctcgccgccgccgcaccacgacatctactcgatcgaggatctggcgcagctgatctacgacctcaagaacgtcaacccggcgggcgacgtctcggtcaagctcgtctccgagatcggcgtcggcacggtggccgcgggtgtcgccaaggcccgcgccgaccatgtcaccatcgcaggcttcgaaggcggcaccggcgcatcgccgctgacctcgatcaagcatgccggctcgccttgggagatcggccttgccgaaacccaccagaccctggtgcgcgagcggctgcgcagccgcatcgtggtccaggtcgacggcggcttccgcaccggccgtgacgtcgtgatcggcgcgctgctcggggccgacgagttcggcttcgccacggcgccgttgatcgcggccggctgcatcatgatgcgcaagtgccatctcaacacctgcccggtgggcgtcgcgacgcaggaccccgtcctgcgcaagcgcttcaccggccagcccgagcacgtgatcaactacttcttcttcgtcgcggaggaagtccgcgagatcatggcaagcctcggtttccgcaccttcaacgagatggtcggccaggtgcagctgctcgaccagactaagttggtcgcgcactggaaggccaagggcctcgacttctccaagctgttcgtcaagcaaaaggaagagaagggccagaagatctatcactccgagcgccagaaccatcatctggaggcggtgctcgaccgcacgctgatcgagaaggcgcagcccgcgctcgaccgcggcgcgccggtgaagatcgaggccacgatcaacagcaccaaccgctccgccggcgcgatgctgtcgggtgcggtggcgaagatctacggccatgccgggctgccgcacgacacgatccatgtcagcctcaagggcaccgccggccaagccttcggcgcctggctcgcccacggcgtcaccttcgagctcgagggtgagggcaacgattatgtcggcaagggcctctcgggcggcaagatcatcgtcaagccgccgaagaactctgccatcgtgccggaggagagcatcatcgtcggcaacaccgtgatgtacggcgcgatcgaaggcgaatgctatttccgcggcatcgccggcgagcgctttgccgtgcgcaactcgggcgccgtcgccgttgtcgagggtgccggcgatcattgctgcgaatacatgaccggcggcatcgtggtcgtgctcggcaagaccggacgcaacttcgcggccggcatgtccggcggcgtcgcctatgtgctggacgaggccggcgacttcgacaagctgtgcaacctcagcatggtcgagctcgagccggtgctgtcggaagagatgatcaacgccgaaacgtatcacgcctccggtgacctcgaggcgcacggccgggtggacgtgttcaagaacctgctcgcctccgacgtcgagcggctgcacgtcctgatctcgcgccatgccaaggcaaccggctccaagcgcgccgccgacatcctcgccaattggaaggaatggctgcccaaattccgcaaggtgatgccggtcgaataccggcgcgctctgcgcgaactggccgccaatgcggacgccgagccgaaaatcgcgatcggggcttaa

SEQ ID NO: 7286 - DNA, 132 bp, BradyrhizobiumColbertium
ttgcgacccgttcattgttcctgtcctctccgtgcggcaagctgcctcaccgccatcttcggcgcaccttgggcgtaccgcggcacccgcctctgggtcaccgctcgtccgctgcgagccgcattttcttaa

SEQ ID NO: 7287 - DNA, 234 bp, BradyrhizobiumColbertium
ttgcttcaaaaccggggctgcgcaacttttggaaagcgattgattgacttatcgggaatcgggactttcccacgcttgtgtgctagacaaaaatttggcaaggtgatggttaggacaggaagactgtctcaattttgcttgccaccccggcacagggattgcagcgaaaaccgatgctctcgagcgtcggcaaggtaccaggcaaagccgttctcggggacgaagaacgcctag

SEQ ID NO: 7288 - DNA, 177 bp, BradyrhizobiumColbertium
atggtcgagacgctcctgtcaggcccccggatggccgccatctttcgcttctcgcggcgtggcgcgctctccgaagggctgatccgaagcttcatttgcgatttcggcgcgcgcggggccggaacacggcgcgtttgcttcaaaaccggggctgcgcaacttttggaaagcgattga

SEQ ID NO: 7289 - DNA, 747 bp, BradyrhizobiumColbertium
atgaagtttttcacaggatgtgtggccgtcgccacgctgatgctggcggcaagtgcagctcaagcgcaggttcccgcgcgcggtatcgcgggaggggccgtcatcgcggtgtcggatttcgacgggccttatgcgtcgccagaggtggcgccgcctccgtccccgcgttacggctacggctacgaggagcgcggttcggtcccgcagttgctgccgtccaccgaggtctacgcggtgttgcgcgacaacggcttcctgccgcttggcatcccgcgcctgcgcggcagcgtctacaccatcgcggtgatcgaccgccgcggtgaggacggccggctggtgatcgacgcccgcgacggacgggtcctgcgcttcatgccggccgctgatgcctacggcatggcccccgcctatgacgagcgcgcggtcgcgccttacggcccgcaaagcgcgctgccgccgccgaccgtgatccgcagcggtccgccgcgcccgccaggctcgatcccgcatgtggcgagccgcgccgtgccgctgcccaaggcagccccgcgccgcggcgagacgccggtggctgccgcgaagcccgagccggcggaggcccaagcccgtcaggcgttgccttcgcagcaagcggccaaggcggccgagcccgtgccgcaagcttccgcaccgaccgtcgggcaggcgaagccgtcggccacgatcttgccgacgcaggagatgcctgcggcgcaggggctggattag

SEQ ID NO: 7290 - DNA, 684 bp, BradyrhizobiumColbertium
gtgctggtgcatggtgcctgggccgacggctcgagctggtcggaggtgatcccgatcctgcaagcggcaggcctgcatgttaccgcggtccagaatccgctgtcctcgcttgcggactccgtggacgcgaccaagcgcgcgctggccgagcaggatggtccgaccgtgctggctgcgcattcctggggcggcaccgtgatcagccaggtcggcaccgacccgaaggtcaccggcctcgtctacgtcgccgcccgcgcacccgatgccaacgaggatttcgtggcgctctcgaagcagtttccgaccgggcccgcgcgcgccggcgtcgtcgagcgcgatggctacaccaagctctcggaagacgctttcctgaagtacttcgccaacggcgtgaagccgaaccaggccaaggagctctatgccgtacaatggccgaccgcggcttcgatccacggaggcggcgtggcgctccaagccgagctggtacgcggtgtcgaagaacgactacactatcaaccccgacttcgagcgcttcctcgccaagcgcatgaacgccaccacgatcgagctcgacgccggtcacctgtccctggtgtcgcatccgaaggatattgcgaacttgatcctggaagcggcggggtacccgcggagctgagccgcgactgcttgatgaaaggcgcctga

SEQ ID NO: 7291 - DNA, 462 bp, BradyrhizobiumColbertium
atgcgtacttacgatctcacccccttctatcgctccaccgtcggctttgaccgcctcttcaacctgctcgaccaggccagctcggacggcagccccggttatccgccctacaacatcgagcgcaccggcgagaacgcctaccgcatcaccgtcgcggtatccggtttcgccaaggacgagctctccatcgtcgcgaaggaaaacacgctgacgatcaagggcgagaaagtcgctaacgaaaacaccaagtccgaagtgctctaccgcggtattgccgcgcgtgccttcgagcgtgccttccagcttgccgacttcgtgcaggtgaaggacgcctcgctcgagaacgggctgcttcacgtcgatctcgtgcgcgagattccggaagccaagaagcctcgccagattgcgatcaacgccggcgcgaaggcccaggtgatcgagaactcggcgcaagccgcctaa

SEQ ID NO: 7292 - DNA, 948 bp, BradyrhizobiumColbertium
atgacgctggtctcaattcccgccaatcccgtccctgaaaacgtcgtcagcggcaccatcaagacccccgacggcgtcgagctgcgctttgcgcggtgggcgccgccggcgggccgcaagggcacggtctgcgtcttcacagggcgcagcgagcagatcgagaaatatttcgagactgtgcgcgacctgcgcgaccgcggcttcgcggtggcgatgatcgattggcgcgggcagggccattcctcccgccgcctgcgcgatccgcgcaagggctatgtgcgcgacttcgccgatttcgagatcgacgtcgagaccttcgtgcagcaggtggtgctgccggattgcccgccgccgttcttcgcgctcgcccactccatgggaggcacggtgctgttgcgagtggcgcatgccggcaagcggtggttcgaccgcatggtgctgtcggcaccgatgatcgacctgcccggacgcaccacctcgtttccggtgcgcgccctgctcaagacgatgcgcctgcttggacagggcggccgttacgttcccggcggcagcgatcgcctcaccggcctcgatcctttcatcaacaatcccctgaccagcgaccccgtgcgctatgcgcgcaatgccgcgatcctggaggaggatccgacgctcggactggcgtctccgacggttgcctgggccgataccgccttcagcgcgatgcataccttcaagcgcgcgaactacccctcgcagatccgccagccgatcctgatgctcgcggcgtccaacgacaccgtggtctcgaccgcggcgatcgaggagttcgcgtatcatttgcgagccggctcccatctcgtgatcgccggggccaagcacgagatcctgcaggagcaggaccgctaccgctcccagttctgggccgccttcgatgccttcgtgccgggcacgccgctgttcaagtga

SEQ ID NO: 7293 - DNA, 2775 bp, BradyrhizobiumColbertium
atgcatcaccccgcttcgaagccgcccctcgatccctcgatcccggtctcgccgaacaatccctgcccgttcctgcgcggcctcgtcggagaaggcttcgtcgacggcgggacggtcccgctcaacacgctgtcgcagaccatcgccaacgcgaccggcgagaccgggctgaagaaggtctcggcgcgcattcaggtccgctgcgtcgccctcatcgccaacggcttcaagcacatcctgaagagcatctggtcgggtgcgcagctcgacgcgctgcgcggcgggccgctggacaagcacggtgccggctcgcgcatccttggcgtggacggcaaggtcaacgaggacgagatcgcgcggctcgcgagcttcggccggacttacattgatccaaacaccggcagcagcgagcccggcctcaacgccgcggaaatcaagaccttcatgcgcgacaacctcaagcgcgcgggcaacgccgcgcgctggtactacccgttgctgatgaagttcgaatggccgatccttttgaagatcatgggcaagggcaagcaggacgaggagcgctatctcagcgtggccgacgtgcgcacgctgttcgaggagcgcaaattccccgagcgcatcaatcagcggattttgtcgcagccgctgctgtcgtcctgccagcttcgctttcgctgggcggccgcgctgacggcgctcgtcaccggtcttggcttcgcagtcctagtggccgtcgccgaattccccaaccaggttcgcgccatgctgccgcagaagggagtgctcgtgaacctgctgccgccgcccctgccgaccgtgcccgagacgaaggccgcttactggctcgagcagaactggtcgctgaaggaccggcactggttccaccatgctagccagggcactgcgaccttcccggtgccctatgagtggttcgtggcgctggagcagccgcggcttcatctgttctcgaagcccggcatgatcaaggacagcgcctatctcgagcgtttcggcttcatcccgagcccgcagacgatccaggccgacacggcgacgctgcgccgcttcggctacgccaatgtctacgagacggcgcaggtgtcggactggtcgacgcgatggacgccggcggagaacgtcgacggcctgccggtcggcttcgcgcgcatgaacggcgtggtcgatcccgcgaccgggcgccgcgaagacgacatgatcgggctgacctgcgcggcctgccataccggccagatccattatcagggcgtcgacatccgcttcgatggcggtgcggccatgaccgacctgaagaagctcgagctcgcgactggcctgtcgatcgcctacacgctgtacgtcccattccgcttccagcgctttgccgatcgcgtgctcggccctgaggccagcgacacggaccgcgccgcgctcaagcagaagctcagcacgatcggcagcttcctgatcgactgggccaagaattacgacaagacgatcgagggcaagaagacctgggacggcaagcagcagcaggacaccgaggaaggattcggccgcctcgacgccctcaaccgcatcggcaaccaggtcttctcgcaggacctcgcaatgagcggcgtcaaggggttcgagaagaatctgcacgcccaggacgccccggtgagctaccccgcgatctggaccgtaccgtggttcaagttcgcccagtacgacgcctcgatcgagcagccgctgatccgcaatgccggcgaagcgctcggcgtcacggcgctgctcaacctgtccgacgcctttcccgaggacaggctttggcgttcgtcggtaaatgtcagaaccctcggctggatcgaggacatgctgcgaggccccgatccgttcaaaacggccgatcctgttgccggtccgaagttcggcggcctgctcgcgccgaaatggccctcgcacattctcggagacgcctggaagctgaagccggaccgcgtcgagcgcggccgcgcgatctacgcggagatgtgctctggatgtcatttgccggccgtcgacacgccggccttctggtcgtcgaagcgctgggagccgagcggcgacagcaaggtcctgaacgcggtgacgatccctctcgatgagatcaagactgatcccgagcagtcgctcgtcctcagcaagaggatcgtcgacgtgcccggcttcctgaaggtgaatacggccgacctgcagacatggtggcaatgcgaggtcccgaccgcgagcaaatcgcccaacgagatggtctatgcgctcggcctgatgacggtggtcgacctcgccgtccgcaagtggatggatgatgaaaacattccggaggccgagcgagggaggatgtggaatctggcgcgcaagaactgcctcaatccagcgccagacccgcgctaccgcgcgcggccgctgaacggcatctgggcaacggccccttacctccacaacggctcggtcccttcgctgtactggctgctgaagccgcagaacgagcgtccgcaaaaattctgcatgggccgtcgcgactatgaccctgaaaccgtgggtttcgcagtcaccgccaacgagagctgcaggacgggagaaacggagttttcagcgatcggttctgacggccagccgatccggggcaacagcgtgctcggccattccttcgagctgaagcaaggcgagccgaaacgtgccggcgtcatcggccgcattttcaaggacgatgccgagcgctacgacctgatcgagtatctgaagacgctttaa

SEQ ID NO: 7294 - DNA, 1797 bp, BradyrhizobiumColbertium
atggaaagacgtctggccgccatcgtctgcgccgatgtcgccggctattcgcgcatgatgggcagcgacgaggccggcacgcatgccgccttcaaggcccatcgtgcagcaatccaccccatcatcctcaatcacggcggtcgcgtcgtgaagaacaccggcgacggcttcctgctcgagttcgcctcaatcgtcggcgccaccgaggcggcgctctcgatgcagacgctgatggccgagcgcaaccgccatctgcctgccgaccgcgccatgcagttccggctcggcatccatatgggcgacgtcatcgccgacgaggacgaggtcttcggcgacgacgtcaacatcgccgtccgcctggaatcggtagcgagccccggcgggttcgcgatctcggccaaagcctatggtgaggcgagcaagcatctggcgatgccgctgaccgatgccggcaaccatcgcttcaagaacatcaaggatgcgatcggggtctttacctggacgcccgagggcgcgccggcgctcgctcccgagctgagagaggcgtccgctctctcgcagcagtaccgcaccgcgatcgtcggcgtgctgcccttcgccaatctcagcgatgcacaggacgagtatttctccgacggcttgaccgaggacctgatccacgcgctgtcgctgcaatccttctatcgcgtgctgagccgcaactcgaccttcatcttcaagggcaagaacaccagcacgcgactgatcgcgcgcgagatcgacgccacttatctgatccagggctcggttcggcgcgccggggccaagatccgcgtcaccgccgagctgatcgcgccggagacgggtgagcagctctggaccggtcgctacgaccgcgacatcggcgatctcttcgcgatgcaggacgagatcaccaccaacctgtccgccgccatcgccaccgaaatcgtgcgggccgaagcttcggcgccggcgcggctctcgaccgacgtctccgcctgggaccgtttcctcaaggggctgtcgcattactaccggcagaccaaggaggatctggccgccgccgtcgacctgttccgcgaggccatccggctcgatcccaaactgtcgatcgcgcatgcctatctgggcacgatccagatccagagcattcagttcggctgggtcaagggcacgcgggagatgtgggccgaggcgatgaacctcgccgaaaccagcgtgcgcctcgatccgcgctcgtcgttcgcgttctcgatcctgtcctgggcccattcgctggagggacatcacgaggccgcgatggatgccgcaaagcgcgcggtcgcgctcaatccctacgacaatggcgcacgcggcgtgctcggcatctgccatttcatgatcggcgagcaccgagaggcgatcgagctgttctcgatggcctcgcagcgcgacaacagcgacccgcgctatcaatgggcggcgctgaatgcgttcagccactacttgttgcgccaatatgacgcgaccctgtcatgggcccgcgagcagctctacatcaatccgaaccacatgcaggcgctggcgatccgcgccgcggcgctggcgcaacttgggcgaagcgacgaggcgagcgaagccgccggcgtgttgatggcaaactatccgtcgctgaacgtcgaccggcacctgcgaaatttccattggaagcggcccgaagacatcgcccattatcgcgaggggctgctgaaggccggcgtgccgctcagtaagctgaccctgttgcagagcgacctcaaacgcgccgccgagtcctga

SEQ ID NO: 7295 - DNA, 633 bp, BradyrhizobiumColbertium
atgctgggcattcacgaaatcgggcttttcgtcctctcgggcgtgctgctcaacatcacgccggggccggattcggtttatgtgatcggccgcagcatgcagatgggctggcggggcggcgccgctgctgccttgggcatcagttgcggctgctttgtccatgtcgcgggcgcggcgatcgggctttccgcgctgctgatggcctcgtcgaccgccttctcgatcctgaagctggtcggcgcggcctatctcgtcgtcaccggcctccagatgctgtggtcgcgaccggccctcgtttcggccgtggacgagccggtgcggagctcgttgcgccgggtcttcctccagggcgtcttcaccaacgcgctcaatcccaaggtcgcgctgttcttcctggccttcctgccacaattcgtcgcagccgatgcgccgcacaagccgctcgccttcctgacgctcggcctgattttcatcttcacgggcacgctctggtgtctggtgctcgccgcctctgcggccagggccgcccaccggctgcggcagtccgagggcgcgatcgcctgggtcaatcgcgctctcggtgggctgttcatctatctcggaatccgcgtcgccatgctggaggcgcggtga

SEQ ID NO: 7296 - DNA, 753 bp, BradyrhizobiumColbertium
atgatcgacccgctcctcatcctgatcgccgccgtcttcctgctggcgggattcgtcaagggcgtcatcggcctcggcctgccgacggtgtccatgggcctgctcgcggtgagcatggcccccagccgcgccattgcgatcgtgatcgtgcctgccatcgtcaccaacatctggcagaccttcgtcggtccttacctgcgggacatcctgaggcggctatggccgctgatgatcggcactgtggtcggctgctggctcaatgccggcgcactgaccggcccgcatgcgcgctacggcacgatcgtgctcggcattctgctcgtcatctacgcggtgatcggcctgaacaaattccatttccacgtttcaccgcggaacgagaaatgggtcggcggggtggtcggcgttatcaccggcgtgatctcggcctcgacaggcgtgcaggtgatcccctcaatgcccttcatgcaggcgatcggcatggaaaaggacgagctggtgcaggcgatcggcgtgttcttcacgacggcaacgctggcgctcgccttcaaccttacggccgttggcttgctgacgcccgccaatgccctgccgggtgccgttggcctcgccatggcctttgccggcatgttcctcggccaatcggtgcgggcgcggatgccggcagaagcgttccgccgctggttcctgatcgcgatgattctgctcggcctctatcttgcgggcagcgcgctggcgcaggagttcgcctga

SEQ ID NO: 7297 - DNA, 891 bp, BradyrhizobiumColbertium
atgcgcttcgacctcgtcgatctccagctcttcatcgcggtcgccgaccagcgcagcatcacccgcggcgcggagcgctcgcacctggcgctggcctcggccagcgcgcgcatcaagggtctcgaggatgcgctcggcgtcgcgctgctcaagcgcgggcgccgcggcgtggagttgaccgccgccggcgagagcctgctcgatcatgccaggctcgtcatccaccagatcgacgccatgcgcggcgatctcgccggatttgcctctggtatgcgtgccagcgtgcatttcctcgccaacacgtcggggctgtcggagcatctgccgaaggcgctcgccggcttcctgcgcgcgcatcgcgacatcgccgtcgacatcgaggagcgcgagagcaccgacattgcggcggcggtcaccgccggtgcggccgatctcggcttcgccgccgagcacgcgctgcccgatcatatcgagcgcttcgtcttcagcgaggaccgcctgacgctggtgacgtcgaagcgcggccccttcgccgaccgccgccggatcgactttcaggaggcgggagcctgcgactttgtcggcctgacaagcgccaccgcgctccagatgcacatctcgaggcacgcggcgcggctcggtatgcgactgcatgtccgcgcccgcctgcgcgacttcgacgcgatctgccagatggttgccgccgatgtcggcgttgctctggtgccggaagctgccgcccgtcgctgcgccaggaccatgccgctcgccatggtccgcctgcgcgatgcgttcgccaaccgtcgactcgtgatctgtgcgcggagcttcaaggcgctgccaaagccggccaagatgctggtggagcatttgcgggcagaggcggtgtga

SEQ ID NO: 7298 - DNA, 783 bp, BradyrhizobiumColbertium
gtgacggtgatcgatttctccgccttcatcggacggctcgccaccgcctccggcgaaaccatcctgccgttcttccgcacgtcgctctcgatcgatgacaagagcaagaccagggatttcgacccggtgacggaggccgaccgcgccgcggaggcggtgatgcgcaggctgatcaaggcaagcttcccccagcacggcatcgtgggcgaggaattcggcaacgagcgcgaggacgcagactatgtctgggtgctcgaccccatcgacggcaccaaatccttcatcggcggctttccgatctggggcacgctgatcgcgcttttgcacaagggcgcgccggtgtacggcatgatgcatcagcccttcatcggcgagcgcttttccggcgacaacggttcggccaactacaaaggtccgtccggcgagcgccggctccaggttcgccgctgcgcttcgctgtctgaagcaacgagctacaccaccagcccgctgctgatgaacgagagcgaccgcgccgtgttcggccgcatcgagcgggctgcgcggctgtcgcgctatggcggcgactgctactcctattgcatgctggcggccggccacgtcgatctcgtggtcgagaccgagctgaaaccctacgacattgcggccctgatcccgatcgtgaccggcgccggcggcgtcgtcaccacatgggaaggcgagccggcccagggcggcggccgcatcatcgcggccggcgatgcgcgggttcacgaagaagcgttgaagcttttgaaccagtag

SEQ ID NO: 7299 - DNA, 129 bp, BradyrhizobiumColbertium
atgaagctcgccttctgcctagctcaattcgtctccgacgtgcagcgctgtcttgatttgctccctggtattttggatgcccggagcgactgctcgttcggtcatcccggggccaaaaatcgatcatag

SEQ ID NO: 7300 - DNA, 891 bp, BradyrhizobiumColbertium
atgacccggtttgacggcgagacgtcgccagccttcgagatcgtggagcccgcgcaatggcgcgcgcccgtcatcttcaactcgccccattccggctcaacctatccggacgaattcctggcggcctcgcgaatcgacctgccgacgctgcggcgttcggaagattcgtttatggacgagctgatcggccatttgagcgagcgaggctttccgacggtgcgggtcaacttcccccgctcctatgtcgacgtcaatcgcgagccgtatgagctcgacccacgcatgttcaccggccgcctgccgagcttcgccaacacccgctcgatgcgggtcgccggcggcctcggcacgattccgcgcgtggtcggcgatggccaggagatctaccgcgaccgcatcctggtcgacgaagcgctggggcggatcgagacgctctacaagccctaccatcgcgcgctgcgccggttgatcaacaaggttcatcagatgttcggcaccgtggtgctggtcgattgccactcgatgccctcggtcggtgtcagcagagacgagccgcgccgtcccgacgtcgtgatcggcgaccgctatggcacgagctgtacgccgctgctgcccgattgcgtcgaggagaccatgaccgggctcggctattcgatcggccgcaacaagccctatgccggcggcttcatcaccgaacattacggcaaccccgcaagcggtctgcacgcggtgcagctcgagcttaatcgcgcgatctacatggatgagcggcgacgcgagcgaagcgcgcgcttcgcgcaagtggcgtccgatttcggtgtcctcgccgacgtgctggcgaccacgatccccttcgccgatctcggcccgttccaagccgcggcggaatag

SEQ ID NO: 7301 - DNA, 360 bp, BradyrhizobiumColbertium
atgccaaagatcctgctcgccgaagacgacaacgacatgcgccgtttcctggtcaaggcgctggaaaacgccggttttcaggtttcgtcccatgataacggcatggccgcctatcagcggctgcgagaagagccgttcgagatgctgctgaccgacatcgtgatgcccgagatggacggcatcgagctcgcccgccgggcttcggaactcgaccctgacatcaagatcatgttcattaccggcttcgccgcggtcgccctgaattcggattcggacgcccccaagaacgccaaggtgctgtccaagccggtgcatctgcgcgagctggtcagcgaagtgaacaagatgctggcggcctga

SEQ ID NO: 7302 - DNA, 72 bp, BradyrhizobiumColbertium
gggcacgtagctcagcgggagagcactaccttgacatggtaggggtcacaggttcgatccctgtcgtgccca

SEQ ID NO: 7303 - DNA, 1473 bp, BradyrhizobiumColbertium
ttgctgccggcgctgctgctcgcctcgcgcgggcgtttcgccgcggcgtcagacgacgcgttcagcccgtccacggtgagggacttggcgcggatgctggcgggcaaaccgtacgaggcgccggacgagaagctcccgagcgcattgaaggatctcgactacgataagtatcgttcgatccgcttcttgcccgagcgcgcgctctggcgcggcaagaatcttccattcgaagcgcagttcttccatcgcggcttcttctacaagaacagagtgaacatcttcgaggtcgtggacggaaaggcaaccgagctcaagtaccgcaagacagacttctcgttcggcgagaagattccggcgttcgaggacatcgatctcggcttcgccggctttcgcatacacgcgcccatgaaccgccccgactattacgacgaggtctgcgccttcctcggcgcgagctattttcgcgccgttgccaaggggcagacgtacgggctttcagcccgcgggctctcgatcgatacgggcgaaagcaagggcgaggaatttccgctcttcaaggcgttctggctcgagcggccggcgcctggtgcgtcctcgctggtgatccatgctctgctcgacagcaagagctgcgcagcgagctaccggttcacggtgcgacctggggacacgacggtcttcgacgtcgaaatgtcggtctacccgcgcgtcgaaatgcagcgggccgggctcgcgcccatgacgagcatgttcttctatggtccgaacgaccgcaacgacatcgatgattttcgtccgtccgtccacgattccgatggccttgcgatcttcaacggaaagggcgaaagcctgtggcggccgctcagcaatccccgcgacctccagatcagcactttccaggatctcaatccgcgcgggttcggcttgatgcagcgggagagagacttctccgtctatcaggacatcgagtccagcttcgaaaaacgcccaagtctctggatggagccgatcggcgattggggcgagggcggggtcatgctgttcgagatcccgaccaaggaggaagttcacgacaacatcgctgcattctggcggcctaagggcccgctgcaggccaagggcgaacacaactacacctaccggctgcattgggggccggatagtccgaagccgcattcgctcgccaggttcacgcgaagcgggataggtgccaggggtgaggacgcgcgcctcttcgtccttgatctgctgggcgacaacctgaaaggcgtcgatccggctggcgtcaaaggcgtggtgacggccgaaaagaccgaggtgaagaacatcgtcacgcagcccaatccgtacaccggtggttggcggctgagcttccaatgccaggtgaagaccgagccgatcgagctgcgggcctttctgaccgcaggtgacaagcccttatccgaagtctgggtctaccgatgggccccgtga

SEQ ID NO: 7304 - DNA, 2118 bp, BradyrhizobiumColbertium
atgggccccgtgagccgcgcgcagcggccgatcgccgaagacatcgcggcccagcgcctgctgccggcggaagctccccttccgatggctcccggcgacctgggaaagaaccgggtacgcgaccggattcccgcgcctgtcacccccgcaatggcctggcggcgcggcctcatcctcctctcgacggcggcgctcacggggggcggcgggtatgagatgtatcgcgtgctgcaggtcggtggcgtaaccgtccttgaagcgatggtgctggcgctgttcctggtgctgctcgcctgggtcgccttctcgttcgcctccgcgatggccggcttctttgtgctgcttgtccatcgtccgggcgccttcgcaccagacggggagctccctgcgatcgcaagccgcaccgccatgctgcttcctacctacaacgaagacccacaccgattgacggcgcggcttcgggcgatcatcgaatccttggagacgacctcgcgcggaaagctgttcgactggtacgttctgagcgacagcaccgatccggacatctgggtcgccgaagaaaaggcggtgcttgcgttgcgacaggccgttggaacgcggctgtactatcgccaccgagcagacaatacggcacggaaagccgggaacatctccgagtggatcacgcgattcggcggcgtctacgacttcatgatcgtgctcgacgccgacagtctgatgagcgggcagacgatcgtgagattggtccatgccatggagagcaatccgagcgccggcctcgttcagacgctccccatggtcgtcaacgcgcgaagtctgttcagccgggtccagcaattcgctggccgcctgtacggcccgatgatcgccgcgggcgtagcctggtggcacggctcggaaggcaattactggggccacaatgccatcatccgggtgaaggcgtttgccgaagcggcagcgctgccgcaactccgcggacgtaagccgttcggcgggcacatcctcagccacgatttcgtcgaggccgcgctgatgcggcgggcagggtggggcatctacatgctgccgacgctcgggggcagttacgaagaggtgccgccctcgctgcttgatttcgccgcgcgcgaccgacgctggtgccagggcaatcttcagcatctcgcagtggtgcccgcgcgggggctccactgggtgtcacgtctgcatttcgtggtgggcataggggcatatctgacggctccgctgtggctcctgttcctgctgctggggatgctgatctcgctgcaggcccgcttcgtgcgtccggagtattttcccaagggcttctctttgtttccgagctggccggcccaggatcccgtgctcgccatctgggtgttcgctgcaacgatggggctgctgttgttgccgaagctgctgagcctgatccttgtttggatgcggggctcggtacgacgccaattcggcggcgcattgcgagcctcggccggccttttcgcagagatcgtcgtatcggcgttgatggcgccggtgatgatgatcttccagtcgatcgcggtcgtcgaaattcttgctggccgcgatgcgggctggcagacgcaaaggcgcgacgacgggaccgtggagcgccgcgagctctatcgcaaatacggcgttccaacattgtgcggcgttgtcatgggggcaagcgcgtacgccgtttcgctcccccttctgctctggatgtcgcctgtcatcgttggcctgctgttcgcagttccgattggcgcactgagcgccaggcccgcgtccggcaaattgttcgtcacgcccgaagagcgggagccgcctgcggtgttgcgacgagcgaacgaattgagcgcgtcggccgatctagcgatcaaacccgcgctcgtggaactgcgcggagatgccgcactcctggccttccacgttgcgcaactgccgcctcctcgcgccgcccggcccgagaccgtcgacacaaacctggcggtcgggcgcgccaaggtcgatgccagcgagactttcgatcaggctgcggcgcatctgtcctcccgggaggttttttcgatcttgaacgatggttcggcgctctcggccgtattggacaagcgatga

SEQ ID NO: 7305 - DNA, 195 bp, BradyrhizobiumColbertium
atgggaatggaaaggttccagcttcaactcatcatcatcctcattgcggcaatcgcgatgtggtggagcagccatccgtcgtcccgcaccatcgaaggctgcgttcagagaggttgcctggctgactatcggaatggattcgatccaacactgatttccgagatgagcccttacatgcgcagcgagaaatggtga

SEQ ID NO: 7306 - DNA, 1974 bp, BradyrhizobiumColbertium
ttgcctcccgccgcgacgtcgcaggaccattctcccgatacgcgcttcgttcaccaggagacggaggcacggtcggttactgcgttcggcaacttgaaagagacgatccgtcttgcccgtcgcgggaagacgggattggcgatcgaacgcagcggggcaattcgtgaccgcgcgagccgtagactggcggagtgggtgatcctgcgttccgatgatgatgggatcgactttcaacgctacgcctcgttcgtccgcgccaatccatcgtggcccagcctcgatcgttttcggcgacgcgcagaagccaggctctggttcgagccgcacgagcccggaaccgtgctcatgttcttctccgagcggaaacccttgggggccttgggcaagctcgcgcttgcgcgagcgttgtcggagcgcggcgatcaagccgcagcccgaaaatacgtccgttccgcctggcacaacggccgcctctccgcgcagtccgaggcgcaagtgctggcgcgcttcggacacctgctctcggctgccgatcaccgggctcgcatggaatcacgtctgtatgcggacgacatcacgggatccctgcgtgcggcgaagcgcctcagcgcaaccgaccgagcgatcgtgaaagcgcgggcagccgtcatccaaaatgccagcaccagcggtgccttgctcgacgcggtagcatcggctgcaggcgctgagcctgcttacctcttcactcgtatccagtggcttcgccgcaaggaccgcattgcggaggccgcgcaactgctgctttccgccaagcttcgcgcatccgtttccgaccatgccgatgcatggtgggtcgagcgccgcatcctggtgcgtcgactgctcgatgacggcaaggcgcagatagcctaccgaatcgcccgcgatgcggcctccccctccagggagagtcttcgcgtcgaccagacattcactgcgggatggatcgcgctgcgatttctgaataacccccatctggccacacagcatttcgcgcgtatcgcgaggatgacgacccatccaacctcgctcgcacgcgcagcgtactggctcggacgtgctgcagaggcgggcggtgatcgggagaaggcgcgcggccactatgccgccgcatcgagacgcaccgcagcatattacgggcagctggcaagcgcccgattgggccggcgcgacgtttcattgccgcgaccgccaagcctcggtcctagagagcgcgcaaacctgtccaaacgcgatcttgttcgcgcagtcgaactgctctacgcgactggcaacagcgatctggtgatcccgttcgtcgccgaccttggccgtacggccgacattggactgctgacggtcatcgccgaagccgtcgccaagaggcgggatgcgcgcgctacccttgcggtcggcaagggcgcccttgcgcgtgggtttccgctggatctgtacgcgtttcccaatttcggcctgcccaactatgcctcggtcggcccgaaggcggctgcaagtctcgtctacgctgtggcgcgggcggaaagcgccttcgacaagggcgcgcaatcgccggcaaaagcctcgggattgatgcaggtgacacccgcaacaggccaaacgatcgcccgccggctgggtatcgcatttgagcccgggcggctgcgaagcgatccagcctacaatgtacaactcggatccgccgaactcgcagatcttctcaagacctatgatgggaaccacgtcctcgttctggtcggctacaacgccgggcgtgggcgggtcaagcaatggatcgcacgctacggcgatccccgagatccgaccgttgacgtcatcgattgggtcgagcgtatccctttcaccgagacgcgcatctacgtgcagcgtgtgatggagaaccttcaggcctatcggtcacgcttcgacgaacgtgcgcctctgggaatcgaggcggatatgcggggagctcactag

SEQ ID NO: 7307 - DNA, 1074 bp, BradyrhizobiumColbertium
atgctgagcccttcgaccatcgcgtttgcatgcgggcttgccgccggcgccgtgctcggcattgccggccgcgccggacgcttctgcacgctggcgatgctcgaggacgcgttcttcggatcggattatcgcaggctgaaatccttcgcgctggccgcggcggtcgccctgctcgcgacccaggcgcttgccgagttcggcatcgtcgatctgtcgcggtcgatctacctcacggcgtcgatcggccttggcggggccatccttggcgggctgatgttcggcgtcggcatggccctggtcggcacttgcgggttcggcacgctggtgcgcgtcggcggaggcgatctgcgtgccatcgtggtgtttctcgtgctcggcctttcggcgctcgcgaccatgcgcggtattaccggtgtgctgcggctgatgctgatcgaaccgttgtcggtgcggctgcccgaggggagcacccagaccttgacgtcgctgctcggcgccgacggcatgatgcgcgcggtcctcgtcgtggccattgccaccgcgctcgccttctgggcccttgcggacggcaggctgatccggtcgccgcggctgctggccgctggtcttgccgtgggcgcggcgatcgcgttcggctggtttgcgactggatggattgccgacgacgagttcgacgcggtgcgggtctcctcgctcaccttcgtggctccgctcggcgatgccattctctatattgccaccttttccggtgcgcggctgaatttcggcatcggctccgtcgtcggcgtcgtcgcaggctcgtttgccgcggcgatgctcgcgcgcggctttcgttgggaggcctgcgacgacgcccgcgagctgaagcggcacatgaccggcgcgctcctgatgggcatcggaggggtcatgtcgatgggatgcacgatcggccagggattgaccgcattctcgacgctctctctttcagcgcctatcaccatgttggcaattgcctgcggagctcgactcgggctcgagttcacgatgaccggcgaatggttgccagcagtgcgcaagctattcggcacgtag

SEQ ID NO: 7308 - DNA, 351 bp, BradyrhizobiumColbertium
atgccgttgccgaagctgaaggagatcgagggctcagccgaactcgagcagatgatcgagaaggcgcgcgaggcgagcgacatgctcaaggcgctgtcccacgagtcccgattgctgctgctctgcatcctcgccgagggtgagaaatccgtgaccgagctcgagcaattcctgggcgagcggcaatcgacggtctcgcagcagctggcgcggttacggctcgatcggctggggacgacccgccgtgacggcaagacgatctactacagcctcgccaacgaggacgtccgcaagattctcaccgccgtttacgacgtgttctgcgagccggtgcgccggcgccgccggtag

SEQ ID NO: 7309 - DNA, 372 bp, BradyrhizobiumColbertium
atgaacagaatcatcgccctgctcgccctcgccatcgggctggcgctgccggcgaccgcatcgcgcgccgcagagcttgtcatgttcgagcggcctggctgcgcctggtgcgcgcgcttcaacgcggagatcgcgccaatctacggcaagaccggggagggccgggccgcaccgctgcgccgggtcgacctgaacggctccctccccgccgatctggccggaatcgatccgggtcccttcacgccgacctttgtcgtggtacaagagggccgtgagatcgggcgtattcgtggctatcccggggatgccttcttcttcggcctcttggaccgaatcctgtcaagcacgggatcagaacccgggaggtcgtga

SEQ ID NO: 7310 - DNA, 732 bp, BradyrhizobiumColbertium
atgaccttggacgtgacgctgggtgcggcctttgtcgcgggcctcttgtcgtttctgtcgccctgcatcctgcctctggtcccgccgttcctgtgctacatggccggcgtctcggttacggatctgtccggcgacaggccggatttgcggccgcgcatcctgctctcggcgctgtccttcgtggcaggtttctcgctggtcttcatcgcgctcggctcgaccgcctcgatcgcgggacgcttcgtctccgcgcatctgtcgacgctcggtatcgctgcgggcgggctgatcatcgtcatggggctgcattttctcgggctgctcaggattccgctgctctatcgcagcgccaccgtgcaggtcgacaatcgtccggccggtatggcgggggcattcgtcatggggctggcattcgcgttcggctggacgccctgcgcgggcccgatcctcgccgccgtcctgctgatggcgggttcggaggacacgaccgggcgaggggcgctgctgctgctcgcctattcggtcgggaccggaattccctttctgatcgcagcggcgttcaccggccgcttcatcggagcgcttggccgcgtgcgtcggcatctcggtctggtcgagaagacgatgggcgtcttcctggttgtgaccggtctcatgttcctgaccggattgatgcccgcggtctcgcaatggctgctcgagcagttccctgcattgaccagcatcggctga

SEQ ID NO: 7311 - DNA, 720 bp, BradyrhizobiumColbertium
ttgcgctgcaccatcgcgctgctggcatggctggcctccaacgcgctcgcgcttggcgcggatggcgacaagccggcgtatctcgtatccgcggtggcgccgatcatggccaacctgcgcattgccgcgagctatgtgcgcaccggcaacgttgcgctggcacaaatcgagatcgacgaagcggccagccgctggaaacggatcgagccgaacacccgcgaacgcccgccagttcacgcgtcttctgaatcgtcgggatttctcgaccgaggatacgaacagctcacaacggcaatgggcgcgctggaccgcggagacaatgcggccgccgaacgcgagctgcttgcggttcggcgagctttccacgcgctcaggcgtcacgcgggcctctacgatctcggcgattgcatcttcgagatcgcgcccgccatggacgccttgcgtgtcgctgcgacccgctacagcgaacggccggcacaagcgaacgccgaggagaccgtcgccgccgcaggcgcgttccgcgaccggcttttacggtgcaacgaatgggcaaacggcgagatcgccgcgcaaggtgaattccgccgcctgatcgatggcgcaatcgccagcagcggcgagatcgctcatgccgccatggccggcgacggccccctcgtgcatcgttacctcatcgagctgcaatctttcgcccaattgctcgacttccgcttcggctag

SEQ ID NO: 7312 - DNA, 579 bp, BradyrhizobiumColbertium
atgtcgctccgcatgcccacccgacgcggtctcctcgcattcgcggcaggcacggctttggcgggccgcggcgcggcagcggccgagccagcagtcggagaagacgggctctaccacgagccctggttcctgcagagctttctcgatctgcgcgaggacctggagagcgccaccgccggcggcaagcgcctcgccgtcatgtgggagctgcgcggctgtccctattgccgcgagacgcatctggtgaacttcgccgaccccgggatcgcgagctacattcgagccaacttcgaggtgttgcagctcaatctgatcggctcgcgcaaggttacggactttgaccgcgaggaattggccgagaaggatctcgcccggaagtacggcatcaggttcactccgactgttcagttctttccgccgtccgccgatggcgtggaagcgaaggaagcgatggcgcgcgaagtggcgcgggcgcccggctatctgaagcctccgcacttcctggcgatgtttcgtttcgtgcgggagcgcgcctacgagcgcggctcgttccgggatttcctggcgtcgaatggctga

SEQ ID NO: 7313 - DNA, 441 bp, BradyrhizobiumColbertium
atggctgcgtttgcactttatgtagcggccgggggcgctctcgcccaagaaccggtcaaggagccgatcaagctcgacgtcgttgacgattccctgccgaaatccctgataggcgcgcccggaaatgccgccgccggcaagaaggtatttctcacgcgtacgctcggcaattgcctggcctgtcatcaggtcaccagcctgaaatccgaggaattccacggtgagttcggtccgtcgctcgacggcgtggccggccgctacaccgaggcgcaattgcgcctcatcgtcgccgaccccaagcgcatcttcaccgacacggtcatgccggcgttcttcaagaacgacggtctcagccgggtgcgcccggaattcgtcggcaagacgatccttacggccgcgcaggtcgaggacgtcgtcgcttttctcaagacgctgaactga

SEQ ID NO: 7314 - DNA, 453 bp, BradyrhizobiumColbertium
atgaaagccatcaatcgacggcaggcatttgcgctcgggggcggcttcgtcatgctgacccttgtaccgatggcggccggtgcggaagtgtcgaacgacgcggcaaagtggatcgagaagttcaccggcggcaagcagccggccaagggcaagatttcgctcgacttgccggagatcgcggagaacggcaacaccgtgccgctgtcgatcaacatcgagagcccgatgaccgcggagtcctacgtcaaggacgttctcatcattgcggatggcaatccgaacgccggcgtcgcgacattgtcgttcacaccgctgtcgggcaaggcggaagcctcgatccggatccggctcgccaccacgcagaacgtggttgcggtcgcgaagatgagtgacggttcgctgttcacggaacagaagaccgtgaaggtcacgatcggcggctgcggcggctga

SEQ ID NO: 7315 - DNA, 327 bp, BradyrhizobiumColbertium
atggcagacaaaccacgcatcaagctccccaaggaagcggccaagggcgaggtgatccagatcaagaccttggtctcgcatctcatggaatcgggtcagcgcaaggacgcgcagggcaagcccattccgcgcaagatcatcaacaagtttgcctgcgagttcaacggaaggccggtgttctcttgcgcactggagcctgcgatctcggccaatccctacatccagttcgacgccaggatcgacgaggccgggacgttcaagttcgcctggaccgacgacgacggctcggtgatcaccgccgaagagaagatcgcgctcaaggcatga

SEQ ID NO: 7316 - DNA, 822 bp, BradyrhizobiumColbertium
atggcgtcacgatatgttgggtttgccgctgcaatcgtggccatcacgtcgggtgcgacgctcgtgtctgccgatgacgccgagcggaaaggtatcgcggcgccgccgggccatgtcttcaagaccatcatctccggctacgaatttcgcagcaaggagacccgcgccctgcaggacgacgatctggagaatcccggcttcctcgccgtggagcgcgcggcggatgcctggaagaaggcggaaggcagtgagggcaagtcgtgcatgagctgtcacggggaggcccaagccagcatgaaaggtgtgggcgccgccatgccgaaatgggacgacaagctgaagaagccggtcaatctcgagcagcgcatcaatctttgccgtagcgaacagatgaaggcggagccctggaaattcaaatccagggagttgaccgacatgacgaccttcgtccgttaccagtcgcacggtatgcctgtggcggtgaagattgacgggccgatctcgccctggttcgagcgcggcaagcagatctattacaaccgttatggacaactcgatctcgcctgcgcgtcctgccacgagcgcaacaatggcaagtttatgcgcgcggacttcctgagccaggggcagaccaacggcttcccgacttatcggttgcgtgaccagcgtgtggtgccgctgcatgagcggttcgaaggctgcatgttcgacgtgcgtgccgagccgttcaagccgctgtctgacgacttccttgccctcgagctctacgtggcctggcgcggcatcgggctgccggtcgagacgccctcggtgcgcaattga

SEQ ID NO: 7317 - DNA, 1692 bp, BradyrhizobiumColbertium
gtgatctctcgccgcgagttcatccaggttgctgcggcaacggctgcactttcgactggtgtgggttctggcctgacccgggcggttgcccagcagcgcctgacccagactgagttgctcgccttcgagccgctcggcaacgtcacgctggtgcatgtgaccgacattcacggtcagctcatgccgctctacttccgagaaccttcgaccaatctcggcgcgggagacgcaagaggggtgccgccccacgtcaccggtcgggagtttctcagccgcttcggcatcgcgccgggctcgtcggcggcgtatgccttgacgtccgaggatttcgaggcgctggccaagacctatggccggatcggtggtctcgaccgcgccgccacggtgatcaaggccattcgcgccgagcgcggcgacaaggttgcactgctcgacggaggcgacacctggcaaggatcctggtcgtcgctgaagacgcgcggccaggacatgatcgactgcatggcgctgctcaagcccgatgccatgactgggcattgggagttcacttacggcaccgagcgcgtcaagcaggcgatcgaaggactcggcttcccgtttctcgggctcaatatccgcgacaccgaatggaacgaggcggcgttcgacgcctacacaatgatcgagcgcggcggcgtcaagatcgcggtgctcggccaggctttcccatatacaccggtcgccaatccgcgctggatgatcccgaactggtcgttcggcgtgcgcgaggaggatgtccagtcgcaggtcgacaaggcgcgcaaggggggggcgcagctcgtcgtgctgctgtcgcataacggtttcgacgtcgaccgcaagcttgcgagccgcgtcaagggaatcgacgtcatcctgaccggacacacccatgatgcgctgccagaggcggtgaaagtcggcaagaccttgctgattgcctcgggctcgtccggcaagttcgtgtcgcggctcgatctcgatgtccgcgacggcgaggtcaaggcgtttcgctacaagctgattccactgttctccgatgtgatcacggcggacgccgagatggctgcgaagatcgccgaggtccgcaagcccttcgcgtccgatttggccaaggtgctcggcaggactgaatcgctgctgtaccgccggggaaatttcaacggcacgtttgatgacctgatctgccaggcgctgatgcaggagcgggatgccgagatcgcgctctcgcccggttttcgctggggcaccagcgtgctgccgggccaggacatcacctttgaggatgtcaccaatgcaaccgcgatcacctatcccgcggtctaccgcatgggcatgactggcgcgcgcttgaaggagatcatcgaagacgtcgccgacaacctcttcaatgtcgacccgtattatcagcaggggggtgacatggtgcggatcggcggcctgtcctatgccatcgacgtcaccaagccgcagggcagccgaatctcggacatgcagatggtcaagaccggcacgccgatcgatcctgccagggaatatcaggtcgccggctgggccagcgtcaatgaagggaccgaagggccgccgatctgggacgtcgtttcgaattacctgacgcgacagagagccattcggctcgagcccaacagagccgtcaaagtcaccggagcgtaa

SEQ ID NO: 7318 - DNA, 1272 bp, BradyrhizobiumColbertium
atgtcgaagatggacagtccccggcaatcccgacgcagttttctggccgctggcgccggtgttgcggcgtcggtgctcgcaaagcccgccttggccggcggcggcaatccggcgaaccagcccccaaacgtgccggaatggaccaaatcgctcggcgaaggcgtcgccgtgcgtccgtacggcaagccgtcgaagttcgagaaggacgtcgttcggcgcgacgttgaatggctgaccgcctcgcgcgagtcctcggtgagcttcacaccgctgcatgagctcgaaggaatcatcaccccgaacggtctctgtttcgagcggcatcatggcggcatcgccgagatcgatccggtcgatcatcgcctgatgattcatgggctcgtcgaacgcccgctcattctcacgctggatgagctgaagcgctatccgcgcgtcaaccgcatccactttatggaatgcgcggcgaattcgggcatggaatggcgcggcgcccagctcaatggctgccagttcacccatggcatgatccactgcgtgcagtacacaggcgtgtcgctgcgcactcttctcgatgaagccggcgtcaagaccaacggcaagtggctgctggtcgaaggtgccgatgcggccgcgatggatcgcagcctgccgatcgagaaggcgctcgacgactgcatcatcgcctacaagatgaacggtgaggcgctctatcccgagcagggctatccgatgcggctcgtggtgccgggctggcagggcaatctgtgggtcaagtggctgcgccgcatcaaggtcggcgaccagccctggcacacccgcgaggagacgtcgaagtacacggacctcatgccgaacggcaaggcacgccgcttcacctggtcgatggacgccaaatcggtgatcacgagcccgagcccgcaggcaccgatcaggcacggcaagggctttaccattgtctccggtctggcctggagcggcaacggcaaggtcaagcgggtggatgtgtcgctcgacggcggccgcaactggtggccggcacgcctcgacgggcccgttctcgacaaggcgctgacgcgcttctactacgagttcgactggaacggagagccgctgctgctgcagtcgcgggtacaggatgacaccgggtacgtgcagccgagcaaggccgagctgcgcaagatccgcggcgtcaactccatctatcacaacaatggcatccagacctggcatgtgcaggccaatggtgaggtcgagaatgtcgaagtcgcgtaa

SEQ ID NO: 7319 - DNA, 666 bp, BradyrhizobiumColbertium
atggcagtggcgctgacggcctgcgtgctgggcgcgccggcgcttgcgggccagaggacggacaccaagagcggtccccgctatcacatcggccgcgcgccgaccgcggacgaaatccgcggttgggacatcgacgtgcgacccgatggtcagggcctgccggagggcaagggcacggttgcccagggcgagaagctgttcatggacaattgcgcgagctgccacggcgagttcggcgagggcagcggtcgctggccggtgctggccggcggcaagggctcgttgacctcggacaatccggtcaagaccgtgggctcctactggccctacgcctccaccctgttcgactacatccgtcacgccatgccttatggcaatacgggatcgctgtcggtcgacgaatattatgcactggttgcgtatgtgttgcatctgaacgacgtgatcacagatcagaatttcgagctgaccaataggaatctcgccacgatcaagatgccgaacgagcagggcttcgtgatggacgaccgcgccaccagcgagaagtcgttctggcagaaagacccctgcatgaaggattgcatcgcgccggtgaagattacggggcgagctgtcgccatcgacgtgacgcctgaggacggcaagaagtcccggggtgtggagtga

SEQ ID NO: 7320 - DNA, 438 bp, BradyrhizobiumColbertium
atgctgctgcatgcgagtctcgttgcgggttcgctcataacaatccacccggccgcggcggaagcggcggagccgcataggctcgcgctgcagatcagcgatgacgaccagagcaagatgcgagccgtcctcgatgttgcggccaacgtctcgcggcattattccgggcagggcgaggatgtcgaactggtggtggttgccttcaacggcggtctcgacatgctgctcgaggaccgctcgccggtgaaggagcgcctcgcaaacttcctgaaatcgatgcccaatgtgagcttcatcgcctgcggaaaaacgctggagacgctggcggcgaaggagggtaagcaaccgcggctgatcgagggcgtcagcgtcacccaggtcggggtcgctgcgttgatggatcttgcggaaaagaactggacgattgtccgaccctag

SEQ ID NO: 7321 - DNA, 906 bp, BradyrhizobiumColbertium
atgcgatggttggtgggattgatagcgttgctcgcacttgcgacgtccgcaggtgctgccgagcaggagctcgaattgtcgctcgacggccgcacgacgctcgcgaccctgcgcacccccagctcgatggggcccgatacgccgctcgtggtcatgacccacggcacgcttgcgcacaaggacatggaagtcattcagggcattgccaaggcgcttgagcagcgcggcatcgcttcgctcgcccatacgctgtcactggggctcgatcgtcgcaagggcatgtatgactgcgccgcgcggcatgattatgtcatcgaggacgcaattgccgagatcggcgcctgggttgcgcgggcgaggggcatgtcccggctcgtcctcgcattcggccattcgcgcggcggcaatcaggtcgcgcggtacctcgccgcaggcgaaaccccgcctgttgcgggtgcggtgctgctggcgccggtgaccgcaaaggccgaggccgacttgcgcgcctcctatgcccagacctatggcaagccgctcgagccccttgtggagctggcgaccaagtcgatctcggctggccgcggcggcgagtggatggatgtgccggggttcatttattgtcgcaatgccatggtcaccgcgcgggcgctggcctctttctacggtcccgatgccggccaggacacggccgcgctcgtggcccgtgtgaaaccgccggtgctggtactcgtcgcggccaaggataccgtcgtgcccgacgtggcagcgtccttcgcttcgctcgcgggttcgggagggggaagggttcagctcgacgagatcgaggatgccgaccatttcttccgcgacctgttcgcagacgatgttgcagaccgaatcgccgagttcatcaagcgaatgagatag

SEQ ID NO: 7322 - DNA, 1092 bp, BradyrhizobiumColbertium
gtgctgacgccggttatcgatttccttggtgaagaccggctgtcatggctcggaggtctcctcgtcggaggcctgttcgggttcttcgcccagcgcagtcgcttctgcctgcgcgccgcagcggtcgaattctcccggggcgagggcggtccgcgccttgcggtctggctgctgacctttgccgcggcgctggtcggcacgcaggcgctggtcgcgatcggctggctcgacgtgtccgaggcgcgccagctcgcgcagcagggcagcatctccggcgcgctcgcgggcggcgtgatgttcggctgtgggatggtcctcgcgcgcggttgcgccagccgactgctggtgctctcggccaatggcaatctgagagccctgctttcagggctggtgtttgcggtgaccgcccaggccgcctatcgcgggctgctgtcgccggcacgcgaatgggtgaccaatctgtggctgatcgatggtggaccgtcccgcgacatcatggccgttttcggcgccggtgcccccgaaaagctcgcgtttggcggactgtggttgattgccggattggcttttgcctttcgcagcaacctgccacgcgatctcatgcttgccgcccttgccacgggagcggcagtcgttgctggctggctcttcacctaccagctcgcgcaggcctcgttcgcacccgtgacgctgaagagcctcaccttcagcgggccttcggccgagttgctgatgcttgtgctgaacagttcgcagctccggctcggcttcgacctcggcattgttccgggcgtattcctcggctcattcgccgcggcggcgcgcgcgggtgagctgaaactggagggattctcggacggcctcggcatgaggcgctatctgttcggcgcggtgctgatggggttcggcgcgatgctcgccggcggctgcgcggtcggcgccggggtgaccggagcctcggtctttgcgctcacagcctggctcgtgcttgctggcatgtggctcggggcagggctgaccgatcttctcgtcgacggtgccggcatgccgcgaccccgccgcccggcaaagtcgccgacgccgggcgcctga

SEQ ID NO: 7323 - DNA, 552 bp, BradyrhizobiumColbertium
atgaccaccatcacggaaagctacgttcgcgaagcgccgcgcaccgcgcggatcgactggtcgccctatctggtcggcgccggaatcggattgttgagctgggtcgcctttggcgtattcggcgatccgctcggcgtcaccaccgcctattcgcgcatcgcctcactcttcgccgtcccggtgatcggaccggaagctgtggcacagaactcctactggaagagcatgccgctgaagtgggattacggtgtttggtttctcgtcggcataccattcggcgcgttcgtctcggcagtgatatcaggcacgtggcgcctcgagctcgtgcctgatgtctggaaggaacggttcggcccgtcagttgcgaaacgcttcgccgccgcgttcctcggtggcatcgtgatcatgtacggcgccaggctcgccggcggttgcaccagcggccacggcatctcgggcggtttgcagcttgcgctctcgagctggctgttcctggcggtcatgttcgccaccggactcgccgtttccgccctcatgttccgtgcccgctga

SEQ ID NO: 7324 - DNA, 552 bp, BradyrhizobiumColbertium
atgaccgcaatgatgaccatccttgggccgctggtgatgggtgccgccttcggcttcctcctgcagcgaggcaaggtgacgagctgcaacgtcatcgagaatcagtttcgcttgcgcgacttcaccgtgctgaaagtgatgggcacggcgatcgtggtcggcggcatcggcgtgctgctgctcgtcgacaccggcaacacgaaatattacgtgaaggatgccaacatgctggcagtcgcgctcggcgccgcactgttcggcgtcggcatggtggtctatggctactgtcccggaacggcgcttggcgctattgcgaccggcagtgtccatgctctcgtcggcgcgctcggcatgatcgccggcgccatcctctacgcgctgagcttcgattggctgaaggcgaacgtgctcaacgtcggggcacttggcaaggttcgcctgccggacgtgacgggcatccccgacgtcgtctggtttgccgcactggcagtcggtgccgggctgttcttctggtggatcgaatccacggaagccaggcagaagaagggctaa

SEQ ID NO: 7325 - DNA, 318 bp, BradyrhizobiumColbertium
atgcgccaattaaagacgaccgagctggagcggcaggccaaggaggtggccgcgctcatgcgcatgttggcgaacgagcaccgcctgctcatcctctgcaggctggtggaatacggcgagattgccgcaagcgcgctcgccgacgacgtcggtctttcgccctcggcactgtcgcaacacctcgccaagctgaaggcagagggcgttgtcgccgcccggcgcgacgggcaaacgatgtggtatcgcatcgcggacgggcgggttgaagagttgttttcaaccctgcaccggctcttctgtcgtcctcggaaacgatga

SEQ ID NO: 7326 - DNA, 114 bp, BradyrhizobiumColbertium
gtgctgccatcgctcgttgatcagggcgacgcacaagctgtcgcggtctcgctgccgccgctaccgacatcgtcgcgacgcttccgcaaatatagctcctgcgagcgcctttga

SEQ ID NO: 7327 - DNA, 180 bp, BradyrhizobiumColbertium
ttgctgctgtgcgccgactgtgcgctgcgggaggaaggctcggccgttcggcttctctggttcacaagcggcttcgctcccacccccgggcattcgaaccctgcggcgcccggctgcaccaccgccggagatgcgagccgtcgtgacgctcttcagggcactctggatctcttgagctga

SEQ ID NO: 7328 - DNA, 828 bp, BradyrhizobiumColbertium
atgcgcattcttcttcttctcggcgagacggagtcctcgcttagcgcgcgggagtttgcattcgatctcgcccgtcccggcggactactggtttccggcctatctggtatcgatctgtcttccctcactgttccaatgattggcgggattggcgcgtcggcacatcaagccaagctcgaggagatccgggggcggcaagcgcgcgagagtaacgcgcggctacacgcgtcatatgctgaagcatgtgatgcgaggggcgtcgagttctcctggctctctttcgaaggtgatccgcctgaggccttccgcgctgcttccgagacgcgagatttgatcgtcaccggtcacgatacgaccttttcggtcgaccaggctccctcgctgccggaattgctgtccaaccttctgctgctctcgccacggccagtcgtcgtctgcggcgacgagtatcgccgtccgcgcgacgtgttggtcgcatatgacggcagtctgcccgccatgcgcgccttgcaaatgtacgcacttctgggattgtggcgcgaggctcgcgtgcacgtgacgtctatcgcagcggaatcggagcttgcgacccgacgcgctcatgctgcggccgacttcttacgtggccatgacgtacactgtacggtcgttccgatcgaggcgagggtggacccgtccgaggcgatccgaattgaagtcattgatagggacattggtctgctggtgatgggcgcgtttggtcatcgcggctggagcaatgccctgtttggctcgacgacgcggcgactggtcgagcggccgccttgtcccctgttcctcttccactag

SEQ ID NO: 7329 - DNA, 114 bp, BradyrhizobiumColbertium
gtgcccgtgcaggtacgcgccttacaccgcttcaagatcgagcagatcgaggaggcttacgggctatgcgccaatcagcgcgaggacgtcctcgaagtggcgatctcgccctga

SEQ ID NO: 7330 - DNA, 2688 bp, BradyrhizobiumColbertium
gtggaagcggtcctcgccgctctcgaggctggtgcaagcgggctttcggcttccgaggcggcgcggcgcctaagccgatacggacccaaccggcttccggaaccgccgcgacgcagtgcgatcctgcgtttcctctcccacttccacaacttcctgatttatgtgttgctgggtgcggcggcgatcactgccgctctcggtcatctcgtcgactcgagcgtcatcctcgcggtggtgatcgccaatgcggtcatcggcttcattcaggaagggcgcgcggaacaggcgatggatgccatccgccagatgctggctccgaaatcctccgtgatgcgcgatggcgaacggcacagcatcgacagcgcctcagtggtcccgggcgatatcgtgctgttggaggcaggcgagagagttcctgccgacttgcggctggtagaggcgaccggtctccggatcgaggaggcaatcctcaccggcgagtccgttccgacagaaaaggaaacgaagcctgtggcaagcggagcgatgatcggtgaccgatcgtgcatggctttcagcgggacgctcgttgccggaggcgccggtcgtggcgtggccgtggccaccggagcgtcaacggaaataggccgcataagcggcatgctgtcccgagtcgagacattgaccacgccgctggttcgccagatggacgggttcgcgcgatggctgacaatcctgatcctgatgattggcggcgtgctgctcgtctacggctatttcgtggggcatctgcccttcgccgagttgttcatgagcgtcgtcggcctgtcggtcgctgcaatcccggagggactaccggccgtactgaccatcacgctggccgtgggtgtccaggcgatggctcgccgcaacgccatcgttcgccgcctgccggccatcgagacgcttgggtctgtttctgtgatttgcagcgacaagacgggaacactcacccgcaatgagatgatggtgaccaccctggccagcgccgaccacatctattcggtcgcgggagacgggtatgcgcccgaaggcgctatccggctcgccgatgctgacgtcgacccggcggagcatgagctgctgctcgaattcgcccgaacctgtgctttgtgcaatgatgccgccttgcacagtcatgacgaagggtggaaggtcgagggcgatccaatggaaggcgcgctcaaggctctggccggcaagattacgcgtcagggcgctgcggccttcgccgattggacgcgaaccgacaccatccccttcgacgccaggcatcggtacatggccgtcctccatcacgatcatgaggggcatgcctggatccacgtcaagggcgctccggaacggatcctcgccatgtgttccgtccagcgggcatcagatggtagcactcacgctatcgacgcggactactggcgcaagcggatggacgacattgccgcgcatggacagcgcgtcctggctcttgccgcacgttcaacggcgccggatcacgtcgtcctgaacactgccgatctcgacggccatatggtgcttgtcggactgatcggcctgatcgatccacctcgcccggaagccatcgccgccgttgcggagtgccatggcgcaggaatccgcgtcaagatgatcaccggcgaccatgcaggcacggcagcagcaatcgcgcgccaggtcggccttcagcaccccggcaaagtgcttaccggggccgatctcgaggcaatgagtgacgccgagttagcggccgtcgtcgtcgacaccgacgtttacgcgaggaccagccctgaacacaagctaaggctggtgacagcgctccaatcgcacggattgacggttgccatgactggggacggggtgaacgacgcgcccgcgctcaagcgcgccgacgccggtatcgcgatgggacagaaaggcagcgaagccgccaaggaagcctccgatctggtcctcgccgacgacaatttcgcatccatcgccgtcgcgatccgcgaaggacgcacggtctatgacaacatcaagaaggtcatcagttggacgctgcccaccaatgcgggggaagccacgacaataatcgccgcgctgtttctcggaatggcgctgcccgtcacagcggtgcagatcctgtggatcaatctgatcaccggaatcactctcggcgttgcgctagcattcgagccgaccgaagaagacacgatgaagcgggcgccgcggtcacgaaaggagccactgctgactggcgcgctgatctggcacatcattctcgtgtccgtactgttccttgcggcagtcttcggcatgtacacctatgcaatcgacaaaggacatgcgccagacctcgcccggaccatcgccctgaacacgcttgtggtgctcgagatcttccacctctttttcatccgcaacatctacggcacttcgttgaccttgaaagcggtgcgggggacacgcgtcgtgtggatttgcgtgatcgcaatcaccttggctcaattcgctgtcacttatcttccgccgctccagcaggtgttcggcacgcaaccggtatcgttcttcgatgggatgctcatcgtggcggtcggcgcagtgttcttcgcggtgatcgaggcggagaaacagctaagaattgtcttccagcgcaccgagcaggcccccgcctcacagacgaccgtgtag

SEQ ID NO: 7331 - DNA, 1671 bp, BradyrhizobiumColbertium
atgtcgtggttaccgcaactcggcctctcggtttcgcttttcgccgacggtcttgccctgttctttgcggcactgatcctagggatcgggctgctgatcatcctctatgcgcgattctacctgagccgcagcgactcgatgggtcggttcttctgttacctcctgcttttccagggctcgatggtcggcatcgtcctgagcaacaatatcctcctcctggttgtgttctgggagctcaccagcctcacatccttcctgctgatcggctactggtatcacctgccggcctcgcgtgcgggagcgctcatggctttggtggtcacgggcgccggtggacttgcgctgatgggcggcatgctgttgctcggtcattctgccggcagcttcgagctgactgagatcctgaaccgcggcgaagcgatcaaagcctcacccctctatctgccggcactgctgttgatcctcctgggagcgttcaccaagtcggcgcagttcccgtttcacttctggttgccgcatgcgatggccgcgccgacgccagtatccgcttatctgcattcggcgaccatggtgaaggctggtgtcttcctgctcgcgcgtctttggccggtcatgtccggcacgcaggaatggttcctgatcgtctcgttgaccggcctcgtcacgatggtgatggcggcgtggattgccctgttcaaggatgatctgaaagcgctgctcgcattctcgaccatcagccatctcggactgctgacgatgctgctcggcttcggcacccgcatggcggtcgtcgccgccgtattccatatcctcaatcatgccaccttcaaggcggcgttgttcatgtccgcaggcatagtggatcacgaggccggcacgcgtgacatccgcaggcttggcggtttgcgtcatctcatgccgatcacatcaggcctcgccatcgtcgccgcagcctcgatggctggggtacccttgctgaacggcttcctgtcgaaggaaatgatgctggaggaggcgtcgcacacgatctacgcgggacaggcctggatctttccgctttttgccaccgtcggagcgctgctgtcagcggcttactccgcccggttgatcttccacgtctttctcggtccgcagcggagcaattacccgcgccacccgcatgacccgtccttcgggatgtggctgccagttgcagtgctggtcatcccggtcatcgctatcggcgtggtgcccgcgacattcgccgtgccgatcgaactgaccgcgcgcgcggtcgcacacggaaccttgccagactttcacctcgccttgtggcacggcttcactcccgcactggcaatgagctcgctcgcacttgcggggggcctcgtgctgttgtggatctacccgtccgccaaccgcttgcgcctcgccgcgccacgggccgatgccatgacgatgttcatgacttccctcgcagccgtaatttgggcatcgcggcttgccctcagcagcatcaatggcggaggtctaccgcgctacctgagcatcatcgtcgggaccatcagcatcctggccctgactggattcctgggggcggcgcccgcgccaatggcaggcggtcgcgccgttcttcccgccacgctaccggttgtgacggctggctggtcttgctcctggcgtgcggaatga

SEQ ID NO: 7332 - DNA, 972 bp, BradyrhizobiumColbertium
atgatcgtccggtgccactacgatcggctgaccgcgttgatcgtcaccagcattgtcgggctcgtggtatcgctcgccttcctgcagttctcggctcccgatctcgcgctgacccaaatctcggtcgaggtggtaactacgattctccttctgctcgcgatcaatctgttgccgcgcacgacgcctgacgaatcgcccttgcgtgcaaagctcggcgctggcggactggcgatggtcgcaggagttggcgtagctgcgctggcttacgccgtgatgacgcgcaacttcgagcccatttccggctatcacatcgaacaatcgaaacccggcggcggcggcaccaatgtcgtgaatgtcattctggtcgactttcgcggctacgacacatttggcgagatcatcgtgctcgcgatcgcggcactaacgatcttcgctttgctcgactccgcgatgcagggcgccgctgggcgccggctcgcacgggtgcgtttcgatccgcaggcccacgaccctcacccgctgatgctgacggtcgtgacccgcattctgctgccgctgtcgctgatggtcggcgcctacatcctcctgagggggcacaatatgcccggcggcggattcatcgccggcctcatcgtcgccatcgccttcctcatgcaatatatggcgagcggttatgtctgggcgcatcgccgcgctcgcttcgacgcccatgtgatgatcggcggcggtgtgttgatcgcaggtgcgaccggcctcgcagcgctcctgttcggccggccgttcctaacgagcacgttcggctatttcaacctgccagtgttcggcgaagtggaactggcctccgcaatggcctttgacattggcgtgttcttcgccgtggtcggcacctgcctgctgtcgcttgcgacattatctcgcgtggaagaacgcgcagagcaggcatccaaccagatggaggcccgcaatccatga

SEQ ID NO: 7333 - DNA, 378 bp, BradyrhizobiumColbertium
atgagcatggaatttctcgtcgctacaggaatcggtgcgctcactgccgtcggtctctacctgatcctactgcggcgcacgtttccggtggtaatcggactgtcatttctctcctacgcggtaaatgtattcctgttcgcaatgggccggcttacgatcgacctgcccccgattgtcagccggtccgctgccggatacactgacccgctgccgcaggcactcgtcctcaccgcgatcgtcatcactttcgggatgacggcattgatcgtggtgttatcgctacgggcctttcttgagacgggcactgacgacgtcgctctgcatgtccggcgcgacgaggagtcgtgcggcataccccgcgacgagcgtttccgatga

SEQ ID NO: 7334 - DNA, 1524 bp, BradyrhizobiumColbertium
atgacagatgcatggctaattgttcctgtcgcggtgccggcaatgaccgcggcgatgctggtgctggccatgcgccacagtctggccggacagcggattttgtcagcggcggcaaccgcatgtcagctcgctgtcgcgatcgggctctacgtcggcgccagcgacggcgaaccacgaacatatctgcttgggaattggcctgcgccgtttggaatcgtgctggtgctggaccggctggcggccaccatgctgctgctggccgggctgcttgccgtcggcgtggtcttggcagcgatcggcgagtgggacaagcgcggacggcacttccatgctctgttccagtttcaattgctgggcgttaatggcgcctttctcacgggcgacctgttcaatctgtttgtattcttcgaggtgcttctgatcgcctcctacgggctcatgctgcatggcggcggcgcccgtcgcctgaaagccggattccactacgtcgcaatcaacctgatcggctcgaccgtcttcctgctcgcggtcgggacgatctatgctgtcactggcacgctcaacatggcggacctcgccgtgaaggtacctcaagtcgcgaccgccgatcaggcgctgctcgcagtcggggggcttctgctgctcaccgtgttcgcaatcaagtccgctatggtcccgctgcattggtggctgccgccgacgtacggatcgacgtcgccgcctgccgccgcattgttcgcaataatgaccaaggtgggggcctattcgattatccgtgtctatacgctgatcttcggttccggtgcaggcccgctgtcggacctcgcaacgccctggattctgccggccgggatgctgacgctcgtcatcgggacaattggggtgctggcaagccgccgcctgcttgatcttgcctgccattcgctgatcgcctcgatgggaacgttgctcattgccatcgggctggccagcgccgccggacttgccgctgcgctctattacgcggtgcagagcaccatcgccagcgccgcgctgtttctgctcgccggccttctcgctcccgggagaggcggccgcgcaaagttcgggtggtatcagcagcatgccgaattgttcgcaggattctacttccttctcgccatcgcgacggtgggcatgccgccgctcgccgggtttatcggcaagctcctgatcctcgaggccggacgcgccgcttcccatgccacgaccatctggcctgcggtcctgatcacgagcctcctgctgatcgtcggtttcgcacgcagcggcattcagatcttctggaaccggatcgagctaccgcaggtgtcggcggtgcgacctgtgccgatgctgccgacattcgtgattgccggcatgattgcgacagtggcggccctgggttttttcgctggtccggtgatggacgacatgaccgccaccgccgaacaattgctctcgccgcagcgctacatcgcgacggtgctgcagccgcgcgaaacctcgagcctcacgggagaatag

SEQ ID NO: 7335 - DNA, 489 bp, BradyrhizobiumColbertium
atgcgcgcattgctgcctcatcccgtgcttgtcgtgatcctcgctctggtttggggcctgctgatcaacgacctctcatggggcgctatcctgttcggattgctgctcggggtggtgatcgcctggctgaccagcccctactggccggggcggtcgaagatccgaaacccgctgccgatcccggaatattttgccatcgtgctttgggacatcttcgtctccaatgtgcaggtcgcctatcttgttctattccgtcgcggagcaagcctgaagtcgcaattcgtcacggtgcccctctctctcgaaagcccggaggcgatcgccaccctggcgggcacgatcactatgaccccggggacgttgagtgccgatctgagcgccgatggacgatcgctgctggtgcattgccttgatataaccgaccccgccgccaccgtggccactatcaagtcccgttacgagcggcgcctgatgaggatattcgcatga

SEQ ID NO: 7336 - DNA, 270 bp, BradyrhizobiumColbertium
atgatcgctgccagctgcgcctttgccatcatcgcgatcgcggcatccatcctgttgaacgtctaccgcctgattatagggccggacgtgaccgaccgcatccttgcactcgatacgatggtgatcaatgcgatcggcctcatcgtcgtggccgggatcgtgttcggaaccgccatgtacttcgaggcggccttgttgttcgctatggtcgggttcgtctcaaccgtcgcgttttgcaagttcctgctgcgcggcaatgtgatcgagtga

SEQ ID NO: 7337 - DNA, 441 bp, BradyrhizobiumColbertium
gtgatgaccatggcggcatttatcgaaatggcgagcgccgctttcatcgtgattggcggcgcgttcctgttcgtcggatcggtcgggcttgccaagctgccggatacgatgcggcgcctgcatggcccaaccaaggcgacgacgctcgggattggctccttgctgatcgcgtccatgctctatttcttggtgcgccatcaggcagtcggcatccacgaaatcctgatcacgctgttcctgttcctgaccgcgccggtgagcgcccagatgatcgcgaaggctcatattttccgaagtcaggagctgcagcggaccctgcctctcgatgcaggcggctccggatgggcgacactggccggccaagctaactcgcccaaggcttccgcacctagcgctcacccggtgtgcgcgagcaatccgccccgctcacagtccgactga

SEQ ID NO: 7338 - DNA, 129 bp, BradyrhizobiumColbertium
gtggtcgcgcagatgagtgatcaagtgaggaaagtggatccatcctacgtcgtcgttggcgccacgatctttgtggttctgacgatctggtgcggctggatcgccatttcgtttaccggcttctcttga

SEQ ID NO: 7339 - DNA, 162 bp, BradyrhizobiumColbertium
atgttctggcacgggatcttggatgaagcttgcagttacctgaaacagcttggcagtctgatgatcctgccggcagtcacggctgcgtcaccttgcttcgaaggtggtcattcgcgctccattcccgtcgaggcactccgagagcgaggcggcagaatctga

SEQ ID NO: 7340 - DNA, 489 bp, BradyrhizobiumColbertium
gtgatcgtggcggaggaaggcaagatcgtttctttgttggtcgagggcctcagaaccaaagaagagccggaattcatgtcacgaattccattcgagcgcgtactgcgtccgcttcacgaaggcgctatcgtggcggatttctctgacctcagatcgcgggaatacggtctgttctttgatcccgatcaagggcgggaccagtcgcatgagttctcgatctcgaaggtcatcggcgattacgcgcgcttgcaagcggggcagggctatggctacgtatccgatcttgtcttcgatcgaaccggcaagttagcggccgtcgtgatctcgcgggaagcgtctgtcggcggagggacatatgcgttcccttacccgggccaattaggaaggtggagtccgaagctgagctattacggccttccctacgtcactgcggaacaggcgagcagagcagggctgcggctggacatgaaggaatttcagcagtcgtaa

SEQ ID NO: 7341 - DNA, 342 bp, BradyrhizobiumColbertium
gtgggcgcgcttgccggcgcggttccagcaattctcgttgccatggctcagtctcctgttcttgcggcctgggtcgctcttctattcctttcggttcaactgctggagggaaacgtgatcgcgccctggattcaaaagcggacgatcgcgctgccgccggcactcacgatgctttctcagacggttctcgggattctgtttggcctgatcggcctgatcgttgcgactccatttattgcggtccttcttgttgcggtgcgtatgatctacgtcgaatggttcttggagagaaagagcggcagcgactgtggtcgaaaggttgcggtctgcggtgccaaataa

SEQ ID NO: 7342 - DNA, 135 bp, BradyrhizobiumColbertium
atgaaccggtgccgattcaaccggacaaaggttccgcaggtgtttgggccaagagcaaccctggacagcattgccgcggccgccaccgccaagttcggcggcagcggaaatgttgaaatcgcacgtcggcaatga

SEQ ID NO: 7343 - DNA, 1257 bp, BradyrhizobiumColbertium
gtgctttcgctcatggacattgcggccgttctacttacgctttcggcggtatttggctggctcaaccacaaattcctgcctttgtcccgcagcgtgggactattggtgatgagcgtcacgacgtcgctgtttctcataggcctggatgcggcaattcccgccgttcatcttctcaaacagctttcagagggtctccgccagatcgatttcgcagagatcgtggtgaatgggatgctcgcgtttctactgttcgccggcgcattgcatgtggatttggcgacccttaggagccgcgcagttccggtgttcattttggccgtgttcggcacttcgatttcaacggcgaccgttggtttcctgttttggtgcatctgcagtctcatgggaataccagtgtcgctgccctgggccctcgtcttcggcgccttgatcagcccgacagatcccgtcgccgttctgagcacacttcgcaacactaacgtgccgagcgaactgaagatcgaaaccgagggcgaagcactgttcaacgacggcgtcggcctcgtcctgttcacgatcttgcttcagtttgcgagttccgaggaaggagcgcacgtttcggtcgcggaggtcgcagagttgctcatccgcgaagctggcggagggatcgtgctgggcttgctgacgggctatctcgcgtatcgcgcgatgcggctcattgatgactacgcgatcgaagtactgatctccctcgctcttgtcaccggaacctacgcaattgcgctccacttgcacgtcagcgggccgctgtccatggtggcggcaggcctcctcatcggggatcgaggaccgcgatatgcgatgagcgagcagacacagagttatcttttcgcactctggacccttatcgacgagatcctcaattcagtcctgtttttgctgattgggctggagacactggttctacgtttcgatcttcgcagcttcggtcttgcggcatcgaccgtgccaattgttcttttcgctcgcttcgtttcggttgcagtgcagccttttctgttcgggtggacgcggcttctctcgatgcgcaacgcgccctttttgacctgggccggcgttcgtggcgggatttctgttgcacttgccctatcggtgccagatagcccggcgaaagtcgctattctcacctcgacctatgcggtcgttttgttcagcatcattgtccaaggctcgaccctgggctgggttacaaggcgcaccgtcaaacgagcccgatga

SEQ ID NO: 7344 - DNA, 147 bp, BradyrhizobiumColbertium
atggacggcagcctgctactactcgtcttcgtcacggcgctttccgctttcggcctcgcggcgctggaggtcgcggcccgccgatcatctggaggtacgatcggcggtaaacctcaagcgactaacgccaagcggcccgtggagtaa

SEQ ID NO: 7345 - DNA, 669 bp, BradyrhizobiumColbertium
atgtgcccgatccggatcacgttaactgacgatcatccgctcgttctggccgggatgaaggcgctgctgcaggcggtggacgacatcgagatcgtcggagaagcaacggatggacagacagcgctcgatatcattcgcgaggtcacgccggacatcgcgatcgtggacatttcacttccaggcatcagcggcctcgaggtggctcgcactgtcgcgacgcagctgcctcaggttcgtctgctggcgttgaccgttcacgaggaccacgcctacgtccagcccatgctccaggccggagcccgcggctatctgctcaagcgctccgcggcagatgagctcgagcgggcggtaagagccatcgccagcggaggcttgtatctggatcccgcaatcgcggagaaggcacttccgtcctctgccggcgctcatccgtctgccgagacgacaggcagtgaactcacgccacgggagagcgaagtgctgcgtttcatcgcccaaggattcagcaacaaggaaattgccggccagctgaacatcagcatcaagaccgttgagacctacaaggcaagagccttggaaaagcttggcctgttcacgcgcgccgacatcgttcgctacggcgtcgcggtgggctggctgggccaagcagggacgggtgccgcggtctga

SEQ ID NO: 7346 - DNA, 2232 bp, BradyrhizobiumColbertium
atgttccatgtcaaggccaattctggaccgcaactacgattgtctgtaacatggggcagattgggcgatctcgggagtcagggtgaccgtccgcgctgtcaggaaaaccctgacgaccagaacacgaaggaaactgtggacgtgggcgtttcgtcgtcacattcggctcctgctcacagggaagcgagaagctcgactacacggagcgcagcgcggcgcccgctggtccttgtcttcatcgcagcagcgatgcctctggccctgtttgccggctgggtcgtctttctgaatgcccagcagcaacgcaatcattcacaagcggcagcggtcgaaaccctcgacagcgtagtgagcaggctcgcctctgagatcagcctgcagctcgagatcgcggagacgatcgcggcctccgctacgctggacaagccggatctcgatgcattctatcgagaggcgacgcgggtgaacgaggccaggacgctttgggaaacgattcagcttgttgatcccaagggcaatcaggtgctggacgtcacccgtccgctggcagacggaatgcgggtgatagccgaccgggagaatttcgagcagatcctgaagacgcgccggccggcgatcggcggtatcggaccacccggtccggtcacgggcaaacgcgtcgttgcggtaagagcgcctgtcgaacgcgatgggcaattgaagtttgttcttacgatcgccctcgtcccggacgcgatgagccagatcttgaaaagcgcgggagctccgaccgggtgggatggctttgtcgttgatgcaaagggcaacattgtcgctcgcacgttcggcgagcaatcggaactcggtcagtccgccagcgctaccgtgcgtcaggcgatcgcctcggcgccggaaggaagctatgtcaagacgacatccaccggcgatcaggtcgactcgatctacaagctcatacccggcacgagtggttggtcggtccatttcggaataccgacacaagagctcaatggtccagttcagcgatcagccattttcctagccgggggcggagtgctgagcttcgtcctggcacttaccttggcctggtacacgatccgcgacatctctcttcgcaggcgcgagcaggaggctcaggcggccttggcgctcagcgccagtgaagagcagcgcaggcttacgattgatgccgcagacctaggcgtattcagctggaacttcgcaaccagggaagcgctcgtgtcgcctcgtgcgcgagagatgttgcagattggcggctcccctgacggcgacactagcttgcctatcgatcggatgctgaactgcatcgaacccgccgaccggcagcagtttgagtcttcacttataagatgtcgttcaggaagcgtcgcgattgcagacttccggaccgctcctccgcacagtcgatggttgcgcgccagtggtcggctctcccggctggaccagaagaacccagatgtcgtctatggtgtcattctggacatcgacgaaacgaaacgggccgagctggaacggcagcggctacttaggcgtctttccgaagcagaggaaaatgaacgccgtcgcatcgcgcgagagcttcacgatcaaatcggccaaacgatcacagggctccttctgggactcaagaacttggaacagtttctcgggccaagtcacaagcgcaaggtagggctggagaagctcaactggctccagggattggccagaggaatcggccgcgacatccatcaagtcgcctccgatcttcggccgactgctctcgatgatctcgggctttacaaggcgctggaagccttctgtgtcgagatccagcggcggttcgggatcagcgtcgatcttcagcccttgggcagaagggaacgtctcggccaggatgtcgaaatcgcggtctaccgcgcagtccaggaagctgtaaacaacgtggtcaagcacgcaaaggcgcgaaacgtcagcgtggtggtcgaccggcgcacggcagagctgcggatcgttgtcgaagacgacggaaacggatttgaccttcaggacttctcgcggagtgatgcccgccactcaaagctcggcctgtcggtcatcgaagagcgccttacgattctgggcggatccttggcgatcgagtctgaaccgggccgcggcacttccctcttcatgagaattcccgtgccagcagaggagatgggctatgtgcccgatccggatcacgttaactga

SEQ ID NO: 7347 - DNA, 393 bp, BradyrhizobiumColbertium
atgcaaaagcaaggcgaatggcgggcatcgaagcttgttggcgttgccgtctacaacaacaacaacgagaagatcggcgacatcaacgatatcatactggacccggccggccgagtcgccaatgtagtgatcggcgtaggcggattccttggaatgggtgaacgcaacgtcgcggtcggtttcgatcaactcaagtttgtaagggagccggtgaagacagcgtccaacgatgcctctgggaaagcaggtaatgccaatccaggaagcacgacaggaagcacgacgggaagcgcatcgacaccgtcgagccgaaatgacaactggtacccggatcacgtggtgctgaacacaaacaaggatcagctgaagcaaatgccagaattcaagtactga

SEQ ID NO: 7348 - DNA, 372 bp, BradyrhizobiumColbertium
atgtctgacgaagagttgccgcatgatgtaaaggaactggtccgccgctacatccattcggtggcgcagctcgaggccctcctgtttttccatgagcggcccggtgagcgctgggacgtcgaatcgctgtccaagcgtctttacgcgggcaaggtagagatggccgacgccctggcgtcgcttaggcgcgatggcttcctggagggtggcccggcactgtatgaattcgctccacgagccgaattgcgggctgtcgttgaggccctccgcaaagcatattcgcggcacctcattccgatcacttacatcatccacaacaagccgcgccggattcaggcattctccgatgccttcaggatccgaaaggattag

SEQ ID NO: 7349 - DNA, 258 bp, BradyrhizobiumColbertium
atggcggcggtcatctacagcctttgcgcaataacgagcggcttctgtgcctggctgctggttcgagcgtactctgccagcaggtcaaggctgctgttatggagcgcggtctgcttcgcagggcttgcgctggagaacggcgctctgtggatagacaagatcgtctttcctcaagacgatctttccgcactacgcgtctcgatcggcttgttcgccatgacggtcctgctgcttggaatgatctgggaggccgagtaa

SEQ ID NO: 7350 - DNA, 276 bp, BradyrhizobiumColbertium
atggaccatctggctcccgtccttgaaggtgcgacggcattcgcatcactcatggcaagcatctatttcctgaagttctggcgcagaacgaccgatgtttttttcctgttctttgccgcagcattcgcaatcgatgccgttgcgcgcttcgtgctggcggtcgtgcaagcgacgaatgcaagtgagcctgtctacttcattccgcgcctgatcacattcagcctgatcgcgctttccattgctggaaagaacgcgatgcctaacaagccgaagtga

SEQ ID NO: 7351 - DNA, 2220 bp, BradyrhizobiumColbertium
atgccgatatcatacaagcagttgctccgctatggcatgttcggtttggcggtggcggcactcgttgcgtttggcatctcaccgttcacgggagggatcgtacagcaatggtcgcgaagcgatgttgagaccaggtccaagttggttttcaatgccatccagccgttgctcagccttgatgtggaagaacgtgcgtgggaccggctctccgaccttttcaagagagtagcactcgaccagaagatcctcgccgtcggattttgcgatacggacggatcgttgatcgctccgacacccgaaatgccggcggacttctcgtgcgaaaaactcgccagatctgaaagcgacagcttcgcaagcataacaagcggcggacggcgggttcttgtagctgcctttcccgtcgcaagcagccgtgggcggtcgtacctcgttatactgaccgacctcagctttgcagctgccagatcgagccaagtgctggcgtatctcctcgcggcgcttgccggagtcgtactggtgttgaccgtcggcaccatcatccttgccgtgatcatgatgaggggatggatgaatgccttgcggcgggcggtcgacgaggtgcgtcgcggtgctcagagggccgagcccaagccaagtggttcgtcaatcgatcgcgagattcacaagctcctgcgtgacgccgaacacattgcggttacaagtcaaattgagtggacgccacaatcgttgcaacaggtgctgcatggggcgctgcctggggccgaagtgatcgtcgtagccaatcgggagccatacatccacaacgcttcggaaggagggactgtggtgcagagaccggcgagcggcttggtctcggcgctggagccgatcatccgcgcctgcggcggcacgtggattgcgcatggcagcggcagcgcggatcgtgagacggtcgatgaacacgacagaattcgtgtgcccgaggcagctccggcctacacgcttcggcggatctggatctccgaagaggaacaggacgggtattattacggcttcgccaacgaagggctgtggccgctgtgccacattgttttcgtgcgtcccacgttcaggctcggtgattggcgactgtaccggcagatcaaccagcgctttgccgatgcagtcgttgccgaagcacgcaccgaggatcccgtcgtgctggtccaggactatcatttcgcgcttgtcccgaagatgatccgtgagcgcctgccgaaggcaacgatcataaccttctggcatattccatggccgaatgcggagactttcagcatctgcccatggaaggaggagatcatcgaaggaatactcggcagcacgatcgtgggctttcacacccagtttcactgcaacaacttcatcgaaggcgtcgaccgctttctggaaagcaggatcgaccgcgaagtgcaggcggtcagtcttggggggcatgagaccaggatacgcgcctatccaatttcgatcgaatggccgccgagggaactggagaagctgccggccgctgcgcaatgccgatccgacatcatcgcgcaattcggtctggcggaggggacgcggctgatcgtcggcgtcgaacgcttcgactacaccaaaggcattctcgaccgcatgcgggccgtcgatgcgctcctgtcgcgagatccgacctggacggatcggctcgcattcatccagatcgcggctccgacccgcaacaagctgagctcatattcgagattgcaggcggaagcagaggacttggcttcggagataaacgaacgacacaaaggtcgccaacgtgtggtccatttgatcgttcagcactacgagccttcggacgtgttccggctgttcaaaggagcggatgtctgcgtcgtcagcagcctgcatgacggaatgaacctggtcgcaaaggagttcgtgagttcgcgagaggacggcgctggggtgcttgtcctgtcgagctttaccggagcttcgcgcgagctctccgaagcgctcattgtcaatccatatgatatcgaagaaatggcatcagcgatcgagcttgcactctcaatgccgctggaggaacaggccgagcgcatgaacctgatgcgacagcaggtgaaggagcacaacgtctatcgctgggcaggagcgatgctgctcgacgcttcgagaagtcgcacccgcgagcgggttctcggtatggccaccagagcccgctcgccctga

SEQ ID NO: 7352 - DNA, 2520 bp, BradyrhizobiumColbertium
atggtgcttcgaaacgtcattcttatgacgctggctgttgcgcttctcgctatgggcgtcgccttgatggtcggtggtctctggctgatttaccttggcggatcctggtactatgccctgtctggcctcgcgtttctggcgacctccatcctcctgtttcgccgagacgaacgggcattgtgggtcttctgcgtcctgaccgccggcaccctgatctggtcgctgtgggaggtcggccttgactggtggccgctggcagcgcgcggcagcgtcatcttcatcgtgggtgcaatcctgttgaccccctggattgccggtagcttggcccatgggggatctgcatcatctcgacttcgcgggggatcggcatggcatggcggcggactggcgctgtccatcgcgctatgcgctgcgatcctggttgctgtcgcgtcctggacgactgatccacatcgcttggcggcaaagacgacgtctgtctccaaggcaacgccggagccggcggctgtagaagcgcaggatctgccgccgggcgagtggcacgcctatgggcgcactggacttggccagcgttattcccccctcagtcagatcacgccgcaaaacgccgcgaaactcgaggtagcttggacctatcacactggcgacatgcgagggcgaccgggtgatcccgaggaaacgacgtttgaagtgacgccgctgaagattggcgatcgcctttatttctgcacgccacatcagtcggtcattgccttggaggcgaccaccggaagggagatctggcgctatgagccgaagatcctcgacaagcttgcccttcagcatttgacctgccgcgggctgtcctactatcccggcgcttccagcgcgaaccagactcccggcacggaagccgtcgataccgcagccggcccgcagactgatcctccggacgcggtcatcaacaagccggtacctgacatgccgattgccgtggcggacggcgtgccgaccaagagctgcacggcgaagctgttcatgcccaccgcggatggccgattgatcgcgctcgatccggaaagcggagcggtgtgccgcgactttggcaggggtaccggtcagatcaacctttgggccaacatgccgaatgttcggccgggtgcctactattccacctcgccggtggttgtcgcaggcggcctggtgatcgtaggcggtacggtgcttgataatgtctcgaccaaggagcaatccggtgtgatccgtggctttgacgtccggactggcgatctggtctggaattgggattccggtaaccccgaccagacggcgccgctgcccccaggtcagacctacacggccaattcgcccaacagctggtctatcatgagcgtggatgaagcgctcggactggtgtacgtgccgctcggcaatcagcctcccgatcaatggggtggcaacagaagccaaagcgtcgagcggttctcatcgtcggttgtcgctctcgaagtctccacgggcaaggtgcgctgggcgttccaaactgtgcatcatgacctctgggattacgacgtcccctctcagcccagtctgattgacctgaccatcaagggacagaccgttccggccttggtccagccgaccaagcagggtgaaatcttcgtgctggatcgacgaaacggaagcccggtcctcccggtgacggagacgcgcgctccgggaggtgcggccaagggagatcacaccgcgccgacgcagccggtgtccgcactgtcattcaatccgagaccgctcaacggcgccagcatgtggggggcgacgctgttcgatcagctcgcgtgccgtatccagtttcgccgcctgcgatacgatgggcgcttcacgcctccgtcaaccgatggatcgctcattcatcccggcaactttggcgtattcaattggggcggcattgccgtcgacccgcagcgacagattgcattcgtaacgcctgcctcgctcgcgttcgtgtctcaactcgtgccgcgtgcggacgatcggaccatgtatgtccagggcaacaacagacctgacaacagcctcccggcgctgaacgagaatttcggagcgccgttcgcagtgaagctgtcggccttcacttcaccgctcggattgccctgtcaggctccgccttggggctatgtgggcgctgcggacctcgccaccggaaatgtgctctggcagcacaagaacggtacggtcagagatctcatgccgctgccgattcctttcaagatgggagtgccaaacctcggagggcccatcctgaccgcgggaggcctcgcctttctctcaggcactctcgactactatctgcgcgcttacgacgtgaacacgggtgaacagatctgggagggccggctaccggctggagggcaagctacgccgatgacttacctcggtgccgatggacgtcagttcgtcctggcggtagcgggtgggcatggttcgctcggcaccaagacgggcgacgcggtgatcgcatacgctttgccgaaggagtga

SEQ ID NO: 7353 - DNA, 885 bp, BradyrhizobiumColbertium
atgtcacgacccatcatccgatcattcttcgacgagccgaccaacacggtgagctacctggtcggtgatcccgccacgagaaaggccgctatcatcgacccggtgttcgactatgaccacagttcgggcgaggtggatacgcgatccgtggaggcgatgctgaaagctgctgaagatgccggcaacaccatcgaatgggtgctggagacgcacgctcatgccgaccatctctcgggcgcgccgttcatcaaggcgaggactggcgcgaagatcggtattggagagcacatcaaggacgtccagcgcatctttcgaccgatcttcaacgccaccgacttgaagaccgacggcagcgacttcgatcatctgttccgcgacggcgagcgcttcaagatcggagaactcgacgtcgaggttctctacacgccggggcatacgccggcggacatctcctacaagatcgaggatgccgtattcgtcggcgacactctgttcatgccggactacggcaccgcgcgcgccgatttccccggcggcgatgctcacaagctctaccgttcgatcaagcggctgctggcgctgccgtcggagacgcggctgttcatgtgtcacgactacaaggccccaggccgtgatacgttcgcgtgggagaccacggtacgcgagcagcgcgagaacaacgtccacgtcagggacggcgtttcggaagacgaattcgtggctttgcggcaggcgcgtgacaccaagctttcggcgcccaggctgctgctgccttccattcaggtcaatatccgcgccggcaaattcccgccggccgaagccaacggggtgcgctacctcacgatccccgtgaagctgaagggcggcgcgcagacctgcgtatag

SEQ ID NO: 7354 - DNA, 333 bp, BradyrhizobiumColbertium
atggcgtcctcaacatttgatccggaaaccttcgagaagcaggccgtcgaggtcgccgccatcttgcgggcgctcgcgaacgagcgccggttgatgatcctatgcaggctggttgaatgcggcgaggacaacgtcggttccctggctcaagccgtgggcctgtcgcagtcggccctgtcccagcacctggcgaaaatgcgcgacgagggtctcgtcgcgttccggagggagagccagacgctctggtatcgcattgccgatccgcggatcgaacaactcttcgcaacgttctacaggctgttttgcgcgcctgtcagaactaggagcagataa

SEQ ID NO: 7355 - DNA, 327 bp, BradyrhizobiumColbertium
atgtcgctacccactatcaatcccgcacaagctcgcaatctcctggcgaaaggtgctatcctcatcgacatccgcgaggcgaatgagcatgcccgcgaaaggatcgtgggcgcccgaaacttgcctttgtccaagctcgacgaggccgatcttgcggcgcatcagggcaagcaggtcattttccactgcaagagcggcgctcgcacgcagatcaatgcgtcgcggctcgcgtcgaaactggacggaagctgcgaagccttcatcgtggaaggcgggatcgacgcctggcgcaaggcggggctgccggttgaaaacgaccgaaagtaa

SEQ ID NO: 7356 - DNA, 780 bp, BradyrhizobiumColbertium
atgctgtcgctgacccaaggcgcactcggcatcgcctccggttcgttggtcggcttctcgctggggctggtcggcggcgggggctctatcctggccgtcccgctcctgatctatctggtcggggtgagcgaccctcatattgcgattggtacgagcgccgtcgccgtcgcggccaacgcggctgccaacctggccaaccatgtccgtgccggaaacgtgaagtggcgctgcgccgccgtgttcgcggtcgcgggtgtggccggcgcctttctcggctccactctcggcaagatcatcgatggccagaagctgctcgcccttttcgccctgatcatgctggtcgtgggcgccctgatgctgagggggaactccggcgagggcgagccatcggtgaggctgagccgggagaatctgccgaagcttgttgccttcggcctcgccacgggagcgttgtccggcttcttcgggatcggcggcggcttcctgatcgtccccgccctgatcgccgccaccggcatgcccatattatatgcggtgggttcatctctcctggcggtcaccgcgttcgggctgacaactgcggcgaactacgccgtgtccggtcttgtggattggtctctcgccgggttgttcatcgtcggcggcgttctcggcgggcttctcggcgcccgctccgcaacctcccttgcgggtcgcaagggcgcgctgaatacggtctttgcggcgctcatatttgcggtcgcaatctacatgctggtccgcagccttggcctgatgtga

SEQ ID NO: 7357 - DNA, 1110 bp, BradyrhizobiumColbertium
atgattctcgccatccccggcgcacacgccgatatcaaggtggggatcgtggtgtctgctaccgggccgggatcggcgctcggccagccgcagatgcggacggttgcggccctgcccaaggagatcggcggcgagaagatcgtctatatcgctctcgatgacgaatcggattcgaccaagggcatacagaacgcccggcgccttgtcattcaggacggcgtcgatgccatcatcggttcctcgctgacgcccgtgacgatgccgatgctcgatgtcgcccgggaagccaggacaccgatcatctcgctggccgcggcgaccgccatcgtccagccgatggacgagcggcgcaaatgggccttcaaggtcgttcccaacgacgacctgatggcgctcgcgattctcaagcacatcgccaagtccggggtgaaaaccctcggctacatcggcgtctccgacggctatggcgagggctattacaaggaagtgagcaggcttgctccgaccttcggcctgaccctgaccactcacgaagtctatgcgcgcgccgacaccagcgtgaccggccaggccctcaaggtcatcgcgacgaatccggacgcggtcttcattgcctcggcgggcactccggcagtgctgccgcagcaggcgctgcgcgagcgcggctattccggcaagatctaccagactcacggtgtggccaccgaggaattcatcaagctcggcggagccagcgtcgaaggcgccgtcttcaccggcgaggcgttcacgatcgccgatgacctgccggcggacgacccgttccgcaaggttcgggatcaattcgtgtccgcctacgaaaaggcgaacgggcagaagccgaacatcttcgcggcgcatctgtgggattcgatggcgctcctcaagacggcgataccgaacgccttgaagacggcgaaacccggcacggcagaatttcgcaccgcccttcgcgacgaactcgagcgcgtcaaggacgtatacctgaacaacggcctctccacgatgaccgcaaccgatcataacggctacgacgagcgctcggcgtttctgatcaaggtggaaggaggccgcttcaggctgatgaagtag

SEQ ID NO: 7358 - DNA, 330 bp, BradyrhizobiumColbertium
atggggtcggaatggcttacgggaaactcgatcgtccgggtcgtcgtttcgcaccatgaattccagaagatcgagtggcacgttttcttccaggagttctattcgttcgacggtttgaaggaagtccccgcgccgaagtcgaaggtcccgctgttctcgacgaaaaaatacaccgagcgccgcgtcgcgaccacgatgaggcagttctggctcaacaagcagggacgttggatgatcgtcgcggttccgaagccgacctcgcccgccgcccagctcgtggcaacgaccgtcaccaacgaatgcccgggcgcgcgattcaacatccagtga

SEQ ID NO: 7359 - DNA, 837 bp, BradyrhizobiumColbertium
atggcaatcagggacatcttgctcacgctcaccagctatcccgacccgaccccggtcgcggtgatcgaccgtgccgtatcgctggcctctctcctcggcgcccacatcgcgtcggtctcctgcgaagttcatgtgcaggtgcctggcagtttcctggcgggggccggcaatgtcggggcaatagtggccagcgaggcccacaagagccggaagaatgcccaggatctgctggcgaccttcgaatcgacggcacaaaaatccggtgttgcgcacgagctcgttctcgatcgttgtttgtcgtccgaggtgccgggcgttctggtggaatatgcgcggcttcgcgaccttgccattgtgccggtgccggaatcttacgatcaatggtatgctgaatcgatcatcttcggttcagggcggccgaccgtcgtgcttccggaagcgtcggcttccagggagttcgaactgaacagggttcttgtcgggtgggatttcagccgcgcggctgcgcgtgcaatatctgatgccattccgatcatggagaaagcgcgcgaggtctgcatcctcaccgtgaccaacgagaagacgatttcgagccgacgctcgtcgtccgaactcgccaagaacctgtcgaagcatggcatcgacgtcgtcgtggaggaggccgatgccgctggacgggcgatcggtagggttttcgccgagcaggtggcctcccgcagggcggatctccttgtcatgggggcttacggccattcccgtttccgggagttcgtattgggaggcgcgacccggagcatcctgacgaagccgccaattccggtgctgttgtcccactga

SEQ ID NO: 7360 - DNA, 660 bp, BradyrhizobiumColbertium
atgggagagatcgaggtgcatgcgctgcgcgacgtcgacctcgacatcttcgaaggcgagttcgtcgtgctcctaggcccgtccggatcgggcaagtcgaccctgctgaatatcctgggaggcctggacagtccgacttcgggcgaggctcattggcgggatcacaatctggtcggcgcaactgatgcggagttgacccggtatcgacgtgaacacgtgggcttcgtttttcagttctacaatctcattcccagcctgacggtgcttgagaacgtcgcgctggtgaccgagattgcggacaagccgcttgagccgcgggaggtgcttgcgctcgtcgggctcgaaaagcggaccgatcacttcccctcgcagctgtccggcggcgaacagcagcgcgtcgcggtcgcccgtgccatcgtcaagtcgccggatgtgcttttgtgcgacgagccgacgggcgcgctggactatgagaccggcaaggtagtgctggcggcgattgcgcgagccaatgagcgcctcggcaccacaacgatcatcatcacgcacaatgctgcaattgcgggcatggcggatcgcgtacttcggctcggaggcgggcggatcgtcggcgaggagcgcaatgcgcatcggctctcggcagacgaggtgcactggtga

SEQ ID NO: 7361 - DNA, 2364 bp, BradyrhizobiumColbertium
gtgagcctgctcgatcgaaaactgctgcgtgacatcggcgcgatgcgagggcaggtgctgacgatcgcgctgctggtcggagccggcgtcgccgtcttcatcgggtcggtctccacctacgaatcgctcaacatggccgttgagcggttctacggggctgcgcggttcccgcagatcttcgtgacgctcaagcgggcgccgctgtcgattgtcccgcaactcgaatcgattgccggcgttgcgacggttgagccccgtatcgttcgtgaggtcatcgtcgattggccggctgcatcccagccggtgtcggcccggatcgtgtcgctcaaccatgcgggcgacgaaaggctcgcccgacttcacttgcgccgtggcacggcgcccgagccaggctctgcgagaactgcagcgattaacgaagcgttcgcggaagtcaacggagtgaatcccggcgacgacgtccgcgtcctgctcaacgggaaggtggaagctttccacgtctccggcatcgcgctttcgcccgaatatgtctatgccgtcaagccgggcctgccgattcccgacgatcggctctatgcgatcctttgggtcgaccgcagtgcggcggaagccgccttcgatatgaaggcagccttcaatgacgccgtcatttcgctggcgccgggcaccgatccgaagccggttatcgacgagctggaccgcttgcttgaacagtacggatcggtcggcgccgtccagcggcgggatcagccttctaaccgcttcctcgaggatgaactgaaccagcagaaggtgatgtcgaccacgatcccgttcatcttcttcggggttgcggcgttcctgctcaacagcgctctggggaggatcgtggcggtccaacgcgagcagattgctgcgttgaaggcgctgggttttccaacctcgacgctaactatgcactatctcaagctcatcctcgttatcgtgctgattggatctgcgcttggtgttggagccggctggagctttgggaaagcgatgattgcgagctatcaaagcttctttcgcttgcctgatctgccgtttcggctgacgccgtggtcgttggcgctcgggattgcgatcagcctggctgcggcatcgcttggcgtcctgactgcgctgcggcaggtcgtccggctggcgccggcggtcgccatgcggccggcggcgccgctgggctttcgccgctcgtggatcgagacacttctgccaggcaacgcgaccagatctcgcctcctgatgattttgcggaataccgccggacgtccatttcgttcgttgctgaccgtcgccggggtggcctttgccgtcccaatgatggtgttgggaatcttttggcgcgacgcgatcaatgagatgatcgacctgcagttcaacctggtggagcgcggcaacacgacggtgacgttcccgcaccctatggaccgggccataatgcgggatctggctcgcgagcccggtgtcttggccgtggaagggcagcgcatcctgccggtgcggctacgcgccggccagcagagttatttgacctcggtgatcggtctatccgcgggagatgagctgcggcggccgcatgacgcgacgctgcgcccgatcgcggtaagccccgacggaattacgctcacacggcggctcgccgaacgactcgacgcgaaggccggtgacatcctcacggtcgaggcgatggaaggacgacgacggaaacgcgatctgccggtcagtgccatcgtcgacgaggcgatcggaatggcatcttacatggagatcgagaccctgaatcgctttaccggggagggtgcggtgatttcggcggcgagcctgtacgttgagccgactgcgatgatagccttggggcaaaggttcaagagcttgccgaccatcgaatctgtgacgatgaaggcgtatgcgctcacttcgttcatggagaagatcgccgggctcgttttcgtgaccgccggaatccttgcggccttcgccaccatcatcacggtaggggtcgtctacaacagcgcgcgcatcagcttgcaggagcgcgcatgggaactggccagccttagggtgctgggctttacgcgcggcgaggttgcgagcatcctgttcggcgagttcgctatcgagatcgcgctggggattctgatcggcctgccgctctctcatgccgttatcgagctgatcgccagatttcactccaacgagagcttccagatacctgccgtgatcgccccgcagacttatctcattgccgtcggcgtcgtcctcgctgcggctgccgccagcgcccgcattgtcaaaggccgtgttgatcggatcgacttggtcgcagctctcaagaccagggagtaa

SEQ ID NO: 7362 - DNA, 1200 bp, BradyrhizobiumColbertium
atgcacgtcacgggccgtcatatcgcaattgctgccggactcttggccgccgccggcgttacggcctggctcctggttccggcctcagtgccggtcgagaccgcagctgtgacaaaggggaggttcgccgccactgtcgatgaggatggcaagacgcgcgtccgcgagcggtacgcggtcgccgcgccgcttgcggggcgcttgagccggatccggttcaaggttggcgatcaagttcaggtcgacgacgccatcgccacgatcaccccatccccagcgcccctgatggacccccggacccgccgagaggtcgaggagagattgggagtggccgaagccaatctggagcgcgccagggcggtcgtcgagcgggctaaggcccagagcgatcacgccaataccgatttgaccagggcgcggacgctggctcagcaaggagcggcgacgacgcaggcgctcgagcgtgcagagcttgcggtgcatctcgccgaccgggatcttcgggcggcggaatttcagaatcatgcggccgagcatgagatcagccaaatgcgcgcattgctggcccggtacggcaatgatggcaacggccacccggatagctggaacgttgtgtcgcctgtcgccggcgtggtgctgaaggtcgcgcaggaaagcgaaacgatcgtgcagccgggtacgctcttgcttgacgtcggtgacgccagagatctcgaagtcgtggccgacgttctcagcaccgatgcggtggagatccgccccggagccgacgtcgacatcgacaattggggtggggagggaaaactgaagggtcgggtgcgccgggtcgagccggcagctttcacgaaggtctcgacgctcggagtcgaggagcaaagggtcaatgttctcgtcgacatcctctcgcccgcgaagcagtgggcacgactaggagatggctatcgggtggatgttcagatcaccgtcctcgcgcgggacgaagccacgatcgtcccgtcgggcgcgctgtttcgtcggggtgaaggctggaatgtctatgttgcgaagggcgggcgggccgaactgcgccaaatcgaactcctgcgccggtccggccgcttcgcggccgtcgcttccggccttgcgcctggtgaagaggtgatcgtctatcccagcgaccgagttgcaccggacgtgcgtatcgcacccagatcaccgtga

SEQ ID NO: 7363 - DNA, 1140 bp, BradyrhizobiumColbertium
atgcttaagatcagcaccgatctgcatccgcccggccgggagaagcccatgaccgaaaccatccgcatcaagcgcttccaggcgcgtcccgtgatcgtgccgatgaacctgccgctccagaccgcgaccggcgcggtcgccaaggcgccgctggtgctgatcgactgcgagaccgatcagggcgcagtaggccatgcctatctgttctcgctcacaccctcggccttgcggccgctggcggcgatggtcacggagatgtcagatcttctcaccggagacgagttgctgccgttcgagatcgaacgcaagctggcccagcgcttcacgctgctgggcctcgccggcctgcaacggctggcgcaatccggcatcgacatggcggcctgggatgcgcttgcgcgcacacgcagcctgccgctggcgcgcctgctcggcggcgcaccgaagccggtcagggcgtacaattcgaaggggcttggcatcatgccggccggcgccgctgtcgaggaagcccacaagttgctggccgaaggcttccaggctgccaagatccgcgtcggccggcccgatgcgcgggaggatctcgcggtcgtgcgcgcggtgcgcaaggccgtcggagatcaggtcacgctgatgtgcgactacaaccaggcgctgacggtgaccgaggccatccgccgcggcgagatgctcgacgacgagggcctcacctggatcgaggagccgatccgccatgacgattatgccggctgcgcccgcattgcggacgcgctgcatacgccagtgcagatcggcgagaatttcgacagcgcgttttcgatgcaatccgcactctcggcggaagcctgcgactacgtgatgccggacgttcaacgcatcggcggcgtcaccggctggctccgtgccgcggcgcttgcgcacgccgccggcatcgagatgtccacgcatctgttctcggaagtgagcgcgcatctgctctgcgtcacgccgaccgcgcattggctggaatatgtcgactgggccgatgcggtgctggcaacacgattgaagatcaaggacggcttcgcactgccgagcgaggagcccggcaacgggatcgcatgggacgaggcggcggtgaagaagtatctggtcggttag

SEQ ID NO: 7364 - DNA, 1563 bp, BradyrhizobiumColbertium
gtgaaacaagagatctccgaagaacagcgcaagagcggcattctcacgggcgccgtgatcgtcttcctcctgcttgccctgcccctggcagtgtggctggacctgaccgagctgagcagtacggcgctgcgccgccaggcggtcgatctcaattcagtgatcacgagcgtgcgcagctactacgcatccaacgtggtcgggcgcgtgctcgccaacccgaacgggacgaccaaggtcgtgcacaattatgaatccgttcccggcgcgatcccgatcccggcgacgctctcgctcgaactcggccgggtgatcggtgcgcagcaggagaacatcacctaccgcttcgtctccgacttcccgttccagaaccgggcgccccaccagctcgacaagttcgagaaggacgcgctggaggcgcttcgaaaggatcccgaacagaagatcgtcgacaccgagacctccttgttcaacgacaaggtccgcctcgtggccccggtcaccatgggtcccgcctgcgtcagctgccacaacagccacccggaaagcccgaagaaggactggaaggtgggcgacgtccgcggcatccaggaggtgatcattgcccagccgatcgccgccaacatcttctcgttcaagtttctcctggcctatttcgtgattgccgccggcagcggtctggcgttcctgtcgctgcagcgccgccaggcgcttcgcatcaagggtatgaacaaggagcttgaatccgccaacgacttcctggcctctctgtcgatgaaaatctcgcgctacattccgcctcaggtctacaagagcatcttctcgggccagaaggacgtcaccatccacaccgagcgcaagaagctcaccatcttcttctccgacatccagaacttcaccgcgaccgccgagcggctccagccggagcagctgacgcagctgctcaacgaatatttcacggagatgtcggcgatcgcccacgaatatggcggcacgatcgacaagttcatcggcgacgccatgctgatcttcttcggcgatcccgagacccggggggaccgcgccgatgcgcaggcctgccttcagatggcctggcgcatgcagcagcgccttgccgagctcaatgcgaaatggcgcgcgtccggcatcgagcagccgttccgctcccgcatgggcatcaattcgggctattgcaatgtcggcaatttcggcagcgccgaccgcatggactacaccatcatcggcgcggaagcgaacctcgccgcgcgcctgcaatccatcgccgagcccggcggtatcgtcttgagctacgagaccttcgcgctggtcagcgacgtcgtgcgcgcccatgcgctgccggcgatcaccatgaagggcatcagccgagaggtgattccctattcggtggatgcgctgaacgacgctgcggcggcgaacagcggcatcatcaccgagcgcgcgcccgggctcgagctctatctcgaccccgcggtggtgagatcaggcgatgccgcgcgtgtccgctcgctgctggagaacgcgctcgccacgctgaagccggcatga

SEQ ID NO: 7365 - DNA, 954 bp, BradyrhizobiumColbertium
atgccccacagggcccgcatcacgatgaagaattatctggcatttttcctccttctgaccatgaccacggcctcggcgcacgggcctttgccgcaccggctggctgcgccgtccgatctcgtccgggcgggcctcaccgattccgacaccacggccggcggcaccgcgcggctgtgcgagcaggtcaccttctcgcgcggtctgcgctacggcgagagcgaggccaacgtgctggatgtcgcgaccaacgcgaccaaggccgacacgccacggcctgtgctgctgttcgtcgcgggcgacaccttcaccggcgaccgcgcggcgccggagctggcccgtcagatccaggatcaggtcatgtgctttgccgcacgcaacggcatggtcggggtccgcgtcaactaccgcctggcgcccgcggcgacctggccggccggcgcctccgacgtggcgtccgcgctatcgtgggtccacggcaatatcgacctgttcaacggcgaccaccgcgagatcgtcgcggtcggatacggtgccggcgcgttccatctcgcaacgctgctggcgcatcccgagctgcagaccgacggcgccgacgtcgccggcgtcgtgctggtgtccgggatctaccgcgtcggcaaggacgcgagcgacagcgagaaggcctatctcggcaccgatgccgcccagtacgacaagcgctcggtcttccccggcatcctcaatgtcgatgtgccgatcgtgctggcctgggccgcggatgattccgccggcctcgtggcgcagggcgaaaccctgaagaagacgctctgcggcgccggccactgcccgcgcagcgcattgctgcgcagccgcgacggcattgcgagcgccttcggcctcgacggctccggcgacagcctcgccgaacccacgctcctgctggtgcggcagctggaggcgcggggactgccgtaa

SEQ ID NO: 7366 - DNA, 561 bp, BradyrhizobiumColbertium
ttggccttgttcggcggcggcgaagacggccctgcggggctccgctacacggacgacttcatcaacgccgccatcgagcaggacctgatcgatcgcatcgcagcattgccgctgcggcgcttccagttcggggccttcgaaggcaaccgccgggtcgcctcgttcggctatcgctacgattatgcgctgcagcggctggccgaggcggagccgatcccggattgggtgacgcccgtcgcccgccgggtcgaggcatgggcggggctgccggaggccagcgtccggcaggtgctgtgtaccgagtacgaggtcagtgtcggcatcggctggcaccgtgacaagccgcatttcgacaaggtcttcggattgtcgctgggctcgccctgcaagttccgcttccgccgccgcagcggcgaccggtgggaacgccacacgctcgaggccctgccgcgctcgctttacatgatggacggcgaggcgcgctccgtgtgggaacacagcatcccgcccgtcgaggcgcggcgctattccatcaccttccgcacgatgaaacggacctga

SEQ ID NO: 7367 - DNA, 141 bp, BradyrhizobiumColbertium
atggcagagaagcattccgccgatccggcagagatcatgcgagcgaccggccatcccgagttggaatatgccgcaggctggaccatcgctggtctcgtgaccatcgccaccatcgtcgccgcctgggtgttcgccatctag

SEQ ID NO: 7368 - DNA, 1587 bp, BradyrhizobiumColbertium
atgagcgcggcgcccgacaaatggcggccgtcgcttgggctcgtcatcttcacggtgctggccacggtcgccatcctgccgctggtcggtctgttcttcttccgcctctatgacaaccagctgatccgccagacccaggccgaactgatcgcgcagagccgcgtgctcgcgacgatctatgcgcaggaggtcgcggcaagactcgacagcggcctgacgctcggtaccgaggtgcccccgggcgtgctgcccgatcccggcgaccaggtcacgccgattcgccccgcgctcgatctcaccgccaacgacctgctgcggcgtcggcccggtgcccaagcagcaatccggccggcgcagcctgcctttgtcgagatcggcgcaagattgacgccgatcatccgcgagacccagaaggtgaccctggcaggttttcgcatcctcgatccgcaaggcgttgtgatcgccgggcggcaggagatcgggcaatcccttgcgcatatcgaggaggtcgccgatgcactgcacgggcagtaccgcgccaccttgcgcaatcgtgtgccggacaagccgccgccgccgatctactccttcagccgcggccttggcgtgcatgtgttctcggcgatgccggtcatcgtcaacaaccgcgtcgccggcgtgatctacaccacgcgtacgccgagtaacatcttcgaccatctctaccaggagcgggccaagttcgtgctggccggccttgccgtcatcctcggcacgatcgcaatcggcatcgtcttctcgcgcaccatcacgctgccgatgcgcgaactgatcgaccgtgccgcccgaatcggccgcggtgaccgcgaggcgttccagccgctccggcactacggcacgcgcgagttcgcccagctctcgcacagctttctcggcatggccgagcaactggcgcggcgctccgactacatcgcgacattttcggcccacctcacccatgaactgaaatcgccgctgacctcgatcaagggggcggccgagttgttgcaggactccgttcagggcaaatcgggcggcctgacgccggccgagcagaagatgttcatcgccaacatcctgtcggacacccaacggctggaagcaatggcacagcggctgcgcgagctcgcccgcgccgaaagcctgccgcaaaacgagcgcaccgagcttgcccccgtcattgccgatctcaggagccggttcccggcaggcgacatctcggccagcggcgacctcgaccgcccggtcgcgatgtccagcgagaaggcgctgatcgttctgtcgcacctcgccgacaacgcgatgcggcacgaggcgaggtcaatccggctggaggcggccttcgagcgcacgaccctgctgctgaccgtgagcaacgacggcgaaccgatctcgccgccgaatcgcgacaggatcttcgacgcgttcttcaccacccgccgcgaccagggcggcaccgggatgggactggcgatcgcgcgcgcggtgatggcgagccatggcggctcgatcaggctcaagcccaccgacaagggcgcggccttcgaactccaattcccggcagcctag

SEQ ID NO: 7369 - DNA, 705 bp, BradyrhizobiumColbertium
ttggcgcatcgcattctcatcgtcgacgacgagatccatatccgcgaggtcatccgtgtcgccctcaagaaggcgggcatggacgtgatcgaagcgcgcgacggcaaggaggcactcgcccgctttgccgccgacaggccggatgtgatcgtgctcgacatcggcctgcccgaattcgacggcctcgacgtctgccgcgagatccgcaagacgtccgacgtgccgatcctgtttctgtcggcgcgcgacgaggagatcgaccgcatactcggtctcgagatcggcggcgacgactacgtgacgaagccgttcagcccccgcgagctagtggcgcggatcaatgtcatcctgcgccgcctcagtccgcgcaatggcgaggccaagtccggtccggccgcgctcgtgcaaggtgggctcctgatcgatcccgagcagcacgtggcttcgtttgcagggacgccgctgaagctgaccgcgatagagttcggcattttgcgcgccttcctgacccggccaacgtctgtgttcaaccgcgaacagctgatgcgggcggcatatcagctcaatatccaggtctccgaccgcaccatcgacagccatatccgcaacatccgcgccaagctcgcggcgctcgcctgcgagaacgtcatcgagaccatccacggcgtcggcttcaagctcggacgctgcgagaaagaggcatga

SEQ ID NO: 7370 - DNA, 1509 bp, BradyrhizobiumColbertium
atgaccagcctgccttcgacatcgacgacggacatccaaccgatcgggccttccgcgctgccggtccaactcacaatggccttgctgctcgcagcactcgccgattggctcttctacggccagcggctcgggttttcgctggccatctttgtgatcgcaatcgcctgtgcctcgatgttcacaaaccacgcgatgctgaatcttcggcgcgcggcgattggaggtgcgattctcgcgctcggcctcgtgcccgcgatggaagagatcaacgctctctcatttccgatcctcgccgcagcgctgctcgtcgccctgctgctcacgacgaatccagacacggcaggacttgtagaccgcgcccgcgcccttcgagatttcatcctgctcggcttctttcgcttcttgccggatgtgctcaaggtcttcgacaaggcagctttcgctaaaggcatcgcgctgtggctgatgccgatggccctgagcaccgtattcgtcacactgttcgccgcggccaacccggtgatcgagcagtgggtatccctgctcaatccgaaggttgtcctcgagcatgtcagcgttccgcgcgtgctgttctgggccttgatgctgacactggtctggccattcatcaatgtgcgctggcgaagccggaagatcgctgtcgacgcggcagccaatgtcgccgagccggagcctgttgcgcccctcgtctcgccagatttcttgggcccctcgaccattctgcgatcgctcatcctgttcaacctgctgttcgcggcccagaccgtcctcgatggcatctatctctggggccatgtggcgctgcccgacaatttgacctatgccggctatgcccatcgcggcgcctatcccctgatcgcgacggcattgctggccgccgccttcgtgctggtggcaatgcgcccgggcggcctggcagagaaatcgagggtgatccggccgctggtctatctctgggtagggcagaacgtgcttctggtcgcctcgtccatccttcggctcgatctctacgtcgacatctacatgctgacctactggcgcatcgccgccttcatctggatggggctggtggcgctcggcctgatcctgatcgtcgcgcgcatcgtgctcgacaggtccaacctatggctcgtcggcgccaacctcatcgcgttgtcgatcgtgctttatggctgctccctcgtgaacttcgatgcgttgatcgccgactacaatgtcgcccacagccgggaagcatcgggcaaaggcgtgcagttggacatcgattatctgctgacactcgggccgcaagcgctgcctgccatcgacaatgcgatggcgctgcggcccggcgccggccagggcagccttgtgtcacgccgcgaccgacttgtagaacagcaacgtcgggacctggcctggcgaagctggggatttcggagctggcggctccagcgcaggctggacgcgcaggcgagagctcagtccggcagcggtccggcgggctga

SEQ ID NO: 7371 - DNA, 1344 bp, BradyrhizobiumColbertium
atgcagttactccgacgtatcggtctcatcctgcttcggctggccgcgcctgtagctgcattcgcggccgcgaacaagaacgatccctatctggttctgctgcgcggcgccggaaacatcgcgcttgtctttgcaagcatcgcgattgtcatcgtcctgtggcgcagggggcgatggcgaagcattgcaggaaagctgctcgtcatgctttggtgcttgccgccactgctgatgtcggcggcgcatgtcaggttcgagctgcgcaagcacgctgtcctcgcctcgagtgaccccgaggcgcgacagctcggacctcacttcatggtcggctattcatcgttcccggaagtcgcgcgccttgccgagaagggattgatcggcggcgtctacatcacccggcacaacatccgggcgcggacggtcggggcgctacgcgccgagatcgcgacgctccaggatatcaggcgcaccgccggcctgccgccactgttcgtcgccgcggatcaggagggcggcatcgtcggccatctttcaccgccgctgacgaaagttccggcgctggcaacactcgccgggctcgcgccagacgagcagcaggccaaagccgaagagttcggccgcattcatggccgcgaactcgcggatctcggagtcaacctcaacctcgcgccggtgctcgacctgaagccgccgcccaggcgcaatcgcctcgatttccatacgctgatcgggcaacgtgcgatcgcgaccgatcccgtcgtcgtgggcacgatcgcgaccgcctatgtgcgtgggctggaggaatccggcgtcggtgccacgctgaagcattttcctggcatcggccgcgtggacggcgacacccaccacttcagcgcaaaccttgatacgcccgtgacggagctggaggcaacggactggcgcccgttccgggaggtgctgtcgcgttcgcgcagcgcgctcatggtcggtcatgtcacgctcaccgccgttgatcccgatcgcgccgcctcgcattcgaaacgcgtcgtccagggcatcattcgcgacaagtggaactaccacggcgtggtgatgaccgacgatctcgtcatgggcgcgatctaccagaacgacgtctgcaaggctgtggtggaggcgatcaatggcggggtcgatttgctgctggtcgcctatgacggcgtgcagttctaccgtgtctttgcctgcgcgctcgagggatcgcggcaggacaagctcgatgccgcgatgctgcgcgccagcgcggggcggctggacagtggccgtccggtcgtgcaggcccggactgtttcgcgagcgatcagcgccgatcgtcaggaatag

SEQ ID NO: 7372 - DNA, 1272 bp, BradyrhizobiumColbertium
atgtatcaccacgtcaaaaagctgatgttcactgtgcgcgtcgatgaacccgatccgcgcttcggcaatatgctcctcgagcagttcggcggcgccaacggggaacttgcggctgcgatgcaatactcgattcaggggctgaattgcgaggatcctgatcgcaaggacctgctgatggacatcggcaccgaagagctcagccatctggaagtcgtcggctgccttgcccgcatgcatctcgcgccttcgaagaacgaccgtcaggccgccgaggccgatccgctgattgcgattgccggcgggggaggcgtcaatctgttcaattcgcagggcaatccctggaccgccgactatctcaagatcaccggcgaactcgacgtggacctccgcagcaacatcgcggccgaagcgcgcgcgaagatcgtctacgagcgactgatcaatttctgcgacgatgccggcagcaaggatgcgctgcaattcctgatgacgcgcgagatcacgcatatgaaggcatttgcgcgcgcgctcgaaagcctgtcgaagccggccttcagtgtgggcaggattgcgccgacgcccggcctggtgaaccagtacttcaacgactccacgggcagcggcgaccatggcgagatcgacacccgcggtccctggaacgaaggagaggactgggtgttcacggaatcgcctgcgctgcaatcctcggatcccggcgctgcgaccccgatcgtcaccgagagttcaccgcccgtcgacgaggcgggcctgacggatctcctgctccacgaactccgcgacattctgcatgccgagaagcagctgacgaaggcgcttcccaagatggcgcaggccgcgcgcttcgaccaattgcgcgagctgttcgagcagcacctggtggagaccgagaaccaggtcgagcgcatcaacgagtgcttcgaactgctcggcgagaacgcccgggccaagccatgcaagggcatgatgggcctgatcgaggagggccaggaggtcatgaaggaaggcgaagataaggaggacgcggccgccgaccttgcgctgatctcagcggcccagcgcgtcgaacattatgagatgtccggctacaccacggcccgcaacctggcgcagcagcttcggcacagcgcgattgtcgccctgctctccaggtcgcttgccgaggaagaaaatgccgacctcctgctcaatcaggtggcgcggtcgctgatgtcggtcgcgaagatgcccgccgcgctggagcaggccgaataa

SEQ ID NO: 7373 - DNA, 207 bp, BradyrhizobiumColbertium
ttgtcgaaacaatccctgcgcgaggaggccgaacgcctgatccgcgagtcgatggaaaagaagaccatcgtcgtcaagcagggcacgacccgcatcgaggcgatctgcggcaaatgcggcgcaccgaaccgggtacaggcggagaagggccaaagccgcgtcaagttcgcctgcaagaattgcgggcacaagcaggagacgctgtag

SEQ ID NO: 7374 - DNA, 846 bp, BradyrhizobiumColbertium
atgccacatcccgccatcgtcagagacaacgttgccgttatcacaggcggcgcgtccggcatcggatttgccgctgccaccgcgtttgcgcgcgctggaatgaaggtgtgtatcgcggacgtcgacgagacacggttagcagaagctgcaacaaaactgtcatccatcacggttgccacaaacgtgatgagttcagtcgtcgatgtcagcgaggccgagagcgtattggaactggagcgcacggtacgcgggcggttcggcggcaccgatgtcctcatgaacaatgccggcatccagccgggcagcacattgttcggcgatcccgacaattggcagcgcatcatcggcgtcaacatgtggggcatcatcaacggctcgcggatcttcgcgccgaacatgatcgcacgcggccggtgcggcctgatcatcaacaccggttccaagcagggcatcaccacgccgccgggcgaccccgcctacaacgtctcgaaggccggcgtgaaggcgttcactgaggcgctccaacacgagctgcgcaacacgaaagattgccaggtctcggcacatctattgatcccgggcttcgtcttcaccggcctgacggcgaagggacgcagcgagaagccggccggcgcctggacgccggaacagaccgtggatttcatgctgatgcggctggaggcgggcgacttctatatcttgtgtccggacaacgacgtaccgcgcgccctcgacgagaaacgcatgctctgggccgccggcgacatcgtcgagaaccgcccgccattgtcacgctggcatccggactacgcggacgcgttcaagacgttcgtggaggggaagtga

SEQ ID NO: 7375 - DNA, 1497 bp, BradyrhizobiumColbertium
atggctgtatcgcaggctattccgatcacgcgtcatccgttcgccaacggatcgtacaagcagatgctgatcgacggaaaatgggtcgatgcagcctcgggcaagcgcttcgagacccgcaatcccgccaccggcgagctgctcgcaaccgtcgccgaaggcgacaaagaagatatcgaccgcgcggtggccgcggcacgccgcgccttcgaagggtcctggagcaaggtcaagcccttcgagcggcagaacctgctcttgaagctcgccgatctcgtcgagagaaatttcgacgaattgtcacagcttgatacgctcgacatgggtgcgcccctcagccgcacccgcgcctatcgtctccgcgccgtaggcatgctgcgttactacgccggccagacgaccgcgatccatggcgagaccatcgagaactcgctgccgggtgagatcttctcctacacgctgaaggagccggtcggcgtcgtcggcgctatcatcccctggaacggaccgctgacggcgacgatctggaagatcggtccggcgatcgcgaccggctgcaccgtcgtgctcaaacctgccgaagaagcgccgctgacttcgctgcgtatcgccgaactcgcgatggaagccggcgtgccgcccggcgtcatcaatgtcgtacccggctatggcgagaccgcgggcgctgcgctcgcatcgcaccacgatgtcgacaaggtcgccttcaccggctcgcatgttacgggccagtcgatcatccgtgcctcggccggcaacctcaagcgcgtctcgctcgagctcggaggcaagtcgcctgacatcgtcttcgcggatgccgatctcgacgcagccgtcccgggcgccgcgatggcggtgttcgccaattccgggcagatctgcagcgccggcacgcgcctgttcgtcgaacagtcgatctatgacgaattcgtcggtcgcgtcgccgagttcggcaagaagctgcaggtcggcaacggcctcgatcccaacgtgcagatcggcccgctcgtctccgagcagcagctcgaacgcgtcaccggctatctggacatcggccagaaggaaggcgccagggcgctcgccggcggcggccgcgtcaccgaaggagctttgtcaaagggcttctttgtctcccccacggtgttcgcgggtgttgaagacaacatgcgcatcgcgcaggaggagattttcggacctgtgatctccgcgatcgccttcaaggacatggacgagctggtcaagcgcgccaacaacaccacgttcggcctcggctccggcttgtggacgcgcgacgtcagcaaggctcacgctgtggcgaagagtctgcgtgccggttcggtctgggtgaactgctaccaggcgatggacccagccgtgccgttcggcggctacaagatgagcggctatggccgcgagtccggcaagcagcatgtcgaggaatatctcaacgtgaaagccgtctggatcaagaccgcctaa

SEQ ID NO: 7376 - DNA, 504 bp, BradyrhizobiumColbertium
atggccaaagccgcagcagccgcgggcatagccaccggccagtgcctctgtggcaaggtcaccttcgaaatccacgttcccgcgcggtgggcctggcatgatcattccgccgccagccgtcgcgcacatggcgcggcctacgcaacctatgtcggaagctggaagaagcgctttcgcattaccgccggcaagaccgcgctcacgcgctacgaggacaaggcgacgaagaccgcgcgcagcttctgctcgcattgcggcacgccgatcgcctatgagcgaccgcgcggcccgcacatggtcaacatcccccgtgcgctgttcaacgagcgcaccggccgccagccgctctatcacatcgccatcgaagagctgcaggaatgggcctacactggcgagccgctggtgccgctcaaggggtttccgggcgtggtgtggcagcgatcgaaaaagaggatgcgtgcgcgcggcggtgatccgttcgaactgggaccgggagagatgtag

SEQ ID NO: 7377 - DNA, 1662 bp, BradyrhizobiumColbertium
atgaagaacaagatcaccggccgttccgcctttctcgcgctgctcgaggacgagggcatcgcgcaccttttcggcaatccgggcaccaccgagctgccgatcatgcatgcgctgaaggatcatcctgacctcacctatgtaatggcgatgcaggagagcctggtggtcgcgatcgccgacggatacagccgcgcctccggaaagctcgtggcctgcaacgtccacgtcgcgcccggcctcggcaatgccatgggctcgctctacaacgcgcagttcacgggcacgccgatgattctcacggccggccagcaggagcagggccacggcctgatggagccggtgctttacggccccttggtgcgcatggccgagccgctggtgaaatgggcggtcgaggtgacgcggttggaagatctgccgcgcatcgtgcgccgtgccgccaaggtcgcaacgacgccgccgaccgggccggtgttcatttcgctgccgggcgatatcctaaacagtgaagccggcatcgatctcggccggtccacccggatcgatgcccgcacgaagccatcggacgaggcgctgaaggcctttgccgcgcggctgctgaaggcggagcgccccgtcatcgtcaccatggacgaagtcgtcaagagcgatgcgttgaaggaggctgccgcactcgccgaattgctcggcgcggcagcttaccagtcgtcgacgccatacggggcgcacttcctgtcggagagcccgagcttcgtcggcactctggcacgcgtgcagaaggtcgcgcgcgatacgcttgcgccttacgatctgctgatcgcgcttggcggcgatcccttgcggatgtcggtctatagcgaggtcgatgcgctgcccgatggcctcggcatcgtgcagatcggtctgctcgattgggaaatcgccaagaactacggcgctgagatcgcattgaaggcggatctgaaggaaacattgcgcgcgctcatcccggtgctgaaggagatgggcggcgcaacactggcgagcaaggcgaagcagcgcctcgccgagctcgcgccgaccaactgggccgcgcggcgtgccgctcttgtccaggagatcagcaagagcgcggaccgtactccgatcgatcccgattttctggtgctgcagatggtcgaggcgatgcctgacaatgccatcctcgtcgacgaaggcctcacctccagccgccagatcacggcgctgcgcccgcaccgcgaccgctacggctatcacggccttgcctccggcggcatcggctggggtctgccggcgtccgtcggcgccagcatcgccaacccggatcgtccggtggtgtgcttctcgggcgatggcagcgcgatgtactcgatccagtcgctgtggaccgcggcgcaccacaagctgccgctcaacgtcgtcatcgtcaacaatggcggctaccgcatcatcaagcagcggctgctcgccttccatggcgacgacaattacgtcggcatggacttcgtcgatcctcccgtggatttcgtaggcgtcgccaaggcactgggctgcgaggcgatcaaggtcagcgacccccgcgagctgaaggcgacgctggcgtcggcgttcggccggcctgggacgaagctgatcgaggtgatggtggacggcaaggtgtag

SEQ ID NO: 7378 - DNA, 1380 bp, BradyrhizobiumColbertium
atggccaaagagatcaggctcaacgcatttgcgatgaattgcgtcgcacaccaatcacccggcctgtggacccatccgcgcgaccgcaccgccgactacaaccgcctgccctactggatcgatctcgccaggacgctcgagcgaggccgcttcgacgggcttttcctggcggacgtgctcggggtctacgatgtctatgacaacagccctgacgcagccttgcgcaatgcagcacagacgccgtcgaacgagccgctgttgctgctctcggcgatggccgccgtgacgcaaaatctcggtttcggcgtcaccagcaatctatccttcgagccaccctacccgttcgcacggcggatgtcgacgctcgaccacctcaccgaagggcgggtcggctggaacgtcgtcaccggctatctcgacagcgccgcacgcggcgccggcaaggacaagcagaccgggcatgacgaccgctacgacatcgccgacgagtatatggaggtcgtctacaagctctgggaaggcagctgggaggatgacgccgtgctgcgcgatcggacgcgcggcatcttcaccgatcccgcgaaagttcatcgcgtcaatcatgagggcgcgaacttccgtatcaacaacacgattcatctcagcgagccgtcgccgcaacgcacgccggtgctgtaccaggccggcacctcgccgcgcggccggcagttcgccgcacgtcacgccgaatgcgtgttcatgtcgggaccgtcggccaaggtgatcgcgccacgcgtgtcggcgatccggcaggaggccgctgcgcgggggcgaaatccggccgaaatcctgatgttctcgatgatgacgatcatcctcgggcggaccgaggctgaggcaaaggaaaaatacgccgattaccgccgctacatcagccccgagggcgcgctggcgctgatgtcgggatggaccggcgtcgacttctccggctacgacctcgaccagcaggtccgccacgtccagaacgacgccggccgcagtgcgatggacaatgtcacccgggccgatcccgaccgggtctggaccgtgcgcgacgtcatcgagcatgtcggcatcggcggcgccggcccggtcgtggtcggcaagcccgagatggtcgcggacaagatcgaagagtggttcgaggcgaccgacgtcgacgggctcaacgtcgcgttcgcagtctcgcccggtgatttcgaggatatcgccgacatgctggtgccggagctgacccggcgcgggcggtacaagccggaatacgcgaaaggcacgctgcgtgagaagctgtttggcgcgggccgggcaagactcgatgcgaaccatccggcggcggagtatcgggtggggaagaagggatag

SEQ ID NO: 7379 - DNA, 1410 bp, BradyrhizobiumColbertium
atgaccagagccgacgccatcgcccgcgcccgggacgacttcaaatccggtgcgtttctcgctgaactcgaccgtcgcgtcgcgtatcgcaccgaaagccagaatccatcgcgcggcgccgagttgcgcgcctatctgaatcaggagatgcagccggccttcgccgcgctgggcttctccagccgcatcgtggaatcgccgagcggtaaggcgcccttcctgctcgccgagcatcacgagagcgcgtccgcgccgactgtgctgatttacggccatggtgatgtcgtcgatggcatggagggcgagtggcgcgagggccgtgatccctggcgcaccaccgtttcaggcgcgcggctctacggccgcggcaccgccgacaacaagggccagcacagcatcaacatggcggcgctccgcgcggtgcgcgaggctcgcggcggccagctcggcttcaacgccaagttcatcatcgagatgggtgaggagatcggctcgcccgatctcggcaaggtctgcgatctccatcgcgatgcgctcaaggccgacctgttcatggcttccgacgggccacgcctgtccgccgaccgccccacgctctttctcggctgccgcggcggcatccgcatccatctcgacgtgaacctgcgcgatggcggccaccattccgggaattggggcggcgtgctcgccaaccccgcgaccatcctggccaatgcgatctcgacgctggttgatgggcagggccgtctcctgctcgatgccttgaagccgccgcggctcaccaatcagatccgcagctatctcgccgacgtgcaggtggtgccctcggcggacgagccggcactggcggagaattggggcgaggaggggctgtctgccgccgaacggctctatgcctggaacacgctggaagtgctcgcgatgtcctcgggcaacatcgagaagccggcgaacgctatccccggtcaggccaatgccgtgctgcaactgcgttttgtggtcgggaccaagatcgagggcctgatcgaggcgatccaggcacatctgaccgcgaaaggttttccgatggtcgaggtgcgggcggcccagagttttgctgcatcgcgcacggattttgacagcccctggatcaaatgggcggcggaatcggtgcaggcgaccacgggcaaggccccggcggtgctgccgaactttggcggatcgctgcccaacgacgtattctccgaaatcctgggcctgccgacgatctgggtgccccactcctatcccggctgctcccagcatgcgcccaatgagcacatcctgctgccattgaccgaagaggccttgacggtgatggccgggctgttctgggatctcggcgaattgccaaaaccactagcaggaccgcaaacaggcccgttaacctga

SEQ ID NO: 7380 - DNA, 912 bp, BradyrhizobiumColbertium
gtgaaacatttccgtagcatcgggctcgcgctcgccgcgaccttcgtcgtcagccaggccggggcccagcagctgaccggcacgctgaagaacatcaaggacaccggcgccatcacgctgggcttccgcgactcctcgatcccgttctcctacctcgacgacaaccagaagcccgtcgggttcgcgatggacatctgctacaagatcgtcgatgccgtgaagaaggagctcaagctcgacaagcttgaggtcaagctcaacccggtgacgtcggcaacgcgtatcccgctgatggccaacggcaccatcgacctcgaatgcggctcgaccaccaacaacgccgagcgccagaagcaggtcgccttcaccaacacccacttcctgacggcgagccgctacgtcttcaagaaatcgagcggcctgaagtccattgacgacctcaagggcaagacggtggtctcgactgccggcaccaccaacatcaagcagctcaccgaagccaacgctgcgaagggcctcggcgccaacatcatcccggccaaggaccacgccgaagccttcctgatggtcgagaccgatcgcgcggtcgccttcgtcatggacgacatcctgctcgcaagcctcgtcgccggctcgaagtcgcccggcgactatgagatatccaaggacgcgttctccaagcccgagccctacggaatcatgctgcgcaaggacgaccccgccttcaagaaggtggtggatgcggcaacggcggcgctctacacctccggtgaagcccagaagatctacgacaagtggttcatgcagaagatcccgccgaagggcctgaacctcaacacgccgatctcggcccagctgaagaacgagttcgccaagccgacggactcgccgaatccggacgactacaagtaa

SEQ ID NO: 7381 - DNA, 756 bp, BradyrhizobiumColbertium
atggcgcgttcgcgcgggggacacgtgaactacaactggaactggggaatctttttccagccgaatccgatggggaccggcacctatctcgatatgctgctgtcgggccttgcgctgaccctcaagaccgcggcgctggcctgggtcattgcgctgatcaccggctcgatcgtcggcgtcatgcgtacgctgccgtcgaaaggcgcgaactggttcggcttcgcctatgtcgaattttttcgcaacatgccgctgctcgtgcagttgttcctgtggtttttcgtgctgccggaattgctccccaaaggcgccggcacgtggctgaagcaactgccgaatgcgccgttctggacggccgcgatcggcgtcggcttcttcatgtcggcccgcgtcgccgtgcaattgcaggccggcatcggttcgctgccgcgcggacagaagatggcggcgaccgcgctgggtctgaccacggtgcagacctatcgctacgtgctgctgcccatggcattccgcatcatcctgccgccgctgacctccgaattcctcaacaccatcaagaataccgcggttgcgatcaccattggcttgctcgagctgaccggacaggcgcgctcgatgcaggaattctcgttccaggtgtttgaggccttcacggccgcgaccctcctttacctcctcgtcaacgcggtggtcgtgaccgcgatgcgcttcctcgagcgctgggtcgcgatccccggctacatcacggggaaatag

SEQ ID NO: 7382 - DNA, 693 bp, BradyrhizobiumColbertium
atgttcgccaatctcgatttcgacgtcatccgccgcgcgctgccctacctgttctatgaaggcatgacgttcacgctgacgctgacggggctcgctgcactcggcggcctcatcttcggcacggcgctcgccctcatgcgtctctccggcttcaagatcctcggtcggatcgccggcatctatgtcgacttcatgcggtcgctgccgctggtgctggtgatcttctggttctacttcctggtgccctatatcgggcagtgggtgaccggcgcctcacggccgatcagcgtcggcgccttcgcgtcctctctcatcaccttcatcatgtttgaggccgcttacttctccgagatcatgcgcgccggcatccagtcgatctcgcgcggacagccggccgccgcgagcgcgctggggctgacctacgcgcagtccatgcgctacgtcgtgctgccgcaggccttccgcaacatgctgccggtcctgatcacgcagaccatcgtgctgttccaggacacctcgctggtctacgtcctgtcgatcacggactttctcggagcggccagcaaggtggcccagcgcgatggacgcctcgttgaaatgtacctgttcgctgcgatcgtctacttcaccatttcctgtgtcgcgtcatacggcgtccgccgcctgcaggcgcgcatcgccatcattcgctga

SEQ ID NO: 7383 - DNA, 732 bp, BradyrhizobiumColbertium
atgatcgaaatcagccacgtcaacaaatggtacacgccgagtttccaggtgctgaccgactgcaccaccagcgtcaccaagggtgaggtcgtcgtggtctgcggcccctccggctcgggcaagtcgacgctgatcaaatgcgtcaatgcgctggagccgttccagagcggcgacatcctggtcgacggcaccaaggtcaacgatcccaagaccaacctgccgaagctgcgctcgcgcgtcggcatggtgttccagcacttcgagttgtttccgcacctcaagatcatcgacaatctctgtctggcgcaggagaaggtgctgggccgcccgcgcgacaaggcgcagaccaagggcatgcagttgctggagcgcgtcgggttgaaggagcaggcgcagaaatttccggctcagctctccggcggtcagcagcagcgcgtcgccatcgcccgcgcgctcgccatggacccgatcgtgatgctgttcgacgagccgacctcggcgctcgatcctgaaatggtcagcgaagttctcgatgtgatggtcgatctcgcccgtgaaggtatgactatgatggtggttactcacgagatgggcttcgcccgcaaggtcgccaaccgcgtcatcttcatggaccgaggcgagatcgtcgaggacgcgtcgaaggacgatttcttcggcaagccccgcagcgaccgcgcgcagaagttcttgtcgaagatcctctcccactaa

SEQ ID NO: 7384 - DNA, 861 bp, BradyrhizobiumColbertium
ttggacccgatcgcctacgtcaacggctcattcgtcccgctctcggaagccaagatctcggtgctcgatcgcggctttctgttcgcggacggcatctacgaagtctcggccgtgctcgacggcaagctggtcgacaacgcctcgcatctggcgcggcttgagcgttccgttggcgaaatcaagctgaagctgccggagacgatcgagcgcatcaccgagcttcagaaggaactgatcgcgcgcaacaagctcgacaatggcctcgtctacctccaggtcacccgcggcgccgacaaggggcgcgacttcccgttccccaagggtgacgtcaagtcgagcctggtgatgttcacgtccgagaaggacatcgtcaacgccgcctcggcgaagaccggcatcaatgtcatcactgtgcccgacatccgctgggagcgacgcgacatcaagagcgtggcgctgctggcgcaggtcttggcgaagcaggccgccgcggaggccggcgcgggcgaggcctggatgctggaagacggatacgtcaccgagggcggctcgtcgtcggcgttcatcctgaccaaggacgacgtcatcgtcacgcgcaggaattccaacgcgatcctgccgggctgcacccgcaaagcggtgatcgcactcgccgaggaacgccagctccgtgtcgaggaacgttcgttcacggtcgcagaggcgctcgccgccaaggaggcgttcatcaccagcgcatcctccttcgtgcagccggtggtcgccattgacggcaagacgatcggcgacggtaagcccggcccggtggcaacgcgccttcgcgagatttacgtggagttcgccaaggcgacggcggtttga

SEQ ID NO: 7385 - DNA, 486 bp, BradyrhizobiumColbertium
atgaagcctcgcatgaactactaccaggccgcacccgataccatcaaagcgctgatggcgctggaggcgcagatccagtcgacgggtctggagaaatcactgatcgaactcgtcaagatccgggcgtcgcagatcaacggctgcgcgttctgcatcaacatgcacaccgaagacgcgcgcaagcgcggcgagaccgagcagcgcatctatctcctcgatgcctggcgcgaatcctcgctctataccgagcgcgaacgcgccgcgctggcctggaccgaggcggtgacgctgatctccgagacgcatgcgcccgacgacgcctacgagcaggcccgcgcgcaattctccgcggaggaggcggtgaacctgaccatgctgatcgcgacgatcaacgcctggaataggatcgcgatcgcgttccgcgccgtccatccggtgaaggtgaaggcgtcgatggcgcaggcaaccacgtcgacacaaatatag

SEQ ID NO: 7386 - DNA, 1611 bp, BradyrhizobiumColbertium
atgagcaccctccaaccgaccttcgacgccgctgccggccgccccgcccgcagcgagccaaccgcaccctcagtatccgcgaagacctggatcgcggtgatcggcgcgacgcttggcgccttcatggcggtgctgaacatccaaatcgtcaacgcctcgctcgccgacatccagggcgcgatcggcgccggcatcgacgacggcggctggatctcgacctcctatctggtcgccgaaatcgtggtgatcccgctgtccggctggctggcacaggtgttctcgatccgcatctatctgctcaccaacgcgatcctgttcctggctctctccgcggcctgcgcgctggcgcaggacctgtcgcagatgatcgtgctgcgcgccatccagggtttcaccggcggcgtgctgattccgctggccttcacgttgatcatcaccttgctgccgcgcggcaagcagccggtgggcctcgcgctgttcgcactctcggcgacgttcgcgccggcgatcggcccgaccatcggcggctatctcaccgagaattttggctggcagtacatcttctacgtcaacctcgtgcccggcgcgatcatggtcggcatgctctggtacgcgctcgaggccaagccgatgaagctgtcgctcctgcggggaggcgattgggccggcattgtcaccatggcaatcggcctatccgcactccagaccgtgctggaggaaggcaacaaggacgactggttcggctcgcccttcatcgtcaagctcagcgtgatcgcggccatcgcactggtctcgttcctggtcatcgagctcacggtaaagaagccgctgctcaatctgcgcctgctcgtccgccgcaatttcggattcggcatgctcgcgaactttctgctgggcatcgcgctgtacggctcggtgttcatcctgccgcaatatctggcccgcatccagggctacaatgccgagcagatcggcatggtgctggcctggaccgggctgccccaactcctgctgattccgctggtgccgcgcctgatgcagcgcttcgacgcgcggatcatcatcggcatcggcttcgtgctgttcgcggcttcaaacttcatgaacatccatatgaccaatgactatgccgccgaccagctgctctggcccaatgtggtgcgagcgctcggtcaggcgctggtgatggcgccgctgtcggccgtggcaaccgcaggcatcgaaccggagaatgcaggctcggcctccggcctgttcaacatgatgcgcaatctcggcggggccgtcggcatcgccctacttcagactgccctgaccaagcgcgagcagtatcattccaacgtgctgatgcagtcggtgtcggcattcgatcaggcgtcgcgcacgcggctggagcagctcacccagtacttcgtcaatcacggcatcctcgaccatgcagatgccgtgcatcgcgcctatgtcgcaatcggccgcatcgtgcagaagcaggcctatatcctcgcgttcagcgacactttctatctgctcggcatggcgctgatcgtggcgctgctcgccgtcctcttcctgaagaagcccggccagacttccgctggcggcgcccactga

SEQ ID NO: 7387 - DNA, 1149 bp, BradyrhizobiumColbertium
atgtcgatcgcttatgttgctgaaaccaataagaaaatcagcctccgtccatcccgccaagcgatccagcgggtggccttgggcctggcgttgacgctcgggatcgccgcggccgggcgcttcggttacgactacatcaccaccggccgctacctggaatccaccgatgacgcctatgtgaaggcggactcgacgatcgtcgcgcctaaggtctccggctacatcgcgaaggtgctggtcggagacaacgagaaggtgaaggcgggccaggtgcttgccaagatcgacgaccgcgacttcaaggcggcgctcgatcaggcccgcgccgatgtcgccgctgccgaagcgtcggtgcgcaacatcgatgcccagttaaagctgcaacagccgatcatcgagcaaggcacggctgatattgctgctgcggaggccaacctgaaattcgcgcaggaggagcgcgcccggtacgacgatctcatgaagacggggtcgggtacggtccagcgcgcacagcagaccgatgcggcgctgcgcgccagcagcgcccaattgcagcacgccaagttcggcctgctggccgcgcagcgaaaaatcgacgttctcaccacgcagcgcgcccaggccgcagcgcagctcgaacgcgcccgcgccgtcgcggagcaggccgcgctcaatctgtcctataccacgatcaccgctccggtcgaaggcacggtcggtgcccgcagcttgcgcgtcggccagtacgtgcaagccggcacacagctgatggcggtggtgccactcgacgccgtctatgtcgtcgccaatttcaaggagacgcaactcacgcatatgcgccccggccagccggtcgagctgcacgtcgacagcttccgcaacaccaccctccgcggccatgttgacagcctgtcgcccgccagcggactcgaattcgcgctgctgccccccgacaatgccaccggcaacttcacgaagatcgtgcagcgcgtgccggtgaagatcgtgctcgatgaccacagcctgaccggcctcctgcggccgggcatgtccgcggtgccggttgtcgacaccaaacagacggtgctcgccgagcgggggactgccaagcagatcgccggcaagacggctcgttcgagcgggggttga

SEQ ID NO: 7388 - DNA, 912 bp, BradyrhizobiumColbertium
atggaccgctttacgagcctcactgctttcgtccgcgtggtcgacgctggcggcttctcagccgcggcccgccggctcaacatgtccaccacgatggtgagcaaccacgtccaggcgctggaggaccggcttggggtgcggctgctcaaccgcaccacgcggaaggtcagccttacggagatcggcaaagcctattacgagcgctcaacgcagatcctcgccgatctcgaacaggccgacgacatcgcgagcgaattgcagtcggtgcctcgtggaacgctgcgcgttcacgtcgctacccatatggtgccactggtggcgccggtcgtggcgcgacttctgtccacctgtccggagctcaagatcgacctgcgcatgggggaggccgaagtcgacctgatcgaggaaggctacgatgttgccctgcgcatgacgcaaccgcgggattcgagccttgtcgtgcgaagcctcgccacttggcgccacgtgctgtgctgctcgcacgattatatcgacaagcacggccgcgtgcagaagctcgacgagctcaccgggcacaattgtgggcggcacttgaactatccgttcggcgacgaatggcgcttccttgaccgcaagggcacgccggcctccgtgcggatctcaggcagcttcgtcaccaacagcggggaggcgctgcgcgaggtcgcgctcgatggcgccgccgtgtgcctgatggccgggtttctcattcaggacgatctcgaagccggccgcctcgtgcgtctcttgccggaatatcgtacggtcgagctgtccatgaatgcggtctatccgcaccgccatcatctgtcggctaaagtcaggaccttcatcgacctgctcgtgcaccacagcgccgagcagcagaagctgatcaacccctactcatga

SEQ ID NO: 7389 - DNA, 1455 bp, BradyrhizobiumColbertium
atggcgctcccgcgatcgggcaattgcatcatggatttcgaccagctcacactgaccgaggccgcggacggcctccgcgccgggaaggttacgagcaccgcgctgacgcgggaagccctggctcgcgccaaagccaacgctggcctcaatgtcttcgtcacgctggacgagaccggtgccttggaggccgccaccgcgttcgacgcggcaggcgacagaagcaagccgctcggcggcgtgccggtcgtgatcaaggacaacatcgaggtggccgggctgccctgcagcgccggtaccccggcgctgaaggattacattccagcgatggacgcgcccgtcgtggcaaagctgcgcgccgcgggagcaatcatcatcggcaagaccagcatgcacgaattggccttcggcatctccggctacaacaccgcgttcaagaccggcgccgagttcggcgtgcgcaatgcctatgatcgcgcgcggatcgccggtggctcctcgtccggcacgggcgccgcgatcggcgcacggatcgtcgcgggcgggctcggcaccgacaccggcggatcagtgcgcgtgcccgccgccctgaatgggtgcgcctcgctgcggccgacgatcggacgctacccgcagaacggcatcgcgcccatctcacatacccgcgataccgcggggcccatggccgcaaccatggccgatgtcgcgctgctcgaccgcatcatcgcgggcggagacgagattgcaccggctgatttgaagcaggtgcgcatcggcatcgtgacgtctatgctggccaatctcgattccgacaccgcggccgcattcgacacggcgatcgggaagatgaaagcccggcatatcacgatcctggagatcgaaatgccacgactggccgagctcaacggtcaggtcgggtttccggtcgcgctgtatgaagcatacgacgacatggttgcgtatctgaagcacaccggtactgatctcagcgtcgaagcgctggcgaaggagatctcgagccccgacgtgaagggcacctatgatgggctcgttatcccgcgcaaactgccgggccccaacgacacgctgatcgatgccaggccgatctacgatgccgcgatcaagatcgcgcgccccgcgcttcaggcgctgtacagcgaaacgttttcgggaaacaggctcgacgccatcgctttcccgacaacgccgcgcgtcgcgattgcctccaatcccgattccagcagcctcgaaaatttcgggctcttcatccagaacaccgatcccgggagcaatgccggtattcccggaattcagatcccgattgcgctgggcgacaccagccaactgccgatcgggctcgagctggatggccccgcaggaagcgaccgtcacctgcttgctatcggaatcgcgctggagacactattcggacgattgccgcccccgcgccgatcatga

SEQ ID NO: 7390 - DNA, 3450 bp, BradyrhizobiumColbertium
atggacgcaatttcatcactcgacacctacgagctctccgaccgctacgaccgtgaggagggccgcgtctttctcaccggcacgcaggccatcgtccgcatcgcgctcgatcaggcactcagagaccgtgcggcccgcctcaacacggccggattcatctccggctatcgcggttcgccgctcggcggcatcgatcaagagctctggcgcatccaggaacggctcaagcgggaccgcatcgaatttcttccggccgtcaacgaagacctcgcggcaaccgcagtgctcggctcgcagcaggtcgaaacgcaagccgaccgcgaggtcgatggcgtgttcggcctctggtacggcaagggcccaggggtcgaccgctcgggcgatgcgctcaagcacggcaacgcctacggctcctcgccgcagggcggcgtgctggtggtcgccggtgacgaccatggttgcgtgtcctcctcgatgccgcaccagtccgacgtcgccttcatgagctggctcatgccgacgctgcaccccgcaagcgtcggcgaatatctcgctttcggcgaatatggctacgcgctgagccgcttttccggcatgtgggtcggcttcaaggcgatctcggagatcgtggagtccggcgcttccgtcgccctgcgccccccgcgcgcttttctcgtgcccgacttcacgccaccgcccggcggcctgcactatcgctggcccgacctgccgggcccacagatcgaggaacggctggaggcgaagaagcatgcggtctacgccttcgccaaggccaatccgatcgaccgccacatctacgacattccgggtgcgacctatggcatcgtcacgacgggcaaggcgcatctcgacttgatggaagcgctgcgcctgatgggcctcgatgaagcggcttgccgcaacatcggaatcgacatctacaaagtcggcatggtctggccgctggcactccatgatgcgatggatttcgtgaagggcaagcgcgagatcctggtcgtggaggagaagcgcggcatcatcgagagccagttcaaggaatacttctacgactatccgggcagcaagcccgagcgcatggtcggcaagcacgacgagcaaggagcacgtctcatctcctggatcggcgaattgtcgccgcgggcgctggcgtctgtgctggcgcgccggcttgacccgatgttcccgggcctcaatctcgcggcacgcgccgccgccctgatgccggaagcggcgcgcacgatcaatgtcggcggcgcgacccgcacgccctatttctgctcgggctgcccgcacaacacgtctacgaaggtcccggagggatcgaaggcgctcgccggcatcggctgccacttcatggcgagctggatggaccgcgagacctcttcgctgatccagatgggcggcgagggcgtgaactgggcggcctcgtcgcgcttcaccggccgcaagcatgtgttccagaatctcggcgaaggcacctactaccattccggctcgatggcgatccggcaggcgatcgcagcaggcgccaacatcacctacaagatcctgttcaacgatgccgtcgcgatgaccggcggccagccggtcgacggccccgtcagcgtacaagccatcgcgcatagcgtccgcgccgaaggcgttgagcgcatcgcactggtatcggatgatcccgcgcacttcagcccggccgagcttccggccggcgtcaccatccatccgcgagaggagatgaatgtcgttcagcgtgagctgcgcgaggtttccggcgtctcggtgctgatctatcagcagacctgcgctaccgagaagcggcggcggcgcaagcgcgggcagatggccgatcccagacgcttcgcctacatcaacgacctcgtctgcgagggttgcggcgactgctcggtcgagtccaactgcctcagcgtcgagccgaaggagacgccgtttggccgcaagcggcagatcaacctatccgcatgcaacaaggacttttcttgtcttaacggcttctgcccaagtttcgtcacggtcgaaggcgccacgcgccggaagaagtccgcaagccagatcgatgcgatcggccgcgcggccgctctcacccttcctgcgaccgcaactctcgatcggccctacgatctgctggtgacgggcgtcggaggcaccggcgtgatcacggtgggtgcgctgatcggcatcgccgctcatctcgaacgccgtggcgtctcggtcctggattttaccggctttgcgcaaaagttcggtcccgtgctgagctacatccggcttaccgcttcgcccgaagcgctgcaccaggtccgcatcgaccagggcgcggccgatgcgctgatcggctgcgaccttgtcgtcagctcctcgccgaaggcatcaggcacctatcgtcgcggcacgcgcgccgcggtcaataccgcggagatgccgaccggcgacgtggtccgcttccgcgacgccgatctcgcctcccatgcccgcttgcgcgcgatcggccgcgtcatcggcgaaggcaatctcgatacgatcaatgcgaatgcgctggccgaacggctgctcggcgattccgtctatgccaatatcatcatgcttggctttgcctggcagcgcggcctcgttcctgtctcgctgcaggcgctgctgcgcgcgatcgagctcaatggcgtcaccgtcgaacgcaacaagcaggcgttcgcctggggacggattgcagcggccgatccgggtcttttgccgagcacggatgatgcgccgaaagccgagacgctcgaccatctcatcgcccggcgcgccgagttcctcacggcctatcagaatgccgcctatgcaacccgctaccgggcgttcgtcgcaagagtccgcaatgccgaagccaacgtgaacagcgaggcgctgaccgagacagtggcgcgcgcgctgttcaagctgatggcctacaaggacgaatacgaggtggcgcggctgcacatgcaaagcggcttcatggacgaactgaagaacgaattcgaagatggcttcaggatccagtatcacctcgcgccgccgttcctgccgtcgcggcgcgatgcccgtggacgtccgcgcaaacgcgccttcggccaatggatccaaatgccgctggcgatgcttgcacgcctgaaggcgctgcgcggaacgctgttcgatccgttcggctacaccccggaacggcgcgccgagcgcgaactgatcggctggtatgaggcgctgatcgagcggatgctcggccggctcgacacggcgcctcttacggacctcgtcgcgattgcagcggctcccatggagatccgcggctatggcccggtcaaggatgccgccatcgggaaggtgaagtccgaaatcgagcgactgctcgccgaacttcccgcgccgttgccggccaggatgcgcgcaaacggttga

SEQ ID NO: 7391 - DNA, 456 bp, BradyrhizobiumColbertium
atgatcgaagagcaggacacgcggattctcgcgcatctccagaaggacggccgtgccacaaaccagcagctggctgatgaagtcggcatgtccacctcggcctgctggcgccgggtgcgagcgcttgaggacagcggcgtcatccagggctatgcggcgctggtcgctcgcgagcaggcgggctttgcaatgtccgccatcctccacgtgtcattggagcggcacgatgcgaagttcgtcgatgagttcgtggccagggtcaccaagcgccgcgaggtgctggagtgctttgcgacgacgggcgatgccgattatcatctgcgtgtcgtcgtgcaggacatggccgcctacaacaggtttcttgacgagttcatgttccgcatccccggcatccgctacgtccgcagcaacgtggtcctgaaggagatcaagacgagtgtggagctgccgttttga

SEQ ID NO: 7392 - DNA, 1551 bp, BradyrhizobiumColbertium
gtgcacatcgatctgatagagacgttcgatgacttcgagcgtatcgaggacaactggaacgcggtgtatgatgcggaccctgacgcgcagctctttctgtcctggaaatggttggctggatggcttcggcagattgcggggccttggctgatcctggccgcccgcgagagcgacgacgacggcgctccgtatgtcgctttttggccgttgcggacctacttcaagtcaaccgatgggaagttccgcaacgagctcaacatggccggcaatttctctgctgattataccggcatcctgtgcgcgtctcgcttcgaaagccaggcgatcccggctttcgcaagacagctcaagcgcatgaattgggcgcgcgtgaacctcgacaatattcgcctgtccgggacacgttatcgcctgctcatggcgcatttcccgaaggcgaagtttcagcacgacgaggtcaaccggatcaacaaggtcgacggcatcgacaacaacgtatgcccgttcgcttcgcttccggccgactgggacgcttacctcgccggcctgagcgccaatacgaggcaaaagatcaggcgcctgctcaagctggtggacgctccgggagagtttcgcatcaccgaggcaacggccgagacgatcgatcgcgatctcaatacgcttctccagctctgggaaacaaaatggcggccgcgcaagggtggtctcgtcgacaagctcgttcgttcaaaccgcgccatgctgaccacgagcttcaggtccggcctgctgttcttgccgacattgtggcagaatgatcgcccacttgcggcccttgccaccctgatcgaccggagaaaacgcagcttcctgttctacatgacgggccgtgacgaaagccatgacggaccgccggccggagtgatcctgcatgcctacagcattcgccgggccatcgccgacggtttcgcggagtatgactttctgcgtggaaatgaaccctacaagtattcgttcggggtcaaggaacggcgcattcgcagtgtcaccatcagcacgagaaacggcctcaatctcggtggccggctcgaccggagaaccctcggtgatgccctcgaagaggcgaccaggctacaccaggccgtcaagctcgccgatgcggagcgcggctaccggcaaatcctcgacgtcgagccaggaaatccggacgcgatccaccgcctcggccagctctatgccacgcgcggaaatcacgttgcggcaaggcgattgttcaagctgctgacggcgatcaagcccgagacgcacaagtcctggttctgtctcgcgcagtcctgcgaggctctcaacgagcatatggaagccgcccgcaattaccgggaagtcatcaggctgaagcctgatgcgcccgacgcattcagcgcgctcgggagagttctggtcaagctcgggctcgttcgggatttcgacgaagcgctcgccgtggttctcggcgaagccgaacagcaatgcgacaggccggaacgtgcgacgcgcatgctgcccaccagagacacaagggacgcgcgttag

SEQ ID NO: 7393 - DNA, 1359 bp, BradyrhizobiumColbertium
atgtcgaaggaccttgttctccgtcaacaaccgcccgaagctgcctggtacgcgaatttgccccgttcgacgcggcttcctaccatcgcgggcatcatcgtgatgacagtgatgctatgcggctttggcgtctggggcaatgtcgctcccattgccggcgccgtggtcgcctccggcgtgttcgtcgccacgggccagaacaagatcattcagcatctcgagggtggggtgatccgcaccatccatgtgcgggagggcgatctggtcgagcagaagcaactcctcgtcgaactcgatgacaccgtccctcgcgcggagctgcggcgtttgtacctgcgcagcctgcgcctgagcgcgatcgatgccaggctccaggcggagatgcgcgaggatgcagagattcaatttccggattcggttctctcggccacaagcgatccggaaatttcgcagatcatcgaaagtcagaaactcaccttcatcgcacgcaggaacaatctgaatagcgacattgccggcatcgaggagggcatcaacgccctcagcgagcgtattcagggctcaaatgtgcagctcgatggcgtgcggcgtcaaatcgctctgctggacgacgagatcgagaccaagcggtacctgctgcagacgggcctcgttcgcaagcctgaactgctggttctgcagcgcacaaaggccaatctcgagggcgagatcggtcgcatcctcggcgaaatcggcgacgccaaggagcgcatcgcgcgttccaaggagcaaatcaacggcgtgcgcaaaaccgcgatcaaggtcgccgtggagcagatgcacgaggtgcggggagagcttgcggatgtacgcgagcgcatgctcgccgcccaaggcgtattggaccgcattcggatcaccgcccccgtcaagggagtcgtggtcaagctgcgctatcacacccagggtggcgtggtcgagcccagcaagaccatcatggaaatcctgcctcttcaggaagagctgatcatcgaggctcgggttcggccgcaggacattgacaccatgaagaacggacagcacgcgatggtccgcctgaccgcgctcaaccagcggattacgccgatgatctcaggcgacgtgatctacttgtccgcggacacgctcgccgacgagcgcaaatcgcagcaggtcggaccaaccgacatctacatcgtgcgggtgaagctcaacaggaacgaagcgatggcaatccccgatttcagcccgacaccgggtatgcaggtcgaggtctacatcaagacccacgagcggactttcttccaatacatcgcgaagccgatccacgacagcatgatgcgggcattccgggagcggtaa

SEQ ID NO: 7394 - DNA, 2157 bp, BradyrhizobiumColbertium
atgggttggggcagcgaggagaagcgcgatctcgcgcgcgacatcgaagacagcacctctgccgacggagataccgccagagttctcacgtttcccggccgtccccacggccgagaaagccgcagcgacgcatcgatcgtttctccgttgcccggagagcgaccgcagcccccaagcccggacgcaatgccccctacccccacgtccggaaccgtgtccgctgcgacacccacgcccgcctccgccgcaagactggagcagccagccgttcaacaaccccgaggaacgcctgcgcgcagcgacgcgcgcgggacgaccgataaggcgtcgatcggcaacggctcggccagcccagctccgcccggcggaggcggcggcggagccgcaagcggcggcggacgcggcaatggcggcggctcacagcccttacacaaacgatccggggacaacgagttccgtgacgtgctcggcaaggggctctccggcgcgcggcgcaatctcgtcaccgtcggaatcttctcggtaatggtcaatctgctcgtactcgcgatccccgtctatctcttcaacatgtcggaccgggtgctgaccagccgcagcacagacactcttgtgatgctgaccatgatcgtcgtcgccgcgatcgccgctcacgtgctgatggacgtgcttcgccgcatcatcctgatgcgcgtcgccgtggacacggaagcgcggctcggcggcccggtgctgagtgccgcagcaaaggcggcgcaaaccggatcaagccgtgagttccagacccttgccgatctccagcacctgcgttcgttcatcaccggtccggtgttgctcaccatgttcgatgctcccgtgaccccgatctacttcgccgtcgtctttcttgttcacccccatctcgggctgatcgtgctgtcctcgggcgtgctgttgatgggtgtcgccttgctcaatcagagaatcacggcgatgccattcacgcgggccaacgcctacggaacgcgggcaaatctgcaggccgaggccatggcgcgcaacgcccaggtcatcaacgcgatggggatgatcccggagggcgttctcgtctggggacgcgagaccgtcgagtcactgaaggaacaggtcattgcacaggatctcaacatcctgatgaccgggatctccaagttcctgcgactttgcacgcagatcgcgattcttggctggggcgcctggcttgccctcgaaggccagctgaccggcggcatgatcatcgcaggctcgatcgtcgccagtcgcgccctcgctccgctcgaaggcacgatcgagggttggcgcaacttcgttcaggcgcgatccgcttacagccgggtgaaagctctgctccagagctctccgctcaatctcgaccggctgcgcctgccgcgcccacaggggcacctcagcgtcgagcgaattctctacgttccgccgccaacgaagaaggtcatcctgaatggcatcagcttccagctcgagccgggcgagtcgctggccatcgtcggcgactccggcgccggaaagaccatgctggcccgcatgctcgtcggctcgatcatcccgaccgcaggcaatgtgcgactggacatgatggacctgcgcaactgggatccgaggcaattcggcgagagttgcggatatctcccgcaggacgttcagctctttccggcctcgatcaaggccaacatcgcgcggatgcgcgaggatgcgatcgacgccgacatcttcgatgcagccgagctcgccgacgtccacgaaatgatctccagctttgcacaggggtacgagaccatcgtcgggatggacggaagtcccctgtccggcggtcagaggcagcgcatcgggctcgcccgcgcgttctacggcaatccccgcctcatggtgctcgacgagccgaactcaaatctcgacgccagtggtgaacgcgctctggccaaggctctcctgcgcgccaaggatcgcgggatcacggtggtcaccgtgacgcaacgggccgccctcctgagaagcgtcgacaagatcatgatcctgagcagcggagccgttcaggccttcggcacgagggacgagatcattccactcatcaccggacggaagccgaacggcggcgacggtccacccttgctgaattcctag

SEQ ID NO: 7395 - DNA, 1938 bp, BradyrhizobiumColbertium
atggttcctggcggaatcaccgaactggtttggcatttcatcgcccacctgcgcatcaccgacgatattgcacgcgatcgcacggcctacgaagggcctgcccttccgaagccgctggacgactacaagacgccgcggccggatttcgatcgcgaccacgatctcgatgcattcgatacgacgccgatcggtcctcccgtcatccgactccttgacgatcacatcctttccaagctgccgcaggtgagatcgcagggtatcccaatcgacgatgatctcgatctgccgacgaggctgcctgcaacgccgatattccgccccggcgccggcggtggcggcggcggctcggaccatgagatcaaggtgatccacgagcccggcggcgaacagggccaaatccagatacgtcagctcaacggaatgctggacaatgacatatccctccaaggcagcttcgggagcggcgacacgggagtgctctctgcccaggccgcgcaaatcagcgcgcaggcggcttcactcctgcaacatatggcggatgacgccaatgggcagatcccgagccaatggtggattccccagaacggtgcaggagtgaccgccttcgtccaggatttcgacaacggccaagtcgcgcacgatggcaccgtcaacgccaattccgttgtgcccggatactatctcaatggcgaacttcagacgcccgccccagagcccccctctccagagctcggcaggcccgccgatccagacacaggaaacggccttggcctttgggccgaggcaggcggcaacgtcagcttcaacggcgccatgatcgttgatctcagcgagtccggccgatccatgatcgtgaagggggactatttccataccaacgcgatcttccagaccaactcgttgatggacgaggaccaaatcgcagcttcgcaagccgaagacggatcgatgaccgcgggagacgacatcaccgacaacattgccgacttcatccagcaccccggcgtctacagcctgatgccggcgacctatgcgggaccgaactggcatgtcgatgtcgtcaacggcgactactacaacgttcagaccctcgtgcagatgaactatctgctcgacaatgacgtaatcgtccagacgggcggcagcaatcactatgacctgatctctggagagaacgaacaggggaatctcgcacagatcttcaatggcagcttccattacgatctgatcatcgttgccggcgcctatcacggcatgaacgtgatcttccagaacaacattctcctggacaatgacgccgtcacccagctcgccaaaggcgacgagcagacgcaatcactcgctgcgggccagaacgagctcctgaacgcggccaccatcgagacgttcggtaacgacaatttcctgccgctcaccccgggcttggagagcctcgttgccgcactcgcaaacggcatacccggactggatccggaaaccggaacgttgctcccggggacgggtgggaccttcgaggtcctctacattaccggcgactactacgacatcaatgcggtctggcagaccaacgtggtctcggacgtcgatgtgctgcttcagcttctcgagcgtccgtcggacgccgcgcaacaacttcatcccggcgacgatggcgctcaggtcgccagcacgggcgcgaacatgctgaccaacgacgcagccatcgtcgatgtcggaccgacagacgcctatgtcggcggccaggtctatggcgacacgattctggtccaggcaaacctgctgccgaccgacgccgaccccgctctcgccagggatacccaaacattggtgtccgagctcgtggcattcgtgaccgacgcgcaggacgaggagcagcaggcgccaccagcgccgcccccaccgccctgcgacgacgccatctccaacgtcatgcactag

SEQ ID NO: 7396 - DNA, 783 bp, BradyrhizobiumColbertium
atgagctatcccaagaagaagtacgatccggatcaggaccaggatcaagagcaggaccagaagcaagccaacctgcaaggccagctgcaaggtcagcttcagggccaaggtcaggggcaggcgcaaggtcaagcccagcttgccgttcagtcgctcgactccaagagtgagaacgagaacgagaacgacaacgacaacagcaacgagaacaagaacgagaacgagaactcgatcgacaacaaggtcgacaacaagctggccaacagtgtcgacaatgacgtcgacaacgagatcgagaacaaggtcgagaataccgtcgacaccaaggtcaacgtcgaggttgacgtcgatatcgatctcgatctcaaggccgacggcctgagcagccccgtgatcgacctgtcgtgcctgagcgacgtcaagggctcggtcatcatgcccgacgtggttgaccagaagctggacggcaatggcaaccagttcaatatcgaccaggtcaacaacctgatcgacaacgactggaaccgctcgtcggtcgactacgacggcaagggcggcgagttcaggatggacgccaaggccgagggcggcgacgtcaagatgcattccgacatcgaggacgtgatcggcgattcggcaagtggcgtcactgcgtctgccgacgctgccatcagccaggaagccttcaaccagaccatcacgcagggtgcgaacatccagttcaacagcatcacgatgagtgtggcaggcaacgacctccaggacagccacgatctcggctga

SEQ ID NO: 7397 - DNA, 570 bp, BradyrhizobiumColbertium
atgccgtccggtcgacttccatccaaacccgatttcgacgcgatcgcagccgcagctcccgcctcggccgatcggcgcacgctgatcctggcgctgatcggaaacctggtctccagctggtcgaacaatgagagcctgttcatctatgtgctcatgatcctgctgcggaccgatcaggcctccgctgcactgaccttcgcaactctcaacaccacgcgagcccggctcgacctcatacagaggcttgcgaagatcacgataaaggacaagcagctcaacgtcgccctcacgaaggtgatcgagcggttcaatgaaactactcaaatccgcaacgaattcaaccattgtatgtacatcgtggattctaccggacagatcacctctactcagtcgatgcgcatctcgcagagcaagaatggcctgcagttcggagaaagaaagccgatggatgacgctcggctcaagagcatggtcaacgccacgaaggacatgacccgcattaaccgggagatctgggatctgctgccccggcttgaaagccatatccgttcgacggatgccgcgcgttga

SEQ ID NO: 7398 - DNA, 522 bp, BradyrhizobiumColbertium
atgtggcattgggtgcgggacacggttcgggtccgaagagcccgcaaggctgcggccgatatgctcgtgccgatcgtcgagcaaagccgcgcgcgtcttggcgggatcagcgaggccgtctggtcggatccctacatcactggtcttgtcgttatgcttattagcgtcgtcgcaagggtcgagggtggagagttctctgaacgtgcgctcttccgtattcaacacggagcttggcacgatattacgtccgttcgagatagcgggattgcggagcgtttcatgctgttgaacaagggccgcgatcgtgacttcgagctaggctgtcacaatgcggcggcgttcgctctcgttttgttcagtacgaaagaaatgctggaaggagcgggtgtgccgctcgtcgatactttgcttgatagtccggtggcgcaacgggaggatgttcgagaggcatggtcgcaatgcttcgatgcctatatttgtgcgcgcgcgaatgacccggtcggctgtcgcgatcagctgtga

SEQ ID NO: 7399 - DNA, 741 bp, BradyrhizobiumColbertium
gtgcgtggtggcgatccgttctcggacgagtcgccggaagcggttgagcgcggcgctcccaatggattcgacttcgagcagccggaagccacgattgcctcgaagctgaagcctacgatcgtggtgattcatccacgtgccgtatttcgagattgtttcgcccgctgcctcgaggtttcataccaggatcatcacgtctattcgtttgcgagcgtagaggactggcgtggttctacggagccgctggcttcggcgccggcagtcgtcatcatcgtggttgagtccggagacgcatcgagcttgaatgatctccagagtctggatagcgcgaccggcaaaacgtcctttgttgtcgtgtcggacgtagatgatgtcgatcacattgttcgaaccttgaagcgtggagcgcgtggatacatccccagcaatctcccgttcaatgtcgccgtggaagcggtgcggctggtcgaggccggagggatcttcgttcccgcgagcagcttcgttgatcgtgagccaccgcctgccccggtcaagccgcaagtaacgcttacagaacgacagaccgccgttctcgaggcaatccgtcatggcaaagccaataagcagattgcctatgagctcaacatgagcgagcatacggtcaaggtccacctccgccatatcatgcggaagctgaaggtccgtaaccggaccgaggcagccatcttgcccaagagcctcatttcgtcgaaggactag

SEQ ID NO: 7400 - DNA, 786 bp, BradyrhizobiumColbertium
atgcgctggttgaagttcaccgcctcgggcaggacctcctggggaattatcgaaggcgagcaggtcgtcgctgttgacggtgatcccttcggcgaatggcggcgcacgtcgcgcatccttccgctgtcccaggtgaagatcgagctgccactgatcccgcgaaccttctattgcgtcgggctgaattacctcaggcacctgaaggaggccgcggacaagcgcggcgaggtgccggcagtccccgaccgtcccgagatcggctatcgcgcacagaacgcgctgatcgcccatggcgaggacgtcgtgatcccctccttcgcgacggacaagatccactatgaaggcgagcttgtcgtggtgatcggcaagaaggtcaagcatctcaccgaagcgaatgcgatggattgcgtgttcggctacaccatcggcaacgacgtcagcgaacgcaactggcagaaggcggatcgcggcctgtggcgctcgaagaacgccgatacgttcaagccgatgggcccgtggatcgagacggacgccgatctcgacaagatggagaccatcgtccgggtcaacggccgcgagaccaaccgcttccacaccaacgacatgatcttcggcgtggtgcccttcctggtcgagctgaccaagtactttacgctctggcccggcgatgtgatctggatgggtaccgacggcgcctcgccggatatcaagcacggcgacgtcgtggaggtcgagatcacaggcgttggcacgctgcggaacaggttcgtgcgggaggggcggtag

SEQ ID NO: 7401 - DNA, 1368 bp, BradyrhizobiumColbertium
atgaatcggcagatggtcctcgtcggcttccttcaggcgcagaactgcacgaacctgccgagttcctggcgacatcccgactcccgcaacgactcgatgtcggcggactattatcaggagatcgccagaattctcgaagccggcaagttccacatggccttcttcgacgatcgcctggcgatgccggaccgctacggcaacgaccacgcccacaccgtcgaatacggcatccgctgcgtgaagatggacccgctgatcgtgctgaccacgatgggcatggtcaccgagaagctcggcttgggtgccacctgctcgaccacctattacgagcccttcgacgtggcccggcgctttgcaacgctcgacctgatgtcgggtggacgcgccggatggaatgtcgtcacttcgctgaacgacggcgaagccctcaacatgggccgggattcccatcccgaacatgattcccgctacgaccgcgccgatgagttcatggaagtcgtgctcggccattgggacacctgggaagacggcgcgctgatcatggacaagacaagcggccgcttcgccgatcccgccaaggtgaagcggctcgaccacaggggacaggccttcaagtcgcgcggaccgttcaccgtcccgcgttcgcagcagggccatcctgtaatcatccaggccggcgcttccggccgcggtcagcgcttcgccgggcgatggggcgaggtgatcttcacggccgcgcgtaatctcaccgccgccaaggaaggctatgcgtccgtgcgcaacgaagccgcaaaggccggacgcgatcccgaccagatgttcctctgcaacttgacgacgccggtctgcgccgcgacaaaggctgaagccgaggacaagatggcgttgatcaacaagctgccgctcgagatcgacgcgctgtcgctgctcgccgaagcgctcaactatgacttcgcctccaagggtctcgacgagccgctgacgacggaagaactgaagagcatgcagggcattctgggtatccgcgacggcgtgctgaagagttcgggcaagagcaatccgagcgcacgcgacttcgtcaccttctccggccgcggccaggtccaggacgccatggtcggcggcccaagggagatcgcggacaggctggaggagatgttcgtcgagcgcggctgcgatggctttgtcattgccgcaacccatgtgcccggctcctacgcggacttcgtgcgacacgtcgtgccggaactgcaacggcgcgggctgttccaagaggactatcgcggcaggacgctgcgcgagaatctcgggctcaggcgcccggccgccggcgcctggaaggtgcagccgcccgaagcggcggaatga

SEQ ID NO: 7402 - DNA, 1053 bp, BradyrhizobiumColbertium
atgccgatcgtcaaagccgatcgcctgaggcgcatcagcgccgcgctgctccgcgccgccggcgcttcggaggaggaagccgacgccgtcgccatcggctgcgtcaacgccaatctcgccggccatgattcccacggggtgatcgccgttcccacctatatcgaccgcatcaaggccggccacatcgttcccggcgccaagtggaccatcgttcaggaatccccgaccacgaccgtgatcgacggccattggggttttggcttccatgtcaacgccagggcgatggcgctgacgatcgagaaggcgaagacggccaacgtcgccgcttgcaccgtgttccgacagagccatgtcgggcgcctggcggcctacccgctgatggcgatgcgcgagggcatgatcgggattgcgacggcggactccggccgttcgccgaagcacgtggcgccgttcggcggcaaggaggcgcggctcggcaccaatccgatttcgatcgcggtgccgtccgatctcgatacgccgttctgtctggacatggcgacctcggcggtggctgccggcaagatccagctcgcggtcgcccgtggccaggaaatccccaccggatggatcatcgacgccgaggggcggcacaccaccgatcccacgcaataccgcaagggcggcgcgctgctgccgctcggcggtaccgagggctacaagggcagcgggcttgcagccatggtcgaggtgctctgcggcctgctcaccggtctcggcttcggggtcgagccgacggggcgacacaacgacggatgcttcatggcggtcttcaatgtcgcagcattcagaccgctgaaggagttcaagcgcgaggtcgcggaattcgcacgttatctgaaatcgacgccgccgtccgaagacagcaacggcgtgttctaccccggtgagatcgaagggctgcgccagcagcagcgcctgcgcgacggcattgagatcgaggatgccacctgggaaaggctgcgcgcgctggcgtgcgaatacaggctcgacaccgtcctcgatctggcctga

SEQ ID NO: 7403 - DNA, 933 bp, BradyrhizobiumColbertium
gtgccgacgacactcgcgcgcacctttgcggcgttgagcgccattaacgaagcgatcctctatgcgaaatcgcccgacgagctgtaccagaaggtctgcgacgccgggttttcgagtggggacttcttgggcgtcgccgtgttcctggtgggaccggacggccgccggctgcattttgcggcgggctgcggcgacgacgttgaacggctgcgctccatcgggatcacgacggaagccggtacccctgaaggctcgggcgtcggcggtgaggcctttcgcgagcagaagctatgcgtctccaacgactatctgagcgatccgcgctcgctggcgtggcgcgagagcgccgccaaggcccacatcggtgcggctgcggcgctgccgctgctttgcgacggcaagagcgtcggcgtattgtacgtgacgagcggagaggccaattcgctgaacgagcagatggtgtcgctgttcgagcgcatgtcggcgaacatttcctatgcgctggacaattttgcgcgcgagaccgcgcggcaggtcagcgagcaggcgacacggcggctcaaccgcatgttcggcgccatcagcgccaccaacgaggccatcctccgcgcgaagaccgagcaggagctgtatcagctcgtgtgcgacgcctccgtccacagcggcaagtcgctggcgaccatcgtgctgctacgtgagccggattcacactggatggttccggtcgcggccacggggcagaacctcgagctggtcacccaggcgcgctattcggtcgacccggacaatccctacggcaagggcatctccggcgaggtgtttcggacccagaaggccatcgtcgaggaggatctcgcaagccgcaccaggggcacgccgtgggagcaggccaaggtcaacaccggcgttgccgcctgcgtgattgcgcgctga

SEQ ID NO: 7404 - DNA, 3093 bp, BradyrhizobiumColbertium
ttgctgcgcatggcggagaacgtctctttcgcgatcgagaatttcggccgcgaggccgagaaagccagcatcgctgcgggagaagaacgcctggcgcgaatgtatgcggcactcagcgccaccaacgaggcgatcctgcgcgctgggtcgcggaccgagctgttcgatctcgtgtgcgaggcgacggccaagggagccaagttcacctccgccaccatcgcgctcgccgaccatcacgctgagctgcttcgcgtcgttgcttcctacgggccgaatgcggatcaggtccgcaacttcacgttctccacctccgaccgggttcccgaagggcgcgggctgacgggcaccgcgttccgcagccggcagcccgccgtcagcaacgacgtgctcgccgatgaccgcatggcgccgtggcaggccagcgcccaccgcaacggcatcgcgtcctccgcggcactgccgctgctcaacggcgaccgcgtggagggcgtcttcctgttcaactctccggagcgcggcaccttcacgcccgagctcgtcgagctgctgcgcaagctccaggccaatgtcgccttcgcgctcgagagtttcgaccgcgccgacgagaaggcgcgagcggacaagcagcgcaatcgtctgagcggcatgttcgaggcgctgagcgcaaccaatgaagccatcatgcgcgccaagacgcgcgaggaattgttcgaggccgcctgccaggcggctgtgctcggcgacctcttcgcctcggcgacgatcggcatcatcgatgacgaacttcaggtcgttcgcgtcgtcgccgtcaaggggcgcctgcaggagcgcatgatcggacgtacctgcagcatttccgccggccatcccgagggcgaaggcatcatcggcacctcgctgcggacgcgccaacccagtgtcatgaacgactatctgaacgagccgagctccgcgcactggcgcacaaaggccgtcgaggatggaacgcgggctgcggcgagcttcccgctgctcaggggaggacaggaaccggtcggcattctgctcttcctcgcgctggaagagaacacgttcacgcccgatctggtcgcgctgctcgggcgattggcggaaaacgtctccttcgcactcgacaacttcgagcgcgccgaggagaaggcccgcaccgaagcgcagaaggaacgcctgacgcgcatgttcgcgtctttgagtgcgaccaacgaggcgatcatgcgggcgaagtcgcgcgccgagctgttcgacctcgtctgccttgcagcatccaacggcgccaagttcacctcgaccacgattgcgctggccagggccggcacggatcagctcgagatcgtcgccaccgccggtccgtccgccgacaccacgcgcaacgtccgtctctccatcgatcccgagcggccggaagggcgcgggatgagcggaacggcgttccgcacgcggcagccctgcatcagcaacgattatctcaacgacgaccgcgtccgtgtcttccatgccatcgtccgtggagacggagcgcggtcgggcgccgccttcccgctcatcgtgcacgatcaggccgtcggcgtgatgatctacatgtcgaccgaaccggccaccttcacgcctgagttcgtcgagctgttgcagcgccttgcggaaaacgtctccttcgccatggagaatttcgaccgcgccgacgcgaagaaggatgccgacgagcggatcgagtacctcgcatcgcatgacagcctgaccgacctgccgaaccgcgagaccttcaacgggctgttgcgtgacgcgatcgatgcggcgcagcgccgcgatcaccgcttcgcggtgctcttcatcgatctcgaccggttcaaggtcatcaacgattccctgggtcacgaggccggcgacctgctcctgctcgaagtggcgaaccgcttgcgtggtgcgctgcggaccagtgacgtggtggcgcggctcggcggcgatgagttcgtcgtgattctcgaccagtgcggggagatcgacgccgttcagcgcatcgcgaccgagctgctcgccgtgcttgccgagcccatggaactggcgggtcacgagtgccacaccacggcctcgatcggcatcgccatgtatccggcgaacggctccgacgcgcagacgctgaccaagaatgccgacatggcgatgtacctcgccaaggaggacggcaagaacggctatcgattcttctccaatgaagtgaagacgcagtcgatcgagcggctgtcgctcgagagcgcgctgcggcgcgcgctcgagcgcgagcagttctcgctgaattaccagcccaaggtggacatggagacgggtcagatcaccggcgtcgaagcgctgctgcgctggacccatccggatctcggcagcatctcgcccgcccagttcattccgcttgcggaggaaaccgggctgatcgtgccgatcggccgctgggtgctgaatgaggcctgcgcgcaggccatggcctggcagcgccgcggcctgctgccgctgtccatggccgtcaacctgtcgccgcggcagttcgcggacgagcatctgttgcaggacgtcgatgaggcgctggccgcctccgggatgtcgccggtcctgctccagctggaggtcaccgagagcatgatgatgcgcaatgtcgggcgcgcgctcaaggtgctcgactccatccagagccgcggcatccgtcttgccattgacgatttcggcaccggctattcgtcgatgtcgctgatgaagcactttccgatcgacaccatcaagatcgaccgctccttcgtgcgcgatctgccgcaggattcggaggaccaggcgatcgcgcaggcgatcatcagcatgggtaaggcacttggcatgaccgtcgtcgccgaaggcgtcgagaatgccgagcaggagacgttcctgcggacccatggctgcgacgagatgcagggcttcctcgtctccaagccgctgccggcgcggcagatggccgagctgctccggccgatggtgctgccggtcgcgcccccgctccagccggagtctgccgacgaaggcgcagcgtcacggctgaaacgcgctgtcgtctga

SEQ ID NO: 7405 - DNA, 342 bp, BradyrhizobiumColbertium
atgcaccaggccgcaagcctgcaattcgagcgcgtggtgaacgagttcgcccgctggctcgccgtgcccgacaacgaacggtcgccggcaccggcctggtggtggggacccgcgatcgcagtacgcgacgcgccccagccgatgccaagggcatggtcgcgcacgctcggcctcgacgacggatcgacctttgcaggcggggcgtccctacttcttgcgctgttcgagaaacagacctcgctaccgtggccggacgactttccgcgcaaggtggagagcgaggctgcagagtctcgtgagctgcacccgcagccgtcagacgacagcgcgtttcagccgtga

SEQ ID NO: 7406 - DNA, 993 bp, BradyrhizobiumColbertium
atgaccgaccgaccgaccgtcctcgtcaccgggggcgcaggctacattggctcgcatgcgtgccgcgcattgaccgccgccggctatcagcccgtcgtttacgacaatctttcgacaggtcatcgcagcttcgtagacggcccgcttgtggcgggcgacctgctcgacggcgcgatgctggcgcgcgccttcgccgaccacaggatcacggcggtcatgcatttcgcggcggcgagtctcgtcggggagtccatgaccgacccgcagaagtactacatcaacaacgtccagggcacactctcgctgttgcaggcgatgcgcaacgccggttgccatcgcatcgtgttctcctcgaccggcgccgtctacggcaatgccgattccaaggaactgccggaggacttcccctgcacgccgatcaatccgtatggcgcatcgaagctgatgatcgagcgcatgctcgccgactaccgcacggcttatggcttcggcgcgttctgcctgcgctatttcaatgccagcggcgccgatccgggcggcggcatcggcgaattgcgcgacaatgaaacccacctcattccgcgggcgatgatggcgcttcaggggcatgtcgacttcgccgtgttcggcgacgactacgacacgcccgacggcaccgcgatccgcgactacatccacgtcaccgacctcgcggcggcacatgtcgcggcgctgaagcttctggagcaaggacatgccggcgccagcttcaatctcggcaccggttccggcttttcggtacgcgagatcctcgacgccatcaggcaggagaccgggcgcgaggtgccgcacaccgtcaagccccgacgcgcgggcgatcccacctatctggtcgcagatccctccgccgccagaaaggtgctgaacttcgtgccgcgccactccgacctgccgacgatcatccggaccgcctgggcctggcaccagaaggcgcatccgttcagatcgcgttag

SEQ ID NO: 7407 - DNA, 804 bp, BradyrhizobiumColbertium
atgcttgagcgccgcgtcaacctcgacggacgggcagcaactgccgacgtgccgaggatcaccctcggcgggcttcgcttggcagcgctcgacctggaagccaccgccgatttcatgatcgaggcaaccgaccctgaaaatcgcatcggccgtccgctgtttctgacctcagccaacggggaggtgctggcgcgctgttcgaccgagccgcagaccgagtacctgttccgcgccgccgacctgatcaacgccgacggtcagccactggtcgcggcctcgaagctgcaatcctggttcccgctgccggagcgcgttgcgaccaccgacctgttccacgtcgtcgcgcgcaaggcagaagcggtcggccgcacattctatatgttcggtgcaagcgaggccgagaacgccgcggcggtcgagaacgtccagaaaatgtatccgcgcctcaagatcgtcgggcgcagccacggctatctgcgaggcgaagcgttgcgtgcgaagatcgaggagatcaacgccctggcgccggactatctgtgggtcgcgctcggcgtgcccaacgagcaggcattcgtgaaggagttcacgccgcacctgagcaatgttggcgtcatcaagacatccggcggtctgttcaacttcttgtccggaagccgttcccgcgcgccgcaatggatgcagaagatcggactcgaatgggcctggcgcaccttgctcgagccgcgccgcctgttctggcgctatttgaccaccaacccccgcgcgctctatcttctcttcagccgcaaccgccccctccgctaa

SEQ ID NO: 7408 - DNA, 2373 bp, BradyrhizobiumColbertium
atgcttgactatagccagccgatcgatcgggccgcaccggaggccacgcagcggaagcctcaggccggcttcaacgtgctggagcttgccaatctgctgtggcggcgaaaggtggcgatcacagcggccgccctgctcggagcgacacttgcagtcaccatcggcaagagcataacgccccgctacactgccaccgcccagctctatgtcgatccgcgcgagcttcagctggtcgatcgcgagcttacgcctcgcgcccaggacgtctccggcatgtccatggtggtggagagccaggcccgcctgatcacctccaacagcgtgttgctccaggtgatccagcaggccggcctcgagaaggatccggaattcggcggcggcgagggcacgagcctgacgtcgtcgctgctcggcctgatcggcctgcaccctcgcgcaccttccgccgcgcagaagaaggaggtgcagctcgccgcactcgacgcgttgaacaagcacatcacggtccgcaagaccgagaagagcttcatcgtcgatgtcgaggtctggtcgacggaccccgccaaagcggcgatgctcgccaacacgctgaccagcgcctacctcgcggaatcccgcaactcgcaggcttcggccgcacggcgcgccaccaacgatctctccagccgcctgaaggagctgcgcgaccggctgcgcaacgcagagactgcgctcgccacctacaaggcccagaacaatttcgtcggcacccaggatgcgctgatcagcgatcagcagctctccgccagcaaccagcggctctccgcggcccgtgcggcaaccatggatgcgcaagcacggctcgaccagatcgaggcgagccggcgcacggccgccgatgcaggtgcgatccccgaggcgctgcaatcgccgacgatagcgaatctgcgcgcgcaatatgccgatgcgcgcaagaaatatgcggagcaggccagcgagctcgggccgcgccatccggcgctgcgccagaccgagaagcaggtcgaagacctcaagcgcaccatcaacgaagagatcgaccgcttcacccaggccgccaagaacgatttgacgcgcgcccgcgatttcgaagcctcgctcaatcgggcgctggaagcgcagaagcggcagagcgtccagctcagccaggccgccgtgcgcctgcgcgagctcgaacgcgaggtcgatgccagccgcgacgtctatcaatcctttctcaagcgctcccgcgagacggaggagcaggagagcctgaacacttcggcagcccgcgtcatcggcgaggcgacggtgccgcagcggcgctcgttcccgccggcaatgagcttgttcgccatgatcggcttcatcttcggcgcgatcgcagcgtcaggctggttcgctgcagccgagctcctgctcgtcggcgccaccacaccggcgccctcaccggcccgccgcgagcgcacgcccgccccgcagcccccgacggctgcagagcctccacggaccgccgagctcacccagccgcagccgatttcgcgcgccccggaagttgcgcaggctccgccggaacttgccgcgcctccgctgcagccttcgatgttcgagaggcccgtgatcgaaaaaccgctgatcgcacgcttccaggaggccgacgtcatccacacgctcggcgcaatactcgcaacgggccagtccgtcgatctcacgcgcttgggttggccgacgctccgtcccggctttgccctgaccgcgctgctcaacgcctggcgggacatgcgcgaagctgcgtcccggcgcgccggcggcaaggcgatgccggtgatcgcgctcgtcagtcccggcgagagcagcgggcggagcgtgatcgcactgaatttcgccctggcagctgctcgcgacggtgcccgcgtgctgatgatcgatgccgaccatcaggcccgatccctctcgaacaaggtgatccgtttgggcaggaccgaaccgagcaagctcggctggctctcgatcggcagcaaggccgcacgcgagatcaaaacggtcaacggtgtctcggtgctgccggccgcggaagccgacgccggaaaggcggctgcggcgatccgcaaggcgatcacgcaggctcgctctgcggccgggtatgatctcgtgatcctcgacggcccggcgatgccgctctcggccggcggccgcaagctcctcgacgacacggactcgctggtggccgtgctgccgaccgatctcgacatcaacgacagcctcgaggagatcctcgccgcgctcggtcccgccgagcgcaagctcgttggggtcgtgctcgacgagctcgcccctgaaatccaaacgcgccagcgaggcaaacaatatgcttga

SEQ ID NO: 7409 - DNA, 801 bp, BradyrhizobiumColbertium
atgaacaagccagcgacgatcgattttgcgacggccacggccatcaacgtccccaccgcggctccacccacccaggcgttgcacgatctggtccccggcgaagcccgcgacagcctgctcgctgtccatgacgttctgcgccgcgagctgccgcgtgaccagctcgccatctatgaagcgggcggcggctcgtgcagcgttctgccccccgaattgctgaaccgcagcaaagtcaccgtcgtggacatcgacgaggatcaggtccgcaacaacacctacgccgacgaggcgatcctgggcgacatccagacctaccgcttcgggcgcgagaccttcgatctcgtgatctgctacaacgtgatcgagcatctgccgaacgtcgacacggcgctcctgaacttccgcgacgcgctcaagcgcggcgggatgatcctgatcggcgcacccaatccgcgttcgctttccggtgtcgtcaccaaatattcgccgcactggtttcacgtctggttctaccggcacatccgcggcatcaaggatgccggcctgcccggcgaaccgccgttcccgacgttctttcatccgctggtgacgctgccccggctcgaagcattcgcggccgccaacggcctggagatgatctatcgccgcgaggtcgaaagcccgcgctatcccgagatgcgccggcgcaagccgctgttcgcggccctcgtcgacgccggcgccgcggtgctgaacgccgtgctcccgagcggcaccgacgtccgacgcggtgactatcacgtcatcctgcggaagagctga

SEQ ID NO: 7410 - DNA, 144 bp, BradyrhizobiumColbertium
atggtgttgcgcggagatggctcagttcgccggcgtgtgctgttcatttttggaacgaatccgttctgcggcgatgtgccgttgcgggacgtaccggcttgcgcgatcgaagcagggctttctcaacatatctcggacatctag

SEQ ID NO: 7411 - DNA, 1029 bp, BradyrhizobiumColbertium
atgacattgatcccgacagacctgtccgccgcgcgcctctcggatgccgtgtgcgattccaaccgagaaatcgcggcgagctcccgcatcattgatctgtcggtcggcatcgtcgtctgcatcccgtgcttccgccgcccgcagcacctgcggctgacgctggaatcgcttgcgaaccagcgtacgccgcgttcctttgccgttgtcatggtcgagaacgacgccgcgcggcgcgagagcgcgccggtcgccgcagagtttctggctgacggcaggctccagggtgtctgcctcgtcgagaagcggcagggcaattgtcacgcgatcaacgcagcgttcgaaacggcgcagacgctgtttcccgccgcgacccgcttcctgatgatcgatgacgacgagattgcttcgcccgactggctcgagctgatggtccgcaccgcggaggcgaccggcgccgatgtggtcggcgggccggtgttgccggtcttcgacgacgacagcaagccctggcttgcgcgccatcccgccttctgtccgacctacgactacagcggcgcggtgccgctgatctatggttgcggcaattgcctgatcacgcgtgccgccttcgagcggttcgaccgtcccgcgttcgatcttcgcttcaatttcctcggcggcggcgattgcgatttcttcgtgcggtgccgtgatgccggcctgctgttccactggacggcggaggcggtcatcaccgagacggtgccgcggaaccgcaccagtctgggctggatcgcaaagcgcggcctgcgcatcggtgcgatcaattatcgcgtgcagtacaaggctgcccgaagcagggcggcgcgggccagggtgtttgtgcagatgctcggacgggtgccgctgtcgctggctcgcgccgcagccttgctgacgtcgtcgaaagccgtcgttgcgatgcatcccgtgatggttgcgcttggcgccgccttggcggccgtcggcttggagcagaagccttatgaggcctcgaagatcgtttcttga

SEQ ID NO: 7412 - DNA, 987 bp, BradyrhizobiumColbertium
ttgatcaccgccgaagacgttctcgaactgccagccgccccccgtgcgacggcgccggcgcgcctcccgcttcaggtcgactcggccacatcagtgtcggtcgtcattcccgccaagaacgtggccgcctatatcggcgaaaccctcgtgagtgctctggcgcagcgcgaggtgaccgaggtgatcgtcgtggacgacggctccaccgacgagacggttgcgatcgtccgggccgtgcgcgactcgcggctgcgcttgatccacaacgactcggccggtgtctcggcggcgcgcaatttcggcgcccggcatgcgagcggcgcgtggctgctgttcctcgatgccgacgaccgcctgcgccccggcgcggtggcagcgctcctgtcggcagcgcgcggtgcaccgcgcgcggttctgatctacggcgactacaacacgatcgatgccgaaggacggcagatcggccggcgcgagttgctgaagggacgccgcaaaccgtccggcgacgtgctgtcgcggctggccgccggcaatttcatcgtcaatggcggcatcgttctcacccgtgcggacgctttccgcgccatcggcggtttcgacgtatcgctcagatattgcgaggactggcattgctggtgccgcctcgcgtcgatcggcgagttcgaattcgtgccgaagcttctgctcgattatcgcctgcacacggccaacacgatgaacgcagcggtgcgaaccccgcaggatttcttgccggcggttgcgcggattttcgatgacgggttgatcctggcgagacttcccgaggacgcggcgagcggattgcgccgagccgccgagattcacctcgtcacctattcggcgatgcaggcagtccgcttcggcagatatcgcgacgcctttgcctatctcgcgatgatcggccgtcggtcgccaagatccctgccacgcgcggcgatccgcgtcgcactcgcccgcttcggcatctag

SEQ ID NO: 7413 - DNA, 1104 bp, BradyrhizobiumColbertium
gtgcccgcaaagaccttcgaacacgaccccgacgcgatgatcctgaacctcttctatgaggacaaggacgatcgctggtttcccggcgaccggcatctgcggcgcatggcgcggcggttgctgctgggcgagccgcgcatgagcggccagcttcgcgtgttcctcaacctctgtgccgggctcgaccggctcggcattcgctaccgcgtcaacgattacggtcatgtcgcccggcatcccgaggaactcgcctgtatcatcggccgtaccttcctgctcgacaagttcgcgtggaagaacccgatcctgctcggcgttgccgcccacaatcatccgctggatgaccccgatctgttcaggcgtctgcccgtgaagaaggtggtggtgcccggccgctggtacgtcgacatgtaccggccgtattggcccgagacggaggcttggccggtcggcatcgacacggatttctgggcgccgtcggagtcatcgcagaagacgatcgatgtcctgatctacgacaaggtttattgggaccgtgagcgctacgtgccggcgttgatcgagccccttcgcgcccggctgctgaaggaggggcgctcgttcacggagctgcgctatggcagctacaaggaggcagattatcgggccgcgctggcgcgttcgcgcgcgatgatctttctgtgccagagcgagagccagggcatcgcctaccagcaggccttgtcctgcggcgtgccggtgtttgcctgggatccgggcgggccttggcgcgaccccgattactatccgcaccgtgtgaggtttgagccggtgtcgtcggtgccatactgggacgaacgctgcggtgcaaagttcaccgacatcacgggcttcgaggcgggttggggcaatttctgggccgggtgcgctgccggcaccttcgatccgcgcggctacatcctggacaacctgaccctggagcaacgcgcgctccaatactacgagatcgcgtgcggcatcatgcggcggcccgcggtggcgaaggcctcgggcggcgccgtcgacgggtgctcggcaggggcgagccagggcctggagcttctccggcatcaccagatgtcctga

SEQ ID NO: 7414 - DNA, 1353 bp, BradyrhizobiumColbertium
atggaccgcagcgccgccgacatgactgccgcccagactcgatcatccggccatatgctgcgtgaggcgcttgcagggctcgatgccgtgcaggccgcgcgctgccttgtcgccgccgcagctctgctgctggtgctggtgacgctcgatccgtttccggacctgcgcaatccagacgtcaccaccatcgtcggcggacgaatggctctgacctatgtctcctggggcctcctggccggggtcgcggtcctgcttgtcgccgccaccgacgcgcccgcgctgaagaccctggcgacaccgcttcatctctgcctcctgggctggctggtgatcaacatcgtcttctccgagagccgcggcgtctcgatgcagcggttcgtgctcgcggccagcgtgacgtcgatcgccgtcctgttgccattgctgccgccgacgcagcgcagtttcaatctttgtctgggtgctacagcgttggtgctgctcgcgctctgctatctcggcgtcctcctcgcgccgcaatattcgatgcataccgcgctcgacgtcaccgagccgcagcttgccggcgactggcggggcagttttggccacaagaacgtcgcctcgcccgtgatgaccatcctggtctatgtcggcatttatttgtccgccgtgggctcattcgtgatgggaccggcgatcgccgctctggccggcatcttcctgatcttcaccggcggaaagacgtcgtcggtgctgtgccttgcgatctacgttctcgcctccctggtctatgtcacgccaagcctttggatgaagcggatcatctgcttcgtgcctctggtcgcgatgaacctgttgaccgtcggcagcgccctcagcccggcactcgcggcgatgacgcggctgcttccgctcgatcccaccttcaccggccgctccgcgatctgggagttcgctctggcagccgtcgccgagaagccgatcatcggtcacggctatgcggcattctgggacgacgtgacttcgcggcagaccgctcagggtgcagaatgggcaacgtccgcagcgcacagccacaacagctacctcgacctcgcggtcacgattggtctgcccgggctgatgctcgtgatcctggtcttcgtgctcgccccgctcggtaacttccagacggcccaggcgcacagccgcagtggtgcgctggccaagttgttcctgaccgtgtggttgttcggcctgtactatggggctaccgagaccttcctgctcgaccggcagaatcccgtctggttcttgttcgctcttgccgtcgctggcctgcactttctggcgaggttccaatgtgtcgagcaggcggaaatggagcgctga

SEQ ID NO: 7415 - DNA, 1146 bp, BradyrhizobiumColbertium
atgacgttccctagtatcgagcagtcagaaggccggatctccagcgcgtccggggtcgcggtcgatttcatgcgtgactggcggcaggccgcatcgcgcctgaacgccgggcaccgcaccgcgttccagcatggcgactggctcggtgcgtggtacgaagcgttccaggatgtagccccgctgatcgcggtgatctccgatgtcgccaccggcaaggacatcgcgatcctgccgatgatcagccatgtcaggcgcggcattcgcattgtcgaattcgcggacctcggcgtctccgacaacaacgcaccgatcctggcgtgcgatgccgccttggatgcaggggcgacggatgcgatcaacgcggcgctgatcgatgcgttgcgcgcgctgcctgaccgtctcgatctgctccgcatgaggaagatgccggcctggatcgagggcgagccgaacccgttcgtggcgctcggccggctcggatcctcctcgctcaacggcaatctcgtgctgatgggcgatgactacggcgcctaccaggcttcgatcaagcgcatgcaaatgccgcgttgctggcgcgtcttcagccggcacgagggcgcgcggttcgagatcgccacggatgtcgcgcgcgcgcatgaattgctggacgtaatggatgggcagcagcaggcgcgcatgcagaagctcggctcgcgcttcgtcctcaacgacgagtcccatgcgcggttctatcgcgaggtggcgcgccggggccttgcggaaggctatgccgtcgtctcggcgctggtctgcgacgcaggtgtcatcggcacatcgttcggcgtcaggcaaggcgcgacctattatctgctgcgcatcagtcacgccggcgatccctggtcgagctgctcgcccggcctgctcgtcatcgagcgcaccatggcggcgctgcatgcaaggggcgttcgtcgcttcgatctcagcatcggcaaccaggactacaagcgacgcttcggtgccgaacgggtgccgctgaccgatgtcagcgtcgcgctgtcctggcgcggtctgccctacgcatggcgcgatcatggcgcgcaaggcctgcgccgtcatcccaggcttgccgccctcgcggcgcgggcgatgggcaagggaaagcgctga

SEQ ID NO: 7416 - DNA, 600 bp, BradyrhizobiumColbertium
atgaccaaagtactcgtcctctattactccgcctacggccacatcgaagcgatggccaacgccgtcgccgagggcgcgcgggaggccggcgccattgtcgacatcaagcgcgtacccgaactggtgccggccgacgtcgccaaagcgtcccactacaagctcgaccaggccgcgccgatcgccaagatcgaggacctcgccagctatgacgcgatcatcgtcggcaccggcacccgcttcggccgcatggcctcgcaaatggcgaacttcctcgaccaggcgggcgggctctgggccaagggctcgctgcacggcaaggtcggcggcgccttcacctcgaccgccacgcagcacggcggccaggagaccacgctgttctcgatcatcaccaacctcctgcatttcggtatggtcgtggtcggcatgaactacggcttcgccggccagatgaagctcgacgaggtcacgggcggcgcgccctacggcgccaccacgatcaccggcggcgacggcagccgccagcccagcgccaacgagctggccggcgcacgctatcagggccgccagatcgcggagacggccaagaagctgcatgggtga

SEQ ID NO: 7417 - DNA, 699 bp, BradyrhizobiumColbertium
atgatcgaactcagacccttcgcaaagctcggcggcgccgaccacggctggctcaaggccaagcatcatttctccttcgcgagccactacgacccgaacaatatgggccacggggcactgcgggtttggaatgacgacgagatcgcgccgaacaccggctttcccgctcatccccacgccaacatggagatcatcacctatgtgcgcgagggcgcgatcacgcatcaggacagcctcggcaacgagggccggactgaagccggcgacgtgcaggtgatgagcgccggcagcggcatccgtcactccgagtacaatctcgagccgaccaggacacggatcttccagatctggatcgagccgaccgagcgcgggggacagccgacctggggctcgaagccgtttccgaaggcggatcgctccggcaagctcgtcaccatcgccagcggctttgcggacgataccgacgcgctgccgatccgcgcagacgctcgcgtgctcgcgaccacgctgagggcaggcgaaagcgcggagtacgagccgcagacctcgcggcatctctatctggttccggcgctgggcgcggtcgagatcaacggtgtgcgcgtcaatgcccgcgacggcgccgcgatccgcgacgaagccaggctgaagatcacggccctggaagattccgagctcgtgctcgtcgacgcggcgtaa

SEQ ID NO: 7418 - DNA, 936 bp, BradyrhizobiumColbertium
atggccaaactcccggatttcgaggcgctcgcgattttcgccaaggtcgtggaattgcgttcctttgcgggtgctgcgagcgagctcgcgatgtccaaggcgacggtatccaaggcggtgacccggttggaggagcggctcggcgctcgtctgttcaaccgcacctcgcgccggctcgcgctgactgatgccggccataagctggccgaacgcgcgacgcgcctgttggccgacggcgaggctgccgagaacgaggcgctcgcgcaatcgatcgcaccacgcggcctggtgcggctcgcggtgccgatgacgttcggcatcaaggccgtggcgccgctgctgccggagttctttgcgacctatccggaagtctcggtcgatctgcatctgagcgatgcgaccgtcgatctgatcggggagggctttgacatggcggtgcggatcgcgcggctgccggactcctcgctgatcgcgcggcggctcttcaccatgccccgttacaccgtcgccgcgccgtcctatctcaagcgccacggacggccgacgcatccgatgcatctcgccgagcacaagtgcttcagctatgcctatctgtcgacgcccaatgtctggcactacaccaattcggccggtgagcaggccagcgtgcgtccgggtggccagcttcgcgtcaacaatggcgaagccgtgatgccggcgctcatcgcagggctcggcatcgccgagctgcctgaattcatcgtcggcgaggccatttcctccggcgaggtcgaagtcatcctgaaggactggaagcaggccgaaggcgccgtgcacctggtgacgcctcccggcggcccgcgtcccgctcgcgtcgaggcgctcggcgatttcctcgcggcgaatctgccgggcatgtgcaagcggcggacgcgcggaaaggcgaagacggcatag

SEQ ID NO: 7419 - DNA, 258 bp, BradyrhizobiumColbertium
atgggaaaactcgcaaccgttgacgtcgccttggacgagatgctggtcaaccttgccgcgatcattctgcggctcgcgaagcccgaattgacgcaaacgccggaggcgcggcgcgcgctggcgcagtccgtccatcaatatgcggtttgcgcgaagcgttcgagcgatccgcgcgttcacgagctgaagtcgcaactggagcagacgctgaagccgagcctgcgcattgtcgcgatcgacggcgagaaagtggcttag

SEQ ID NO: 7420 - DNA, 150 bp, BradyrhizobiumColbertium
atgccgactacaaggccagcccacgcacggaccggcgttgtcggcatcctgcacaacaggctgctcgtcacaaccgcgctggcgccgctcgctcatgccgctgcagctgatgccgaggccggcgctggcggcgttcgcagcgaatcttga

SEQ ID NO: 7421 - DNA, 345 bp, BradyrhizobiumColbertium
atgcgaacggagctggccttgctgggtgtggtgcttgctatcgggggcatcggagcgcagagcgctgcgtccgcgcaggaatatcgcggcacgatggaacagcagatggcctgcacaccggacgtgtggcggctgtgcagcgatcagatcccggacgtgaaccgcatcgtcgcgtgcctgcagcagaacacgccgcagctctccagcggctgccgtggcgtgttccagtccaacaatcaggtgcagccgcagcagccgacgccgcgcaatcgcgtcacgcccccgccacgctacaatgctgcgcctccgcccactcaatcgcagccttacgatgaggatgaataa

SEQ ID NO: 7422 - DNA, 468 bp, BradyrhizobiumColbertium
atgagcctggaatccgttcgcgcttttttcgccgagaatgcccccgacatctcagtcatcgaatccccgatcagctccgcgacggtggcactggcggccgaagcttatggcgtcgagcccggccgcatcgccaagacgctgtcgttgcgcatcggcgagcgcgtgatcctgatcgtcgccagcggcacctcgcgcatggacaacaagaaggtcaaggcgcagttcggcggcaagccgaagatgctggggctggaggaggtcgccgacatcaccggccacgaggtcggcggcgtctgcccgttcggactgaagtcgccgctgccggtctattgcgacgtctccctgaaggcgttcgacgtcgtggtgccggccgcaggctcgacccacagcgcggtgcgcatcacgccggagcggatggcggagctgaccgcggctgaatgggtcgatgtctgcgagcatagaccctag

SEQ ID NO: 7423 - DNA, 732 bp, BradyrhizobiumColbertium
atgagcttgaaagccgtcgtcttcgacgcctacgggacgctctacgacatccagtcggtcgctgagatcaccgaggatgcgtttccgggctatggcgagatcatcacccaggtctggcgcatcaagcagctcgaatacacctggctgcgctctctgatgcggcgctatctggactttgctgccatcacccgcgactcgcttgcctatacgctgcgtgtgctcggcttggcctacgagagcgaggtgttcgagcgcgtgatcgagaaatatctgcaccttgatctctatccggatgcgactgcaacgcttgcggccctgagaccgcgcaagctcgccatcctctccaacggcagcccggacatgctcgatgcgctcgtgcgcaattcgggcctggaggctctgctcgatgcgaccatcagcgtcgacgcgaagaagatcttcaagccgagcccgcaagcctatgagctgatcggcgaggtgctcggcaccgcgccgaacgaggtcctgttcgtctcttccaatccctgggacgccgccggagcgaaatcgttcggattgaacgtcgcctggatcgatcgggtgacgcccgaagccatggcgctggcttgcgtcgagaacgaagccgtggcaccgctgacgatgttcaaggcgatccgcacccagatggacgagctcggctttgcgccggaccatcggatccgctcgctctccgaactgccgagaatcgcctaa

SEQ ID NO: 7424 - DNA, 291 bp, BradyrhizobiumColbertium
atgagcaacttcaagatcacactcgcacgcattgagatgatctcgccgaatgagcgaggtgaggatatgggtctaacgtttcgatttgagcgcgatcaaaccagttttaccttgccgatattcctcaactctcgcgaatttgacgacacggagatggtaaaggtcgcccggagcaagctacacgacgttttcgaacagctcttcactcaatgcgaggattggcaattgtccgatgccgagcgccgtgagctcgcaaggctcaacgtgcggccggaagcgccgatcccatga

SEQ ID NO: 7425 - DNA, 219 bp, BradyrhizobiumColbertium
gtgcatttctggggatcagacagcgcgattgaggcatcattcttcattgaggaagacgccttgaaacgacttcagccgggtgcctgtcacgaagctgatttcctgaatgcatttgaccgcaatcggggcgtgatctgcgccacagccgcaaaggtttatgtgcgcggcagcaggggctcttatgatcttgtcgccaaccaattctcaaaaggggcctga

SEQ ID NO: 7426 - DNA, 864 bp, BradyrhizobiumColbertium
ttgatcaccctggacattcagcatacgacgacctatcgcttcgacgagccggtaggccttcttcctcatcgccttatgcttcgcccgcgcgaaagccgagatgttcggctgctgtccagccggatctcggcgtcgcccgatgcggtcctgagctgggccagcgatgtgttcgggaatacagtcacgacggcaacgtttgccacgaaggcgagcactctggtgatctccagcgttgccaagcttcagctcgcttcggtcgagtggccgattttcgacatcgccgtctctgcaacatcctaccccttcttctattccgatcatgattgggccgatcttggcgccttggccagtccgcagttcgcggaccccgaaggaacgttgcgaaactgggcacgaatgtttgttcgcggaagccagaccgacacattggcgctgctcaaggacctaagcgttgggacttcggaagctgtccgatatcagagccgtgacgaggaaggcacccaaacgccgctggagaccttgagccgtggctggggttcatgccgggatctggcggtgttgttcaccgaagcggcccgcgtactgggtttcggagcgaggatcgtttccggctatctgtacagcccgagccagcaaagtgcgggctccggcggagcagggtcaacgcatgcgtgggccgagatcttcgtaccgggagcgggctggatcacctttgacccaacaaaccgcagcttaggcggcttcaacttggttcccatcgcggtagctcgcgacatccgccagattgcccctgtatccggcagctacatcggcagcacccatgccttcgccggcatgtcagtggaggttctggtcacctcatag

SEQ ID NO: 7427 - DNA, 1005 bp, BradyrhizobiumColbertium
atgactgtcccgcatgttcgttttccaagaatcctgtccaagtgtctcgtcgcattccagcgtcaccctgcgcttgccaccgttgctggcgcggccactctcatggcgggcgccgcgctcatcaaccggaagtttgcgaagaaggcgcaacgcgacaatcctccacaagggcgattcatcgaggtcaacggcgtccggctgcactatgttgaacgcggcaacggtcggcctctcgttctcttccacgggaacgggagcatgattcaggatttccaatcgagtggcttgatcgatcgcgcggctgaaacctaccgggtgatcgtgttcgaccggcccggcttcggacatagcctccggccccgcaacgtcgtctggaccccggaagcgcaagcggatctgttcaaggttgcacttgatcagttgaatgtcgaccgcgcgatcgtgctcgggcattcgtggggagcgtctgtcgcggtagcgctcgcgatccggcacccgtcctcggtcgaagccttggtgcttgcgtcgggctactatttccccaccgctcggagcgattcagcgacctccctgttgcctgcgacgccgggactaggggacatcatcagctacaccgcctcgccgctcctcggtcgcctgatgtggcctgcgatgttgaagaagctgttcggcccgcagccggctcctgggaagtttgccggttttcccagagacatggcactgcgaccggggcagatgcgtgccggcgccgcagaagcagccttgatggtccccggtgcgttctcggctgaaaagacctacagcgaacttgggatgcctacgatcatcattgcgggtgaaggggatcgcttgattgacatcaatgagcaatcggccaagcttcatggagaggtcaagcaaagtaaactgcaccgcatcgccggagtgggtcatatgattcaccagtctgcaatgccagacgtcatggcggccatcgacgaagctgctgcacagacggtgcattag

SEQ ID NO: 7428 - DNA, 258 bp, BradyrhizobiumColbertium
atgaccatccgttcgcggcgggaaaccgtcacattcaagcatccgttccacatccgcggcattgcgcgcgagttgccggcaggccgctatgaggtcgtcaccgacgaggagatgatcgatggactttcgttcgcggcttggcgccgtgtcgccaccatgatcacggtgccgtccaaagacgtgcagggcgcgacggagatacgcgcgatcagttcggtcgacctcgcggacgctcagcgcaccgacgtgaaccgctga

SEQ ID NO: 7429 - DNA, 168 bp, BradyrhizobiumColbertium
ttgaagcacgaccacgtcgtgctcgcgcaggagcgtgcgatttggcattgttggacctcggaatggatcgttccgccaatcgtggttcccgtgttcctgctgcttctcgttgtgcagcggcactcttccatagctagcgcgacacgttcttatcgcgtgacctcgtag

SEQ ID NO: 7430 - DNA, 981 bp, BradyrhizobiumColbertium
atgcccgtatggcacgaaaagcacctccgggccgcgacgcgcgccgccggcgtcgcattgtggtcttggaacgtcgacactgacgcgatcacgatggacgaggccgcatatgatctttgggatgtttcgaaggaagaacggacaattaccttcgaaatactgtccaggaatattcatcctgccgatctcgaaagggtcaggtcggccttttcggcaacgcgagcggtagtgggcgcttatgagatcgattttcgtatcttatctggaggcgatgttcgctggatctccgcccggggccaaggggacgatgctgacatcgcagaacgagttatgttcggtatcttccttgatgtcacccaacgcaagcaggccgaggaagcaaatgaactgctggcgggggagatgagccatcgggtgaagaatcttttgacgattgcgacggcccttacccaaatcacatcccgctcggccgaaacaaaagaagagatggcacaggaactgaccagtcgcctgatcgccctaggccgtgctcaagacctcattcgtcgaatacccggtcagaagaccggggccacgcttctcggcgatctcatctctgtcctgctcgcaccgtacgatgagaagggagctagtgttcgtattcgcgtttcggtccccaagatgaccgtgggagagagctcgagcacggcactagccctcgtgatccacgaactggcgacaaactctgcgaaatacggcgcattgtctgtttcgagtggcaccttggacgtttcttgcaacgcccatgaagacgaagttgtggtcatgtggaccgaacgcggcggccctccggtggtcgcgccaacaaagctgcacggcttcggaagcaagatggtgcaccggagcatggcttcacagctcggcggcaccatagctttcgagtggtcagacgagggtgtggttgtcgccttgcgaatgagcaaacacagtctcgccgattga

SEQ ID NO: 7431 - DNA, 885 bp, BradyrhizobiumColbertium
atgccgaagctgaagctgccaaacatcgacgatgtcgtcgccatcgacatccacacccatgccgaggagccctgcggcacgcatcccgacgacggctacgacgatttccaggcgcagatggcggagtatttcaagtcgccgcacaagcatccgccgacggtgccggagaccgcggcctactaccgctcgaagaacatcgccgccgtgatcttccctgtcgatgccgagcgcgagaccggtttccgccgctacaagaacgaggagatgctggagatcgcctccgagcatctggacgtcctcatccccttcgtctcgatcgacccgcacaagggaaagctgggcgcgcgcgaggcgcgcaagctgatcgaggaatacggcgtgcgcggcttcaaattccacccgaccatgcagggcttctatgccaacgaccgcatggcctatccactctatgaagagatcaacaatggcggcgcgatcgcgctgttccacaccggccagaccggcgtcggctccggcatgccgggcggcatgggcatgcggctgaaatattccaaccccatgtacatggacgacgtcgcggccgacttccccgatctcaagatcatcctcgcacacccctccttcccctggcaggaagaggcgctgtcggtcgcgacccacaagccgaacgtctacatcgacctctccggctggtcgccaaagtattttccgccgatcctggtgcgctacatcaactcgattctgcaggacaagatgctgttcggctcggactggccggtgatcacgccggaccgctggctgtcggacttcgccaagatcgacatccgcgacgagatccggccgaaggtgctgaaggccaacgcgcgcaagctgttggggatctag

SEQ ID NO: 7432 - DNA, 126 bp, BradyrhizobiumColbertium
atgaaggtccgtaactcgctgaaatcactgcgcggtcgccatcgcgccaaccgcctggtccgccgcaagggccgggtctatgtgatcaacaaggtgcagcgccgcttcaaggctcgccagggctga

SEQ ID NO: 7433 - DNA, 570 bp, BradyrhizobiumColbertium
gtggctccagccctggcgcagcaggttgagccgcccggcaaacagaagaagctcccggaagcgcctgccaagctgcccaaggtcgatcgcagcaagaatctcgacttcctgttcggcgcgttgaaggcggcccccgacgagaccagcgccaagcacgtcgaggcgcggatctgggcggtctggctgcagacaccgagcgacactgcggcgcttctgatggcgcgggccaagaccgcggtcgacgcgaagaagatcgaggttgcgatcaagctcttggattcggtcatcaagctcaggccggattacatcgaggcatggaaccggcgtgcgacgctctattacatgcagaacgactatggccgctctctttcggacatccagcaagtgctgatccgggagccgcgccatttcggcgcgctcgctggtctcggcatgatcatgcaggaggtcggcaacgagaagcgcgcacttgatgcctatcgcaaggcgctcgccgtcaatccccacctcgaaaagatacccgatcaggtcaaggcgctgaccgagaaggtcgagggccgcgacatctag

SEQ ID NO: 7434 - DNA, 114 bp, BradyrhizobiumColbertium
atggctttcgctcctgccgtggacgtaggcctgcaaagcgccgcgcaacagccccgctgcgcgacggctgcgatcgtggttaatcggcgacggctgcaatcgctcaagaaatga

SEQ ID NO: 7435 - DNA, 249 bp, BradyrhizobiumColbertium
atggtcgcagctgtcttgctgctcgggtcgggaacggtgagcttcgccgacggactgttctgggtggtcggcaaccgcgccaccggaaaatgcaatatcgtgaccagcaatccggtcatcgccggcgacatcttcttcggcgacggtccctacaagtcaagggcggatgccaagcttgcccgctcgacgatccgcgtctgtcccgcagtcacgcccgaggacgaaaaggaggaagacgggacgaactag

SEQ ID NO: 7436 - DNA, 183 bp, BradyrhizobiumColbertium
atgagcttcagatcaagcgacactgcgatcgacgaaatcgtcgcgagttgcaatggcgacctgcgcggtgcggtgcgggcgctgctcctgatcaacgagcatctcgagaccgagcttgcaagggcttacgccgcagcggccgatcgcggccttgtcgagcgcggcggcaacgtcctgcattga

SEQ ID NO: 7437 - DNA, 957 bp, BradyrhizobiumColbertium
atgatcgtgatgtcagccgtgacggcgctggttctgctggccctggtcacgcaggtgggaatcgtcgccgtgcaacgcgcctttccgccgcagggccggatgatcgaagtcgacggcgcgacgctgcacgtcgtcgatctcggcccgcgtgaggccggcctgccggtcgtgatgctgcacggcgcgagttccaatctcgaagcgatgcggcggccgctcggcgatatcctcgcggaggaccggcgcgttgttctgatcgaccgccccggccatggctggagctcgcgggcgcgccggcaggattcgacaccgcagatccaggcgcggatgatcgacgaggcgcttcataagctcgggatcgatcgcgcggtcttcgtggtgcattcctggagcggtgctctcggcgcgcggatcgcgctcgatcatccgcaccgcgttgccggtcttgtgatgctcgcgcccgtcactcatccctggcgcggcggcgtcggccgctacaacgagatcatcgcaacgcccgtgatcggtccgctgctcgcctacaccatcacgctgccgctcggctatgttctcgctgaatccggcgcgcgcaatgtcttcctgccgcaaaccatgccggatggcttcgtcaaggactccgcgacgccgctgctgctgcgcccccgcgaattcatcgccaacgcccatgatctggtgacgctgaaggaggccgtcgccgcgcaagtcgcgcgctatggcgagatttccgcgccggtgacgatcatcgccggcgagcccgacaagacggtatcgaccaacatccatgcgcgcccgttcgcggccatggtgccgaatgcgaagctgatcgtacgtcccggtctcggccacatggtgcagaacgccgtgccggatcttgtgaaggcggagatcgagaccatgatcggcaagatcgttccggcgcaggcggccgccgactga

SEQ ID NO: 7438 - DNA, 396 bp, BradyrhizobiumColbertium
atgacaaaactgacttttggcgcactgacgatcctcaccgcgattgccaccgctcccgccgcgatggcgcaggatgtcgcggccggcaagacatcgttcaacaagtgcctggcctgccacgcgatcggcgaaggcgccaagaacaaggtcggccccgagctcaatggcctcaagggccgcaagtcgggcaccgttgagggctacaactacacggacgcgaacaagaattccggcatcacctgggacgaggcgacgttcaaggaatacatcaaggaccccaaggccaagatccccggcacaaagatggcgttcgccggcatcaagaacgagaccgagatcgccaatctctgggccttcatcgcccagtacgacaaggacgggaagatcaagcagtaa

SEQ ID NO: 7439 - DNA, 1494 bp, BradyrhizobiumColbertium
atggccatcatgatgcctgccagcgaccaggccgtgctcgcgcggcgcgcggaaatcattgctgcgttgcgtgcgatcgtgcccggggaaggcgtgatcgacagtgctgccgagatgcgggcctacgagtccgacgggctgaccgcctaccggcagccgccgatggtcgtggtgctgccggatacgacggagcaggtctcgctcgtcctgaaatattgtgcagagcagagcatcaaggtggtgccgcgcggctccggcacctcgctctcgggcggcgcgctgccgctcgaggacggcgtgctgttggggcttggcaagttcaagcgcatccgcgagatcgatttcgacaaccgcgtcgtcgtcaccgagcccggcgtcaccaatctggcgatcagccaagccgtcgctcatgccggcttctattatgcgcccgatccgtcctcccagatcgcctgctcgatcggcggcaatgtcgcggagaattccggcggcgtgcattgcctgaaatacggcatgaccaccaacaacgtgctgggctgcgagattgtgctgatgagcggcgagatcctgcgcatcggcggcaagtcggccgagaaccccggctacgacctgatgggtgtcatcacgggctccgaaggtctgctcggcgtcatcacagagatcacggtgcgcatcctgcagaagcccgagacggcacgcgcattgatggtcggcttcgccgaggtcgaggccgccggcgaatgcgtggcgcgcatcatcggcgccggcatcattccgggcggcatggaaatgatggacaagccggcgatccacgccgcggaggccttcgtgcatgccggctatccgctcgacgtcgaagcgctcctcatcattgaactcgacggccccaagatcgaggtcgacgagctgatcgcgcgcgtcgaggccatcgccaatgcgtgcggctccaccacctgccggatttcgacgtcggaggccgaacgcaacctgttctgggcgggccgcaaggccgcattcccggccgtgggccgcatctcgcccgattatctctgcatggacggcacgattccccgcggcgcgctgcccaaggcgctggcgcgcatccgcgagctctcggaaaaataccagctcggctgcgccaacgtgttccacgccggcgacggcaatctgcaccctctcatcctctacgacgccaacaagcccggcgagatcgagcgcgctgaagccttcggcgccgacatcctgcgcgcctgcgtcgagttcggcggcgtgctcacgggcgaacacggcgtcggcatcgagaaacgcgacctcatgcccgacatgttcagcgagatcgacctaaaccagcagcagcggctgaaatgcgccttcgactcacagggcctgctcaatcccggaaaggtgttcccgaccctgcaccgctgcgccgagctcggtcgcatgcatgtgcacgcgggcaagctggcgttcccggacattccgcggttctag

SEQ ID NO: 7440 - DNA, 1239 bp, BradyrhizobiumColbertium
gtggatacgctcagagtcagagacgccaaagacgttgaagaggtggtacgcgcggcgattgcgaacgagcagccgctcgagatcataggccatggcagtaagcgcagcatcggccacgcgatggcgaccaatgccgtgctcgacgtctcggccttgaatgccgtcacgtcctacgagccaaatgagctgatcgtcacgctccaagccggtgcgccgctgggcgacgtgcagtcgctgatcgatgccaagaaccagcaattcgcctttgagccgatgaacaccgctccgctgctcggcacgcccatgtcaggcactatcggcggcatgatcgcggccgggcttgccggtccacggcggatcagggccgggggcgcgcgcgatcacctgctcggggcgcacgccgtctccggctttggcgacagcttcaagactggcggcaaggtggtgaagaacgtcaccggctacgacctctgcaagcttctcgccggttcctggggcacgctgtcggtgatgacggaggttacgctcaaggtgatgccgaagccggaagccgagcggacgctgctgctgcgtgggatggatgatgccgccgccaacaaggccatgaccgtggcgctgggctcgcccttcgacgtctccggtgccgcgcatctgccgaaatcggaactccgggccaaggtcgaggggctaggcgacgtcgcgggtgagggcgagccgctgaccgtgctgcggctcgaagggatcatggcgtctgtcgcgcaccgcgccggatcgctgcgcgaactgctggtgtcgttcgggaccgcgaccctggtcgaggatggcgcatctgcggcgctgtggaccacgatccgcgatgtgctgccgttcgcggcgaccggcgcgctcggcgcctggccggtgtggcggatcgtctgcccgccggcctcgggcgcggcactcggcacccaactggcccgcgagacggggggcgatttgatctacgattggggcggcgggctgatctgggcggcattgccgccgaagtcggatgcccatgccccggtcgtgcgcgcacgcgtgagtgcggccggaggacatgccacgctgatccgggcggaagaggaggtcaggcgcgacgtcgatgtatttcatccgcaagagccgggcatcgccgcgctgagcgagagggtgcgcgccagcttcgatccgaaggccattctcaaccggggacgcttgagccggggcgctacggcatga

SEQ ID NO: 7441 - DNA, 1323 bp, BradyrhizobiumColbertium
atgaagaccgaattctcactggcgcagctcgccgaccccgagatcgcggaagccgacaagatcctgcgtgcttgcgtccattgcggcttctgcaccgcgacctgtccgacctatgtgttgctcggggacgagctcgatagcccccgcggccgcatctacctgatcaaggagatgctggaaaaggaccaggcgccgacggccgaggtggtcaagcacatcgaccgctgcctgtcgtgccttgcctgcatgacgacctgcccctcgggcgtgaactacatgcatctcgtcgaccaggccagggtccgcatcgagcagcgctatcagcggcccttgaccgagcggctgctgcgccgcgtgctggccttcgtgctcccggatccgcagcgcttccgcctcagcatgtggctggcgcggctcgcccgtccgctgggcgtcttgttgccgacgccccggccttcggccacacccggattgatccaccgcatcaaggcgatgctggcgctggcgccgaatcggctgccaccggcagggcctgctgcaggcagcgtgttcgcagcgctcggcaagaagcgcggacgtgtggcgctgctccagggttgcgcccagcaggtgctggcgccgcgcatcaatcaggccgccatcaatctgctgacgcgccacggcatcgaggttgtccttgtcagggacgagcagtgctgcggcgcgctgacccatcacctcggcgacgaccaggatgccttggcgcgagctcgcgccaatgtcgcggcatggcggaaggaagcggccggcgaggggctcgatgccatcctcgtgacgacctcaggctgcggcacggtcatcaaggattatggctatctcctgcgcgaggaggccgccttcgcggccgatgcggccaaggtgtcgtcgctcgccaaggacatcaccgaatacgtcgccggcctcgaactctcgaccgccgcgcggcaggagaacatcgtcgtcgcttatcactcggcgtgttcgttgcagcacgggcagaaaatcacgagccttccgaaagaattgctttccaagaatggattcgtggtgaaagatgtgccggagagccatttgtgttgcggttcggcggggacctacaacattctccagcctgagcttgcgggtcggttgcgcgatcgcaaggtcgccaacatcgtgagcgtcaagccggatatgattgccgcgggcaatatcggctgcatggtgcagattgccagtggcacgtcagttccggtcgtacacacgattgagcttctcgattgggctacgggcgggtcgcggccggcactgaacgcgcaggtttga

SEQ ID NO: 7442 - DNA, 378 bp, BradyrhizobiumColbertium
atggcgaaagcgaagaagaagaaaagcaagaaggccagaaaggccaagaaggctgtagcggccaagaaagcaaccaagaaagcagccaagaagtccgcgaaaaggtcggctaagaaagccacgaagaagactgcaaagaaatctgccaagaaggccgccccgaagaaagccgccaagaagggcgcggcaaagtcggccaggaaggccgcacccaagaaagccgcaaggaaagcggcaccgaagaaggcgaaggcagctcctgctccgaagccgtcagcaccggcggaagctccggctgccgagcctgccgccgagactagctgggcgatgccttcgccttctgcggagccggcggcggctgccgagggtcaggggtag

SEQ ID NO: 7443 - DNA, 1026 bp, BradyrhizobiumColbertium
atggggatcgaaatgaaaaaagtggctttgttggcaacggcgctggcaatggtgacgacgggttcggctttcgcggcggatttgcgtgtgaaggcgctgaaggccccgccgcccccggccttcgacccttgggatatcgccttcggcggcgcgatcatgagcaactacgtcttccgcggcatcacccagtcgaaccacaaaccgtcggtcgccgcctatttcgagccgcgctacaacgtcaccaaggatctccagctctatatcggcctcgccggtgagagcatctccttcccgaaccgcgcggcggccgagatcgatgtctacggcggtattcgcccgaccttcggtgcgttcgccttcgacatcggcgtctggggttacctgtatccgggtgggacctgctattacggcgcagcaaccgacaccgccggcaatccgctcgccgagtgtgccgccaacgccctgctcaacggcaacgtcatgaagagggacgtcagcttcttcgaagtctacggcaagatgacctacacggtgaatgacaattgggcattcggcatcagcgagttctattcgccgaacttcctcaacaccggggcttggggcaactacacttcggtcacggccaaatggatagcgccgagcaccaccttcggcgcgagcggcgtcgggatgtacgtgtccggcgagttcggccgtcagtggttcggcacctccgattcgttctatggcacgggcattgccagcccgctgggtggcggcccgttcccgaacggcatcaaatatgccgactacaacacctggaatatcggtgtcggcttcacctacaaggtcatgacgttggatctccgttactccgacaccgacctgagcaggggtgattgcaatgccttcaccagcgactataccgccggcggaacgaccaatgcgaccccgatcaaccccggcggagccggctccaagtggtgcggcgcgaccggcatcgccaagctctcgttcgatctgacggcgatgaccaacctgaagtaa

SEQ ID NO: 7444 - DNA, 1758 bp, BradyrhizobiumColbertium
gtgaagaacatcagcgccacgctcgcgatcgtctggcgaatcgccgccccctatttccgatccgaggacaaatgggccgggcgcggcctgctcgccgcggtggtcgcgatggaactggcactggtcgcgatcgatgtgctggtgaaccagtggcagaaccggttctacagcgcgctccagaccagcgactgggacaccttcgtgcgggagatctggatctttatcgcgctcgcgttcacctatatcgcgctcgcggtctacaagctttacctcaaccagtggctccagattcgctggcggcaatggctcacgcggcactatctcggcgaatggctgcagaatgccacgcattaccgcatgcagctcaagggcgatgcggccgacaacccggaccagcgcatcaccgaggacgtcaagaacttcgtcgagcagacgctgagcatcgggctcggcctgctctcgtcgatcgtgacgctgttctccttcgtgatcatcctctggggcctttcaaacgcggcaccgctgcgcctgttcggcaccgatgtcatgattcccggctatctgtgctggggcgcgttgatctacgcgatcttcggcaccgcgctgacgcattggatcggcgcaccgctggtcaacctcaacttcgaacagcaacgctatgaggctgacttccgcttcaatctcgtccgcgtccgcgagaattccgagcagatcgcgctgctcaacggcgaaggcgccgaacgtgcccgcctgctcgatcgtttcggcttcgtgatcgccaactggtacgccatcatgagccggaccaaacgcctcaccgcgttcacggccagctatcagcaggccgccgtgatctttccctacgtgctggtggccccggccttcttcgccaagaagatccagcttggcgacatgatgcagaccgcatccgccttttccagcgtacagggcgccttgtcgttcttcgtcacggcttaccggtcgctggcggagtggcggtcgatcgttgcgcgcctcgatggctttgaaatgtcggtcgattcggccgcgaacctgccgctccatgagcctgcgatcgcgctggaagtcgccggcagcagcggccatatcgagcttgagcagctctgcgtgaacctgcccaacggcacgccgctggtcgccgccaagggcttcgccattcagacgtcggagcgcgtgttggtgaccggaccgtcgggctccggcaagtcgacgttgttccgggccatcgccggagtttggccgttcggcacaggcacggtcgtcatcccggaaaaggcaaagctgatgatgctgccgcagcggccctattttccagtcggcatgttgcgcgacgccgtggtctatccggcagcacccggcgcgttcgccccagcgcaagtgcgcgacgcgttggtcgcggtcgggctgccgggcctcgcagagcggcttgaagaggagggtcactggaatcggatgctgtcgctcggcgagcagcagcgccttgggcttgcgcgcgcgctgctgcacatgccggactatctgttcctggatgaggcgaccgcctcgctggacgagccctccgaggcgcggctttaccggctgctggcggagaagctgccgcaggccaccatcgtctcgatcggccaccgctcgacgctcgacgccttccacacgcgcaaggtagcgctggtgaaagatggcacaatccatgtcctcggcggtgaacgggctgcagcggagccgagcgcggcgcgctga

SEQ ID NO: 7445 - DNA, 1665 bp, BradyrhizobiumColbertium
atgtggaatcaagtctatgatccgctgaacagcccggtgctgtcgacgatcgcggcggcggtgcccgtcgtcacgttgctggtgctgatcgcgagcgggcgcgtccaggcgcatatcgcggccattattgccgtgatcgtggccaacctgatcacgatcttcgtcttcaccatgcctgcgaacatgtcgatccgcgcctcggtgctgggcgtcgtgaccggtttctttcccatcggctggatcgttctcaacgtcatctttctctaccaggtgacggtggccaccgggcgcttcgagcttttgaagcgcgcggtcggtggtgtcaccgaggaccggcggctgcaattattgctgatcgccttctcgttcggcgcatttttcgagggcgcctcgggcttcggcacgccggtcgcgatcaccggcgcggtcctgatcggtctcggcttctcgccactcgcagcttccggcctgtcgctgatcgccaacaccgccccggtcgcctatggcgctctgggtacgccgatccagggcctctcctccgtcaccgggatcgatccttacatcctcggtgcgatggtcggccggcaattgccggtcttctcgctgatcgtgccgttctgggtggtgtgggcattcgcgggctggaagggcatgaaggacgtctggccggcgatcttcgttaccggcatatcgtttgccgtcccgcaattcgtgatctcgaactacatcaatccctggatcgtcgacatcggcgcgtcgctgatctcgatgggcgcactgatcctgttcctgaaggtgtggcagccgaagcagctctggctgtcgccggcgttgcgcggcaatgatgaatcggccgccaccatggcggcggcaaggccgctcgacaagacgccgctgacgcagagcgagctgttcagcgcgctgctgccttggatcatcgtctgcatcgtgatgctgatctggggcaacggtggcttcaaggcgtgggcgaactcgatcttcgtctggaactaccccgtgcccgagctgcaccagatgatcaacaagatgccgccggttgcgccgggcccgacgaaagagagtgcggtgttcgccttcacctacttgtccttcaccggcacgggcatgctgatcgctgcgatcatcgcaggcatcctgatgggggtcggtcccggcaagctggcggccgagtacggccgcaccatccggctgtgcgcgatctcgctgatcacgatctcggcgatgctggcgataggcacgctgacgcgcctgtccggcgtcgacgccacgctcggcctcgccttcgcggcgaccggcgtgctctatcccttcttcggcacgctgctcggctggctcggcgtggcgctgacgggatcggacaccgcctccaacgtgctgttcggaaacctgcagaagatcacctccgagcagcttggcctgtcgccggtgctgatggcggcggcgaactcctccggcggcgtcatgggcaagatgatttatgcgcaatcgatcgtggtcgcctccaccgccaccaactggtacggccatgagggcactatcctgcgcttcgtgttctggcactcgatcgtgctggcgtgcctcgtcggcgtgctcgtgacgctgcaggcctatgtctggccgttcacggagctggtgctgaagtag

SEQ ID NO: 7446 - DNA, 660 bp, BradyrhizobiumColbertium
atggagctacagacgatgcccaccatcaccgccttcgaaagctctcccgatcgtggccgaggacaggcgcgcgacatgcgcgtgcgctgggcgctggaggaggtcggccagccctacgacgttcgcctcgtctcgttcgaggacttgaagcagccgccgcatcgtgcgctgcatccgttcgggcagattccgacctatgaggacggcgatctcgcgctattcgagtccggcgcgatcgtgctgcacatcgccgagcgccatgccgggctgctgccgcttgacgcgaacggcaggtgccgtgcgatcgcccggatgttcgcggcgctgaacacggtggagccgccgatcgtcgagctcggcatggccatgctgctcgagcgcgacaggagctggtacgccgagcgcctgcccatgctgcaggaccgcgtccgtgtcaggctcggcgaactgtcctgccacctcggcaatgccgaatggctcgatggcgcgttcagcgccggcgatctcatgatggtgacggtgctgcggcggttgaacacgtcggggctgctggaagagtatcctgacctcgccgcctatgtcgcccgcggcgaagcgcggccggcctttcagcaggccttcgctgcgcagcttgcggtgttcaacgccgcgcgttcgtag

SEQ ID NO: 7447 - DNA, 393 bp, BradyrhizobiumColbertium
atgagcgacgatctctccggcgtctgggacggcagctacatccagcccggcgtcggcatgatcacgttcacggcgaccctcgtcgagaccgggggcgcgctgagcgggagcgtgaccgagccctgcatgatgccgggttgcccggtgagcacgcacaattcctcgatctcgggtcatcgctccggcagtgcggtctcgttcatcaagcgctacgagccccccggcttcggctacgaccgtgtcacctatgagggcacggtgaacgccgaggcgaccgagatcgacgggcgctggcgcctgccgggccattccggatcgttcctgatgatccgcgccggcaagcctgcgcaggcggtaacgaccgaaaggcgtgccaaggagccggcacgctga

SEQ ID NO: 7448 - DNA, 435 bp, BradyrhizobiumColbertium
atgaagatcgcatccacctttcgcgccgcgctgctcgtcatcgccgctttggccggcctctcgagcgccgcgcgggccgacagcggcttcgtgacgctgacgatctacaaggcgggctggatcatcggcggctcgggcggctcgggcgtgctgaacttccgcggccgcacctatgcgctctcgaccggcgggctcgactacggcctcgtgttcggcggctccaagaccgtgctgcgcgggcgcgtctccaacatcaaccgtccctccgacgtcgccggagtctccggcgcggccggtgccggccttgcggtcggccgcggcgcccgcgccatcgtgctgaccaaccagaagggcgcggtgctggagctgaccggccaccaggtcgggctgatggcgaacgccgatctcagcgggtttgcgatcacgatgcggtag

SEQ ID NO: 7449 - DNA, 384 bp, BradyrhizobiumColbertium
atgccgatccagcatttcgcgcccccgccgcacgtccaggcgccgccgctgtcctttgcgacgcgcgtcggcgatctcctgttcgtctccggcattcccggcttcgatgcatcgggcgcgctgcccgacggcttcgaggcgcagttcgccaatgtcgtcgtcaacatccgccgcgtgctgggcgaggcgggcgcaacgttccgcgacctcgtcaaggtcaacgtgctgctgacccgcgccggcgatgtggccgccatgaacgcgctctatgccggcgccttcggcccgccgccctatccggcgcgcaccacctgcgtggtgcaggcgttgcccaggccggagatgctgatcgagatcgaagcggtggcgtcgctggcggggtga

SEQ ID NO: 7450 - DNA, 261 bp, BradyrhizobiumColbertium
atgcgtcgcgttctcgccctctgtgccgttgccggcattgccagttccgtgttcgccgtgccggcctcggcgaaggtcggctattacgtgatccgctgggacaacaccggcatctgccaggtctggaacgaggacctgcagtacaagccgctccagatcggcgtctccacctacaaggtcgtcagcaagtcgttccccaccttccagcaggcctccgacctccagatcaagatgcgcgccgagcgcaagtgcacgctctga

SEQ ID NO: 7451 - DNA, 252 bp, BradyrhizobiumColbertium
atgcgtcgtatttccgtgctgtgcgctgccgccggccttgccgtcactgcgttcgtcgccgcgagcccggccgaagccggctatcacctgatccgctggcaggacagcggcttctgccagatctgggacgagagcatcccgaccacgccgtggccggccggctatcaccgcgccagcgccagcgtgccgaccttcatcgacgctctcgtgctgaaggatgccgcgctgaagagcggcagctgcacttggtaa

SEQ ID NO: 7452 - DNA, 486 bp, BradyrhizobiumColbertium
atgatggaacggctcgacccctggaaactcgccctcgaacgattgcggtcggcgcactcgcccgactgggccgaggccggccggctggtggccgagatcgcgcggatgagcagcgacgtcacgctgcgccaggccgccgagcaggccctcccggtgctgcgtcaggcggtggacaacgacgatcatagcgtgacgctggcggcgcagcgccgtctcggcgtggtgctcgaggtcgtccacgatctgaccgcgccgcgctttggtcgccgcaatgcgatgccgaagaagctgtcgagcgaggatcgcgcccgcaagatgctcggcctgccgctcgccgtgcagctcacctgcgaggacatcaaccaagcctatcgccgcgccgccaagggcatgcatcccgatcacggcggcagcgcgcaagccttcatcgacctcgccgccgcgcgcgatatcctgatccatcccggcgcgcacaaggacgcgtga

SEQ ID NO: 7453 - DNA, 768 bp, BradyrhizobiumColbertium
atggcgcagctcgcaaaccacatcgccgtcgtcacgggtgccggctccggcatcggccgggcgatcgctgccggctacgcgcgggaaggcgcgcaggtcgtgctgctcgacgtcaacgccgacaccgtcgcggaggccgcgcaggagatccgcaaagccggcggcaaggccgagagcttcgcgctcgacgtgacccggcgcgaggattgcttcgcgctggccaagcaggtcgagggcaaggtcgggcaggtctcgatcctcgtcaacaacgccggcatcacccgccgcaatgccttcaccgcagagaccgagacggtggcaaaggactggaacgacatcatctcgctcaacctcaacggcgtcttcaacatgacgcaggcgttcctcgcgcccttgcgcgccagcaaggggcgcatcgtcaacatcggctcgatccagtccttcgtgcatctgcgcacgccgagctcggcggcctacaccacatcgaaacacggcgtgctcggcttcaccaaggcgctcgcggccgaactcggcaaggaaggcgtgcgcgtcaacgcaatcggccccggcttcatcgagaccaacatcaacgccaatgtgcgcgcgaccaatccggcgctggtgcaggccttcctcgatcacaccccgctggcgcgcaccggcaagcccgaggacatcgtgggacccgcgatcttcctggcctcggacatgtccgcctatgtcacgggcacgatcgtgatggtggacggcggatatcggacggtgtga

SEQ ID NO: 7454 - DNA, 249 bp, BradyrhizobiumColbertium
atgaccactgttcatgtcgctgcgtccgaatcggccgcacagtttcttgcccccaaccaggtcgttccgctgctgatcggcgcgaccgtcgacgaggtcgagcgcgagctcgtgctgcagacattggcgcgctgcgacggcaaccgcacccgcgcttcgcgcgtgctcggcctgtcggtacgcacgctgcgcaacaagatccggctctatgccgcttccggcatcgacgtgcccgcctgccaggactag

SEQ ID NO: 7455 - DNA, 519 bp, BradyrhizobiumColbertium
gtggcagacgatcagggacgacggccgggacctcagggccctcgcgggcgacaaggagaaccgggacggccggggccgcaaggtcatcccggccggcgcgggcccgacggcgcgcgcggcaagccgggaccgcagggcaagccgggtccggtcgggaaggcgggcccgcccggcaagcccggcccccaaggcaagcagggcgaagccggcccgcgcgggccggccgggccgcagggacccgccggacctcagggcccggcaggcccgcaaggaccgcgcggcgaaccaggtccccccggtcagctgccgtcgatcgagcaggtgctgccgtggctcgagcagctcttcgatgcctgggacgaacgtcgccgccagcgcgagcgcgaagccgccgagcgcgacgcgctcgaggccgccgtgcgggaagttgatgagccggtcgccgatcacgagagcgatgacggcgaaagcggtgagcacaagaaaaggaagagaaagaagaaacacggcaaggattag

SEQ ID NO: 7456 - DNA, 222 bp, BradyrhizobiumColbertium
atgagccgccctcttcttcctctgaaagcaggcgccgtcgccttcacggtgctgtggaccgcctggatgatgtggtggagcggctcatacagcagcgtcaacctcgtcatcctgacgctgctcggcacgatggtcggctatctctggtatcgcgccatgcgctggcagttcgagcgcatgggcatgctgccgcgcaaggatgatccgtccggggcgtcttga

SEQ ID NO: 7457 - DNA, 267 bp, BradyrhizobiumColbertium
atgtgccgcaacatcaagacgctgtttaacttcgagccaccggctaccgaggacgagatccacgccagcgcgctgcagttcgtgcgaaagctgtcgggcttcaacaaaccgtcacaggccaatgaggaggtgttcgaacgcgccgtggcggaagtctcggacgccgcgcgaagactcctgacgtcgctgcatacgcacgcgccggcgcgcgaccgggaggtcgaggcggagaaggcgaaggagcgctcgcggctgcggttcggttag

SEQ ID NO: 7458 - DNA, 351 bp, BradyrhizobiumColbertium
atgcacaggctggctctgtgcgtctggttggctgcgacgatgctgacgaacaccgcgttcgcgcgcgacaacggccagtacgaccacgtcccgcccgacatccgcgcctggttcaagagtgtgatcgcgccgaacggggttccctgctgcgacatctccgatggccatcgcaccgaatacgacgtgcgcaacggcgcttattgggtgccgatcgagggacaatggacggaggtcccggaacgcgccatcatccgcaatcgcggcaatccggtcggccaagccgtggtgtggtacgtccatcaccgcggcgccgtcatcatcagctgcttcgtgccggctgatgcagtttag

SEQ ID NO: 7459 - DNA, 630 bp, BradyrhizobiumColbertium
atgccaagctatagcggagccatgccgttgaccgatcttagcgccaaagacctcgccgccatctatgccaagccgactccgcgcgtgatcgcgaaggcgcgtcccgccatcgatgcgcatgcgaggaagttcatcgagatgtcgccattctgcgtgctcgcgacatcaggcgcggacggcagcgtggatgcctcgccgcgcggcggcagcatcggcttcgtccgcgtcgccggccccaaccggctgttgatgcccgaccgctccggcaacaaccggatcgacagttttcggaacgtcgtcgaaggctcgggcttcgtgcatctgctgttcttcgttcccggcatcgacgagacgctgcgcgtcggcggacgcggcacgctgtcggccgatccggatctgctcgccacgatggtggagttcgggaagccgccgcgcgccgtgctgaacgtcgccgtcagcgaagtctatttccattgcggcaaggcgctgatgcgctcgaagctttggtcgcccgagaaggtgcaacgctcggtgatgccgagcattgtcgaggtcattcacgaccagacgggcctgggcgagccgcagagtcagcaggccgtggaagagctttacaagacgcagttgtag

SEQ ID NO: 7460 - DNA, 489 bp, BradyrhizobiumColbertium
atgcagggcgacgcaaaagtcatcgactatctcaacaaggcgctgcgtcacgaactgactgcgatcaatcagtactggctgcactaccgctttctcgacaattggggcctgctggacatggcgaaggtctggcgcaaggagtccatcgaggagatggaacatgccgacaagctcaccgcgcgcatcctgttcctcgacggctttccgaacatgcaggtgcttgatcccctgcgcatcggccagaacgtcaaggagatcatcgagtgcgacctcgctgccgagatgagcgcgcgtgcgctctaccaggaggcggcgacctactgtcacggcgccaaggactacgtcacgcgtgacctgttcgagaagctgatgagcgacgaggagcaccacatcgatttcctcgagacccagctcgatctgatcggccgcatcggtctggagctctacacccagaagcatgtcggcggcctcgagggggaggggcactaa

SEQ ID NO: 7461 - DNA, 273 bp, BradyrhizobiumColbertium
atgatcgtttgttcctgtaacgtgctgagcgatgacgacatccgcgctgccgtcgccgagtccgacgatgccgtgcgccatgccaagcaggtctacggatgtctcggctgtagcgctgaatgcggccggtgtgcccggactatcaagaccatcatcgatgaagcgcttggaccctgcgccgattcatgctgcgccggctgcccccatagccacgccgtggccgccaatgacgagacggccgagcccgccgagtttgccctcgcggcctgctga

SEQ ID NO: 7462 - DNA, 324 bp, BradyrhizobiumColbertium
atgaagaagccactcctggcggtggttgccgtcgccaccctggccctcacggccggcacaccggcccaggcgcagcgacgccgcgctgcgggcgtggcggccgggatcatcggcggcgccatcgtcggcggcgcgctggcatctccgtattattacggacctggaccgggctattacgagccgggctactacccgccccgctattacgcgcccgcccccgcctacgtcgtcgacgactattacggcggtcgccgcatttggcagaagcagcgcttctgggacggctatgcttggcgcgcccgccgcgtcagagtctgccgttga

SEQ ID NO: 7463 - DNA, 285 bp, BradyrhizobiumColbertium
atgaagaagacactagttgccgtcctgacggttgcgacggtcgccggttcgctggtgaccgccactccgtccgcgaaggcccatgacggcatcggcgccggcatcgcggccggcctgatcggcggcgccatcgtcggcggcgcgatcgcgtcgagccgtcccgcctatggcggtcccgtttacgtggccgagcccggcccgccgcccccgccctgctattggcagcgccagcgctattgggacggttatggctgggtcgttcgcccggtccgcgtctgctactga

SEQ ID NO: 7464 - DNA, 1227 bp, BradyrhizobiumColbertium
atgatgcggcggacgttcatcgctgctttgatcttgctcacctgcggctcgacgtccggccgcgccgcagacgctggcttcacgcagttcatcgcctcgctttggccggaagcgcaggccgcaggcgtctctcgcatgacgttcgagcgagagacgcgcgggctcgagcccgactacaagctgccggacctgcttctacccgggcggcccgcgaccggcgccccgtcgcaggccgagttcgtccaggtgccggcggactacgtcaaggaagcctcgatcgcgcggctcgcaggcgaggggcagcggctgctgcagaaatatcgccctgtgctgaccgagatcgagaagaactcaggcgtgccggcgaccgtgatgctggcgatctggggccgcgagaccgattacggccgctacaggctgccttacgatctcgtccgggtgctggcgacgcaggcctacgtcggccggcgaaaggatcagtatcgcaacgaattcatcctctcgctcaagcttctcggcgaaggcgtggtgacgcgcaaggacatgcgctcatcgtgggccggagccaccgggctcacgcagttcctgccctcggagtattacaagcacggcgtcgattccgatggcgatggccgcatcgatatctggcgctccgtgccggatgcgctggcctccgccgcgcagcagctcgtcaacaagggctggcagagcggcgttcgctgggcctatgaggtgcaggctcctgcgaaggttgattgcacgatgggcgtgcccgaggtgacgaagccgatcggccagtggctgcgcgaaggctttgttccggtgcgtggccaaaaactcagcgcggccgagcaagcgcagccggcctcgttgctccagcccgaaggcatctacggcccgtcgttcctgaccacgaagaattacttcgtcatcaaggaatacaatttctccgatctctacgtgctgttcgtcggccacctcagcgatcgcatgacgagcccgttgcctttcgcgacacgttggtcggcttccaggcagttgcgcaccaaggacgtcgagatcatgcagcgcgagctcacgcgggtcgggctctacaaggacaagatcgacggcaaggccggcatgcagacccgcgccgcactcggcgcctaccagaagtcggcgggtctcaaggtcgattgctggccgagcgaagacgtgctgcgcgcggtccaggcggcgcgatag

SEQ ID NO: 7465 - DNA, 1650 bp, BradyrhizobiumColbertium
atggcgcgccagttcatctatttcatgcagggcctgaccaagagctacccgacccggaaggtgctcgataacattcacctgagcttctacccggatgccaagatcggcgtgctcggcgtcaacggctcgggcaagtcgacgctgctcaggatcatggccggcctcgacaaggaatacaccggcgaagcctgggtcgccgaaggcgcccgcgtcggttacctcgaacaggagccgcagctcgatcccaagctgtcggtacgcgagaacgtcatgcagggcgtcgccaagcagaaggcgatcctcgaccgctacaacgaactggcagtcaactattccgaggaaactgccgacgagatgaccaagctgcaggacgagatcgaggcgcagggcctctgggatctcgacagcaaggtcgaccaggccatggacgcgctgcgctgtccgcccgacgatgccgacgtgaccaagctttccggcggcgagcgccgccgcgtcgcgctttgcaagctgctgctcgaccagcctgaactgctgctgctggacgagcccaccaaccatctcgacgctgaatccgtgtcgtggctggaaggccatctgcgcaactatcccggcgcgatcctgatcgtcacccacgaccgctacttcctcgacaacgtcaccggctggatcctcgagctcgaccgcggccgcggcattccctacgagggcaactattcgtcctggctggtgcagaagcagaagcgcctcgagcaggaaggccgcgaggacgcggcgcaccagaagacgctcgcccgcgagcaggaatgggtcgcgtcatcgccgaaggcgcgccaggccaagtcaaaagcgcgctaccagcgttatgaggagctgctcaagaaggcgagcgagaagcagacccagaccgcacagatcatcattccggtcgccgaacggctcggcgccaacgtggtcgatttcgacggcctcagcaaaggcttcggcgatcgcctgctgatcgacaatctcaccttcaagctgccgcccggcggcatcgttggcgtgatcggccccaacggcgccggcaagaccacgttgttcaggatgatcaccggccaggagaagccggacgccgggaccatcacggtcggcgagaccgtgcatctcggctacgtcgaccagtcgcgcgatgcgctcgacggcaagaagaccgtgtgggaggagatttccggcggcaacgagctgatcctgctcggcaagaaggaagtgaactcgcgcggctattgctcggccttcaacttcaagggcgcggaccaacagaagaaggtcggcgcgctctccggcggcgaacgcaaccgcgtgcatctcgccaagatgctgaagtccggcgcgaacgtgctgctgctcgacgagccgaccaacgatctcgacgtcgacacgctgcgcgcgctcgaagaggcgctggaggatttcgccggctgcgccgtcatcatcagccacgatcgctggttcctcgaccgcatcgcgacccacatcctggccttcgagggcgacagccatgtcgaatggttcgagggcaacttccaggactacgagaaggacaagatgcgccggctcggccaggacagcatcattccgcaccgagtgaagtacaagaaactgacgcggtga

SEQ ID NO: 7466 - DNA, 123 bp, BradyrhizobiumColbertium
ttgcttgccgccgatgtaacgatcccgcccccaaagggcaacgttttccgtccgttcaccacggatgaatacggtccggataccatctcgccgctgatccggacaattgaaaccatcttttag

SEQ ID NO: 7467 - DNA, 216 bp, BradyrhizobiumColbertium
atgtctctgaccgagaccagctctcttcatgctccggcagaagccggccacgtctccgggttcgtctcggagatccagggcttctggaagcgcttcttcgccgccgccttcaacccgtaccggcccgagctgcactacatgcgcggaccgggcccggcctggcgcgccaagcacggcatggatgcgccgctccgcctgaaaccacgcaacttctga

SEQ ID NO: 7468 - DNA, 963 bp, BradyrhizobiumColbertium
atgagccggctgcgctgtgcaattctcgacgactatttcaatctcgccctcgacgttgccgactggtcgaagctgtccgaccgggtcgacgtcacggtgttcaggcacccgttcgcctccgagcaggcggcggccagcgcgttggctgatttcgacatcatctgcgcgatgcgcgagcgcaccggatttcccaagagcctcatcgagggcctgccgaagctgaagctgctgctgacctcggggatgcgtaacgctgcgatcgacatgcaggcggccaaggcgcgcggcattgccgttggcggcacgcaatattcccgcgatccgacggcgccgctcgccatgggcctgattctggaactgacgcgcggcatcggccgcgagaacgcgcgcatgcacgccggagagccctggcagagctttgccggcgtcgaaatcgaggggatgacgctcggtatcgtcgggctcggcaagctcggcagcaagatggccgggatcgcgaaggctttcggcatgaacgtgatcgcctggagcccgaacctcacgcctgagaagtgcggggaggttggcgttggctatgccagcaaggacgagcttttcgccaaggccgacatcgtcaccatccatgtcgtgctgagcgagcgctcgcgcggtctcgtcagccgcgccgatctcgcgcggatgaagccgaccgccttcctcgtcaacacctcgcgcgggccgatcgtggacgagcaggcgctgctggaagccttgcagcagcggcagatcgcgggcgcggggttggatgtgttcgcggtcgagccgctgccgatcgaccatcctttccgcaagctcgacaacctcgtgctgacgccgcatctcggctacgccacctcggacggattgcgcgctcattacggtcagatggtggaggcgatcgatgccttcacaaggagcggcgaactgccgcgcaagctggcctga

SEQ ID NO: 7469 - DNA, 1218 bp, BradyrhizobiumColbertium
atgatgatcaaacattttctgacgatatgcgctgccgcaacagtcgctgcggcgggaacctcgctcgctcaggctcagagctatccggttcagcaggtgccgggctatggagctccggcggaataccgccccggcgatcgcgtgccgaatttcgacgcgctggacgaagacgacgaagccatgccgcaggcatcgctgccgccgcccggtccggctgatgatccgcgctatggccgcccgatgggaggtccgccagtctattcggccgctcccccgcaagggccggtgatgtcgccggatgatccgcgttatggtcgtccggctggcgccacgccggtctactcggcggcgccgccgcagggccccgtgatgtcacccgacgatccccgttatggccggccggccgatccgccgccggtgatctatgccaatcgcccgggtcagcaggcgcctggcaatgacggactgcgtccgccggaagctgttggcggtcccgccgcgaccgggacggtccaggccgcgcagccgcccgtcggtgccgatggccggccgatcacgctggccgcgctgccgcccgaggagcagcccgacgccgcgccggtgcagctgccgccgaacctgcgccgccaggaggtcgcgttccagaccaaggagccggtcggcacgctcgtggtcgatacctccaacacctacctctattacgtgctcggcaatgggcgtgcgatccgctacggcgtccgcgtgggtcgcgacggcttcacctggaccggcgtgcagaagatcacccgcaaggccgagtggccggattggcatccgccgaccgagatgatcgaacgacagccttacttgccgcgcttcatggccggcggccccggcaatccgcttggcgcccgtgcgatgtatctcggctcgaccgtgtaccgcattcacggcaccaaccagccctcgaccatcggcaagttcgtctcttccggctgcatcggcatgctcaacgaggacgtctccgacctgttcgagcgcgtcaaggtcggcacccgcgtcgtggtgctgccgggcggcccgccgccgggaacggcgaccgcctctgcggcgccgacacccggcgctgccgcacccggtactgctggtccggcgccaatgtcggcccaggctggtcccgtcccgggcacccagccgaccgtcgtgccgccgctgcctgcgccggtcactgtgcgctga

SEQ ID NO: 7470 - DNA, 771 bp, BradyrhizobiumColbertium
atgcttcccggctttcgcttcctgtttgccgcgatcctgctgtcaacctccatcctggtgttcggcctaggggccgccgcgctgctgcgggcgacccatcagcagtatgtcagcaacccttcctggcgaaacggtccgcaggaacaggtgtttgcgcaggcgcccgagccggcccagcccgtgctcgcggtgttgcgagcggagccggacgagcccgtagccgccgcgccggagccgtcgctgcgcgaccagataccgacgatcggactgccggcccaggaggccgagcaggtcgccgcgctgacgcccgaaccggacccgcagcccgaaatgactgcaacgccgaccgaagtcgctgcgatccggcccgtcgagcccgaagcggccgcggaggtcgcagaggcgacaccgcgcgatacgctcacaccagacgacaccacggcctcgatcccccaggccgcgccagcctcagccacatccgagtcggcgcctgcccaggtgggcgccgccctcccctcctcggcgctcgaggacacttcaacgaagctatcggcgctgaacgatccgacggcgacgtccgtgaaggacacagcagcgaaagccaaggttgatgccaagcctgacagcaaagcgatcaaatccaaggccaaggtgaagaagcggcctcgcgtggtacgacgtccgccgcctcagcaattgcagcaacagctcgatccgttcggtcagccgcagccggccttcgcgacgacaacaacggcgcgctcgcgttaa

SEQ ID NO: 7471 - DNA, 858 bp, BradyrhizobiumColbertium
atgatcgcccccaccgaccccctcgtctccaccgaatggctcgccgcccacatcaacgatggcaacgtcaagatcctcgacgccagcttcaagttgccgggggtcttgccgctgccgaaggacgactatctcgccgcgcatctgccgggcgcggtattcttcgacgtcgacgcggtgtcggatcattccaacccgctgccgcacatgtttccgagcgccgagcagttcggccgcgacgtcggcaatctcggcatctccaacgcggacacggtcgtgctctacgacgccggcggctgggtcgcggcgccccgcgcgtggtggatgttcctgtcctacggccacagcaatgtgcgcattctcaatggcggattgaagaagtggcgcgccgagggccgcccggtcgaaagcggcgacgtgaagccgaagccggcaacgttcgaggcgagctatgattcaaagcgcgtgcgcagcatgcagcagctgatcgccaacgtggaaagccgcgccgagcaggtgatcgacgcgcgcgccgccgaccgcttcgagggccgcgcgcctgagccgcggccgggcatccgctccggccacatcccgggcgcccgcaacgtgccctacaatctgctgttcgataccgcgaccggcaccatgaagcccctcgatgatctccgcgcggcgttcgcgggcgccggcgtcaagctcgatgcaccgatcgtgacgagctgcggctccggcgtttcggccggcgtgctgacgctcgcgctctatcgcctcggcatcaccgacaccgcgctctatgacggctcctggtcggaatggggccaggccgacggcccgccgatcgcgaccggcccggcgtga

SEQ ID NO: 7472 - DNA, 414 bp, BradyrhizobiumColbertium
atgccccagaccatcacccgcggcatcaaggcgttgatcgacgaggccaatgccgagatcgagacgctctcggccaaggacgccatcgagatatccaagaacggcgacgtcgtcatcgtcgacatccgcgatccccgcgagatcgagcgcgacggccgcatcccgggcgcgttcgcgtgcacccgcggcatgctcgaattctggatcgatccacagagtccctacgccaagccgatcttccaggaggacaagaagttcgtcttccactgcgccggcggcctgcgctccgcgctcgcagccaagaccgcgcaggacatgggcctcaagcctgttgcccacatcgccggcggctatgcggcctggcgcgatgccggagggccgacggagaagtgggagccgaagaagaaggggtga

SEQ ID NO: 7473 - DNA, 1176 bp, BradyrhizobiumColbertium
atgttcctgcaattcttcacctctctgcgcgacgcgcaggtccccgtgacgctgcgcgaatacctcacgctgatggaggcgctcgacgctgatctcgccgactacacggtcgagaacttctattatctgtcgcgcgcctcgctcgtgaaggacgagcgtaacctcgacaagttcgaccgtgtcttcggcacggtgttcaagggcttggaaaatctgctcgatgccatggagaaggcggagatacccgaggagtggctgaagaagctcgccgagaagtatctcaccgaagaagagaagaagcagatcgaggccatgggctgggacaagctcatggagaccttgaagaagcgcctcgaggagcagaaggggcgccaccagggcggctcgaaatggatcggcaccgccggcacctcgccgttcggcgcccacggctacaatcccgagggcgtccgcatcggccaggagaagaaccgcaacaaccgcgccgtgaaggtttgggacaagcgcgagttcaaggatctcgacggcaatgtcgagctcggcatccgcaacatcaaggtggcgctgcgccgcctgcgcaagttcgcccgcaccggcgcgcccgacgagctcgatctcgacaccaccattcgcgagaccgccaaccatggctatctcgacgtgcacatgcgccccgagcggcgcaatgcggtgaagctgctggtgttcttcgacatcggcggctcgatggacgcgcatatcgagcaggtcgaggagctgttctcggcggcgaagagcgagttcaagcacatggagtatttctacttccacaactgcctctatgaaggcgtgtggaagcagaacaagcgccgcttcaccgaccgcacgccgacttgggacgtgctgcacaaatacccgcacgactacaaggtcgtgttcgtcggcgacgcctcgatgtcgccttacgagatcatggtgcccggcggctcggtcgagcacgtcaacgaggagccgggctcggtctggctcgatcgcatcatccgcacctatccgcatacggtgtggctgaacccggtgcagcagaagcactgggactattcggaatcgaccaccatcatcaagcgcatctttgccaaccggatgtatccgatcacgatcgaagggctggaagccgcgatgaaggaattgacgcactag

SEQ ID NO: 7474 - DNA, 246 bp, BradyrhizobiumColbertium
atgggaattgtcgcagcgctcatcattggcgcgatcgccggctggcttgccggcaagattgtccacggggcgggatttgggctggtcggcaacatcgtcgtcggcatcattggcgccctggttgcaagctgggtgctgccccagctccacatccagctggcaacgggcacgatcggcgccatcgtggacgccacgatcggtgcggtgattgtgctcgtcatcctttcgctgataaaacgggtctga

SEQ ID NO: 7475 - DNA, 909 bp, BradyrhizobiumColbertium
atgcgcggccgttcgcttgtcgtgaccaaggcattgccctgggacgacgaccaacaaggacgtgcgatgaaatttaccggcaccaaggactatgttgcgaccgacgacctcaaggtcgccgtcaatgcctcgatcgtgctcgagcgcccgctcctggtgaagggcgagcccggcaccggcaagacggtgctggcggaggaagtggccaaagcgctgaacgcgccgctgctcacctggcacatcaagtccaccaccaaggcgcagcagggcctctacgaatacgacgcggtgtcgcgcctgcgcgacagccagctcggcgatgcccgcgtgtccgacatcaagaactacatcaagcgcggcaagctctgggaagccttcaccgccgagcagcgcccggtgctgctgatcgacgagatcgacaaggccgacatcgaattcccgaacgacctcctgctcgagctcgaccgcatggaattccatgtctacgagaccggcgagacgatcaaggcgaagcagcgcccgatcatgatgatcacctccaataacgagaaggagctgccggacgcatttctccgccgctgcttcttccattacatcaagttccccgacgccgacacgatgggccgcatcgtcgacgtccatttccccggcatcaagaagcgcctcgtcgaggaagcgctgcgcatcttcttcgaggtgcgcgaggtgcccggcctgaagaagaagccgtcgacctcggagctgctcgactggctcaagctgctgctcaacgaagacatgagcgccgaacagctgcgcgagcgcgacccgcgcaagctgatcccgccgctgcacggcgcgctgctcaagaacgagcaggacgtgcatctgttcgagcgactggcgtttctgagtcgccgggaagtgtag

SEQ ID NO: 7476 - DNA, 1647 bp, BradyrhizobiumColbertium
atggacagatttgattatgtgatcgtcggcgcgggctccgccggttgcgtgctcaccagccggctgagcgaggatcccaacaccagcgtctgcgtgctcgaggctggcccgagggattggcatccctacatccatctgccggcgggcttcatcaagaccttccacatgaagagcatcaactgggcctatcagcaagagcctgggccctggaccggtggccgcagcatctatgcgccgcgcggcaagacgctgggcggctcgtcctcgatcaacggccacatctacaatcgcggccagcgcatggacttcgacacctgggcgcagatgggcaatcgcggctggggctatgccgacgtgctgccctacttccggcggctggagaagcgcatcggcgagggcgaggacacttatcgcggccgcgagggcggcctcaccgtcaccacgatggactggcgcgatccgctctgcgaggccttcatggagggcgcggtctcgctcggcattccccgcaatcccgattacaacggcaagacgcaggaaggcgtttcctactgccagcgcaccatcaacaacggcctgcgcgtctccgcggccaccgcgttcctcaagccggcgatgaagcggccgaacgtgcacgtgcacacgcatgcccacgcgaccgagatcatcttcgagggcaagcgcgccgtcggcgtgcgctacatgaagggcggacgcggggggcaccccgtcgaggtgcgggccaacaaggaggtgatcctctccggcggcagctataattcgccgcagctcttgcagctctccgggatcggctcacccgatctgctgcagcagcacggcatcgcggtgcgtcactcgttgccggtcggcgaaggccttcaggatcattatgcgccgcgcacggtcgcgcgcgtcaagaacatcaagaccatcaacgagctccgccgtggcgtctcgctgtggatcgaagccatgaaatgggcgaccgcgcggcgcggcctgctctcgctgtcaccgaccatggtctattgcttctggcattccggggagagcgcggagagctccgacctccagcttaccttcacgccagcgagctacaaggagggcgtgcagggccagctcgaggacgagccgggcatgaccgtcgcgtcctggcagcagcgccccgagagccgcggctatgtccgcatccgctccagcgatccgttcgcgccgccgatcatccagaccaattatctcgacgccgagctcgaccgccgcgtcgtcgtcggcggcatgaagctcgcccgccggcttctgaagagcgcgccgctgtcgccctattacgcctacgaggatttccccggccccaacgtcaacaccgacgacgaatttttgcaggcggccacccagcgcggcaccaccaccttccatcccggctgcacctgccgcatgggccctgcggattccacctgggcggtcgtcgacgaccagctccgcgtccacgggttggagggcctgcgcgtgatcgatgcgtccgtgatgccgcgcatgatctcggcaaacctcaatgcctcgacgatgatgatcgcggaccgcgcctcggacttgatccgcggcaagcagccgatggaagccgcgcgcattccggacgcggcgatggcatga

SEQ ID NO: 7477 - DNA, 594 bp, BradyrhizobiumColbertium
atgccctggcccgatcccgtaaccctgcgcggacagcacgcccggctcgagccgctgacgcatgatcaccgccagggactgatcgaggccgtcaaggacggcgagctgtcgaagctctggtacaccgcagtcccaacgccggaaggcatggcgaaggagatcgaccgccgcctggccttgcaggccgcgggctcgatgctgcccttcaccgtgttcgattcgaccggcaggatcgtcggcatgacgacctacatgaacatcgatgcagccaatcgccgcgtcgagatcggctccacctggtatggcaagagcgcgcagcgcggtccgctcaacacgcagtgcaagctgctcctgctgcgacacgccttcgagacgctgaactgcatcgcagtcgagttccgcacccatttcttcaaccaccagagccgccgcgccatcgagcgcctgggcgccaagcaggacggcatccttcgcagccatcaggtcgcgccgaacggcaccttgcgcgacaccgtggtctacagcatcaccgccgccgaatggccgacggtgcaggcgcatctggaattccagctcaacgacaagccgcgctag

SEQ ID NO: 7478 - DNA, 927 bp, BradyrhizobiumColbertium
atgtccaacatccgcgttctcgccaccgacctcgaatttccggaagggccggtcgtgatgccggacggttcggtggtattggtggagatccggggccagcgcctgacccgtgtttatccagatggccgcaaggagatcgtcgccaagattccgggcggcccgaacggcgctgccctcgggcccgacggcaagatgtacatctgcaacaatggcggcttctcctggataccgacccgcaacatgatcatgccgggtccgcagcccgacgattatctcggcggctcgatccagcgcgtcgacctgcaaacgggcaaggtcgagaccgtcgtgacgaaatgcggcgcgcacgatctgcgcgggccgaacgatctggtcttcgacaagcagggcggcctctggttctccgatctcggcaagcgccgcgcacgcgagatggacgtcggcggcatgtattatctgaagcccggcatgagcgagcttgtcgagatcgtgcatggcatattgccggcgaacggcattggcctgtcgccggacgagaacactgtctacatcgcggagacgccgaccgggcggctctgggcctatgagctctcggccccgggcacgctgaagccgcgcgatgtgatctatcgcggcgagcggggcaagccgatctgcggcctcggcggctaccagatgttcgattcgctcgcggtagaagccggcggcaacgtctgcgtcgccacgctcgtctccggctgcatctcggtgatcgcgcccgacggcacgctggtcgagcaggtcccgaccggcgaccgcgtgaccaccaacatcgccttcggcggccccgagctgaagaccgcctacatcacgctgtcgggcaagggtgagttgatcgccatggactggccgcgcggcggtttgccgttgaatttcttgaataagtga

SEQ ID NO: 7479 - DNA, 912 bp, BradyrhizobiumColbertium
atgccgatcaagcagatcggtaccgacggtcgcatcattgccgcgcttcgaacgaggacgatcaccgtgaccccagcccagcgagcgctctggtatatcgagagccatctggccgagccgatgacgctcgaccagatcgctgcgatatcgggcgtgtcacggttccacatcgtgcgtgcgtttgccgcagccacgggatttcccgtgatgcgatacgtgcgcgcgcgacggctgacggaagcggcgcgcagcctggcaaggggcgcacccgacatcctgtcattggcgctggaggcggattacggctcgcacgaagccttcacccgcgcgttccgcgaccagttcggcaccacgcccgaagcggtccgggccacgacttgcgtcagccatctcaggctacaggagccgatcctcatggactccaccatgctcgaccatcttgccccgccgcgtttcgaaaccgcaaagaccttcctggtcgccggacccgtcgcgcgcatctcctgcgacaacggcgccatgatccccggcctgtggcatcgctttcagcaggaggtcgccgacattccggcgagcgtcggccaaggaaaaaatcaagccgcctatggcgtctgctgcaatggcgacgatgccggcaatttcgactacatcgcgggtgtcgaggtcgccgatttctccgatctgccgcgccgctacgggcgtatccgcatccccgagcagcgctatgccgtgttcacccacgaggaccacgtcgcctcgatccggcgcacggcgaacacgatctggaatcaatggctgcccgcctcgggcttgaaagccgcggatgcgccgaacttcgagcgctacgacgagacattcgatccctcaaccggccatggcggcttcgagatctggctgccggtgcgagagtag

SEQ ID NO: 7480 - DNA, 1104 bp, BradyrhizobiumColbertium
atggaaatcaccgatgtgcgggcgcaccatatccgcattccctatgacgccggtgtcgcgagcttccgccagggcgcttcggccatttccgcgctcgatatggtgctcgtggaggtcacgaccgattccggattgaccggctggggcgatgccttcgcctatgtctgcccgcgcaccacgcgcagcgccgtcgaggagatgatcgcgccgcaggcccacggactgaaggtgcccgacgcggccggcattcccgccgcgatggagcagatccagcgcaatctgcatttgttcggccgctacggcatcaccatgttcgcgatctccgggctcgatatcgcattgtgggacctggctgcgaagatcgagggcgttcccctgcatcgcctgctcggcgagatcaggcgcacggcgatcccggcctacgcgagcctgttacggatcggctcgcccgacaacatcgccagtgaatgcaggaaggcgctcgcgctcggctatggcgcgatcaagctgcacgagacgacggcgccggcggtgtttgccgcgcgcgaagcgatcgggccagagattccgctgatggtcgacatgaactgtccactcaccggcgagcaggcgatcgcgttcgcgaagacatgccgggatgcgcaaccgatgtttctggaggagccggtctggccgccggaagactttgccacgcttgccgaggtgcgcgaccagggtggcctcggcattgctgccggcgagaacgcctgcaccgaatatcaattccgccagatgatggaagcgggcgcggtgagccacgcccagccctcggtgatcaaggtcggcggcatcagcgaattcctgaaggtcgccgcgctggccgatcggcgcggcatcaagatcgtcccgcattcgccgtatttcggtccgggcctgctggccacgctgcacctgctcgcgacacgtgacgatggtctggtcgagatattttatctcaagcgcgaagcttgcctttggggcggccgagcggacagcgatgccaccggacatgtcgccgtgccgacaggcccggggctcggctatgagccggatcgtggcgtgatggagtgctatcgcgtgacgtga

SEQ ID NO: 7481 - DNA, 354 bp, BradyrhizobiumColbertium
atgctgcttcgaggacccggcatttgtttcgcaatgttgctgctcgtcacgcaggtagccctgcctgtgcacgcgcaggacgtgcctggcatcgagatctgcacggtcgagaagaccatggagcggcgtaccagctgtcttcagagcaacgtagatttcctgcagaagaccatcaccaagctcaatctcgatcaccagcagaagctggatgctgcgggtcgccagatcgatgcgctgaagacgagcctcgccggcatgcagaagacgctcgccgatcttcaggccgcgcaggcgaagttcgccgacgatctgaagaagaagcaggacgcggcgcccgcgaaggacgggaagtaa

SEQ ID NO: 7482 - DNA, 225 bp, BradyrhizobiumColbertium
atggcaacgcgcgatagacgtttggcggaattcgatggcgccggagaaccaccgccaggcctgccactcgaagtgctatgcgaggatcacagcggaacgtatcagctgccgttcgcctgccgttatgtcgagggacgctggcagaaccatgaggccggcattgcggtcgaagcaaccgtgatcggctggcgcctgccgcgcgtgaagcagcgcggggccgcctga

SEQ ID NO: 7483 - DNA, 657 bp, BradyrhizobiumColbertium
atggcgaaggcgacactgaccatcagcagcaagaattactcgtcctggtcgctgcgtggctggctgctgacgaaattctccgggctggatttcgaggagatcgtcaccgcaccggatgatgcgtcagcgcgcgccgagatcctgctgctgtcgtcgtccatcctggtgccgtgcctgcggcacgagggcgccgtggtctgggatacgctggcgattgccgaatatctcaacgaggtgatgccggacgccgggctgttgccggccgaccgcattcagcgctcgcattgccgctcgatctcgggcgaaatccattccggcttcaccacgctccgagcctcgctgccggtcaacctgaagggacactttcccggcttcaagatctggtcccgggcacaggccgacatcgaccgggtctggttcatctggcgcgactgcctggagaaatccggcggccccttcctgttcggtgcgcagcgcaccatggcggatgccatgtacgccccggtggtgacgcgcttcgtgacctatgacgtcaagctcgcgccgccgctgcaggcctatgccgacaccatcatggcgatgccggagatgcaggaatgggtcgcggcggcgagggaggagccggccgagatcgaggaactcgaggtcgaatattag

SEQ ID NO: 7484 - DNA, 1224 bp, BradyrhizobiumColbertium
atgatgtcgatgtattatcaggcctttcagaaccacatggacctgacggcgccgtggcgggcgggggcttcgtctgcgctcaaattcctcaacctggtgccgcagggcgcgtccgatcaggtcatcggccggctgtcggcggcgttggagctgatctcgcgctccaccctcacttatgaccgtcccgcctacggcatcgacagcgtcatggtgggcaaccgcgaggccgccgtcaccgaggagatcgcctacgcaactccgttcggttcactgctgcacttcagaaaggagggcgtgggcgagcagccgcgcatgctgctggtggcgccgatgtccggccacttcgcgacgctgctacgcggcaccgtgaagacgctgctccaggaccacgacgtctacatcaccgactggcacaatccgcgcgacattccgcgcagcgaaggccgcttcgggctcgacgactacaccgagcacctgatcgatttcctcgggcagctcggcccccgcccgcatatggttgcgatctgccagccgtcggtgtcggctctcgcggccgccgcgatcatgtgcgaggacaatcatcccgcgcggccggcgacgctgacgctgatggccgggccgatcgacacgcggatccagccgaccagggtcaacgaattcgccaagagccggccgatcgagtggttcgagcgcaatctgatcaactacgtgccggtgcagtgccgcggcgcgctccgcaaggtctaccccggcttcgttcagctcaccgccttcgtctcgatgaatctggagcgccacatcaagcagcatctcgatctcgccaaccacatcgccaagggcgagacggagaaggccgcgacgatcaagactttctacgacgaatatttcgcggtgatggatcttccggcggagttctacatcgagaccgtgcgcgacgtgttccaggagcacctcctgccgcagggcaaactgatgcatcgcggccgccccgtgaacacaaaggcggtcaaccgcatgggcctgatgacggtcgaaggcgaaaaggacgacatctgctcgatcgggcagacgctggccgcgcaggacctctgcacgggcgtgcgcgcctatcggcgcgtccaccacatgcaggccggcgtcggccattacggcgtgttctccggcaagcgctggaacaacgagatttatccgctgctgcgcgatttcgtacacgttaattcgtga

SEQ ID NO: 7485 - DNA, 1026 bp, BradyrhizobiumColbertium
atgtccgcagccgtgctggaaatgagcgcaagggcgcccgcagccgagcggctcgcggccttcgcccgcgtcaccacggatgacgttgacgaggccgcggagcagatcgggcgcatcttctgcccgcacgatctcaagccggagcgggcgcgagcggccggcttctccgcccggcacaattgtgcggccttcgacggcttctccatcaactacgtggcctatggcggatcggtgagcatcgatccgggctgcctcgagcgcttcttcctggtgcagattccgctggcgggcagcgcccgtattcgttcaggcgtcggcgagttcgatgtcgtgccggaccgcgccgcgtcgctgttgtcgccgaccatcccgacccggatgatgtggagcgattgcgcgcaggcgatcctgctgctcgaccgccgcatggtcgagcaacgcgccgcggcgctgtcgggcagaacggccggcacggtcgaattcgatccggtgatcgacctggacgcgccgtccgggcggggcttgcaggccagccttgccgggctgatgaatctcgccgagcgttttggtccttccggccggctttcgccggttgccatggccgactggcgggagctgctgctggatcatctcctcaacgggcagcggcatggcttgtctgatgcgatcaggacgttctcagggcaggcagagcgcctgccgcgtgcgctccgtgccgcgcgcgaccatctggcggatcatgccggcgagccgctcgatctcggtgagctcgcttgcgtgtccggcattggcatccgcgcgctccagctcggcttccgccgtcacttcggcgtctcgatttcggagatgctgctcgacatgcgcctcgcgagcctgcacgcgcgcctcgcgcaggccgcacccgatgcctccatcaccgacatcgccttcgatctcggcttcacccatctcggccgcatggccggcgcctaccgcgaaaaattcggcgagacgccgtcggcgacactgcggcggaggatgagctag

SEQ ID NO: 7486 - DNA, 450 bp, BradyrhizobiumColbertium
atgactgcactcgaaaagggcattactgcaaacggcacgggctacggcggcaaaagctggaacatcctgggccaagtctatttcccgaaggccgtcaccgactccacctttgcgttcgagaccaacagcgatcccggccagttcgtgccggtgcacatccatccgacccaggacgagtttatcctggtgcaggaaggcaccctcgatctcaagctcgatggtcaatgggtcaaggcccatgcgggcgatctcgtgcgcatgccccgcggaatcccgcacggctatttcaacaagtccgacaagccgtgccgggcactgttctgggtctcgccgatgcaaaagctggaggcgctgttcaatcagctgcacaacctgaccgatcccgcagaggtcgtgcgcatctccgcgctgcacgaggtcgacttcctgccgcccgaggccaacgactag

SEQ ID NO: 7487 - DNA, 1491 bp, BradyrhizobiumColbertium
atggtcagcctcaagcatgtctgcgtgatcggcgccggcgtctccggccttgccgccgcaaaagcgttctccacccacggccaccgcgtcatcatcgtcgagcgcagcagcgatctcggcggcgtctgggagccggcgcgctcatatcctgacgtgcagacgcagagcccgaaggagctctaccgctacaccgatcgcgccatgccggacgcctatccggaatggccgaccgggccgcaggtccatgcctacctcgccgactacgcgaagagcttcggtctcgaccgcatgctgcggctcgacacacaggttgccggcatggctcgccgcgccgacggcaggccgggctggacgctcgcgctgagaaacagggacggcgcgaccacgaacgaagacttcgatttcgtcgcggtctgcaccgggcagttcaacgagccgcgcgagctacattgccctggcgaggacgccttcctggcgcagggaggccagattctgcactcgtcgaaatacagcgatccggcgctggcgaaagggcgacgcgtcgtcgtgctcggcggatccaagtccgcaaccgacatcgcggtgaacgcggtgaaatcgggcgcgcgcgaggtcacgatcgtgatgcgcgaaccggtctggcgcatcccttatttcatcggcggcctcgtgaacttcaaacgcatcctctacatccgcgcgcaggaggagatgtttccgggatggggcatcagcgcgacgtcacgacttgcccatcgcatcgctgcgccgctggtctgggcgaactggcgcggcctggagagtctgttgaaggcccagctcaagctgaagcaatgcaagatggtgccgaacgagcggatcgaggacggcgtcaactgctcggtgccgatcgcaacgccgggcttctatccgatggtcgccgacggccgcatcaaggcggtgttcggcaccttcgatcgttatgacggcgacagcatcgtgatgagcggcggcgagcgcgtcggtgcagacatcgcggtgctcgcgatcggttacaagctcggcgtgcccttcctgcccgaagcttacagacagaaactcgtcgatggtgacgggcagtaccggctctatcgcctgatcgccagtcctgacctgcctgacatgggcttcgtcggcttcaactcgtcattctgcaccgtgctctgcgccgacctcgccgccaactggctggtgcgctacgccgacggccagctcgccaaccagccgacggcacaagcgatgcgcgacaacatcgagatgatgctgcatttcaggcgcgtcgagcggccggccgccggcgtctatggcggcctgtgcgtcgcgccctatcactatcgccatttcgacgagctgatggccgacatcggcacgaagacccagaagcgtaaaggactcgctgggcgcttcctgccgccggacgcggatgtctatgccaagttcctggcttccgcgccggactatcgcgccgcgtaa

SEQ ID NO: 7488 - DNA, 1068 bp, BradyrhizobiumColbertium
atgggatccagacgtcttgcagcccttgcggctattgccttcttcatctcagcgcccgcgaacggacaacagcccgcgctcacagccaggcaatccgaggcactcaccgcctatgaccgcgcgctaggcgatttcaaagccatcctctcggagcggcggcgtcagatcgaggcgaaggagccgctgccgaatctgccgggacaggcgctatatctcgcccgtgtcgccgtcatcagcacctacaaggatctcaccgacgtcatgccgtcgcgcatcggccggcccaacaagttcgagattccgccggcctatttcgatgccgatatcgagccgctggtcgacgagtacggcaagctgttcgacatcatggaagcgccgcctccgggcgcgcaaaactcgccgacgccggtcaaggacgtcgtcgatctcgccgttgcgatcgcgcgcgcaaaggggctcgcgcctgaacatgccgagacggccggtcgcatcagtctcggattgttctttgccgagaccaacggcaagcagaacgtccgcaatgcgcgctcgaacacctatatgggcagcttccagaccggcccctccgaagaccgcaacggccgcaggaaatgggagaagatcaagtcggacgtcgccgcgttggatccggcgctgagtgcgcgagacgacaaggaagaggcccgggcccgcggcaccgatcaccgcttcaaccactggaccaacgtgcgcaatggcctgatgaacgcgcacgctgacctgttccgtgagatacccggaatcgtgaagacgctgcccgacccgatcgaccagatgaagctgttccagttgatccagatcgtgccgaccccgacgcggtccgcgctgagatcgggcgatctcctgaactacagggtgtcaagtccaacggtcatgaagtatctgcgcaacaacagcatcttcgccttcggacaggccgaccgggcgcgcagctcggcaagctaccgcgagatcttcgctgcgatgtggctgttcaacaggaagttcgagcgcgcgatgacgagttacgcggagatcagggcgcgttga

SEQ ID NO: 7489 - DNA, 1005 bp, BradyrhizobiumColbertium
atgcgcttcctcattctcggcggcagccagtttctcggccgggcaatcgccgcgcatgcctgcgctgccggtcatgacgtgacctgtgcagctcgcggccttgcggggccgattgccgcgggcgcgcgcttcgtgcggatcgaccgcgacgccgccgacggtctcgccccgctcgcggctgagaccttcgacgccgtggtggatgtctcgcgccggcccggccaggtccgtcgcgcggtcgccacgctgaagcgaccggacgtgcattggacctttgtgtcgacgatcagtgtctatgcggacaaccggatcccggggcaacgcgccgacacggcgccgctgcgcgagccggttggggcggagatcgagcacagcaccgacgccatctatggcgccgccaaggttgcctgtgagcaagcggtcggtggcgacgccttcatctgccgcgccggcctgatcgccggaccggaggacccgacaggacgtttcgcgtactggccggcgcgtcttgcgcagggcggcgaggtgctggcgccgggatcgcccgaggatgccgtccagttcatcgacgtgcgtgatctcgcgcaatggatcgtcgatgcggccgagattcacctcaccggcatctatgacggaattgggccaactcgcacgcgcggcgaattcctgagcgaatgcgcatccgcgctgaacacgtcctgcacgttcacctggatcgaccgtgcctttctggaagcgcatgatgtgcggcgctgggcaggtccgcgatcgctgccgatgtggctgccattgccggactatgccggattcctgacacgcgacacctccccggctcgcgcggccggattgacctcgcgaccggtggccgccaccgcgcgcgacacgcttcactggctcctcgccggcggcggcccggtcgtcgggctcaccgcggacgaagagaaggatgtgctcgccgcgtggcatgcgcaccagccgggctggggccggaatgtaacctcataa

SEQ ID NO: 7490 - DNA, 1110 bp, BradyrhizobiumColbertium
gtgattgcgctcgccggttgcgaggacaagaacaccttcgtggcaccgccaccgccgaaggtcgacgtggcgacgccggtgcagcgcccggtcacgcgctatatcgagtccaccggaaacaccgctccggtcaaaagcgtcgatctcgtcgcgcgcgtgcagggcttcctgcaatcgatcgactaccaggacggcacgttcgtgaagcagggcacgcagctgttcacgatcgagccggagacctacaagctcaagctcgagcaggcgcaggcggccgaggccggcgcgcaggcctcgctccgtcaggcggaagccgactacaagcggcaggcggagctggtgcagcggcaggccgtctcgcaggccacgctcgacacctcgacatccaaccgcgacaacgcccaggccaatctgcaacaggcccaggccaatacgaaactcgccgaggtgaactacggctacaccaaggtgacggcgccgttcgacggcatcgtcagcgcgcacatggtctcgatcggagagctcgtcggcgtttcgtcgccgacccagctcgccaccatcgtggcgatggatccgatctacgtaaacttcaccgttaacgagcaggacgtcctgcgcattcgcgccgaagcggcacgccgcgggatgacacccgccaacctcaaggagtttcctatccagatcggcctccagaccgacaccggctacccgtaccaggggcatctcgactacgtctcgccgacgctcaatcaatcgaccggcacgctggcggtccgcggcctcgttccgaaccagaagcgggtgctgctgcccggctatttcgtccgggtccgcgtgccgttcgagcaggagaagagcgccctcctggttcccgacaccgcgctcggcagcgaccagggcggccgctatctgctggtggtcaacggcgacaatatcgtcgagcagcgcaaggtgcagatcggccccgtcgacaacggcctgcgcgtgatcgaaaacggtctgaagccggacgaccgcgtggtggtcgcagggctcttgcgcgtcatcccgggccagaagatcgacccgcaggtgaccaagatcgagcagccgcaggcgtctgccaagtag

SEQ ID NO: 7491 - DNA, 3150 bp, BradyrhizobiumColbertium
atgatctcgaagttcttcatcgagcggcccgtcctctcgaacgtcatcgcgctgctgatgatcctgatcggcggtgtcgctctgttcaaccttgccatcgcgcaatatcccgacgtggtgccgccgaccgtgcaggtcaccacgcgctatcccggcgccagcgccaagaccgtgatcgacaccgtggcgttgccgattgagcagcaggtcaacggcgtcgaagacatgctgtacatgcagtcctacagcgctgcggacggcacctacacgcttaccgtgacattcaagatcggcaccgacctcaacttcgcgcaggtgctggtgcagaaccgcgtctcaagcgcattgtcccagctgccgcaggcggtgcagaaccagggcgtcaccgtgcagaagcgatcgacctcgatcctcctgttcgtgacgctgacctcgccggattccaggtacgacagcctttacctgagcaattacgccaccatcaacatccgcgacgagctctctcgccttcccggcgtcggcaacgtcaccgtgttcggcgccggccaatattcgatgcgagtctggctcgatccgaacaagctgcaagtgcgcggcctcgtgccgcaggatgtcatccaggcaatccagcagcagagccagcaggtctcggccggccaggtcggcgcgccgccgaccccgccaggacaggcgttccagtacacgctcaatgtcaacggacggctcgacgacaccagtcagttcgagaacatcatcgtcaaatcgggcagcagcggcgacgtcacgcgggtgcgcgacgtcggctgggtcgaactgggcgcgcagacgtacaaccagatcttctcgctcaacaagcagccggccgtcggcatcggcgtgttccagtcacccggtgccaacgcgctccaggtcgagaatgccgtcgagaagaagatggccgaacttgccaaacgcttccccgagggcatcaagtacgacacgccgttcgacaccaccaaattcgtcgaggcctcggtgcacgaggtctacacgacgctgatcgaggcgggcctgctcgtgctggtcgtgatcctgatattcttgcaggactggcgcgcgatgctcgtgccggcgaccaccgtgccggtgaccatcattggcgcctttgccgcgatggcggcgctcggcttcaccatcaacatgtcgacgctgttcgcgatcgtgctcgcgatcggcatcgtggtcgacgacgccatcgtcgtggtcgaaggcgcagcgcacaacatcgagcagggcatgaacggccacgacgccgcgatcagggcgatggaccagctgttcgcgccgatcgtcggcatcacgctggtgctgatctcggtgttcctgccggcctcgttccttgcaggactcacgggacgcatctattcgcaattcgcgctggtgatcgccgcgacagcgcttctctccgccatcaacgcggcgaccttgaagccgacgcaatgcgcgctctggctccggccggccgtcccgcccgagcagcgcaacttcttctatcgcggcttcaacgcgatctataatcgcgtcgagcgcgcctacacgaggctgatcacctttctcgtcaaacacgccaccatctcggtcgcgttcgcgctgctgatcatcggagcgagcggctacggcctgtcgcgggtgccgacaggcttcctgccgatcgaggaccagggctatctgatcgccgccgtgcaattgcccgacggcgccgcgctggagcggacgcaagccgtgctcgacagagcgagcgagctgatcaaggacacacccggcgtccagcaggtcatcacgattgccggcatctccgcgctcgacaacagcgccagccttgccaatgccggcgtcgcctacatcatcctgaaggactgggacgcgcgcaaaggccccggcgaggatctgcgctcgttggtgttcgggctgaacgacaagctcgcggccatcatggaggcgcggaccatcgttctgcccccgccgccgatccagggcatcggcaatgccgccgggttctcgatgcaggtcgagctgcgcgacggcaacagcgacttcgccaagctgcaggcgatcaccggggcgatggtcagcaatgcccaaagccagagcgcgcttcaacgggtgcagtcctcgttccgctcctcggtgccgcaattcaatgtcgagatcgaccgcgtcaagacccagaccctgcacgtgacgacggatcaggtgttctcggcattgtcgacctatctcggctcctcctacgtcaaccagttcaacaagttcggccgcgtatttcaggtctatacccaggccgacccggcgttccgcgtcaccgagcgcgacatcgccaacatgatggtgcgcaactcgaacggcgacatgattccgatcggcacggtcgccaagatcacgcccgccaccggaccatcgctgatcagcctctacaatctctatccgtcgtcgaccgtgatcggcctgcccgcacagggctattcctccggtcagtcgctgaagctgatggaggagatcgcggacaagacgctgccgcccggcaccggctacgaatggaccgcgatgtcgtatcaggagaaggcggtctcgaaccagatctactgggtgttcgggctcgccatgctgctggtctatctcgtgctcgccgggcaatatgagagctggtatgcgccgatctccgtgatcctcgccgtgccgctgtcgctgctcgggccgatgctggttctcagcgccctcaagatcgacaacaacctctattgccagatcggcctcatcctgctgatcgcgctgtcggccaagaacgcgatcctgatcgtcgaggtcgggctcgagctgcacggccgcgacggcagaccgatcctggagtccgccatcgaagccgcgcgcgcccgcttccggccgattctgatgacctcgttcgccttcatcctcggcgtggtgccgctggtgctggcgaccggcgcaggcgcaagcgcgcgcaagtcgatcggcattaccgtgttctccggcatgcttgcctcgacctgcctcgcagtgctgttcgttccggccttcttcgtggtggtgcagcgcttcgagaactggcgggcgtcgaagaagcgcaaggtgcaggcggtgccggcgaaatag

SEQ ID NO: 7492 - DNA, 2265 bp, BradyrhizobiumColbertium
atgcagagcctgctcagaccgatcgtcattgtccctgcagcgctcgtcttcaccaccatggcggcttttgccgagaccgggaaagcggacggcccgtccgaattcctgctggtggcgcagatcgtcctgctgatcgcggtcggccgcggcctcggcgagatcatgatgcgtatcggccagccctccgtcatcggcgagctgctcgccggcatcatcctcgggccgtcgctgttcggctggatctggccggaggcccagcacgcgatcttccccaagtcgcccgagcagaaggcgatgatcgacggcatcgcccagttcggcattctcctgcttctgctgctgaccggcatggagaccgacctcaagctggtccggaaggtcggcagggccgcgatcgcgatctcggtcgccggcatcatcgtgcccttcgcctgcggctttgcgctcggcgagttcctgccggatgcgttgctgcccgatccgcagcagcgccttgtcgcgtcgctgttcatgggcacggcgctgtcgatctcctcggtgaagatcgtcgcggtggtcgtacgcgagatgaacttcatgcgccgcaatgtcggccagatcatcgtctcgaccgccgtgatcgatgacacgatcggctggatcatcatcgccatcatcttcagcctggcatcccacggcacgctcgatatcgcctcggtcgccaaggccgtgctggggacgcttgccttcctcgcggtcagcttcaccatcggccgccgcctggtgtttcagctgatccgctgggccaacgacaatctcgtcagcgcggcgccggtcatcaccgtgatcctgctgctgatgagcgtcatggccatgatcacgcacctgatcggcgtccacaccgtgctgggagccttcgtcgccggcatcctggtcggagagtccccgatcctgacgcggcagatcgacgagcggctgcgcgggctgatctcgagcttcttcatgccggtgttctttggcctggcagggctcagcgccgacctctcggtgttgcgcgatcccaatctgctgatgctcaccggcctgctggtcgtgatcgcgagcgtcggcaagttcggcggggcgttcgtcggcggcaccctcggcgggttgaatgcgcgggagtcgctggcgctggcgagcgggatgaacgcgcgcggctcgaccgaggtgatcatcgccaccatcggcctctccatcggcgtgctcagccagaacctgttcacgatgatcgtgaccatggcgatcgtcaccacgatggcgatgccgccgatgctgcgcgcggcgctggccaggctgccgatgagcaaggaggagaaggagcggctggagcgcgaggaattcgagaagcgcggcttcgtcgcaaatctcgagcgccccctgctggcggtggacgaaagcgtcaacgccagctttgccgcccacatcgcgggcctgatcgccggcaagcgcaacctgccgctcaccgtgctgcatatcggccagcacgccaaggagcaggagaagggtagggacgaggaagaaagccacgaagccgtggtgaagaaggccgcagaagtcgtgtccgctcgcggcgacggcgaggccggcaacgtcgatgtcgtcagccgggcgaggcaggcggggctcggcgagacgatcgccgacgaagcgcgcaagggcttcgatctcctggtcgtcggcatcgacacggtcgtgacgacgaaggatcgtttcgaccggaggatcgacgatatcgcggcgaagttcgaagggccgctcgcgatcgtggccgcgaagggcaagcacctgaagcagccgatgcccgacgcgctcaacatcctcgttccggtttcgggcagcagtgtctccaagcgcggtgccgagatcgcggtggcgctggcacaggcgggatcaggttcgctccgggtgatctatgtcgcaacgacgcgggacaagggcgcacagcgcggggtttccggcggcctgagccaggagacgggaatcctcaaggacgcgagcgatctcgccgcccgctacgacgtcgacatcaccaccacgctgcgggtgaaccgggcgccggaggcggcgatcctgcgcgagatcgacacaaccgacgtcgatctcgtcgtgatgggcgtcgaccgcatccaggccgatcacctctccctcggcggcgttgccgacgccgtgctaaggcagtcgaaggtctcggtgctgctggtgtcgagcggtgaggcgcgccggactccggcggagaagggttag

SEQ ID NO: 7493 - DNA, 399 bp, BradyrhizobiumColbertium
atgcacagtagagacgcgttgaaagcgctcgagatttcggctccgccgaagaaacttgctccgtcgggcaaaacactggcaggatggcatcatcggtggcgtggatgggctgccatcttccaggcccccaccccacgtcctcccgtcattgagcgcagcgaagcaatccagagtctctccgccgaacgattctggattgctccgtcgctacgctcctcgcgacgacggtggagaacgggtgccgcgtctcggaggcatgccggcgccccgacaggcgcgaacgcggaagtcctggggcagcagagcgtgcggacaaatggacccgggctcgtcgctgcgcgacgccccgggatgacgcgcggagggagcatcgccctcacgccgtctgcggcgtcctga

SEQ ID NO: 7494 - DNA, 1173 bp, BradyrhizobiumColbertium
atgaacagccccggtcgggtcatcagtttcgtcaacgcaggccatttcatcgaccattatgcgatgctgatctttgccgccgccgtcatcatcatggggccggcgctcggcatggcctattcggaactcctgccctacgccacgccgggcttcgtcgcctttggtgccggctcgctgctgaccggctggctcggcgaccgctggagccggcgccacatgatgctgatcttcttcgtcggcatcggcgcctccatggttgcggtcggcttcgtgcaaacgccggtgcagctcggcgcggcgctgctcgcgatcggcatcttcgcctcgatctatcaccccgtcggcaccgccatgatcgtgtcctatgccgataggctcggccgcgagatgggcatcaatggcgtctggggcaatctcggcgtcgcctcgtcggccttggtcaccggcgtgatcggccaatacctcggctggcgcttcgccttcatcgttcccggggccgtcacgatcctcaccggcatcgctttcgcgatgagcgtcgtgcatgaggaccgcaagggttcgaagcaggccgccgcgcaggcgcgcgtcgccaagcgggacatgtggcgcgtgatcctggcgctgctgatcgtcgtgatcgcgatctcgacgaccttcaacgccgtcaccgtggcgctgccgaaactgtttgcggagcggcttgcggacctgaccaagagcccggcgctgctcggggtcatcgcggcttgcgtctacgtgttcggcgcgatgacgcagtacacgatcggccggctgctcgaccgctattcgttgaagacggtggcgctgccgctgtcattcatgctggcgccgttcctgtatctggccgcgagcctgaacaatctgccgctgatcctggtctcgatcggcatcgtgatgggtgccttcgggcaggtcacggtgaacgacgccatggtcggcaagtacaccaccgaggagtggcgctcgcgcgcctacgccgtgcgctacttcgtcggcttcaccgcggccggtgcctcggtcggcctggttgcctggctctacgagcagggcggcttcgtcaccatgctgcacgcctttgccgcgttgtgcctgctcgcaatcgccgccgccttgatcctgccgcgcgagatcaggacgccgcagacggcgtga

SEQ ID NO: 7495 - DNA, 801 bp, BradyrhizobiumColbertium
atgactgtcttggaaacgccaatcctcagggaagtccggggcaaccatcgctcgaccgcgggcgtgcacctggtcgctcgcgactatcccaagggcatgcggatcaagccgcacctgcaccgcgaagcgcagctgatctatgctgcgaaaggcaccatgcaggtcacgacgcccggggggcgctggctggtgccgccggaccgcgccgtctgggtacccgccgggctcgagcacgccatcgacctgctcgccgacatcgagatgcgcacgctttacttcgacttgtcctggctgaagcgcgagcgtcgctatgacggcctgaccagggaattcgtggtgcgggtctcgccgctgctcaatcaggcgatcctggcgctgttcgacacgcgcaacaccgaggagcgcaccgagctgctagtccggctcgtgatgctggaattgcaccaggccgaggattccgcgaccttcgttccgctgccgcatgagccgcgctgccgccgcgccgcgatgatcgtgctcgacgatcccaccggcctgcacgacatcgacacgctggcgcgggaggtcggaacctcagcgcggacgttgtcccggctgttctcgagcgagacgcagctgagcttcaagagctggtgccagcgcgcccgcatcgcggctgcgatccagcggctgtcgacggatgcgaccgtctcggtgaagcagctcgccacgtcgctcggctatgccagcgtgccggcgttctccgccgcgttccgccaggtgacgggacggacgccgacggagtttgcgggaaagggttag

SEQ ID NO: 7496 - DNA, 1353 bp, BradyrhizobiumColbertium
atggccaacgccttcttctccgatctgcttgccaccatctccgagcgcggccgcacgctgcttcgccgcggtgattccgccgacaccagacgagatgccgacggactgctcgagctctgcgatgcgctgctgtccggccggggcgaagcttccggcaccgcgatggcgcgcgaggtgctggacatctaccgggagctggatgcggcggggcgccgcgccttcttcgagggattggttcgcgatttcggtcccgatcgggagcgcctgtccaaggcaatcgagacatggcgcgccaagccgagcgacgaggacgcgagcgcactgcacttcgcctccgagccgcggcggcaggaactgatccgccgcctgaatcgcgccccgggtggcaccggcgatctcgtcaacatgcgcgccgatctgctcggcatgatgaacgggcacaccgatctcgccgcgctcgatcgcgacgtctcgcatcttctctcttcgtggttcaacagggggtttctcgtgctgcgcaggatcgactggtcgaccccggccaacatcctcgaaaagatcatccgttacgaagccgtgcacgagatcagcgactgggacgacctgcgccgccgcatcgatccggtcgaccgccgctgctacgccttcttccaccccgcgatggtcgacgagcccctgatcttcgtcgaggtggcgctgaccgaaaccatccccggcgcgatccagcccctgctcgcggtggaccgccagcatctgccgatcgaacgcgcgcgcaccgccgtgttctattcgatctccaacacccagcgcggcctcggcggcatctccttcggcagcttcctgatcaagcaggtggtggaagagctgcgccgcgaattgccgaagctcgacactttcgtgacgctgtcgcctgtgcccggcttcatggcatggatcaagcaggacaaggatttgccgctgtcggacgaggaccgcgaggtgctgaagcgtctggaggatcccagatggttcgaaagccccgagacaacggccctgctccgcagcgtgatagagccgctggctgcgcactatttcctcaaggcgcgcacgtcgaagggcaagctgatcgattccgtcgcccgcttccacctcggaaacggcgcgcggctggagcgcatcaactggctgggggacctctcgccgaagggcgtgcgcgaatccgccggcgtcatggtcaactatctctaccgtctcgacgatatcgagaagaaccacgaggcctatgccaatgacggcgaggtcgtggcatcgagcgcggtaaagaagctgctgaagagcgaaggacgaaggctgctggatattcgtttgtcgtag

SEQ ID NO: 7497 - DNA, 1170 bp, BradyrhizobiumColbertium
atgtccgtccgcatcgtcgacgtccgcgagatcaccaagccgatctcctcgccgatccgcaacgcctatatcgatttcagcaagatgacgacaagcctcgttgccgtcgtcaccgacgtcgtgcgcgacggcaggcgcgtcgtcggctacggcttcaattccaacggccgctacggacagggcggcctgatccgcgagcgctttgcttcgcgcattctcgaagccgatccgaagtcgttgctcgatgaagccggcggcaacctcgaccccgacaaggtctgggccgcgatgatgaccaacgagaagccgggcggtcacggcgagcgctcggtcgccgtcggcacgatcgacatggccgtgtgggatgcagtggcgaagatcgcgggcaagccgctgttccgcctgctcgccgaacgtcacggcgtgaccgccgatccgcgcgtcttcgtctacgcggccggcggctactactatcccggcaagggcctgtcgatgctgcgcggcgagatgcgcggctatctcgaccgtggctataacgtcgtgaagatgaagatcggcggcgcgccgatcgaggaagaccgcaagcggatcgaggccgtgctggaagagatcggcaaggacgcgcagctcgccgtcgatgccaacggccgcttcgacctggagacggcgatcgcctacgccaagatgctgcgggactatccgctgttctggtacgaggaggccggcgatcccctcgactacgcgctgcaggccgcgctcgccgaattctatccgcgcccgatggcgacaggcgagaacctgttcagccaccaggacgcccgcaatctgatccgctacggcggcatgcgccccgatcgcgactggctgcaattcgactgcgcgctgtcctatggcctgtgcgaatacctgcgcacgctggaagtgctgaagactcacggctggtcccccagccgctgcattccccacggcggccaccagatgtcgctcaacatcgctgccggcctcgggctcgggggcaacgaaagctatcccgacctgtttcagccctatggcggcttccccgacggcgtccgcgtcgagaacggccacatcaccatgcccgaccttccaggcatcggcttcgaaggcaagtccgatctctacaaggagatgaaggcgctggcggagtag

SEQ ID NO: 7498 - DNA, 243 bp, BradyrhizobiumColbertium
atgagcgacgaatttcccgaccgcctgtcggtcgatccgaacagcccctactacaacgccgacattctggcgcgcgacgttggcatccgcttcaagggcatcgagaagaccaatgtcgaggaatactgcatcagcgaagggtgggtccgcgtcaccgctgggaacgccaaggaccggcacggcaatccgctgaccatcaaggtgcacggcccggtcgagccgtacttccgggacaagaagtag

SEQ ID NO: 7499 - DNA, 477 bp, BradyrhizobiumColbertium
atgacggccatctacgacttcaaggccaactcgcttgccggcgaggagatcgccctgcgccggttcgagggacaggtgctcttgatcgtcaacacggcgagcaaatgcggcttcacgccgcaatatcgcggccttgaggatcttcatcgcgatctctccccgcgcggcttctcggtgctcggctttccctgcaaccagttcggcgcgcaggaaccgggaccggcgagcgagatccaggagttctgttcgacccactacgaggtcacctttcccctcttcgagaagatcgacgtcaacgggccgaaggcgcatcctctgtacgaatacctcaaacgccagcaatcagggcttctcggcgcctccatcaaatggaatttcaccaaattcctggtggaccgtgccgggaaggtggtcgcgcgctacgcgccgaccgcacggcccgaaggattgcggcagcaaatcgaaacactgttgtga

SEQ ID NO: 7500 - DNA, 1401 bp, BradyrhizobiumColbertium
atgcaagatctctggcgcctgtcagccgccgacctcgccgccctcgtcaaatccaaaaaggtgtccgccagggaggccgcgcaggctggccttgcccggctcgatgccgtcaatcccaaactcaatgcggtgatcgatcaccggccggaggacgtgctcaagcaggccgatggcgtcgatgccgccatcgcgcggggcgaggaccccggtgtgcttgccggcgtgcccgtcaccataaaggccaatgtcgatcaggaaggcttcgccaccaccaacggcctcaaactgcagcgcgacgtgatcgcgcgcgaggacaatccggtggtcgccaacttccgcaaagccggcgccattctcctcggccgcaccaattgcccggccttctcctaccgctggttcaccaccaatctgatccacggcgacaccaagaaccccagggatgcctcgctgacgccgggcggttcctccggcggcgccggctccgcggtcgcggccggcatcggccacattgcccacggcaccgacatcgcgggttcgatccgctatcccgcctatgcctgcggcgtgcacggcctgcgtcccacgctcggccgcatccctgctttcaatcccgcgctgccggagcgcccgatcggcccgcagatcatggcggtgtcgggcccgctggcgcgcacggtcaacgatttgcgcatctcgcttgatgcgatgtcggcccgcgacatccgcgatccctggttcgtgccggtgccgctgcagggccccgctcgggacaagcgcgccgcgctctgtctcaatccgggcggccttgccaccacgccggaggtgaaggccgcggtgagcgatgccggcaagcggctcgagcgggcgggctggaccgtcgacgtcatcgaggacacgccgccgatgcgcgaggcggtcgaatggcagatcaagctctggctcggcgacggctacgaggcgcaactcgaggcggccgagcgcgagggcgatcccggcgcgctggcctgtctgcgcggcaaccgcagcagggtcacgccgatggatcaggcaaattacgccaaggcgctgacgcggcgagccacgctgacccgcgaatggatgttgttcttcgagaagtacgccgtgctgctgacgccggtctcgggcgaattgccgttccccgatcatcttgaccgcaaggacgacgaatccttcaagcgggtctgggaagcgcagctgccgcagatcgcaattcccttcatgggtctgcccggcctcgtggtctccacgggcctcgtcggcaaggcaccggtcggcgtgcacatcgtctccggacgttatcgcgaagacctttgcctgcttgccggcgaagcgatcgaggccggcggcgtgccgccgtcgccgatcgatcccgtggactag

SEQ ID NO: 7501 - DNA, 258 bp, BradyrhizobiumColbertium
atgcccagatatttcttcaacacccgtatcggcgacgaactgatcgtggatcctgaaggcgaggacctgcgcaaccccgatcgcgcctgggaggtcgcccgccagatgatcctggaggtggtgaagtcggagggcacccagcgggccctgctcgaggcggtgatcgaggtgacggacgctgaaggcgagatcgtgctcgagtttcccttcaccgaggccctgctggacctgccggaccagtcagcgacgaggcattag

SEQ ID NO: 7502 - DNA, 930 bp, BradyrhizobiumColbertium
atgcttcgcgtcgtcgtcctgggcgctgcagccggcggcggagttccccagtggaattgcggttgcgacggctgccgtgcggcccgcagcggcgggcatgagctgcaccgtacgcaagcctcggtcgccttcagcggcgacggcgagcactggttcctgatcaacgcctcgcccgatctccgtcagcaattgaatgcaacgccgcagctgcaccccagggcgggcgcgctgcgtcacacgccgattgcaggcgtgatcctgaccaacagcgaagtggatgcggtggcgggcctgctctcgatgcgcgagagctcgcccttcaccatctatgcgcatgagaaagcgctggcgatccttgccagcaacagcatcttcaacgtgctgaacgagaagcacgtgcggcgacagccgatctctatccgcgagcccttcgagccgcgcctcaccgatggcgcacgctcggggctggaggtgatggccttcgcggtgccgggcaagtcggcctggtatctggaaggcaagacgcatccgggcggcgagaacggcgatggcgatacgctggggctcaagatcaccgacaaggcgaccggcaagtgcttctacttcattgcggcctgcgccgaggtgaccgacgcgctcaaggccgagatcgacggcgccgcgctggtgttcttcgacggcacggtctggcgcgacgacgagatgatccgggccggcctcggccacaagaccggaaagagcatgggccacgtcgccatgtccggcgagggcggcgccatcgcgcggcttgccgaccttgctatcgaccggaagatatttctgcatatcaacaactcgaacccggcgctgctgcccgcgtcacccgagcggaaagccactgaagaggcgggctggcagatacccgccgacggaacggagatcgtgctgtga

SEQ ID NO: 7503 - DNA, 780 bp, BradyrhizobiumColbertium
gtgattgccgcatcactgactggaatgaccgcgctctcgatcggcaaggacatcaggctcggctcggccgaggagctggaggcggcgctgcggcatatcggcgcgacgcgctatcacagcctgcatccgttccataagctcctgcacggcggcaagctgaacaagggccaggtgcaggcctgggcgctgaaccgctactattaccagagcaccatcccgatcaaggacgcggtggtgatctcgcgcttccgcgaccgcgccaagcgcctggaatggcgccaccgcatcgaggaccatgacggcgacgtcggcagcgaaggcggcatcgagcgctggatcaagctgaccgaagggctcgggctcgatacggcttacgtggaatcgaccgaaggcatcttgcccgcgactcggttcgcagtagaggcctatgtccattactgccgcgagaagagcccgctggaggcgatcgcctcctcgctcaccgagctgttcgcgcccaacctgcatgaagagcgcatcgcgggcatgctggagcattacgacttcgtcaatcccgacatcatgagctatttcaagcggcgcctgacgcaggccccgcgcgatgccaatttcgcgctcgactacgtcaagacgcatgccacgacgccggagcaacgcgcgcttgtgtgcaacgcgctgatcttcaagaccaacgtcttgtgggtgcagctcgatgcgctccagcatgcctatgtcgagggccacattccgccgggcgcgttcgtgcccaaagcgagttga

SEQ ID NO: 7504 - DNA, 312 bp, BradyrhizobiumColbertium
atggccgggccgcgtcacatcagcgtcagcgaggcgagccgccccgtgctgccgcggcatgccaagctgaaatatgacgagacgcggaaagtctgggtgatcctggcgccggaacgggtgctggcccccgacgagatcgcagtcgaggttctgcagctctgcaacggcgagcgcaatgtcggcgacgtcgccgatcaactcgcggcgaaatacgccgcgccacgcgaggcgatcctcgctgatgtcattgccatgctgcaggatctcgccgacaagggctttctcaccgagatcagggagaagacgtcatga

SEQ ID NO: 7505 - DNA, 1182 bp, BradyrhizobiumColbertium
atgagcgacgtgaccatcccgcccagcgacagcctcgcggtgctggagaagcagcgctcgacagcggagagcttcggcattccgctcgcggtgctgctcgagatcacccatcgctgcccgctgcaatgtccctattgctccaacccggtcgagctcgaccgctcggcgaaggagctgaccaccgaggaatggaagaaggtgctgagcgagctcgccgagatcggcgtgctgcaggtgcatttctccggcggcgagccgaccgcgcgcaaggacctcgtcgagctggtcaagcatgcgagtgacgtcggcctctacaccaacctcatcacctcggcggtgctgttgacgcgcgagaagctcagcgatctcgccgacgccgggctctgccatgtgcagatctctttccagggcatcgaggaaggcctcgctgatcgcgtcggcggctacaagggcgggcaccgcaagaagctcgaggtcgcaaggtggactcgcgagctcgatctgccgctcaccgtgaacgcggtgatgcaccggcagaacctgcaccagctccccgacatgatccagatgtcgctggatctcgacgccgaccggctcgaggtcgccaacgtgcaatattacggctgggcgctgaagaaccgcgccgccctgatgccgaccgtggcgcagctggacgaatgcactgaaatcgtcgaggaggcgcgcgagcggctgaagggccggctgacgatcgactacgtcgtgcccgactattacgcgctgcggccgaagaagtgcatgggcggctggggccggcagttcttcaacatctcgcccgccggcaaggtgctgccctgtcacgccgccgagagcatcaccgggctcgaattcgaatccgtgcgctccaaccattcgatcgcctggatctggcagaactcggaggccttcaaccgctatcgcggcaccggctggatgaaggagccgtgcaagagttgcgagttccgcgagatcgatttcggcggctgccgctgccaggccttcgcgctgaccggcgatgccgccaacaccgatcccgcctgcgctctgtcgccgctgcacgagaccatcttcaagcaggcggaggccgaggccgagggcgagacgagccgcttcatctaccgcaacttcgccggcggcaccctggaatccgagaatgggacctga

SEQ ID NO: 7506 - DNA, 987 bp, BradyrhizobiumColbertium
atgggacctgacgccgacgcggccacttccgtcaaacgtgccgatccctttgcgccgctgacctccgacatgctcgacgtcggcgacggccatgagctgcatgtcgagagcgtcggccgtgccgacggaatccctgcggtctatctgcatggcgggcccggctccggctgccagccggaccatcgccggctgttcgatccggaccggttctgcgccgtcttgttcgaccagcgcggctgcggccgcagcaggccaaaggggtcgcgcgagcacaacaccacggcgcatctgatcgccgatatggagaagatccgcgagaagttcgatttcgaccgctggatggtggtcggcggctcctggggcgcgacgctggcgctggcctacgcagaagcacatcccgagcgcgtctccggcatcgcgctgcgcgcgacctttctcggcacgcgggccgaggtggagacggccttcacctcgcgcctggcgcagttctatcccgcgctgcacgaggactttctcggtgtgctgcctggggaagaacgcgatcgaccggtcggcgcctattggcgccgcatcctcgatgccgatccggccgtgcacggacctgccgcgcgcgcctggcacgacaccgagcgcacgctgtcagagcacaagcccgccaggacccggctggaccttgcatcgctcagtgtctggcgcacgctgccggcgacgccgttcatggaggcgcattatttcgtcaacgacagcttcatgaccgaggaccagctgttgcgcaatgcgggacggctcgccggcattcccggcatcattgtccagggtcgctatgacttgttgtgcccgcccgagacatcgcaggcattgacgaaagtatggcccggttccgagcttcgcctcgtggaagcagccggacattcgctctatgatgccggcgtgagggacgccgtcatgaagtcgatcgcggacctcgcgtcgaagatcgggcgatga

SEQ ID NO: 7507 - DNA, 678 bp, BradyrhizobiumColbertium
atgccgctcgccggaaagggcatgctgctgacgtcgatgaacatcgacgtttcagacgaagccgatttcaaccgctggtacgatcgcgagcatctggaagagcgtgtcgcgatcgacggattcctggaggcgcggcgctatgtcgcgcatgccgccaatcccaaatatctgtcgttgtactcgaccgcgacgctcgacgtgctcgacagccccgcctaccgggcgcggctggcgaacccgaccgactggtcgcggcagaccatggcgcgtttcagggacatgctgcgcgttgtcgcccgcatcaccatcagcaagggcaccgggcgcggggctgtgctcggcctggtgcggctgcggccgacgcctgacaatgccggagcgtggcgggacgcgctgcaagacaagctgaggcccgaagcgcatgacggcatcatctcgatgcatctgctggaaagcgagcccgaactgtcgggtgcgacagcgggaatcccggcgacgcgtaacgaaggcgcacgcgactggttcgtgctgatcgacggcacgcatgtcggcgcggtctccgccgtcatcgccgagcgcttcaccggtcctgcggcggcccccttcccgcctcccgtctccgtcggcacgtactgcctgatgtgggatctcgcgaagagcgatatcgcgcacggctga

SEQ ID NO: 7508 - DNA, 1566 bp, BradyrhizobiumColbertium
gtggcgatctgccgcctcaagcgcgtcgccgcggacttcaaggacgacatcaggcaacgcctgccgcgcccggcacccaagaacggcaagcgcgtcgcgctggtgggaggcggcccggcctcgctgacggtggcgcgcgatctcgcccccctcggctatcactgcaccgtgttcgatgccgatccggaagccggcggcatgatgcggacgcagatcccgaaattccgcctgccgaattccgttatcgacgaggagaccggctatatcctgggtctcggcgtcgacttcaagggcggccatcgcatcgagagcatgaaggcgctgctcgcggaaaagtacgacgcgatcttcgtcggttccggcgcgccgcgcggccgcgagctcgacattcccgggcggaaagaggcagcgagcaacatccatatcggcatcgagtggctggcctcggtctcgttcggccacaccgacaagatcggcaagcgcgtgatcgtgctcggcggcggcaacaccgcaatggattgctgccgcaccgcgcgccggcttggcggcgaagaggtcaaggtgatcgtgcgctccgggttcgaggagatgaaggcctcgccttgggagaaggaggacgcgatccacgaggacatcccgatcctcaacttcatggttccggtcgccttcgtgcacgaaggcggcaagctcaccggcgtcaccttccagaaggtgaaggccgaatacgacgccaaggggcggcgcaatctcgttccttcaggcgagcccgatcagaccatcgcctgcgacgacgtgctggtcgcggtcggccaggagaacgccttcccctggatcgagcaggattgcggcatcgagttcgacaaatggcacatgcccaaggtcgacccgaagaccttcgcttccaccaatcccagagtcttctttggcggcgacgctgcgttcggcccgaagaacatcatctgggcggttgcgcacggccatgacgccgcgctgtcgatccacaagatgctctccggcgaggccatcgacgagcgcccgctccccgacgtgcaaatctcgtcgcagaagatgggcatccacgaatggagctatgacaacgacatctccgtcgacaagcgctacaaggtgccgcaccgcgacaaggttgtcgcgctgaaggacatccgcgccgaggtcgagctcggctatgacgtcaagctggctctcggcgaggcgcatcgctgcctgaactgcgacgtgcagaccgttttctcgacctcgctctgcatcgaatgcgacgcctgcgccgacatctgtccgatggattgcatcacctttacggccaacggcgaggagagcgatctgcgccagcgcctgaaggcgccttcgctgcatcccgatcaggatctctacgtgtccagcgacctcaagaccgggcgcgtgatggtcaaggacgaggacgtctgcctgcattgcgggctatgcgccgagcgttgtcccaccggcgcctgggacatgcagaaatatttcatcgagatgacccacgcaggttcgacatgtccgacaaaaagccgatcagcagcgtaa

SEQ ID NO: 7509 - DNA, 1848 bp, BradyrhizobiumColbertium
atgtccgacaaaaagccgatcagcagcgtaaacgacttcgtcgtccgcttcgccaacgtcaacggctcgggttcggccagcgccaacgagatgttcgcgcgcgcgatcctgcgccatggcgtgccggtgtccccgcgcaacatcttcccctccaacatccagggcctgccgacctggtacgaggtgcgggtgacggaagacggccatctcggcgcccgcggcggcgtcgacatgatggtggcgatgaatccgcagacctgggacaaggacgtcgccggcatcgagccgggcggctacctgttctacgattcccccaagccgatgccgtcgaccaagttccgcgacgacattaatgtgatcggcgtgccgctgaccgccatcaccaactcgacctataccgatccgcgccagcgccagctgttcaagaacatcatctatctcggcgcgctcagtgcgctgctcgacatggatcccaagctgatcgagcagctgatcggcgagcagtacaagggtaaggagaaactgctctcctccaacgtccacgcgctgcatctcggccgcgactgggcgctctcgaacctgaaatgcccgatcgggctgcgggtgaagaaatccgacaaggtcggcgaccgtatcttcatcgaaggcaacagcgccgccgcgctcggcgccgtctatggcggcgccaccgtgtgcgcgtggtacccgatcacgccgtcctcatcggtggccgaggccttcaccgcccactgcaagaaataccggcacgatccggagacggggaaggcgaaatacgcgatcgtgcagggcgaggacgagcttgcctcgatcggcatcgtgatcggcgcgtcctggaacggcgcccgcgcctttacggcgacctccggccccggcatctcgctgatgaccgagttcatcggcctttcatacttcgccgagatcccggccgtgatcatgaacatccagcgtgccggcccctcgacgggcatgccgacccgcacccagcaatgcgacatcatcgcctgcgcctatgcttcgcacggcgacaccaagcatgtgctgctgttcccggaagatcccgccgaagctttcgagttcgcggcggccgcgttcgacctcgccgagcggctccagaccacgatcttcctgatgctcgacctcgacatcggcatgaaccaccggctctgccgtccgctgaaatgggacgattccaagcagtatgaccgcggcaaggtgatgaccgcggaaatgctggatgagggccgggacttcggccgctatctcgacgtcgatggcgacggcatcccctaccgcacctatcccggcacgcatccgaccaagggctcctacttcacccgcggcacgtcacgcgatcgctatgcacgctattccgaggaaggttcggtctacgccgacaacatgcagcgcctcgtgcgcaagttcgagactgcgcaggacctggtgccaagaccgctgcaggccaatgcggagcggccgaccaagtacggcgtgatctatttcggctcgacctcgccggcgatggacgaggcgatcggattgctcgaagcgcgcgggcatcaactcgaccgcctgcgcatccgcgcattcccgttccattcgagcgtggcgagcttcctcgccgagcacgacttcgtctatgtggtcgagcagaaccgcgacagccagctgcgccagctcatcgtcaacgagaacggcatagaccccgtccgcctcgtgccgatcgtgcactacgatggcacgccgatcaccgcccgcttcatcgccaaggccattggcgaccatcaggatcacctcaaggtgaccccgctccgcaaggccgtgtcatga

SEQ ID NO: 7510 - DNA, 174 bp, BradyrhizobiumColbertium
atgaccaacatcctgctctctctttcgtcatgcccgggcatagccgttcgaagaacggcgtcgcttccgctcgcctatgccccggcatccacgcgcttcgtcgtcgccgcaaagacgtggacggccgggtcaaggccggccatgaagcagcggacatttcaggtgctcgcatga

SEQ ID NO: 7511 - DNA, 1056 bp, BradyrhizobiumColbertium
atgacctacattgcaaagccgaaattccatcatccgggcctcaagaagaacgcgctcggctacacccaccgcgactacgagggcaagatctcgacgttgtgcgcgggctgcggccacgattcgatcacggcctcgatcatcgaggcctgctacgaactctcgatagagccgcatcgggtggcgaagatctccggcatcggttgctcgtcgaagacgccggattacttcctcggcaattcgcacggcttcaactccgtgcatggccgcatgcccagcgtgctgaccggcgccaacctcgccaaccgcgacctgatctatctcggcgtttccggcgacggcgattccgcctcgatcggcttcggccagtttgcgcactcgatcaggcgcggcgtgaacatgacctatatcgtcgagaacaacggcgtctatggcttgaccaagggccagttctccgcgaccgccgaccgcggctccaagagcaagaagggcgtgaccaacaccgataacgccatcgacctcgtcgccatcgcgctgcaactcggcgccaccttcgtcgcgcgctccttctccggcgacaagacccagctggtgccgctgatcgcggccgcgatccggcacaagggcgcttccttcatcgacgtcatcagcccctgcatcgccttcaacaaccatgccggctcgaccaagagcttcgactatgtccgcgagcacaatgacgccgtgaaccggctcgacgtgctggtcggccgcgatccgatcgcggtggactatgcgccgggcacggtgcaggtggtcgagcagcatgacggcagcaagattgcgctgcgcaagatcgacgcggactacgatccgcatgatcggctcggggccatgaccttcctgcagaagcacgccgccaagggccagatcgtcactggcctgctctatgtcgaccccgacgcggaagacatgcacgagcatctcaacacggtcgagacgccgctcaacagcctggaggcggactcgctgtgcccgggctcggcggtgctggacaagatcaacgccagcctgcggtga

SEQ ID NO: 7512 - DNA, 450 bp, BradyrhizobiumColbertium
atgaaagtcacttcctgtatcgcgctggcagcggcaattgccttgctcccaggcacggcctgctcgcaaggcaaatccgcgcccaaggacgccaagctctatttcatcacgccgtatgacggccagaaggtccgtggtggattttgggtccggttcggcctgcgcaacatgggcgtgacgcatgccggcgacgattaccacaatgcgggtcatcatcatctgttgatcgatgtgaaagaccccatcgatgtcaaggagccgattccgcaggacaagtcccatctgcatttcggggcaggacagaccgaaacgtttctcgagctttctccgggcacgcacaccctgcaactggtgcttggtgatgccaagcactatccgttcgaaccacccgtcgtgtcggacaagatcaagatacgcgtcaggccggcggtatcggcgcggagccgatga

SEQ ID NO: 7513 - DNA, 1527 bp, BradyrhizobiumColbertium
atgggcgaaattcgcaacttcagatccgaaaaccaggatgagccgccgccgcacagcggagtgcctcgtcgactcgccgccatcatcgtcggtgacatcgcctcctacagccggctgatgcaggctgacgaggagggcacgcatattcgcgtcaagcgtatcgagcgagatctcatccagcccagcatcatcgaacatcacggaagtttggtgaagacgactggcgacggcttcatcgccatcttcgacagtcctgtggaggccgttcgatgcagcatcgtcatccagcaaaatctcgtcggccgcaacgcgtcggttcccaagcattcccggctcgagtaccggattggcgtcaatctcggcgatgtgatcgtggagccagacgacatctatggtgacggcgtcaacatcgccacgcgtatcgagggcatcgcggaaccgggacaggtctacatctccggcgccatctatgagcagatcaagcacaagatcgtgtgcggctatgagtcgctcggcgaccgcaaggtcaagaacatcactgatccggtgcgcgtctatcgcgtgctaccggacgcggacgccgtcggcaaaacaagaagccgccgcgagactgcgctgatcttcttgcttgccatcacaatgctgacgatggccaccggcgtgctctggtacttgctggcgcagcccagcaggatgggcgagcaggctgccgcgccgcccaccgctccggtcgcgtcaccgattgctcaagcctcgccgagcgaagcggccacgcagatgtcgcaagcgtctccgtcactggcctcgtcgcctccgccgccggtcccgactcccagcccatcggcaacgccgcttcgcgagcccgagatgatcgccattcgcggcggcagcttcgcgatgggaagcaacgatgatccgaccgagcgccctgtccaccaggtcacgatcaagccgttctcgatcggaaaatatccggtgacggtgcaggagtggaatgaatgcgccgccgccaaggcgtgcggattcacggccagcggcaaggacgatgccccggtcagcaatgtgagctggatcgacgcgaagcaatatgttgactggctggcgcaggcaacgaagaagccctaccggctgccgagtgaagccgaatgggaatatgcggcacgcggcgggacacagacgaagtattggtggggtgacaagctccagccgggcatggccggctgcaaggattgcggtgaacttgcggccgagcagccggccaaggtcggcagtttcaagcccaatccgttcgggctttacgacatgggcggcggcatcgatcagtgggtcgcagactgctggcaccggacctatcagggcgcgcccagcgacggctcggcttggaccagcgcggactgcagcgctcatgtcctgcggtcgggctcctggaagaacgattcgggatatgtgcggccgtcgaaccgcggtggatacgacgcgggtgttcgttaccccacgcacggcttccgcatcgcgctcagtccgtaa

SEQ ID NO: 7514 - DNA, 114 bp, BradyrhizobiumColbertium
gtgaaggctatcacatcgacgagccgagacaatgtcgctgcgaccgtcggcgtcggttccaaggagacaaggcgcgacatccttttgaaccttcttgatcgtggagttgactaa

SEQ ID NO: 7515 - DNA, 618 bp, BradyrhizobiumColbertium
atgaagctctccctcgttgctgttcttgctttcgctgctttgaccggcgtcgctcacgccgatgagactgaaattcgggagaccacaaaggctgaagccgagaccttcaatgtgcggatgtatgccggcccgcccggcaacaaggcctatgcttgcttcgtccgccgctacgatgccgaccacctggcgcggcaccccaagcagagggtcgccgcgatgaagctgctgatctcggcggaggtcgacgcagaggacaaggagctgcacagctccttccgcctcgggttccggtaccgtcatcggagcggcgatttcgactccagcggctcctgtaatcacgtcgtgttcactgcgagcgggggcgaggtgcgcctgggctgcggtgtcgactgcgacggcggcggcatcggcgtcgcgctgtccaaggacgacaagtccgcgatcgtccggctggagcgggtgcgggtctggcagaacaacaagccggacgacgatgccgagcattcgctgacggccggtgccgacgacaagatctttcgtctcgatcgcaccgacaacagcgagtgcgcctcactcgtgaccgaccgcaaggagctcgcagcgctgcgccacaagtga

SEQ ID NO: 7516 - DNA, 447 bp, BradyrhizobiumColbertium
atgaaccgccggaacattttgtggagcgccgtgtcagctctgggtgcggcgttcggagcatccagcgcgaaggccgcggcccaggctgcaccgagcaagctgaaggtggcatatcatctcagcgacgccgagaaggtcaatttcgtgctcggcaacatccagaaccatatcgacggcgtcggcggccccgagcatgtgacgatcgcgctggtgatccacggcccggcgctgaaggcctttcacgccatgcaggccaaccccgacgtcagcaagcgcgtcggcgagttctccaagggcggcatcgagctcgccgcctgcggcaacacgatgaaggcgcagaacgtcacactggcggatctcctgccgggcttcgtcaacgcggagagcggcggcgtggtccggttggccgagttgcagtcgcaaggatatctgtatctgcggccgtag

SEQ ID NO: 7517 - DNA, 324 bp, BradyrhizobiumColbertium
atggccgccgaccccgacctcctgttcaggaccctcgccgatcctacgcggcgggcgatcttcgagcggctgtgccgcgagggcgagcagacggtcggggcgctgacgatgcgatcaggcgtctcgcagccggcggtgtcgaagcatctcggcgccttgaagcaggccgggctcgtgcgcgaccgccacgaaggacgccagacccattacagcgcgcggccgggtgcgctcaacccgctgatcgactggaccagccagatggctgggttctggcagaagaggctcgacgcgctcgacgatctcctgaagaggatggaccaatga

SEQ ID NO: 7518 - DNA, 426 bp, BradyrhizobiumColbertium
atgaacgaacctgagacgcgctccgtcatcgtcgagcgcgaatttgcggcgccggtggagcggctctggcgtgcgctgacgcagccgcatttgatcgaggaatggctgatgaagaacgacttcaagccggtcgtcggccaccgcttcaatctgcgcggcgaatggggcggcgtgctggattgcgaggtgctcaccatcgagccgcagaagacgctggcttacacctggaatttctcgcatgaggacgcggcgttcgacctgaagagcgtcgtgaccttcacgctgacgccgaccagcgctggcacgcatctgcgcgtcgagcagtcgggcttcagaccgacgcagaagcaggcttttggcggcgcgcatgccggctggaagcagtttttcgccaggttggacgacgtgctggcgcgggcgggctag

SEQ ID NO: 7519 - DNA, 192 bp, BradyrhizobiumColbertium
atgtggatccggcagattcatcgctggctgtcgatggctttcaccatcgcggtcatcgccaacatcgtggcgatgaccatgcaggtccaagccgcatggattggcttcctggcgctcgttccactcattcccttgctcgcgaccgggctctatctgttcgcgctgccctatcttcgccgcagcaacgcgtga

SEQ ID NO: 7520 - DNA, 435 bp, BradyrhizobiumColbertium
atggctgtgacgttgaagaaggcacgcacgaaggacacgaagcaggcctccccctccaagctgatcgacggcaggatcaaggagctcggcgactggcgcggcgagatgctggggcgggtccgcggcctgatcaagcaggctgatcccgacatcatcgaggagtggaaatggcgcggcgttcccgtctgggagcacgacggcatcatctgcaccggcgagacttacaaggacgtggtgaagctgacctttgccaagggcgcggcgctggaggatccggctggtctgttcaatgccagcctcgacggcaatgtgcggcgcgcgatcgacattcgcgagggcgggaagatcaacgaggaggcgctgaaggcgctgatccgcgcggcggtggacttgaatggatcgaagaagaagccggggaagaagcgagctgtctag

SEQ ID NO: 7521 - DNA, 1539 bp, BradyrhizobiumColbertium
atgacggaacgtttgttcgaaggcgccgattgggacttccacaccttgcagcgcatcacggatgcctgcgaggaggtggcgttgaaggatctcgggctcgacgtctatccgaaccagatcgaggtcatcacggccgagcagatgctggacgcatactcgtcggtcggcatgcccttgttctacaagcactggtcgttcggcaagcatttcgcgtttcacgaggcgtcctaccgcaagggcctgatggggctcgcctatgagatcgtgatcaattcctcgccctgcatctcctacctcatggaggagaacacggcgacgatgcagacgctggtgatcgcgcatgccgccttcggccacaatcatttcttcaagaacaattatctgttcaagcagtggacggatgccgacggcatcctggattatctcgacttcgccaagaactacgtcatgcagtgcgaggagcgctacggccgcatcgaggtcgagcgcacgctcgatgccgcgcatgcgctgatgtcgcacggcatcgaccgttatcccggcaagaagaagctcgatctgcgggccgaggagaagcgggcagggcgccgccgccagcacgaggaggaggtcttcaacgatctctggcgcacggtgcccaagggcgcggccaagagccggtccaccctgagcatcgaacgccgccgcaagctgctcggcctgccgcaggagaatctgctctatttcctggagaagagcgcgccgcggctggcgccctggcagcgcgagctgctccgcatcgtccgccacatcgcgcaatatttctacccgcagagccagaccaaggtgatgaacgaggggacggcgacctacgtccactatcgcatcatgaccaagctgcacgagcagggccgcatcaccgacggcaacttcctcgaattcctgggatcgcacaccaacgtggtgttccagcccgaattcgacgatccccgcttctccggcttcaacccctacgcactgggctttgccgtgatgcaggacatcgagcgcatcgtcaccaatcccgaggacgaggaccgcgagtggttccccgacatcgccggcaagaacgacgtcatgggcgtgctgcgcgacgtctgggccaattaccgcgacgagagcttcatcgggcagttcctgagcccgaagctgatgcggcatttccgcatgttccatctgcatgacgatcccgaggagcgcgccggaatccgcgtcgatgccatccacgacgagcgcggtttccgccgggtgcggcgcgaactggcgcggcagcacgatgtcggctacatcgatgccaatatcgaggtggtcgacgtcgatctctccggcgaccgccggctgatcctgcatcaccacgtcatcaagggcgcgcagctcaacgaaacggacgccaagcgggtgctccagcatctcgccgatctctggacctacgacgtcgcgctgatcgaggtcgatgccaacgacaaggtcctacgcgaatacgtcgtcagcccgcgcccgatcccggccgcggtggcttga

SEQ ID NO: 7522 - DNA, 1284 bp, BradyrhizobiumColbertium
gtgcccattcacatcattgacaggcgcctgaatccgggcggcaagagtcttgagaaccgccagcggttcttgcgtcgggccaagtccctggtgcagggcgccgtcaagaagacctcgcaggaacgcgacatcaaggatgtcctggagggtggtgaggtcacgatcccgctcgacggcatgcatgagccgcgctttcgccgtgagggcggaacgcgggacatggtcctgcccggcaacaagaagttcatcgaaggcgactatctccagcgttcgggacagggcagcgccaagagttccggcccaggcgagggcgacagcgaggacgcctttcgtttcgtgctgagtcgtgacgagttcgtcgatctcttcctcgacgatctcgagctgcccgatctcgccaagcgcaagatcgcgcagaccgagagcgagggcatccagcgtgccggctacacgacctcaggctcgcccgccaacatctcggtgagccggacggtgaagctagcgcttgcccgccgcatcgcgctcaagcgtccccgcaaggaggagatcgaggagctggaagccgcgatcgccgcttgcgaggacgaggacgagcgcaccgagctggtggctcagctcgaaagactcaaggcgaagtccaggcgcattcccttcatcgatccgctcgacatccgctaccgtcgtttcgagacggtgccgaggcccgtcgcacaggccgtgatgttctgtctgatggacgtgtccggctcgatgtccgagcacatgaaggacctggcgaaacgcttctacatgctgctctacgtgttcctgaagcggcgctacaagcatgtcgagatcgtcttcatccgccataccgaccgcgcggaggaggtggacgagcagaccttcttctacggtccggcctcgggcggcacgctggtctccagcgcgctgcaggcgatgcacgagatcgtgcgcgagcgcttcaatccgtcggactggaatatctacgccgcgcaggcttcggacggcgacaattcctattccgacggcgagctcaccggcatgctgctgaccgacaagatcctgccggtctgccagttcttcgcctatctcgaggtcggagaatccggcggcagcgccttcgatctctccgattcctcgctgtggtcgctttacgagcgcctgcgcaacagcggcgcaccgctctcgatgcgcaaggtctccgaacgcagcgagatctttccggtgttccacgatctgttccagcgccgcgaaactgctcaggagaaagccgctccatga

SEQ ID NO: 7523 - DNA, 1944 bp, BradyrhizobiumColbertium
atgtacaacgattctctattcaacgctttcgctcggtcgttcgaggcgagaagccagcacgacatgtcgatggcggaatatctggaatcgtgtcgaagcgatcccatgaaatacgcgaacgcggccgaacgactgctagcggcgatcggtgagcctcagacgattgacacggccaaggacccacgccttggccgtatttttttgaaccgcacgatccgcacctatccggccttcgccggcttctacggcatggaagaaaccatcgagcgcatcgtcggtttcttccgccacgccgcgcaaggcctggaggagcgcaagcagattctttatctgctcggcccggtcggcggcggcaaatcctcgctcgccgagcggctgaagtcgctgatggaagtgcatccgatctacgtgctcaaggccggcgacgaactctcgcccgtgttcgagagcccgctcagcctgttcgatcccgatcagctcggcccgatgctggaggagaagtacggcattccgcgccgccgtctcaccggcttgatgagcccgtggtgctacaagcggctcgaggccttcggcggcgacatctcccagttccgcgttgcaaagatccagccgtcgcggctgcgtcaggtcgcaatcgccaagaccgagcccggtgacgagaacaaccaggacatctcgtcgctggtgggcaaggtcgacatccgcaagctcgagacttacgcccagaacgatcccgacgcctacagctattccggcggcctcaaccgcgccaaccagggcgtgctcgagttcgtcgaaatgttcaaggcgccgatcaagatgctgcatccgctgctgacggcgacgcaggaaggcaactacatcggcaccgagaacatcggcgcgattccctttaccggcgtgatcctggcgcactccaacgaagcggagtgggcgagcttcaaggccaacaagaacaacgaagctttcatcgaccgcatctgcgtcatcaaggtgccttactgcctcagggtcaccgaggagcagaagatctacgagaagctgattcagggctccgagctcgcggcggctccgtgcgcgccgtcgacgctggagacgctggcgcggttctcggtgatgtcgcgcctgcgcaagcacgagaactccaccctgttcgccaagatgcgggtctacgacggcgagagcctgaaggaatccgatccgaaggcgcgcagcgtccaggaatatcgggacgccgccggcgtcgacgagggcatggacggcgtttcgacccgctttgccttcaagatcctggctgcgaccttcaaccacgatccgcaggaggtcgcggccgacgccgtgcacctgatgtacgcgctggagcaggcgatccgccgcgagcagctgccggaggagaccgagaaacgctatctcgaattcatcaaggccgagctggcgccgcgctatgccgagttcatcggcaacgagatccagaaggcctatctggaatcctactcggactacggtcagaacctgttcgatcgctacgtcgactatgccgacgcctggatcgaggaccaggacttcaaggatcccgacaccggccagctgctcgatcgcgagcttttgaaccaggagctgaccaaaatcgagaagccggcgggcattgccaaccccaaggacttccgcaacgaggtcgtcaaattctcgttacggtcgcgcgcccagaacggcggcaagaatccgacctggacctcctacgagaagattcgcgatgtgatcgaaaagcggatattctcccaggtggaggacctgcttccggtcatctccttcgggtcgaagaaggacggcgagacggagaagaagcatggcgagttcgtcgcacgcatggtggagcgcggctacaccgagcgccaggttcgccggctcgtcgaatggtacatgcgcgtgaagcaggccggctga

SEQ ID NO: 7524 - DNA, 651 bp, BradyrhizobiumColbertium
atggccgtgctgggggagagcatgcaggcccacaaggaaggtttggcgttcgccgtcgccaacagcccgcaagcggctgggtcggcggccggcatcgacgcctcccgcgacctcgaaatcccgcgttgcgtgatgcagttgcggctgctggtcgcggcagggttcgcgatgacactgctcagtgcaagccttgccttcgactggtgggatggcttcggcgactatgacaagagcgtcggctatgccggcgtcgtgctgttcggcctcgtgacggcgtgcctgatctggatgcttcccgccgaacgaggggctgtggtggtcgtcactccctacggcatccgcgatcttcgcattggcaatgaatttctgctgtgggagtcgatcgaggagatttcggccgaagagtgccgcggccacaaggcgatcgcgctgacgcccacgccggcgttgcggcaccagctgcgcgccatcccaaccctggccagctatgcgcagaacggccgcattgtcatccgcccggagggcctggcgaccgattttgagacattgctgcgcgcttgccgcgactgccacgcttccagcagcgcgcgcactgcattgcagcaggatgatgaacgcggcgggcaaggcttcgccgtacaagtgtcataa

SEQ ID NO: 7525 - DNA, 156 bp, BradyrhizobiumColbertium
gtgcttttccagttctttgacgggattcatgatgcttctttatctccaagcctgcggcgaggggtttccgcgccggtcctgacgcgctatcctctaacttacatgctcccgggagggaaccaatcaagggtgtgggagtcataccctccagtgtaa

SEQ ID NO: 7526 - DNA, 2850 bp, BradyrhizobiumColbertium
atgaatcccgtcaaagaactggaaaagcacggccaagccgtctggctggacttccttgcccgcggcttcatcgccaagggcgacctgaagcggctgatcgagaccgacggcgtcaaaggcgtcacctccaatccgtcgatcttcgagaaggcgatcggcagctccgacgagtatgacgcgccgatcggcaaggcgctgaagcgcggcgaccggacggttgccgacctgttcgaggccgtcgcggtcgaggacatccagaatgccgccgacgtgctccgtccggtctacgaccgtctcaagggcggcgatggttatgtcagcctggaagtctcgccctatcttgccatggacaccgccggcacggtcaccgaagcacggcggctctggaaagacgtcaatcgcaagaacctgatggtgaaggtcccggcgacgccggagggcctgccggcgatcgagcagctgatcggcgaaggcatcagcatcaacattacactgttgttctcgaaggcggtctatctccgggtggctgaggcctacattgccggactcgagaaatacgttgccggcggcggcgatccttcgcatgtcgccagcgtggcaagcttcttcgtcagccgcatcgattcggtcgtcgacaagcagctcgacgagaagatcgcccgcgccaacgatccatccgagaaggaacggctcgccgcgctgaagggcaagatcgcgatcgccaacgccaagctggcctaccaggactacaagcgcctgttctcgggtcctcgctgggagaagcttgccgccaaaggcgccaggccgcagcgcatgctttgggcctccaccggcaccaagaacaaggactacagcgatgtgctctatgtcgaggagctgatcggccccgacaccatcaacaccgtgccgccggcaacgctggatgcgttccgcgaccatggcaagccgcgcgacagcctggaagagaatgtcgaggacgcaaggcgcgtgctcgaggagctggagcgctcgggcatctcgctcgatacgatcaccgaagagctggtcaaggacggcgtcaagctgtttgcggatgccgccgacaagctctacggggcggtcgcccacaagcgcgccgtcgtgctcgggccggcgctcgatcgccaggagatctcgctcggggacggcctcggcaaagccctggctgagagcaccgagaaatggcgggcgtcagccaagatccgccggctgtggcagcgtgacaagtcggtctggaccggcgcagacgaggacaaatggctgggctggctcgacagcccggccaaggccgacattgccgattacgaggactatgccggccgcgtgaaggggcagaagttctccgatgccgtggtgctcggcatgggcggatcgagtctcgggcccgaggtgctggccgagaccttcggcaagaagccgggcttcccgaagctgcatgtgcttgactccaccgacccggcgcaggtgcgcgcgatggaggcgaagatcgacatcgccaacaccgtgttcatcgtctccagcaagtccggcggcaccaccgagccgaatgcgatgaaggactatttccacgagcgcgtcgcgcaggcggtcgggccgaaggtgaagaccggccatcgcttcatcgcggtgaccgatcccggctcgtcgcttgagaaggcggcgaagcagctgcactacgcccgcatcttccatggcgagccatcgatcggcgggcgctactccgtgctttcgccgttcggcctcgtgccggcagcgaccgccggcatcgacgtgaagaccttcgtcaagcacgcgctggcgatggtccgctcctgcgggccggatgttccgccgagcgagaacccgggcgtgcagcttggccttgccatggggttggccgggctcgacggccgcgacaaggtgacgatcctggcctcgaagaagatggccgatttcggcgcctgggccgagcagctcatcgcggaatcgaccggcaaggagggcaagggcctgatcccgatcgatggcgagccgctgggcgatccctcggtttacggcaacgaccgcttcttcatcgacatccgcgtcgaaggcgaagcggacgccgcccacgattccaagcttgccgcgatcgaggcggccggtcatcccgtggtgcgcatcgtcatgaagtcgatcgagcatctcggccaggagttcttccgcttcgagatggcgacggcggtcgccggctcgatcctcggcatcaacccgttcgaccagccggacgtggaggcggccaagatcaagacgcgcgagctcaccaccgccttcgagaagaccggggcgctgccggaagaacagccggtgatcagcaccagggaggcagatctctacacggacgaggccaacgccacggcgctgcgggccgccggcgccgacggcgatctcacctcctggctgagggcgcatctgtcgcgttcgggcgacggcgactatgtcgccctgctcggctacatcgcgcgcgacaaggcgacggtcgaggcgctccaggccatgcgcctcgaggtgcgcgagaagcgtcacgttgcgacctgtgccgagttcgggccgcgctttctgcactccacagggcaggcctacaaggggggccccgacagcggcgtctttctccagatcacggcggacgatgcccaggacctgccggtgccgggccagaaggcgagcttcggaatcatcaaggcggcacaggcgcgcggcgatttcgacgtcctcacggagcggggccgacgcgcgctgcgcgtacacctgaagggcgggctcaagaaaggtctcgcgacgctcaatgcggcgctcaacgacgcgctgaattaa

SEQ ID NO: 7527 - DNA, 999 bp, BradyrhizobiumColbertium
atgcaactcggcatgatcggcctcggccgaatgggcggcaacatcgttcgccgcctgatgcgccacggccactcgaccgtggtctacgacaaggacgccaatgccgtcgcaggccttgccgctgacggcgcggtcggctcggcaacgctcgaagagttcgtctcgaagatggagcggccgcgcgccgcctgggtgatgctgcctgcagggcacatcaccgaaaccacgatcgagacgatcgcgggcgtgatgcaggcggacgacgtcatcatcgacggcggcaacaccttctggcaggacgacgtccgtcgcggcaaggcattgaaggcccgcggcatccactatgtcgacgtcggcacctccggcggcgtctggggcctcgaccgtggctattgcatgatgatcggcggcgagaagcaggtggtcgaccggctcgatccgatcttcgccgcactcgctccgggcgcgggcgacattccgcgcacgccggggcgcgaggggcgcgatccccgtatcgaacaaggctacatccatgccgggcccgtcggggccggtcacttcgtcaagatgatccacaacggcatcgagtacggcctgatgcaggcctatgccgaaggcttcgacattctcaagaacgcgaacatcgcagctctgccgccagaccaccgctacgatttcgatctcgccgacatcgccgaggtgtggcggcgcggaagcgtgatcccgtcctggctgctcgacctcacctcgactgcgctcgccgacagcccgcagctgtcggagtattccgggttcgtcgaggattccggcgagggtcgctggaccgtgaatgccgcgatcgacgaggcggtgccggccgaagtcctgaccgcggcgctctacgcacgttttcgttcccggaaggaacacaccttcgctgaaaaaattctctccgcgatgcgtgcagggttcggcggccacaaggagccgaagcagccgggcgcggcgaagccaaagtaa

SEQ ID NO: 7528 - DNA, 1512 bp, BradyrhizobiumColbertium
gtgacaaaagacccgcagcccaagcgcaagcccgacaattgcgccttcgtcatctttggcgtgaccggcgacctcacccaccggctggtgatgccgtcactctataatctcgccgcagagaacctgttgccggaaaagttctgcgtcgtcggcgccgcccggaagagccagtcggacgacgagctgcgccagagcctgatgaagggcctgcgcgaattcgcaacgcgtcccgtggacgatgacgtcgccaaacagctgctgcagtgcgtcaccttcgtggaggccgacgccaaggacccatcctcgttcgaccgcctgagcaggcatctcgacacgctggaatgttcggaaggcaccggcggcaatcgcctgttctacctggccaccccgcccgccgcgttcgcaccgacggcgcgggagctcggccgcaccggcctgatgaaggagaacggcgcctggcgaaggctcgtgatcgaaaagccgttcggcaccgacctcgcctcggcgcgcgcactgaacgccgaactcctgaagatcatggaggagcaccagatctaccggatcgaccactatctcggcaaggagacggtgcagaacatcctggtgctgcgctttgccaacggcatgttcgagccgatctggaatcgcaaccacatcgaccatgtccagatcacggtcgaggagaagctgggcgtcggccatcgcggcggcttctatgatgcaaccggcgcgctgcgcgacatggtgccgaaccatctgttccagctgatgtcgctggtggcgatggagccgccgacgcgattcgacgcgcattccgtgcgctccgagaagtccgacattctcaccgcgatccagcggcccagtgaagaggaagcactgaggaactcggtacgcgcacagtatctggccggccgtgtcggcgacgaggagattccggactatcgcaaaaccgcggacatcagaccggacagcaccaccgaaacctacgtcgccctgaaactgatgatcgacaactggcgctgggccggcgtgccgttctacctgcgcaccggcaaggcgctggcgcacaagcgcaccgaggtcgcgatcaagttcaagcaggcgccgctctcgatgttctcggggacggcggtcgaccgcctgtcgcagaacttcctcaccatcggcattgcgcccaccgagaccatcgagcttcaattcaacgccaagatccccgggccgagcgtcaccatcgacggcgtcgagatgaaattccgctacggcgactatttccgcgccgatccctcaaccgggtacgagacgctgatctacgactgcatgatcggcgacaatatcctgttccaacgcgccgacggcgtcgaggccggctggcaagccgtgcagccgttcctcgacgcctggaagaatgcaggcaccaacggcatcgagacttatgaggccggcagcgacggcccgaaatgcgcggacgagttgctccggcgcgacggccgaagctggcggaaatactcgtga

SEQ ID NO: 7529 - DNA, 750 bp, BradyrhizobiumColbertium
gtgatcgcggccgaccagccgaagctgatcgtcgaaaccggcgccgaagccttggcccgcgccgcggccgaacggctgctggcgcggatcgcggccaatcccgggcgtatcgcgatctgtctcaccgggggctccagcccgaagaggctctacgaattgctcggcagcgacggctggcgcggcaggattccgtggcagcgtgcacactggttcatcggcgacgagcgcttcgtgcccgaaagcgatcccctcaacaacatggcaatcgcgcgcgcggcgtttctcgacggcaacgcgccgcccgaacatatccatccgattccaaccacgggcgagaatcccgaggccggcgccgaagcctatgcacgcgagctacaggccttctacggctcggaccggctcgatcgggcgcgcccgctgttcgatctcgttctgatgggtgctggaccggacggccacaccgcctcgcttttcccgggctttcccgaaatcgaagagaccgagcgctgggccgtcggcgtgcccaaggccaatgtcgcgccgttcgtgccgcgcgtctcgctcaccctgcccactttggcctcgtgccgcgagatgctgttcgagattgccgggcccgacaagcgaccgatcttgacgcgcctcttcaacggcgagaacctgcccgccttgcgcgcgcgctcgaatggcgagaccgtctggatggtggacagggccgcgcttccggaggaaattcgtgggccgcgctga

SEQ ID NO: 7530 - DNA, 504 bp, BradyrhizobiumColbertium
ttgatcgtgatgggcgtgtcgggctcgggcaagagcacgatcgcggaggcgctcggccaacgtctcggctggcgtttcgaggacggcgacagcttccatcccgccagcaacgtcgagaagatgcgggcgggccatccgctcacggacgaggaccgctggccctggctcaatgccatcgccgacgagatcgcgcttgtctgcagacggggcgagcacgtcatcatcgcctgctcggcgctgaagcacgcctatcgcgacgtgctgctgcgcgggcgcgacgacgtgcgcttcgtcttcctgaagggcaccaaggagctgatcgcagagcgcctggcgcaccgcaagggccacttcatgccgccagggctgctgacgagccagttcgacacgctggagccgcccgaggcgagcgagcacgtcatcaccgtttcgatcgacgagaccgtcgaagcgatcgtggacggcatcgtgcggcagctgaaactgggcggcgtaggacgctga

SEQ ID NO: 7531 - DNA, 813 bp, BradyrhizobiumColbertium
atgacgcaaatctcactcgtggtgtccgatgtcgacggcacgctgctgaccaaggacaagacgctgacggagcgtgcgaagaacgccgtgcagcggctgcaccaggccggcatcggcttcaccatcacctccagccggcccgcgatcggcatgcgcttcttgatcgagccgctggcactctggctgccggtcggtccgttcaacggctcctcgatcatcgatcccgagatgaggccggtcgagcagcacctgattcccgcggctgcggccgagcgggccctgcagatcctccgcgagttcggcgccgacgtctggctcttcaccaccgacaaatggctgatcgacaatccggacggaaagtacgtcgcgcacgagcggcacacgatccgctccgatccgaccatcgtgactgacctgtcgccgtaccttgccggcgcctgcaagatcgtcggcgccagcgccgacgccccccgcctcgaggcgtgcgagaaggtcatgcaggaagccctcggcagcgcggcgaccgcggtacgttcgcaaacctattatctcgacatcaccccgcccggcttcaacaagggcaccttcgtgcaggccatggccaagcgcctcggcgtttcgaccgacgcggtcgccaccatcggcgacatgcagaacgacctggccatgttccgcgtcagcggtgtctcgatcgcaatgggcaacgccgccgaaaacgtgaaggacgaggcgacgcacgtcaccgcgaccaatgagcaggacggttttgccgaggcgatggagatgatcctgatgcggaatggggtgggttag

SEQ ID NO: 7532 - DNA, 1800 bp, BradyrhizobiumColbertium
ttgtctcagaggatcgaggactatgcgctgatcggcgattgcgagaccgcggcgctggtcgggcgcaacggctcgatcgattggctctgctggcctgcattcgattccgatgcctgctttgccgccatcctgggcacgcatgagaacgggcgctggctgatcgcgccgagcgagggtgcgaccgccatctcgcggcgctacatcggcaacaccctgattctcgaaacgcgtttcgagacgattggcggcaccgtcgccctgatcgacttcatgccgctgcgcggcaaggcgtccgacatcgtgcggctggttcgcggcgtcgacggcacggtgaagatgcggatggagctcgtcatccggttcggatttggcgccaacattccctgggtgcggcgtattgaccactccctgatggcgattgccggccaggacctgatcgtgttgcgaacacccgtcgagacccgcggcgagaatctgacgaccgttgccgaattcgaggtgaaggccggcgagacggtgcccttcgtgctggcctacggtccctcgcacctcgatccgccggcgccgatcgatccggaaatcgctctccaggagaccgagagattctggcaggattggtgcggccattgcacccgcgacggcgattatcaagagctcgtgttgcgttcgctgatcacgctgaaggccctgaccttcgcgccgaccggcggcatcgtcgcggcacccaccacttccttgccggagaagcttggcggcagcaggaactgggactaccgcttctgctggctgcgcgacgccaccttcacgctgctggcgctgatgaactctggctacaccgaggaggccctggcctggcacaattggctactgcgtgcggccgccggttcgccggcgaagatgcagatcatgtacggcatctggggccagcgccggctgctcgaatgggaggcgggctggctcggcggctacgagggcgcgcggcccgtgcgggtcggcaatgccgcgcatgcgcagctccagctcgacgtctacggcgaattgatcgacgccttccaccagtcgcgcatggccaagctcgagctcgacgatgagacttgggcgctggaatgcgccgtgctcaatcatttggccgaggtttgggaccggcccgatcacgggatctgggagcggcgcggccagcccaggcactacgtcttctccaaggtgatgacctgggtcgccttcgaccgcggcatcaagagcgcagagacgttcggcttcaaggcgccgctcctgcactggcgcaccttgcgcgatgcgattcatcgcgacgtctgcaacaggggcttcgacgcggaggagaacgccttcgtcgaatcctacggctcgaaactgcttgatgccagcgtgctgctgctgcccgaggtcgggttcctgccgccttcggatccgcgcattcgcggcaccattgccgccgtggagaaatgcctgatgcgcggcggcttcgtgctgcggcacgatccgcgcgagctgccagcggaccagccgccgctcgaaggtgcgtttctggcctgtagcctgtggctcgccgatgcctatgtgctgtcaggcgatctcgacaaggcgcaggaattgtttgaccgagtggtcggcattgcgaatgacgtcggcttgctggcagaggaatatgattcagacgcccgacgtcagaccggcaacttcccgcaggcgctgacccacatcgccctgatcaacaccgcacataatctgtcggcggcaaggcaaggcagcgagaaaccggcggtgcagcggtcgaagtga

SEQ ID NO: 7533 - DNA, 1962 bp, BradyrhizobiumColbertium
atggatcttttagctcaagcccggctcaagggcgttcagtccgaattcatcgacgccctcggcaagctgcgggtgaccgcgcccgaggcgctcaagtccatcctcgacgccctgccggagaagcgggtctatcgctttgtcagcggtccggtcgtggtccgtgcgctgggacatccacgcacggaattggcggccatcggtgcgccgccgctgcaatggaaactccttggcaacggcaatgtgatcgcgacaggcgagacgcgcgagcccgtcatcgcctggcccgccgccctgccgctcggatatcaccgcttgacgctgaccgatgccgatggcgtgacggaagaggtgccgatgatcgtggcgcccgaacgctgcttcggtggcgatttcgaccgcggctggctgctcgccgtacagctctacagcgtccgttcggaccgcaattggggcatcggggatttcaccgatcttgcggacctggtcaggctcgccaagcagctcggggccgacggcgtggggctcaatccgctgcatgtcctgttcgacgaccgcccggctgattgcagcccctattcgccgaacagccggctcttcctcaatcctctctacatcgacgtcgaggctattcccgaattctccgccgagctcgtgcccgacgcagccgtgaccgcggctcgtctgcgcgaaggtgaccgcgtcccttacaccgccatggcaaacttgaaatggctgggtctgcgcggtgcctttgagcgtttcgtgacaagcgcgagcgacgcgcgtcgcaaggagttcgacgccttccgcgccgcccgggcaccgctcctgtcccgcttcgcctgcttcgaggttctgcgacatcgcttcgccgtgccctggtgggaatggccgtcggagtggcaacggccggatgaagcgaaatgtgccgagctgcgcaaggggcccgacaagcgggaggtcgagttcgtcgaattcgtgcaatggacggctgacagccagctgcatgcagccaaggagctggccggtcagctcggcatgcgggtcgggctctatctcgatgttgcggtcggcgtgcaatccaacggcttcgatgcctggaacgagcagacggcgatttcccgccagctcgccgtcggtgcgccgcccgacgtgctcaacacgatcggccaggactggggccttgccggcttcaatgccggcggcctcgaagcgcagtccttcgtgccgttcgccgacatgctcgcggcctcgatgcgccatgccggggccatccggctcgaccacgtgctcggcctgaagcggctttatctcgtgccacgcggcttcaaacccgacaacggtgcctacgtcgagatgccgttcgaggcactgctggcagtggtgacgcgcgagagcgcggcccataggtgcatcgtgatcggcgaggacctcggcaccgtgccggaaggcttccgcgagacgatgcaggatttcggtatctggtcctatctcgtcatgatgttcgagcgcgacgatgccggccatttccgcaacgtcgatcactaccggcccaatgcgctggtcacgctgaacacgcatgatctgtcgacctatgccggctggcgttcgttcggcgatctcaagatgaagcgttcgctcgggctcgatcccggcgagaacgatcaggcgcgctgggatgcgctcggcaggctggacgagatcctgcgccagaacggcatcagggcgaacgatctctattcggtgctcgccttcctgtcgcgcacgccctcgcggctgctcgcagtatcgctggaagatctcctgggtgtggtcgatcagccaaacattcccggcacgatcgacgagcatccgaactggcgccagcgtcttccggtcgcgctggacaagatcgcgtccaaagtcgatctggcagctttgaaggccgcgacacgggaacggtcgttgcccggcggaaattga

SEQ ID NO: 7534 - DNA, 1947 bp, BradyrhizobiumColbertium
gtgaacaagacaattcaaactgtcgagagtgctgcggccggcggcactttcctcatcgaggacgtctatccctcgatcgacggcggccgcttcgccgcgaagcggatcgcaggcgagccggtcgaggtctgggccgacatctatcgcggcggtgacgcggtgatcgccgctgcgctgatctggcggaaagagcaggaccgcgaatggcggagcgagccgatgacccatcacggcaatgaccgctggtccggcgcattcacgcccgttgagcccggccaatatatctacgcgatcgaagcctggaccgatgagttcgccacctggtcgcgcgcggtggcgcgcaagcagcgcaccggggccgacatcagcctcgatgcgatcgagggcgccggcctgctgaccaaggcgcacggcgcacggcaggatgccgccgcaatcatcatcaggcggtgtgaggattatcttcaaagcggggacgtcacccccctgctcacgaccgagctgggccaggccatggccgagagccagtcgcggcccgacctgacgcgttcaccatccttcccgctgacgatcgaccgcgacaaggcgcgcttcggcgcctggtatcagatgatgccgcggagccagagtgcatcgccgggccggcacggcacgctgcgcgactgcatcgcgcgcgtgcccgacatcgccgccatgggctttgacgtgctctacttcacgccgatccaccccattggccacactcgccgcaaaggccgcgacaacgcgccggtggcgagtgacggggatcccggatcaccctacgcgatcggttcggccgcgggcggccacgatgcgctgcatcccgagctcggcacgatcgaggatttccgcgcgctggtggcgacctgcctcgaatatgacctcgagctcgcgctggatttcgccgtgcagtgctcgccggaccatccctggctgacgcagcatccggaatggttcaaatggcggccggaccgctcgatacgggcggcggacggcccctattccgacatcgtcatccccgatttcggctccgtcgacagggcaggcctttggaatgcctttcgcgatgccatgctgttctggatcgaccatggcgtgacgatcttcgccatcgacaatcacgacactgcgccgcttgcgttctgggaatggctgatccgcgacattcgccgccgccaccccgaggtgatcctgttctccaagacctatgcacgaccgaagctgatgaagggcctcgccaagatcggctttgcgcagtccttcacctatttcccctggcgcacctcgaagtgggagctggagcaatatctcggcgagctgacgcgccatccggaacgcgatttctaccggccgcacatgttcgtgaacacgcctgacctgttgccttatcatctgcagggcggcgagagctgggctttcaagtcgcgcatcacgcttgcggcgacgctttccggcaattacggcatccacagcgggttcgagctgctggagcatgaggcgattcccggccgcgaagaatatctggactccgagaagtaccagatcaggcagcgcgactgggacaggccgggtaacatcaagccctacattgccgctctcaatcgcgtccgccacgagaacccagcgctgcagcagacggccaatctgcgctttcttggcatcgaggacggcgagaccatcgccttcgtcaaggaggcagccgggcccggcaacaccgtcgtcatcgtggtcgcgctgtcgcgcgacgtgcgagaatgctggctgcccctcggcgacgtcatggttgacgccggcggacagagtcaccatgtgacggcactcgaaaacctcctcaccggcgaacagtcccgcagcgaatggggtgggatcaggttgcgaatcgatcccgatcgcgatccggcccttctgttccgctgcctggcgtaa

SEQ ID NO: 7535 - DNA, 3294 bp, BradyrhizobiumColbertium
atgaatgttctgtcttccgtcgacaccaagaaggttgaagctgccgagatcgtggacgagctctggtacaaggacgccatcatctaccagcttcacgtcaaggccttcgccgacagcaacaatgacggcatcggcgattttgccgggttgaccgagaagctgccctatctccaggagctcggcgtcaccgcgctgtggctgctgccgttctacccgtcgccgggccgcgacgacggttacgacatcgccgactacggctcggtcaatcccgatttcgggacgatgaaggacttcaagcgcttcatccaggaagcgcagaagcgcggcttgcgcgtcatcaccgagctcgtcgtcaaccacacttcggaccagcacaaatggttcaagcgcgcgcggcgcagccatccgggctccagcgcgcgcaactggtacgtctggagcgacaccgaccagaagtaccagggcacgcgcatcatcttcaccgacacggagaagtcgaactggacctgggatcccgaggccggggcattctactggcaccgcttcttctcgcaccagccggacctcaatttcgacaatccgcgcgtggtcagcgccatcatccaggtgatgaagcgctggctggatgccggcgtcgacggcttccggctcgacgccattccctatctgtgcgagcgcgagggcacctcgaacgagaacctgcccgagacgcatgcgatcatcaagcggctgcgccaggagctcgacgcgtattcgaggggcaagctgctgctggccgaggccaatcagtggccggaggacgtgcaggaatatttcggccgcggcgacgagtgccacatggcctatcacttcccgctgatgccccgcatctacatggcgatcgcgcaggaggaccgcttccccatcaccgatatcctgcgccagacgccggacattccggcaagctgccaatgggcgctgttcctgcgcaaccacgacgagctgacgctggagatggtcaccgacgtcgagcgcgactatctctggaccacctacgccaacgatccacgcgcccgcatcaatgtcggcattcgccggcgcctcgcgccgctgatggacaacgaccgccgcaagatcgagctgatgaactcgctgctgctgtcgttccccggcacgccgatcatctattacggcgacgagatcggcatgggcgacaacatctatctcggcgaccgcaacggcgtgcgccccccgatgcagtggagccccgaccgcaacggcggcttctcgcgctgcgatccggcccgcctgtacgcgccgctgatcatggaccccgtctacggctatgaggccgtgaacgtggaggcgcagtcgcgcagcctgtcgtccctgctcagcgccaccaagcggctgatctcggtgcggaagtcgacgctggccttcggccgcggcaccatgacgttcatccgtcccgtcaatcgcgccgtgctcgcctacgtccggcaataccgcgacgaggtgatcctctgcgtcgccaatctgtcgcgagccgcgcaggcgaccgagctcgatctgtcgccgtggaaggaccgcattccgcaggagatgctgggccgcacccgcttcccagcgatcggcgaactgccgtacatgatcaccctggggccttacgggttctattggttccagcttcaggagcgcgacaagtccgagccggtgacgccgcgcgcggtgccggagttcgagacgctcgtggtgccggtgaactcgaactgggtttctctcgcccgcgagcgcggcgtgttcgagcgcgacgtgctgccgggattcttgtcgcgaacgaggtggtatcccgagcacaaccccaagcacatcaagaccgcgctgacctcggcggtgccgttctgcgacatcggcgataaccggccgtggatcgcgttcttcgagagcgggcaggcggacgcggccacccgctacgtgctgccgctgcagatcgagtgggtacgcttcgaccgcgaacgtttcaatccgagggcgctggccgccgtgcgccagggcgcgcgcgaaggcacgctgctcgacgtcgcgaccgaccagatcttcatcggcctgttactgcgcaacctgtcgcagaatctggtggtggaagagaacaacctgcggctggagttcaagccgaccagccgcttcgccgattacacgatcaaggagccggaacgggtccgcgcgatcgagcagtccaacagcactgcgctggtcgacaaccagtatgtcgccaagatctaccgccggctcgaaagcggcatcagcccggagatcgagatcggacactatctcaccgaggtcgcgcgcttcgccaacacgccggcgctgctcggcagcgtcgagcttgtcgaaggcaaccagcgcagcgcactcggcgtgctgcatgcttatgtcgagaaccagggcgacggttggaccgtgagcacgggctacctcgatcgctatatcgacgagcaacgggtaatgccggcgggcgagacgctccgcgagacgcaggagcaggctccctatctgcatttcgtcgcgcagattggccggaggctcgccgagttgcacgtcgctctggcagcggcagatgcagatgatcttgccccggagccgattggctccgcccagatcaaggcctgggtgtccgacctgagggcgcgtgccgagcgggttctcgagcggctggccgacagccgcgacgggcttcgggagatggaccgccccctgatcgaccggctcatcgcggcacgcgcgggcctattcgacggcctgaatgcactcttgccatccgacatcgccgggttgaacatccgtcatcatggcgacttccggctcgggcagactttgatcgtgaaggacgatatcttcatcatcgatttcgacggcgatccgcgccgaccgctggcgagcaagcggcgcaagctgcccgccgcgcgcgacgtcgccggcatgatccactcgattgacctttccgtgaacgcagcactgagccgcgcgctcaccggcgcctccgacgagcaggaccggctcgcggctgcgctcgatgaatggcgcgggcgcgccaccgcgaccttcctgtccgcctatcgcgaagccatgaccgatcgaagagtatggccggaagaccggcaatccgcggatgccctgttacgattcttcctgcttgatcaagcgttcgacgaagtcgagtacgagctgtcccatcggcctgaggggctccatgcgccgctgaccggactgcttcgcattttatccagtgccgagagcgaagcccatgcctaa

SEQ ID NO: 7536 - DNA, 2139 bp, BradyrhizobiumColbertium
atgcctaaactgcctgccgaggcctatgcgatcatcgagggccgccactccgatcccttccactatctcgggctgcacccggaggacggcaggagcgtggtgcgcgcatttctgcccgaggccaccaatgtcgaagcggtcggcgaacatggcgaggttgcaccgctggaccgtgtccacgattccgggctgttcatcggcgccctgccaaacggctccaagcactaccaactccgcgcaaggttcggcgacaacgtcgtcgagttcgaggatgcctaccgttttcccccgatcctgaccgacttcgacctctacctgctcggcgaaggtacccatcagcgcatctatgacaagctcggcgcccatccgatgcggctcgagggcgtcgacggcatcgggttcgtcgtgctggcgccgaatgcgcggcgcgtgtcggtggttggcgatttcaacttctgggacgggcggcgtcatccgatgcgggtgcgcggcaacggttattgggagttgttcatcccgcatgcgaagacgggcgatcactacaagttcgagatcatcggcccgcacggccacctgctgccgttgaaatccgatccgatggcctttgcgagcgaggtacggccgaagacggcttccatcgtgttcgacgaagcgcacctgcctcggccgcgcccggcgcctgacgggatcaattcattgtcggcgccgatgtcgatctacgaggtccatctcggctcttggcgacgcacgaacgacaatgaatggctgacctaccgcgagctggccgagcaactgccggcctacgcccgcgacatgggcttcactcatctcgaattcctgcccgtcagcgagcatccattcgacggctcgtggggctaccagccgaccggactctatgcgccgaccagccgcttcggcacgcccgacgacttcgcggcgctggtcgacgcctgccatcgcgaaggcatcggcgtgctgctcgactgggtgccgggccatttcccggacgatccgcacgggctcggccatttcgacggcacctcgctttatgagcatgccaacccgctccagggccgccacctcgactggggcacgctgatctacaattacgggcgcaccgaggtgacgaacttcctggtgtcgaacgccctgttctggctggagcgctatgcgatcgacggcctgcgcgtcgatgcggtggcgtccatgctctatctcgactacagccgccccccgggcgcatgggttcccaaccagtatggcggccgggagaacatcgaggccatcaacttcctgcggcgcttcaacacggaagtgttcgcacgcttcccgcaggcaacgaccgcagctgaagagtcaaccgcctggccgcaggtctcgcgcccggtcgaattcggcgggctcgggttcggctacaagtggaacatggggtggatgcacgacacgctgagctacatcagcaaggacccgatctaccgcaagcaccaccacggcgagatcctcttcggcctgcactacgcgttctcggaaaacttcatcctgccgctgtcgcatgacgaggtcgtgcacggcaagcgctcgatcctcggccgcatgcccggcgacgagtggcagcgcttcgcgaatttgcgcgcctattacagcttcatgttcggtcatcccggcaagaagctgctgttcatgggcgcggaaattgcgcagagccgggagtggaatcacgaccagtcgctcgattggcacctgctggaatacaagtaccatgcgggcatccaggcgttgatccgcgatctcaaccggctgtatcgcgctgtacccgcgctgcaccagatggattgcgaccaggccgggttcgaatggctgatcacggacgacgccagccgcaacgtgttcgcctggctgcgcaagggattcgacgagcacgcgcgctgcctcgtgatcctcaacttctcgccgaacgtctaccagaattatcgcgtgcgcgtgcccttcggcggaaaatggaaggaagtgctcaactcggattctgcccattatggcggcagcaacgtcgggaatatcggcgaggttcacgccgaaggcggtgagcttcgcctcaccatcccgccgctcgctgcgatcttcctcgttccggaaggctga

SEQ ID NO: 7537 - DNA, 2079 bp, BradyrhizobiumColbertium
atgcgcctgaccgctggatcgcccgcacgcctcggcgcaagctgggacggacgcggcaccaatttcgcgctgttctccgcgaacgcgcagaaggtcgagctctgcctgttcgactcacaaggccgccgcgaactcgagcgcatcgaattgccggagaagaccgaggacgtctggcacggctatctcaacgatgtctcgcccggccagctctatggctatcgcgtgcacggcccctacgaacccgagcacggccatcgtttcaacgccaacaagctgctgctcgacccctatgccaagcgcctagccgggcgcctggtctggagcgatgcgcacttcgcctaccgcaccggaagcccgcgcgaggacctgtctttcgaccggcgcgacaatgcgcgcggcatgccgaaggccgtcgtcgtcgacgagaccttcaactggggccggcgcgagatccgtcccaacattccctgggaagacaccgtcatctacgaggcccacgtcaagggcctgacgcagaagcgggacgacgtgccgccaaacttgcgcgggacctatggcggcctgtcctcgccggcgatgatcgagcacctgaagaggctcggcgttaccacggtcgaactgctgccggtccacagcttcgtcgacgaccgcatcctcgtggagaagaagctcgccaattattggggctacaacacgctgtccttcttcgcgccggaaccgcgctacgcccaggacaacgcgctcgattccttccgcaccacggtggcgcggctgcacgatgccggcatcgaggtgatgctcgacgtggtctacaaccacaccgctgagggcaatcacctcggcccaacgctgtgctatcgcggcatcgacaattcctcctattactggctgagccgcgagaacccgcgctactacgacgacttcaccggctgcggctcgtcggtgaacctcactcatccgcgcgtgctgcagatggtaatggattccttgcgctactgggtcgaagtctgccatgtcgacggcttccgtttcgacctcgccaccacgctcgcgcgtgggccgaacggttatgaccgcggcagctcgttcctgaccgcgatccggcaggacccggtcctggcgaccgtcaagctcgtcgccgagccgtgggaccttggcttgggcggctaccaggtcggcgccttcccatcgcaatggtcggaatggaacgaccgctatcgcagcgccatgcgtcgctactggagcggcgaaggcagcctgatcggcgatatctccagccgcatgacggcgtcgtcagatctgttcaaccacgacggacggcggccgcgcgccagtatcaaccacatcacggtgcacgacggcttcacgctcgccgacctcttcagctacaacgagaagcacaacgaggccaatggcgaggacaatcgcgacggctccaacgacaaccacagcaacaattgcggtgtcgagggcccgaccgacgatccgaacatcatcagcctgcgccgccagctgcgcaagaacgtgctggcctgcctgatgctggcgcagggcgttccgctgatcctcgccggcgacgaagtcggcaattcgcagtccggcaacaacaacgcctattgccaggacaacgaagtcggctgggtcggctgggacaatctcggcaaggatggcgacgacatggtcgatttcgtcgcccatctcgccgacatccgccggcggttctcgcagctgcgcagccatcgctggctcgatggccggcccaaggacggcgtctcctacggtgcgctgtggttgacgcccgccggggacgagatgaccgagagcgactggaatttcccggaagggcggttcctgtcctatgtgatgggtccgatggaaccgggcagtgccgcgatctttatcgttttgaacgccgccccggaagagatcgcattcaaactgcccaaaatgaccgagtacaggagctggcagcagattctcaacacgaccgctgccaagctgaacacgatcgacttcctgcccgggagcgacagcaaggcgccgccgcgctccgtgctcgccttcgcgggtgcaccatga

SEQ ID NO: 7538 - DNA, 1716 bp, BradyrhizobiumColbertium
gtgtcgttccggctgtgggcgcccggagcgcgccgtgtcgacctcctgctcgagcgaaggcatgcgatgcagcgccggcaggatggctggtacgtcgccgacatcgccgggctcgccgccggcagtcgctaccagttcaggatcgacgacgagatcgatgtgcccgatcccgcttcggccttccagccggaggacgtgttcggcccgagcgaggtgatagatcacgatgtcttcgcatggcgggcgcgggaatggcgcggccgtccctgggaagagacggtgctgatcgagacccacgtcggcaccttcacccaggaaggcacctatcgcgcgatgatggacaagctcgatcatctcgcagcgacaggcattacggcgctggaattgatgccgctggcggatttcgcaggacgccgtggctggggctatgacggcgtgctgtggtatgcgcccgacagcgcctatggccggcccgaagacctgaagacgctgatcgacgaagcgcatttgcgcgggctgatggtgtttctcgacgtggtctacaatcattttggacctgaggggaattacctcggccgctatgcgcctgccttcttcaccgaggcgcacacgccgtggggcagcgcgatcgactatcgcgtgccgcaggcgcgcgcctttgccgtcgagaacgcattgtcctggctcaccgactaccgcttcgacggcctgaggttggatgccgccaatcacatcctggcaatccccggcgagcagtccatgctgcaggacctcagcgtcgccgccggcgagctcgccaaggcgaccgggcgccacatccatctcgtgctggagaacggcgacaaccgcgcgagcctgctcgatgccgcgcaggagccgccgaacggcaagtaccgtggacagtggaacgacgactatcatcacgtctggcacgtcatgcttacgggcgagcatgccggctattatggcgactaccagacgccacgcatggacctcgcgcgcgcactcgcctccggcttcgtctaccagggcgagatttcggaattctggggcaagaagccgcgcggcgagccgagcggcacgctgcccccggcgaccttcgtcaacttcctgcagaaccacgaccagatcggcaaccgtccgcttggcgagcggctggagagcctggcaccgccacaacagatcgaggccgcgctcgcggtaacgctgctcgcaccgatggtgccgatgctgtttcagggggaggaatggggctccaaggtgcccttcccgttcttctgcgatttccagggcggattggcggatgccgtgcgcaggggccgcaggcaggaatatgcctgggcttacgacaagtacggcgacgacgtgcctgatccgctcgacccggccacgctgcaatcggccgtgctcgactggaccggccacacgccggagcaaaacgcgcggctcgccctggtgcgggagctgctcgcactgcgtcgcaaggcgatcatgccgcggctgaacggcgcaagcttcggcggcgcagaggcggcggacaacggcttgctcacggcgcattggctgatgggcgacggcgcggctctgcgcttgactgcgaatctctcgaacaaggacatcgcgcattccagcgatagtgctggtacgccgctctggggcggcgcgaccggcgaccggcttccgccctggtcggtggtctggcagctcggagcttga

SEQ ID NO: 7539 - DNA, 2787 bp, BradyrhizobiumColbertium
atgccttccgccgttcctctcgcgacctaccggcttcagctcaccgcggatttcgactttgacaaggctgccgcggtcgtgccctatctcaaggcgctggggatcacgcatctctatgcctcgccggtgatgaaggcccgcaagggatcgacccacggctatgacacggtcgatcatggccagttgaatcccgagctcggcggcgatgctggcttcgcgcgcctgagcgagacgctcaaggcacatgatctcgggcttatcatcgatttcgtgcccaaccatgtcggcgtgcattttgccgacaatccctggtggctcgacgtgctggaatggggccaggcctcgccgcacgccgtctccttcgacatcgactgggatcaactggcctaccgcgcacgaggcggcgtgctgctgcccatcctcggctcgtcctatggcgaagcgctggagcgcggcgacatcgagctgcgctacgccccggaggaaggaagcttctccgcctggtatttcgagcatcgcctgcccatcgctcccgagcgctatggcgaggtgttgcggatgatcgtcaaggaggcggacgcggcggaaacgcagccgggcgagcgcctgctcgcgctcgctgcgcgctacaccggattgcgccggcccaatcgcaaggaagctcccgccttcaaggccgagctcaaggagatcgcgggcgccgccgatatcatcgcgcgaggccttgccgcctacggggccggcaaggaccgcacggcccagacgctcgcgctgcatcacctgctcgagcgccagcactacaagctcgggcactggcggcttgcctcaagcgacatcaattatcgccgcttcttcgatgtcaacggactcgcaggcctacgcgtcgaggatcccggtacgttcgctgccacccaccggctggtgaagcagctcgttgcagagggcaagctgcacggcatccggctcgaccacatcgacggcctgcgtgatcccgcgcaatattgccagcggctgcgccggctcgtgcgcgatgctcaaggcaacacaaagcccttctataccgtgatcgagaaaatcctgtgcgagcacgagcgcctgccacagttcgccggggtccagggcaccaccggctatgagtggatgaacgtcgtcacccacgtgctgatcgatccgaaaggactggaagcgctggacgagacctggcggcagatcagcaaccggccgccgcagcttgcaccttacgtcaaggaggcgaagcggcgggtgctggagaagctgcttgccagcgagttcaccgtgctgacgggcctgctcgcacgcattgccaacggacattattcgacacgggacttttcagccgacagcctgcgtcaggcgctcgagctctatgtgctgcatttcccggtctatcgcacctacctgacacacagcggcccgactgcccccgaccgcaagctgatcgaagacaccatcgagcgcgcccgccgagagtggtttgccgccgacgaaggcatcttcgatttcctgcgcgatgccctcaccatggacctgctgaagcccggccgtcccccgcacagtgccccgcgcgtgcgccgcttcgcactgaaggtgcagcaattcaccgggccgatgatggcgaagtcgctggaggacaccgcgttctatcagtttcaccggctgctcgcgctgaacgaggtcggcggcgatcctgcgagcacaggcctcaccattcccgccttccaccaggccatgcaagcccgcgccaaggaatggccgctaggcatgacggcgaccgccacccacgacaccaagcgcggcgaggatgcccgcacgcgcatcgcggcgctcagcgagattccgggcgaatggaccagcgcggtggcgcgctggaaggtgctgaacgcggcgcatctcacaacgtacggcaatttccgcgcgccctcggcgacgttcgaatacatgctctatcaaaccctgctcggcgccttgccgctcggggaggaagtcgatgccgccttcgtcgagcgcatccaggcctatgcgctgaaggccgcgcgcgagggcaaggaggagacgagctggctcaacccgcatgaagcttatgagaacggcatccgcgacttcatcggcaagatcctcgatcctgcccagtccgcagaattcctcgaagcattgcagaggctggcccgccgggtcgcactgcttggcacgctgaactcgcttagccagctcacgctcaaggcgactctgccgggcgtgcccgacttctatcagggtaccgaattctgggacctgtcgctggtcgatcccgacaaccgccgcccggtcgacttcgccgcccgccatgcggcactgaaatcattggaagctccggactggaacgcgctaagcaagagctcgccggacggccggctgaagctggcctggacgcgccatcttctcgcgctgcgcaaccgccttcccgatatcttcgtcgggggaagctatcggccgctcgaagtgcgcggcgcgcacgccaaccacgtcattgccttcgcccgcggccatggacgtgcggcagccatcgtcgtggtcgggcgtcattttgcgccgttcacgcaaggaggccgggagtggccttcactcgaaggtctcgatgcgactctcgatatcagcggctatgccgcgccaggtctcgcaggcaacgagctgccgctcgccccagcccttcgcgatcttcccgtggccgtgatcgaggcgcgcagcacgagtgcagcgaagccgacacggcagcgcgcgcacccctga

SEQ ID NO: 7540 - DNA, 318 bp, BradyrhizobiumColbertium
atgtcagcaccacttatcgtctccattccgcatcgtctcggccgcgaggaggctgcgcgccggctcaagaccgggctcggccgcgccgctgcgagcattcctgtgatgcaggtcgaggaggagcgctggagcggcgacagcatgaatttccgcatccgtgcgctgggccagatcgcgagcgggcaggtcgacgtcggcgacgatcaggtccgggtcgaggtggtgctgccctggctgttgcagcgcttcgccgagatggcgcaggccacgatcaagaagcgcggccagttgctgctcaccaaggacgggggcaagtaa

SEQ ID NO: 7541 - DNA, 165 bp, BradyrhizobiumColbertium
atgtctatcggcacgatcattctgatcattctgatcatcgccctgctcggcggcttcagcggcatcggcggcgggccgttctacggcaccggttattacggcggcggcggcctcgggctcgtcatcgtcatcctcctgatcctgatcctgatgggacggatctag

SEQ ID NO: 7542 - DNA, 2715 bp, BradyrhizobiumColbertium
gtgataggcttgaaccccgaaagagaagcgggacaggtcgtgctgcagaaactctccacttaccggcagaaacgtgatttcgagaagacgcccgagccgtcgggcaagaccgcggtggcgccctcgaagcagcggcgcttcgtgatccagaagcacgatgcgacccggctgcactacgatctcaggctcgagttcgacggggtcttcaagtcctgggccgtgacgaaggggccatcgctcgatccgcacgacaagcgccttgcagtcgaggtcgaggatcatccgctcgattatggcgatttcgaaggcacgattccggaagggcaatatggcggcggcacggtgatgctgtgggatcgcggcacctgggaagcggacgatcccgaagccggcttcaagaagggcgatctgaagttcaccttgcacggcgagaagctgcatggaagctgggtgctggtgcgcatgcgcaaccggggcggcgagaagcgcaccaactggctcctgatcaagcatcgcgacggatacgcccgcgaaggcgccgacaacgacattctcgaacaggacaagtcggtcgcctccggccgcgccatggagcagattgcggaggggaggggccgcgcgccgaagccgttcatgctggcgaagggcactaagggcaaggccgacgcggtctggcagtccaaccgtgccgaggagacgaaagggcgcacggtgaagccggcgccgcgcaccgcgttgaaacgcggcaagacggccaagacgagcgccacgaccgcgaccaaggccaaaaaggtctctgcgatgccggacttcgttgcgccgcagctctgcacgctggtcgagcggccgccggccgacgagggctggtgccatgagatcaagttcgacggataccgggtgcagcttcgggtcgaggacggcgaggcgaccctgaagacacgcaagggcctcgactggaccgccaagttcggctccattgccaaggaagcatccacgctgccggacctgatgatcgacggcgagatcgtcgcgcttgatcataacggcgcgccgaacttctcctcgcttcaggctgcgctgtccgatggcaagaccgacgagctgatcttctttgcgttcgacctcctgttcgccgagggcgaggattaccgtcgtcttccgctcggcgaacgcaaggtgcggctcaaggagctgcttgagtcacgcaagcggaaattgggccagatccgctatgtcgagcatttcgagagcggaggcgatgccgtgctgcgatcggcctgcaagctcgagctcgaaggcgtggtgtccaagaagctgaacgcgccgtatcgctcgggccgcaccgagagctgggtcaagtcgaaatgtcgcgccggccacgaggtggtgatcggcggctacaagaccaccaacggcaaattccgctcgctgatggcgggcgttcagcgcggcgatcatctcgccttcgtcggcatggtcggcaccggcttcggtgcggacaaggtcaagcgcatcatgcctgccctgaaggcgatggaagccaaggaaagcccgttcggcggcaagaatgcgccgaagaagacgcgcgaggtgcactggctgaagccggagctggtcgcggagatcgaattcgccggcttcaccgccgacggcaatattcgccaggccgcgttcaagggactgcggcaggacaagccggccgaggaggtcgaggccgagacgcctgtcgataccgagttggccgagccccgggccaagaagccggcgcgcgcgagaacaggccggcagccgaagcaggccgccccgaatgccgaggtcatgggcgtcatcatctcgaagccggacaagccgctctggccagatgatggtgacggcactcccgtcaccaagctggatcttgcccgctatctcgaagccgtcggcgaatggatgatcgtgcacctcaagggccggccgtgctcgctgatccgagcgcctgatggcatcaagggcgaatgcttcttccaacgccacgccatgcagggcacgtcgaaccttctcgaactcgcgcgagtctccggcgatcgcaaaccatacttgcagatcgaccgaatcgaagggcttgccgccgtggcgcagatcggcgggggcgagctgcatccttggaattgcgcaccttacgcctacgatacgcccggccggctggtgttcgatctcgatccggcaccggacgtcgagttcgccgacgtcgtcgaggccgccaaggagatgcggcagcgattaagcgatatcggcatggacagcttctgcaagaccacaggcggcaagggcctccacgtcgtggtgcctctgcgttacggcgcacgcgacaaggtgagttggaaagaggccaaggcgtttgcacaaggcgtctgccagtggatggccgacgacgatccggaacgctatctgctcaacatgtcgaagaagctgcgcaagggaaagatcttcctggattacctgcgcaacgatcgcatgtcgacggcggtggccccgctgtcgccgcgtgcgcgcgcgggggcgacggtctcgatgccggtcacctgggcgcaagtgaagagcgatctcgaccctaagcgctatacgctgcgcacagtgcctggtctgctggcgcgatcgaaggcatgggaaggttatgacgacgcggcgacgtcgatcaaggcggcgatcaagaagctggccggcaaggtgaaatag

SEQ ID NO: 7543 - DNA, 885 bp, BradyrhizobiumColbertium
atggccccgcgcgcctattggaagggaacgttgaagctgtcgctggtcagctgccccgtcgtgctctatcccgcgaccacggcggcggagaagacgcggtttcacctgatcaaccgcgagacgggcaaccggctcaagcagcagatgatcgattccgagaccggcgacatcgtcgagagcgaccagaagggccgcggctacgagctccgcaagggcaagtatgtcgagatcgagccggaagaactcgaggcggtccagatcgagagcaatcacaccatcgacatcgagagctttgtgccgagcgaggaggtcgatcagcgcttcctcaaccatccctactacatcgctcccgacggcaaggccgcggtcgatgccttcgccgtcatccgcgacgccatgaaagaccaggatcgcgtggcgcttgcgaagatcgtgttgaccaaccgcgagcacgtcatggcgatcgagccgcgcggcaagggcctgctcggcaccacgctgcgcttcccttacgagctgcgcgacgaggaccagttcttcgatgacatcaagagcccgaagataaccaaggacatggtcgaactggccggtcacatcctgcaatccaaggcggcgcatttcgaccccagcaaattcaaggacgagtacgagaatgcgctgaaggcactggtgaagcgcaaggccagcggcaagacgatcgagctgccggagcccgaggagcgaccgagcaatgtcatcaacctgatggacgcgctgaagcagagcctgaaaggacgcggcggagggaagaaggcggcgaagtcgcatgcacgccgggcgaccgggcgccggaaaactgcgaagaaggcgcaccggtctacggcgcggcatcgcaaggcgggttag

SEQ ID NO: 7544 - DNA, 114 bp, BradyrhizobiumColbertium
gtggcgcgcgtcagcgcgagcccggaatccatttctccgcccgtcgcgctcggcatggattccgggctcgacgcttcgcatcgccccggaatgacggcgagcctgctggtctaa

SEQ ID NO: 7545 - DNA, 690 bp, BradyrhizobiumColbertium
atgagcgctgctccgatcaaggtcctggtcatcgacgacgagccgccgatccgcaaattgctgcggatggggctgacgacgcaaggatacgagatcctcgaggcgtcgaacggcaaggccgcgctggagaagctggccgaagagccggcactgatcatcctcgatctcggcctgcccgacgttcagggacatgagctgcttcgcaccatccgcacccgcaacgaaggcgtaccgatcgtggtgctgtcgagccgcggcgacgaagccgggaaggtccaggcgctcgatctcggcgcagacgactatctcaccaagccgttcggcatggaggagctgctggcgcgcctgcgcgctgcgctgcgccatcaacttcaggtcaagggcgagcgcccggtgtttcgcgccggcgatctgtcggtcgatctcgtccgccgtatcgtcaaggtcggggatcgcgacgtgaagctctcgccgaaggaatacgacctgttgcgcgtgctggtgcagcatgccggcaaggtgctcacccaccgcttcctgctcagggagctctgggacgagctgacggacgcgcagtacttgcgcgtctatgtccgccagctgcgccagaagatcgaggccgatccggagaggccgcaatacgtgctgaccgagacggggatcgggtaccggctgaaggcgggggattga

SEQ ID NO: 7546 - DNA, 2727 bp, BradyrhizobiumColbertium
atgatggtccgagagcgccgcgatcccgaacaacgtccgtcgcccgaggcgctgctggaagccgcgcgccgggaggagggcgcgagcggcaagctgaagatcttcgtcggcgccgcccctggcgtcggcaagacttacgagatgctgcagagcgcccatgccaagcgaagggccggcgtcgacgtggtgatcggatttgtcgagacccacggccgcgccgagaccgaggcgctggtgcgcggcctggaagcggtgccgcgcaagcggctggattaccgcggccagatcgtcgaggagatggacctcgacgccgtgatcgcgcggcggccgcagatcgccctggtcgacgagctcgcccacaccaacgcgcccctttgccgccatcccaagcgctatctcgatgtcgaggaactgctgtcgcacggcatcgacgtctacaccgccgtcaacatccagcacatcgagagcctgaacgacgtcgttgcccagatcacccacgtccgggtccgcgagacggtacccgactccgtgttcgaccgcgccgatgcgatcgagctgatcgacctgactcccgacgacctgatccagcggttgagggagggcaaggtctatgtgcccaagcaggccgagcgggcgctggagcattatttctcgccgggcaatctcaccgcgctccgcgagctcgcactgcggcgcaccgccgaacgggtcgatgagcagcttctcaaccacatgcaggcgaatgcaattgccgggccctgggccgcgggcgagcgcatcctcgtctgcgtcagcgaggatgcacgcgcggccggcctcgtgcgctacacgaagcggctggcggaccggctgcatgcgccgttcaccgcggtgtcgatcgagacgcggcgatccctgcaattgtccgacgaggagcgcgaccggctggccgatacgctgcgcctcgcggaatcgctcggtggcgaagcgctgacgattcccgcggtcgggcgccgcatcgccgacgacgtcgtcagtttcgcgcaaggcaacaacgtcacccagatcgtgatcggcaagtcgagccgctcgcgctggttcgagatgactcgcggctccgtggtgcacgatttggtgcgccgtgccggcaacatcacggtccatgtcatcgcgggcgacgaactgccgggcgaagcgccgcccaagacggaggtgcagaccgctgcacgatcggagcccttcgatccgctgccttacctgaaggcgctcggcatcgtgctgatcggtctcggcgcagcgaaactgctccagccgcgcttcggcatcgagaacgtcgacctcgtgctgctgacggctgtggtcacggttgcggtccgctacgggctgtggccttcgctgcttgcgacggtcgccgcctcgctgtcctacaatttctttttcctgccgccgctctacaccttcacgatcaccgacccgaccaatgtcgccgccttcctgctgttcctgggcgtggcgataatcgtctccaacgtcgccgcgcgcgtgcgcatccaggccgataccgcgatcggccggatccggatgaccgagcagctccatgccttcagccgcaagctcgccggcacggccacgctcgacgacgtgctgtgggcaaccgcctaccagatcgcgttgatgctgaaggtccgcgtggtcctgctgctgccggacgaaggcctgctcacggtgaaatcaggctatccgcccgaagacgagctcgatcaggccgatctcgccgcggccaactgggcctggagcaacgatcgccccgccggtcggggctcggacacgctgccgggcgcaagacggctgttcctgccgatgcgcaccgggcgcggcccgatcggggtgaccggcatcgacgacgaccgcagcggcccgctgctgacgccggaccagcgccggctgctcgatgcgctggtcgatcagggcgctctcgcgatcgagcgcgtgctgctggtcgaggacatggatcgcgtcaagcgcaccgtggaatccgagcggctgcggtcggcactgttgacctcgatctcgcacgacctgaagacgccgctcgcctcggtgctgggcgcggcctccaccatgcgcgatctcgccggcgcgctctccgacaccgagaagcgcgacctgctcgccaccgtgatcgacgaatccgagcggctcaaccgtttcatcgccaatctgctggacatgaccaagctcgaatccggcgcaatcgtgcccaacgcggcgctgcacgatctcagcgagatcgtcggcagtgcgctgcggcgcgccagcaagattctcaaccgccacaaggtcgagctggcgctggccgccgatctgccgatgctccagctcgatgccgtgctgttcgagcaggtgctgttcaatctgctcgacaatgccgccaaatattcgccgcccgagaccacgatttcgatccgcggccggcgcgaccgcgcccatgtcgtgctcgagatcgccgacgagggagccggcattccgcctgacgaactcgagaacgtgttcgacaagttctaccgcgtgcagaagggcgatcacgtccgccccggcaccgggctcggactcgccatctcccgcggcttcgtcgaggcgatgggcgggacgatctccgcggccaatcgcagcgggaggagcggcgcggtcctcaccattcgcctgcccgttccagcagaaagccacgcattggataccgccgcatga

SEQ ID NO: 7547 - DNA, 606 bp, BradyrhizobiumColbertium
atgttcagagaaatccgccccgccatcgccctgttgctggcgctcaccgccatcacgggccttgcctatccgctcgcgatgaccgccatcgccggcacgttgtttcccgtacaggcgcagggcagcctgatcgagaaggacggcaaggtgatcggctccgccctgatcgggcaggagttcagggacggaaaatacttccatggccgcccctcggcgacgctggcgccggaccccaatgactcggcaaagacggtgccggcgccctacaacgccggcagttcgggcggctcgaacctcggcccgaccagcaaggcgctggccgaccggctgaagcaggatgtggacaagctcaggggcgagaatccgaacgcggccgtgccggtcgacctggtgacgacctcggccagcggcctcgacccggacatctcgccggaggcggcgcaattccaggtgccgcgcgtggcgaaggcgcggaatctgcctgaggatcaggtcaagcagctcgttgccgccaatacccaaggccgtctgctcggccttctcggtgaacccagggtcaacgttctggcgctgaacctcgcgctcgatcgcatggccccgaagtag

SEQ ID NO: 7548 - DNA, 2115 bp, BradyrhizobiumColbertium
atgaatatggcaaaattgcaaaagcgcgcgccgatgtcggcaatgctcgatcccgggatcgtgatgcccgcggtcaaggcgtccttcaccaagctcgatccgcgctggatggtgaagaacccggtcatgttcgtggtcgaggtcgtggccgcgctcaccacggtgatcttcctgcgcgatgtcgctacgggcggcgcgggcctcggcttcaccttccagatcatcctgtggctctggttcacggtgctgttcgccaatttcgccgaagcggtggcggaaggccgcggcaaggcgcaggccgagacgctgcgcaagacccgcaccgagagccaggccaagctcctgagcggtgcaggccgagactacgagctggtttcaggcaccagtctgaaggtcggcgacgtggtgctggtcgaggccggcgatacaatcccttccgacggcgaagtgatcgagggtgtcgcctccgtcaacgaggccgccattaccggtgagtccgcgcccgtgatccgcgagtccggcggcgaccgttcggcggtgacaggcggcacccaggtgctgtccgactggatccgagtgcgcattaccgccgcgcagggctcgaccttcatcgaccgcatgatcaaactggtcgagggggcagaacgccagaagacgccgaacgagatcgcgctcaacatcctgctggccggcctcaccatcgtcttcgtgttcgcgacggtgacgatcccgagctatgccgcctatgcgggcggctcgatctcggtcatcgtgctggtggcgctgttcgtgacgctgataccgaccaccatcggcgcgctgttgtccgcgatcggcatcgccggcatggaccgcctggtgcgcttcaacgtgctggcgatgtccggccgcgcggtcgaagccgccggcgatgtcgacacgctgctgctcgacaagaccggcaccatcacgctcggcaaccggcaggccacagcgttccgtcccgtccgtggcgtcaccgagcaggagctggcggacgccgcccagctcgcttcgctcgccgacgagacgccggaaggccgctccatcgtcgtactggccaaggagaaatacggcatccgcggccgcgacatgaccgagctgggcgcgaacttcgtgccgttcacggcgcagacccgcatgagcggcgtcgacgctgccggctcatcagtgcgcaagggcgccatcgatgccatcctcaactatgtcggcggcggcgccccgaccgcggtcgcgtcgggcaacacggcgcgggtggtgcagcctgccgcgctctccgagctcggccgcgagatccaggccattgccgatgacgtgtcgaagtccggcggcacgccgctggcggtcgccagggacggcaggctgctcgggatcgtccagctcaaggacatcgtcaagggaggtattcgcgagcgtttcgcggagctgcgccgcatgggcatccgcaccatcatgatcaccggcgacaatccgatgacggctgccgccatcgccgcggaagccggcgtcgacgattttctggcgcaggcgactcccgaggacaagctcaggctgatccgcgacgagcaggccaagggcaagctggtcgccatgtgcggcgacggtaccaatgacgcgccggcgctcgcccaggccgacgtcggtgtcgccatgaataccggcacgcaagccgcccgcgaggccggcaacatggtcgacctcgactccaacccgaccaagctgatcgaggtggtcgagatcggcaagcagctcctgatgacccggggtgcgctgacgacgttctcgatcgccaacgacgtcgcgaagtattttgcgatcatcccggcgatgttcctggcgttctacccgcagctgaacgtgctcaacgtcatgaacctgtcgagcccgcggagtgccatcctgtcggcgatcatcttcaatgcgctcgttatcgtcgcgctgatcccgctcgccctgaaaggcgttgcctatcgtgcggtcggagccggtgcgctgctccgccgtaacctcttgatctatgggcttggcggcatcgtcattcccttcatcggcatcaaggcgatcgacgttgtcgtgaccgccttgcacttggcttga

SEQ ID NO: 7549 - DNA, 1704 bp, BradyrhizobiumColbertium
atgactgtcatcggttggctccagatcattctttactgtgcgattgtcgtcgcgctgaccaagccgctcggctggtacatgacgcgagtgttcaacggcgagcacacgttcctgtcgcccgccctgcgcccgatcgaggtgggcatctattggatcgccggggtcgacgagaagcgggagcagcactggctgacctacacggtcgccatgctgttgttccatgtcggcggcttcctcatcatctacggcctgatgcggctccaggccatgttgcccttcaatccggccgggcagtccgcggtcgccgaagatctctcgttcaacaccgcggtctccttcatcaccaacaccaactggcagaactacggcggcgagagcacgctttcctatctgacccagatgctcggcctgacacatcagaacttcctgtcggcggcaaccgggactgttctggcgattgcgctgatccgcggcttctcgcgtgcgtcgatgcgcaccgtgggcaatttctgggtcgatgtgacccgctgcacgctctatgttctgctgcccatctgcgtcgtgctcacgctcttcctggtctggcagggcatgccgcagacgcttgggccttacgtcgaggctaccaccctcgaaggcgccaagcagaccatcgcggtcggcccggtcgcctcgcaggtcgccatcaagatgttcggcaccaacggcggcggattcttcaacgcgaacgcgtcgcaccccttcgaaaacccgaccgcgctgtccaacttcgtgcagatgctgtcgatcttcgtgctcggcgccgcgctgaccaacgtattcggccggatggtcggcaaccagcgccagggctgggcgatcctggcggtgatgggcgtgctgttcgttgccggcgtcgccgcctgctattgggcggaggccaacggcacctcgaccctgcatgccctgggcctgaccggtggaaacatggaaggcaaggaggttcgcttcggcatcgtcgcgtcctcgctgttcgcggtgatcaccacggccgcgtcctgcggtgccgtcaacgccatgcatgacagcttcacggcgctcgggggcatgatcccgctgatcaacatgcagctcggagagatcatcgtcggcggcgtcggcgccggcatgtacggcatgctgctgttcgtcatcctcgccatcttcgtcgcgggcctgatggtcggacgcaccccggaatatgtcggcaagaaaatcgaggcgcgcgaggtcaagatggcgatgctcgccattctcgtcctgcccttgatgattctcggttggaccgccatcggcgtggtctatccggcggcagtcgcctccatggcgaacgccggaccgcacggcttcaccgaagtgctgtacgccttcagctcggggacgggcaacaacggctcggccttcgcgggcctcaccggcaacaccttcttctacaatctcacgctcgccagcgcgatgttcgtcggccgcttcttcatgatcgttccggccatggcgatcgcaggttcgctcgcggccaagaagtcgatcccgccctcgatgggcacgttcccgaccaccggcggcctgttcatcggcctcgtgaccggcctcatcctgatcatgggcggcctgaccttcttcccggcgctcgcgctcggtcccatcgtcgagcatcttgcgatgaccgcgggcaacgtcttctga

SEQ ID NO: 7550 - DNA, 162 bp, BradyrhizobiumColbertium
atgacagtcatggcattaacccttcaggcttcgggtccggcggcgcaagagcggcaggagcagcgcaagcaggcccgcgacgagcgcggcgtcggccagcagcaattcgacgatcagcagcacggcctcagaaccgctcgggccgcagcaacgcgtaggtga

SEQ ID NO: 7551 - DNA, 150 bp, BradyrhizobiumColbertium
gtgcgctcaccggaatcccgggaaagcggtcgccccgacaatgagggcgcaacgaggagtatcgccatgatggactttctgatgctggtgctcgccgtcaccttcttcgccctcgcgatcggctacacctacgcctgcgaacggttgtga

SEQ ID NO: 7552 - DNA, 636 bp, BradyrhizobiumColbertium
atgagcactggcagcgtcaacgtcgtcaaccatcccctggtccagcacaagctctccctgatgcgggagaaggaccgctcgaccaagagctttcgcgagatcctgaacgagatcgggatgctgctcggctacgaggtgacgcgcgacctgccgctggagctggtggacatcgagacgccgatcgcgccgatgcaggcacccaagatcgccggcaagaaactcacgctggcgccgatcctgcgcgcgggcgtcggcttcctcgatggcatgctcgccttgatgccgtcggcgcgcgtcgcccatatcgggctctaccgcgaccccgagacgttgcaggccgtggaatattacttcaaggccccgcaggacctgtccgaccgcaccgtcatcctgatggacccgatgctggcgaccggcaactcggcctgcgccggcgcgtccctgctcaaggcgcgcggcgcccgcgacatccgcttcgtctgcctgctcgccgcccctgaaggcatcgcccaattccagagcgagcatcccgacgtgccgatctggaccgccgcgatcgacgaacggctcaacgaccacggctacatcgtgccgggcctgggcgatgccggtgaccggatgttcggcaccaagtag

SEQ ID NO: 7553 - DNA, 1575 bp, BradyrhizobiumColbertium
atgagcgccaacgacttttcactgcaatcgctgattcggatcgagaccgccgccgatcctgccttcgtattcgatgctacagccgtctcgcgcgcggagttctcggccaaggtcgaacagaccgccgcctggcttgcggcgcaaggcatcggcaagggcgacgtcgtggcggtctggctggttaaccgggccgaatggctggcgctgctgttcgccgcggcacggctcggggccatcgtcgcggccgtcaatacgcgctaccgcagcgcggaggtcgcgcatctgctcaagctgtccggcgccaggctgatggtggtcgaggccaatttccgctcgatcgactttgccgccattctcgccggcatcgccaagaacgaggtgccggcgctgcaaaagctggctgtggttggtgcggatgcgatcccggcgcattggcccttcgtgtgtttcgatgcctttgaccggccttatccaccagccccgccggctcaggacgacatcgacctgcccgtgctgctctacacgacgtcgggcacgaccaaggggccgaagctcgtcgcgcattcgcagcgcacgctggcgacccacgccgtctccgtcgcccgcgcactccagctcaatccgcagcgccattcgctgctggccatgctgccgttctgcggcacattcggcatgacgagcctgctcggcttcgtcgcagccggtgcgaccgtccacgcgctcgacgccttcgaggcggcgccggccctggcgattctccgcgagcacaggatcacgcattccttcggctccgacgagatgtttcggcgcatccttgcgcacaccgatgcgccacgcccctttccatatatcgagctctgcggttttgccgcgttccagcccggctggcgcgaactggcggcagaagctgaagcccgcggcttgccgcttcacggcctgtacggttcgagcgaggtacaggcgctgttctccatcgcccgcgctagcgatgcgttcgcggatcgcatcgagggtggcggctggccgatgtcgccggatgcgaaggtgcgcgtgcgcgacacggacaccggcgagcttgcggccagcggcgtctccggcgaaatcgaaatcagcgcgccgtcacgcttcctcggctatttcaacaaccccgaagcaacgcgcgaggcgatcaccgccgacgggttcttccgcaccggcgatatcggccacctgcgcggcgatggctcgttcgtctacgagacgcgcgccggtgatgcgatgcggctcggcggcttcctcgtcgcgcccggcgaaatcgaggacgaactcaaatcctgtgccggggtcgccgacgcccagatcgtcgcagtcgatctcaaagggcaggcgcgctgcgttgcgttcgtgatcccggcgaaggagccgccaatgcaggagatgctggtcgcgcacctgcgcgagcggctcgccggctacaaggtcccggcacgcatctatgtcgtggacgcctttcctgtcacggacagcgccaacggagtcaagatccagcgcgccaggctccgtgccatggcgatagagcggatcgccgccgaatag

SEQ ID NO: 7554 - DNA, 1167 bp, BradyrhizobiumColbertium
atggatttcgcgctcaccgatcagcaggaagccattcgcgacgccatcgccaagatctgcgaaggctttcccgatgcctactggctgaagaaggatcacgacggcggtttcccgcacgacttccacaaggcgctggctgacgccggctggctcggcatctgcgtgccggaggaatatggcggctcgggtctcggcattacggaagccgcgatcatgatgcgcaccatcgcggagtccggtgccggcatgtccggcgcctccgcggtgcacatcaacgtgttcgggctcaatccggtggtcctgttcggcaccgaggagcagcgcaggcgcatgctgccgccgatggtcgagggccgcgaaaaggcgtgctttgcggtcaccgagcccaacaccggcctgaacaccacgcagctcaagacgcgcgcggtcgccaagaacgaccgctacatcgtcaacggccagaaggtctggatctcgacggcgcaggtcgcgcacaagatcctgctgctggcgcgcaccacgccgctggaagaggtgcgctcgccgacccacggcctcagcctgttctacaccgatttcgaccgcaacaggatcaaggtccacgagatcgagaagatgggccgcaagatcgtcgattccaacgagctgttcttcgaggatttcgagatcccgatggaggatcggatcggcgaggagggcaagggcttcgagtacatcctcgaaggcatgaaccccgagcgcatcctgatcgccgcggaggcggtcggtctcggcaagctcgcgctgtcgcgcgcgaccgaatacgcgaagactcgcgtcgtgttcaatcgtccgatcggcaagaaccagggcatccagcatccgctagcggtcaactgggtcgagctggaggccgcctggctgatggtgatgtcggcggcctggcaatacgacaagggcatgccgtgcggcgctgccgccaatgccgcgaaatatctggctggcgaagccggcttctccgcctgcgagcaggcggtgatgacccatggcggattcggctacgccaaggagtttcacgtcgagcgctatttgcgcgaagtcatgatcccgcgcatcgcgccggtcagcccgcagctcgcgctcagcttcatcgcggaaaaggtgctggggctcgccaagtcgtactga

SEQ ID NO: 7555 - DNA, 516 bp, BradyrhizobiumColbertium
atgcatagggtcatgcggcgcgacggcaagagcgcgcctttatttcgcagggaggaaaccgcgatggccgggctttatttcgaggacttttccgtgggccaggagttcaggcatccgctgacccggaccgtcacggagatggacaacaccatgttcagcctgctgacgctcaacccgcaaccgctgcacatcgacgcgcatttcgccgagaagaccgagttcggccagcgcattttcaacagcctttacaccctcggcatcatgatcggcatgacggtctatgatacgaccctgggcaccaccgtcgccaatctcggcatgaccgacgtcacgtttccgaagccggtcttccatggcgacacgttgcgggctacgacgaaggtgctgtcggtgcgggaatccaggtcgcggccaatggccggcatcgtcgagttcgagcaccacgcgtacaatcaaagcgacgagatcgtcggcaaatgccgccgcatggcgatgatgcacaagaggccggtttga

SEQ ID NO: 7556 - DNA, 891 bp, BradyrhizobiumColbertium
atgccgccgcatggcgatgatgcacaagaggccggtttgatgcgttcgatgctgttcgttccgggcgattccccgcgcaagttcgagaaggcgagcgaaggcaaggccgacgcgctgatcatcgatctcgaggactccgtcgtcaccgagaagaagccggaggcgcgttcgctgacgcttgccatgctgaaaggcaatcgcggcccgcaccaactctatgttcgcgtcaatgcgctcgacaccggcatgacgctggccgatctcgccgcggtgatgccgggcaggcctgacggcatcgtgctgccgaaatcgcaaggtggcgacgacgtgcggcgggtcgcgacctggctcgaggccctggagtccgcctccggcaccgaggtcggcgcgacccgcatcgtctgcgtcgcgaccgaaaccgccggctcgatcttcgggctcggcagctacaagggctgctcccctcgcctcgccgggctgatgtggggcgctgaggatctttcggcctcgctcggcgccaccgagaaagcctccggcggcgtcttccacagcccctatcgcctggcgcgtgatctctgcctgatggccgcggccgcggccgaggtcgccccgatcgacactgtgtacaccgacatcgacaacctcgcgggcctcgagcaggaaacgcacgccgcacggcgcgacggcttttcggccaaggcgctgatccatcccaagcatgtcgacatcgtcaacgcggcgttcgagccgaccgacgcggagcgcacctgggcggagaaggtgatcgcggccttcgcgagcaatcccaattccggcacgctgcggctcgacggccagatgatcgacaagccgcaccttcgggccgcgaagaagatcctcggccagccgtag

SEQ ID NO: 7557 - DNA, 384 bp, BradyrhizobiumColbertium
atgaccaaagctctgatcactgccgttgcaatgctggcctgcgtgcccgcgagcgcgcttgcgcaggagcgcgccggcgatgcggcgctcggcgccgtatccggtgcggtcgtgctgggccccgtcggtgcggtcgccggggccttgattggctacacggccggaccttcgatcgcccgctcctgggggatcagaggttcgcactcggcaaggcatcggcagccgccgcgccgtgcggtcgtgaggggcggtgcaccccgcacgcgcgaggcgatggccgccaatggccagatgagagctgccggcaatccggcggcgccggttcaggccgcgcctagcgtgtcggcgcaaccgtcggcaccgcctgttcaggcattcgactga

SEQ ID NO: 7558 - DNA, 240 bp, BradyrhizobiumColbertium
atgctcgatgagaatctggcccgcatcctccgcagcgcaggccgacgcgatgagggtggcacaatgaacagccggcgagacctgctcattcgaggcagcgagaaggtgatcggccattacgagctcctgcttgcaagcgcgaagaccgaacatgagcgcgaactctatcttcagcgcatcgagcgtgagcgtcggctgatccggagcctgcagtgggagctcgatcaccgcgcggcctga

SEQ ID NO: 7559 - DNA, 1110 bp, BradyrhizobiumColbertium
atgatgaatgctgtgcgtctgctgttcctggccttgctggtgctgacgctcacggcgtcgcagcctgccgccggccagattccggagatgaagaccggcggcccggtgccgacgctggcgcctctggtgcgccacgtgacgccggccgtcgtcaacatctccgtgcatggccgcgtgcgcgaggacaatccgctctatcgcgatccgctgttccgcgaattcttcgacgttccccgacagatcgagaaggaggtcaatgcgaccggctcaggggtcatcgtcgatgcccagcgcggctacgtgctgaccaacaatcacgtcgtcgaaggcacctccgcggtccagatcacgaccaaggacggccggcagttttcagccaaggtgatcggccgcgatccgcccaccgacgtcgcggtgctccaggtccagaacccggtcgggctcaaggcgcttcccttcggcgacagcgacggactcgaggtcggcgacttcgtgcttgcgattggcaaccccttcggcctcggccagaccgtgacatcggggctcgtcagcgcgctgggccgcaccggcctcggcaagcagggctatgaggatttcattcagaccgacgccgcgatcaatcccggcaattccggcggcgcactggtgagcctgcgcggcgaactcgtcggcatcaactcggcaatcatctcgcctgccggcggcaacgtcggcatcggctttgccattccggtcaacatggcgcgcaaggtgatggagcagatcatcgccaatgggcgcgtcgagcgcggccgcatcggcatctcgctgaaggacctgcatccgtcggtcaacaagggattgaatcaaggcgccgtcattgccgagattgctgcgggttcgcccgcggagaaggccggcttgcgcaagggcgatgtcgtcaccggagccgacgaccgcccgatccgcaccgccgcccagctccgtaacacgatcggccttgcgcgggtcggggaggatgtgaagctcaccctgttgcgcaacggcgccccattcaccgccagtgtgagagtcgcgcccgcggtccaaccgagcagcgcgctcgcaggccccaatcgcctcctccgctga

SEQ ID NO: 7560 - DNA, 117 bp, BradyrhizobiumColbertium
atgatggtcacgccgaccgttctcggcctcgtgctgctcggccaggcctcggcggcctgggccgttccgttcctggccctgcagggctgggtcgtcgcaccgcgcggcgagggctga

SEQ ID NO: 7561 - DNA, 336 bp, BradyrhizobiumColbertium
atgaccaacgtgaataccaatcccggcactctcaacccgctgtttcatcccgccgcccattacgactcgccggccgaggtcctcaatgcgaaggatctctctgcgccggagaagcggatcatcctgtcgtcatgggcgtccgacatgtacgccgtcgaatcctgtcctgccttgcgagaaattcccggtatgagccacgcggttcgactggtcgatattctggccgccctgcgcaagctggacggcgacaacgacaacgacgacccgccgcgcggcggcggcgtgccgatgcggctgcggcggccttgggccgccgcagagaggcgggctgcatga

SEQ ID NO: 7562 - DNA, 492 bp, BradyrhizobiumColbertium
atggcttttcgtgatctcattccctggtcgaggaaccaggagctcgcgccggcgcgcgacaatttcgatccgttcctgacgcttcaccgcgagatgaaccgtctgttcgacgacgtcttccgcggcttcggcgggaccggcctgtcgccgctgatggagggccggttcggctggccgaaggtcgagctcagcgagaccgacaagacgctgaccgtctcggccgagcttccaggcctcaccgagaaggacgtccaggtcgagatggccagcggcgtcctgaccatccgcggcgagaagaaggcggagcgcaacggcgaaggcaggtacttcaccgagcgctattacggtgccttcgagcggcagatcccgctggagggcgtcgaggaggacaaggccgaggcgtcgttcaagaatggcgtcctgaccgtgtcgctgccgaaatcggagaaggcgcgcgagggcgtcaagcgcatcgcgatcaacacgcattaa

SEQ ID NO: 7563 - DNA, 462 bp, BradyrhizobiumColbertium
atgaggaccagttttgatttcgcccccctgtggcgctccaccatcggcttcgatcacctggccgacctcgtcgacagcacgctgcgccaggcgaccgaggacaattatcccccctacaacatcgagcgctccggcgaagaccattaccggatcagccttgccgtggcggggttcggcgtcaacgatatcaccgtgacggcggagcagaatgcgctcaccatcgagggccggaagcccgagaccgccgcgcgcgaatacctgtaccagggcatcgccgcgcgtccgttccggcgcgtgttcaaccttgccgactacgtccaggtcaagcaggcctcgttccaggacgggctgctgatcatcgacctcgtccgcgaggttccggaagccatgaagccgcgccggattccgattgcgggcggcgcttctgcggcatcgcagatcgagcagaagaaggcagcctaa

SEQ ID NO: 7564 - DNA, 1302 bp, BradyrhizobiumColbertium
atgacagcagcaattgggttctccgctgcggcggagaaatcgaagacggcgcatgtggtgtgggcgagcgcgctcggcaccgcgatcgaatggtacgatttcctgatctacggcacggcggcggcgctggtcttcaacaggctgttcttcccgagcttcgatcccttcgtcggcacgctcgtggcattctcgacctatgcggtcggcttcgtggcgcggccgatcggcggggccatcatcgggcattacggcgaccggctcggccgcaagaccatgctggtcgcgaccatgatcgcaatgggcctcggcaccttcctgatcggctgcctgccgacctatgatcagatcggcatctgggcgccgatcctgctcgtctgcctgcgcttcgttcagggcatcgggctcggcggcgaatggagcggcgcggtggtgatggtgatcgagcatgccggccgccgacgcggcttctacggcagcctggtgcagatcggctttcccgtcggcgttgccgcctccaccggcatcttcgcgctgatgacgaagctgcccgaggcggacttcctcagctggggctggcgcgtgccgttcctgatcagcatcctgctcgtcggcgtcggcttcatcgtgcggctcaagctcgcggagacgccgcacttcaaggaagtggtcgagcgcaaggaggtgctggcgcagccggtactcgaggtgctgcgccgcgactggcgcagctttctgctggccgtcggcatcacggtgtcggaggtcggactcgcctatctcctcaccgtcttcaccgtggtctacgccacgacgaagctcggcctgccccggcaggtgatcctagatgccgtggtctatgccgccgtcgtggaattcgcgacgctgccgcttgccggctggctgtccgatatcttcggccgcaaggcgctgtatctggccggcggcgtgttctcggtggcgctggccttcccgctgttctggttcctcgacaccggggagccggcgctgatcacgctcgcgctcgtcgtcacgatgaccctgacccatgcgctgctgttcgggccgaaggccgccttcatgccggaactgttccgcacaaaggtgcgctacagcggcgcctcgctcggcgccaacgtcgcagcagcgctcagcggcggcttctcgccgctgattgcggccgggctgctcgcctgggccggctcctattgggcggtgtccgtctacatcatcgccctgtcggtcgtcacgatcatcgcaacgctgctggcgccggagacggcacgggacgcgctgagatcctga

SEQ ID NO: 7565 - DNA, 807 bp, BradyrhizobiumColbertium
gtgatcagcgatgtcaagctggccgccgccggcgccactttcgccgaagcgggcccggcgaccctgaccgaaaccctatcgttcaatggcgtattgcgtgccaaccaagagaccgtcgtgcaggtcacgcctcgctttccgggcatcgcccgcgccatcaagaaacggatcggcgatgtgatcggcaaagacgacctgctggcatccatcgaaagcaaccagagcctgaccgtctacgatctcaaggcgccgatcgctggaacggtgattgaccgtcagatctcgctcggcgaatacgtctccgagcagaagccgtcgttcgtcgtggccgacctgtcgacgatctgggtcgatctgtcgatctaccgtcaggatctcaggcgcgtccggatcggggacgaggtcctgatcgatccggatgatggggcgggcgacatcaagggcaagatctcttacttggcgccagtcggcgcgagtgagacgcagacggcgatcgcgcgggtgatcctgccgaatccagacggaaggttgcggcccggactgttcgtgacggctcgtttggtgttggccgagcggaaagtcggggtcgccgtgcgcactggcgcgatccagaccttcgaaaacaagaccgtcgtgttcgtgcgcgagggcgacgacaagctcgaggcgcgtcctgttgagctcggggattccgatcaaaaattcgtggaggtccgcgccgggatctcaccgggcgagaagtatgttgccgaaaactcgttcgttgtgaaggcggagatgggcaagggagaggccgagcatgattga

SEQ ID NO: 7566 - DNA, 282 bp, BradyrhizobiumColbertium
atgcagggtctggcattgctggtgcaggaggggctggggcgggatccttttgccggcgacgtctttgtgttccgtggtcgtgctggcaccctgatcaaagccctttggcacgacgggatcgggctgtcgctctacgccaagcgactggaccgtggccgcttcatctggccggcgacggtggatggcgtggtatcgctgaccgcagctcagatgggctatttgctggaggcgatcgactggcgcaatccccaacacagctggcggccgcagagcgcaggatag

SEQ ID NO: 7567 - DNA, 492 bp, BradyrhizobiumColbertium
gtgacggtccggcagaagctgccggaagacattgaggcgctgcaagcggcgttgctggcgacgcgcgccgaactcgccagcgttcgcgcccagcagtccgacgaccatgctctgatcgctcacctgaagctgcagatcgaaaagctgaaccgtgatcgttatggccctcgctcggagcgtaccgcaaggctgctggatcagctcgaactgacgctggaggagctcgaggcctcagcgactgaggacgaactcgctgccgaaatggccgcggccaagacgacgaaggtggcctcgttcacgcgcaagaggccgtcgcgccagccgttcccggaccatctgcctcgcgagcgggtgctcgtgccgggacctgtggcgtgcgtctgctgcggcggagcgaggttgtccaagctcggggaggacatcaccgagacgctggaggtgatcccgaagtcctggaaggtgatccgtaagcgaagcttttgtcccatttga

SEQ ID NO: 7568 - DNA, 1287 bp, BradyrhizobiumColbertium
atggtcggcatggcgatcgcggtcgccacaacgctggcgagccatccgccggccgacggcatggcctgggtgctggtcatcctcgcggttgcgatcggcggcggtatcggcgcggtgatcgcccgccgcgtgccgatgacctcgatgccggaactggtcgctgccttccattcgctcgtcggcatggctgcggtgctggtggccgccggcgcgttctacgcgcccgaagcgttcgacatcggcaagcccggcgcgattcatgcatcaagtctggtcgaaatgtcgctcggcgtcgccatcggtgcgctgaccttcacaggttcggtgatcgccttcctgaagctttccgcgcgcatgagcggcgcgccgatcattctgcccgcccgccacatcatcaacatcgcattggccctggcgctggtgttcttcatcgtccgtctcgtcctcacgggcggcgctttcgacttctggatgatcaccatcatcgcgctggcgctcggcgtcctcatgatcatcccgatcggcggcgccgacatgccggtcgtgatctcgatgctgaactcctattcggggtgggccgcggccggcatcggcttcacgctcggcaattccgcgctgatcatcaccggcgcgctggtcggctcttcgggcgccatcctgtcctacatcatgtgccacgcgatgaaccgctccttcatctcggtcatcctcggcggcttcggcggcgagaccgccgccgccgccggcggttcgggcgagcagaagcccgccaagctcggctccgccgacgatgcggcgttcatcatgaagaacgcctccaaggtcatcatcgtgcccggctacggcatggcggtggcgcaggcccagcacgcgctgcgcgagatggccgacgtcctgaaaaaggaaggggtcgaggtgaaatacgccattcacccggtcgccggccgcatgcccgggcacatgaacgtgctgctggccgaagccaacgttccctatgacgaagtgttcgaactcgaggacatcaactccgaattcgcgcaggccgacatcgccttcgtgatcggtgccaacgacgtcaccaacccggccgctgaggaagacaagtcctcgccgatctacggcatgcccgtgctccaggtctggaaagccggcaccgtgatgttcatcaagcgctcgctcgcttcgggctatgccggcatcgacaatccgttgttctatcgcgacaacaccatgatgctgcttggtgacgccaagaaggtcaccgagaacatcgtcaaggcgatgtaa

SEQ ID NO: 7569 - DNA, 171 bp, BradyrhizobiumColbertium
gtggccatcaacaaggaatggcaccggtctcatcccatgccgcccaaagcgacgcgcgagcagcgcgtcgcctggcacgccgcgcacagggcggcgtgcggctgccgcgatattccggcgagccttcggcccgatgtcatcaaattgctgcggagccatcgcaagccgtga

SEQ ID NO: 7570 - DNA, 798 bp, BradyrhizobiumColbertium
atgaccttcatcaagtggaccgccatcctgctcgcgaccgtctatctcgctggtctcgttgtgctgtacgtccgacagcgcgagatgctgtttccgatcccgcctgtcggccggactgcccccgatgccgcgggccttccggaagcggaagagcatgtcctgatcacgtctgacggcgagaaggtcatcatctggcacgtcccggccaagccaggccgtcccctgatcctttacttccccggcaatggcgatttcctcgccggccggatcagccgtttcaaggcgatgaccgccgacggcaccggcctcgtcgcactgtcctatcgcggctatgccggctcgagcggcgcgccgagcgaacagggcctgctgcgcgatgctgaggccgcctatgccttcaccatcgcgcgctacgaagcggaacgaatcgccgtctggggcttttcgctcgggacgggcgtggcggttgcgctcgcctcggaacgtcgcgtcggaaagctcatcctggaggccccctatacatcgaccgccgacatcgcagctgcatcgttctggtacgttccggtgccgctcttgatgcgcgatccgtttcgctccgacgagcgcatcgcgcgcgtcacggtgccgctcctcgtgatgcatggcacgaatgattttgccatttcgatcgtgttcggagagcgtctgttcgcactcgccaatgagcccaagcggttcgtttccatggctggcggcggacatgacgatctcgatcaatttggtgcggtcgaaaccgcgagagattttatcggcagttga

SEQ ID NO: 7571 - DNA, 147 bp, BradyrhizobiumColbertium
gtgcggtcgaaaccgcgagagattttatcggcagttgataatctctttgtacgttacatttgggcgctcgccgccttctgccgcgctgattccgcgttcctgctgttgacgctgctgccggtcgcgccgatcctgcactggcattga

SEQ ID NO: 7572 - DNA, 1062 bp, BradyrhizobiumColbertium
atgtttcccgcacttgccgtgctgttgttcgctgccgtcaccgcgacggactacgtgttcacgctgtcgctaggcgggctcgtctttgccatcgtgcttctggtcatcctgttcggcacggtgttcgccgcggttcaccatgccgaagtgatcgcagagcgggtcggcgaaccctatggcacgctcgtgctgacgctcgcggtgaccatcatcgaggtcgcgctgatcaccacgatcatgctgggcgacaagcctgccccggcgctcgcccgcgacaccgttttcgccgtggtcatgatcgtctgcaacggcctcgtggggctttgcatcttcatcggcggcctgcgctatcgcgagcagggtttccagctctcaggggccaacgtctatctcagcgtgctgtttgcgcttgcgaccatcacgctgatcctgccgaactacaccaccaccgcgccgggtccggtctattcggcggttcagctcggcttcgtcgacgtggtcacgctcgcgctgtacggagtgtttctctacactcagaccgtcctgcacaaggattacttcgttcatgaacgggcggagggcgaggctggggaggtgcaccggtcggccggggcgctcgcccttaccgtggtgctgctcctggtctcgctgctggcggtcgtgcttctggcaaagaagttctcgctggtggtcgacgccgtcgcggcccggatcggcgcgccgcccgcttttgccgggcttctggtcgcgctcctgatcctgatgccggaaggcgtcgcggccgtgtcggcggctcgcaagaacgacctccagaagagcatcaacctggcgctgggctcctcgctcgccaccatcgggctgaccatcccggcggtcgggctcgccacctacgcgctcgagaaggagctcgagcttggcctcaacgcccagggcagcgtgctcatgctcctgaccttcttcctgagcatgctgaccttcggcacgggcaggaccaatgtcctgttcgggctggtccatatggtggtatttgccgtctacgtattcatggtgttcgtgccctga

SEQ ID NO: 7573 - DNA, 117 bp, BradyrhizobiumColbertium
gtgcgcggtgcagagacgatccgaccaacgatcttccagtattgcttcaaagctcttgcgcgattgatcggattatcgcgggcaaaagatcacggcatatccgaagcgagggcatga

SEQ ID NO: 7574 - DNA, 1164 bp, BradyrhizobiumColbertium
atgcgcattcagcggcggcagggcgctgccctgcttgcgaccatcgccatcgtcgccaccatcggcggcgctatcatcttcgagggtgaccggacggcgcttgcgcaagcccccgcaaccgcccccgtcagcgcggccgtcgccacagttcaacgatccgacattgctctgtgggaatccttctccggacgtttcgaaccagtcgaggccgtcgatgtacgagctcgcgtctccggtgcaatccgctccgtcctatttgaggagggagcgatcgtccaacgcggtgatctcctcgtcgtcattgaccccgatcccttccgcgccgaagtcgaacggcttcaggctcaggtcgccatggcggaggcgcgcgcacgcttcacacgatctgaatccgatcgtgccgatcgcctggtggaaaccaacgctatcgccacgcgcgaccgtgaccagcggaccaacgctgccgaggaggccgcggcgaacctcagcatggcgcgagccgccctgcgaagcgcggagctgtcactgtcctacacagaggtgcgggcgccgatatcgggaaggattgggcgacgcgaaatcacagtcgggaatctcgtcgacgctgggccaagcgcgccgatcctcaccaccatcctttccgtcgatccgatctacgccggtttcgaggcggatgaacgcacggtcgcccgtgctttggccgacatacgcggtgaccgtggccacatcaacaccattcccgtcagcgcggacataggtggcgatgctccgccgcttcagggtcggctgcaactggtcgacaatcgggtcgacgctcgatcgggtacggtgcgtctgcgcgcggtcttcgaaaacacgcaaggcatgttcacgccgggtcagttcgctcgcatccggctcggccgcgcgcaacgcgagccggtgatcctgatccctgaagaagcaattggtacagaccaaagccgccgcttcgtgctggtggtcgacggtgataaccgcaccgcgcgtcgcgaggtgcagcttggccaattgcttgatggcagccgcgtcgtgacatcgggcctccagcctggcgaacgcattgtggtctccaacctccagcggcttcggccgggtgctcaagtgcagccccgcaccgacggagctcgcccatcgacaagttga

SEQ ID NO: 7575 - DNA, 3195 bp, BradyrhizobiumColbertium
atgaacatctcgcccttcttcatcaaccgcccgatcttcgcgggcgtgctctcggccttgatcttcattgccgggttgatcgccatccccaacctgccggtttctgaatatcccgaagttgtgccgccgaccgtgatcgtgacggcacgctatcccggggcgagcccgacagtgatcgccgagacggtggcgacaccgatcgaggagtctgtcaacggcgtcgagaacatgctctacatgagcagtcaggcgacgacggatgggttaatgacgctggtcgttaccttccggctcggcaccgatccggacctcgcaactcagctcgtgcaaaaccgcgtgcagcaagccgaagcgcgcctgcccgaggcggtgcgccggctgggcgtgacaacgatcaaaagcacgccggacctcacgttgaccgtgcacatgttctcgccgggcggtcgctacgacatgaactacctgcacaactatgccctcctgcatgtccgggaccgcttggcgcgcatccccggcgtcggccaggtgatgatccgtggtgccggcgactattcgatgcgtgtctggctcgatcccgagaagatcgccgaacgcggtctatcggcttccgatgtcgtgacggcgatccgcaacgagaacgtcgaggccgccggcggtgccttgggcgcgacgcccactgcggagggcgttcggacgcaactcaccgtcaatgtccgggggcgccttcgcaacacggaggagttcgagaatatcatcgttcgcaccgcgtccgatggcgcaattacacggttgaaggacgtcgcccgcgtcgagctcggttcggccgaatacgctgtgcgctccttgatggacaaccagcctgcggcggctctattcgttctgcaggcaccaggttcgaacactgtcgagatcggtcggcaggtccgcgtggtcatggacgaattgaagcggacgatgccggcgggcgtggactaccgcatcgtcttcgacccgacgcagttcgtcgtcgcctcgatcgacgccgtcgtccacacgctgttcgaagcagtgctgctggtcgtgctcgtcgtcatcctgtttctacagacgtggcgcgcatcgatcatcccgctgatcgctgtgccggtgtcgatcatcggaacgttcgcggtaatggcgctgctgggctattcgattaatgcgctgacgctgttcggtctggtgctggcgatcggcatcgtggtggacgacgccatcgtcgtcgtcgagaacgtcgaacgaaacatcgaggccggtctcacgcccaaggaggcggcgcttcgcgccatgcgggaggttacagggccgatcatcgcaatcgcgcttgttctcgttgcggtgtttgtgccgctcgcgttcacgaccggcttgacggggcagttctaccggcagttcgcgatgaccatcgccatctccacggtgatttcggcgatcaactcgctgacattgtcgcccgcgctggcggcgctgctcctcagagcgccggatgcccctaaagattggccgacgcgccagatggatcgggtgttcggccggtttttcggctggtttaatctgggctttagccgcggcggccatgcctacggggctggcgtcaagcgcatcctcgcaaggcgcctatcggtcctggtggtgtatggcggcctcatcgtcgtgaccacattgctatttcacacggtgcccggcggcttcgtccctcagcaggaccgcacgtacctcatcgccagcgcaacgcttcccgatggggcgaccctcgaccgcagcgaggatgtcgtgcgacagatgggcgagatcgccctcaaagatccggacgttcgtgcctcgctcgccttccccggcctctcggtgaatggccagctcaacagcaccaatgccggcatcgccttcatcaatttgcagccctttgccgcgcggcgcggcgccaaccagagcgctgctgcgatccgcgaccggctgcgtgtcgcttttgcgcagatcgagaatgcacgaatcgtcatcttcccgccgcctccggtgcgaggactaggcgcaacgggtggcttccggctccagatcgaggaccgcgcctctctgggctatgcggcgctcgacgctgcggtcaaggcgtttctcgaacgagcgagccgacaaccggagctaaacggcatgttctcgtcgttccaggtgaacgtcccgcaagtcgatgccgatgtcgatcgcgaacgggcacgccaactcggtgtctccatcccggacatcttcagcacgctgcaggtctatctcggcagcttctatgtgaacgactacacgcagttcggccgcacctacacggtaagggcacaagctgatgctccgttccgagcttccatggaagaccttggcgcactcaaggtacgctccggcacgggcgagatgatcccactcgcgaccttgatgacgatccggcagagcgccgggcccgagcgcgccatgcgttacaacggcttcccgacggccgacgtcagcgggacggctgctgcgggttactcgtcgggccaggcacaggccgccatcgagcgaactgcggccgaaacgttaccgcctggaatcagcttcgaatggactgacctgacctatcagcagatcctgaccggcaacaacagcatctggattttcccgctcgccctgatactcgtcttcatggttctggccgcgctctacgagagcctggttctgccgctatcgatcctgatgatcgtgccgatggcggccctgtccgcgctggccggcatctggttgacgggaggcgacaacaacatcttcacgcaaatcggcctcgtcgtactcatcggcctatcggcaaagaatgcgatcttgatcgtggagtttgcgcgcgagctggagttcgccggccgaacgcctgtccaggcggcgattgaagcagcccggctgcggctgcgcccgatcctgatgacgtcctgcgcctttatcatgggtgtggttccactggtgctctcatccggcgcaggctcagaggttcgacgcgtcatgggcgtgacggtgttcagcggaatgctgggagtgaccctctttggattgttcttgacgccggtcttctatgtcgtgcttcgcaagctgagtggggatcgtccgctcgctcatcatggcgccgaggtagaaggcattgccgaacggcctgctgcggccgctgagtga

SEQ ID NO: 7576 - DNA, 159 bp, BradyrhizobiumColbertium
atgttgtttccggcactgacgccggccgccggggttttgttcgggagcagcctgacgggagaactgccgacaatcacccaggcttcctttcttgcattgagtgctctcggagccctgtttttgctggcggcaagtcgtcaaccaagaacgatggcgtag

SEQ ID NO: 7577 - DNA, 171 bp, BradyrhizobiumColbertium
gtgatacttctcattactgaagccaaccggaagggagcgcttctgcggctccagtggaccgcgatgggaacccgcgacatcgataacaggcgtcccgatatcgcgtatcatccatccgccgctcccatccgcaacgacgtgtggctcgcgacgagcggcgtcgatacgtaa

SEQ ID NO: 7578 - DNA, 864 bp, BradyrhizobiumColbertium
atgactcagaaaatctggttcatcaccggcgtcagcacaggtttcggccgcgccatcgccaacgctgccatcgctgccggcgacaccgtcgtcggcacgctccgcaatgaagagcagcggaaggcgttcgacaacgtcgctcccggacggacgcacggcgtcatcctcgatgtcaccgacaatgccaaaatccatccgaccgtcgatcgcgtcgaacgcgagatcgggccgatcgacgtgctcgtgaacaacgccggttacggccatgaggggaccttcgaggaatcatcgctcgaggaccttcgtcggcagttcgacgtgaacgtcttcggagccgtggcggtgacgcaggcagtgctgccccacatgcgccagcgccgcgccggcagaatcatcaatatcacatcgatgggcggcctcattaccttgccgagtctcagtttctaccacggttcgaagtttgccttggaaggcctctccgaggcgctcggcaaagaggtgaagggcttcggcatcttcgtcactgccgtcgagccgggttcattcaggaccgactgggcgggacgctcaatgaaccgcgcaccacgccggattgcggactatgacgccctgatagacccgttgcgcgagaagcgcctcgcgatgagcggcaaacagcttggcgacccggcaaagctcggtgaggcggtcgtaaagatcgccaacgcagagaacccgcccgcgcatctgctgctcggctccgacgcccgcacgctggtcgaccgcaagctgtcggaccttcgcgccgaatacgacgcctggaatgacctgaccctctcgaccgacttcaacgacaaggcgtcggccggcaatagctgggcgtga

SEQ ID NO: 7579 - DNA, 234 bp, BradyrhizobiumColbertium
gtgaccgcccgccaacgggactgtcaagcatcgctcggcagtccaggcatcgcccgcagcgaacgcttcgccacaaagcacatcaacgagcgctcggccgacgatttcgcgagcgtgccgttcggcgacgagaagagccccccgttccgctccggcgcgcacggcgtgatcgacggcgccacgaccgagcatcggatctcgcttcgccgcacccctcgcgcccttcctttctga

SEQ ID NO: 7580 - DNA, 870 bp, BradyrhizobiumColbertium
atgacacagattgacgctcgcccgtccggcacgtttgccattggcggcgatatgacaatcaaccggctcggcttcggtgcgatgcggattacaggccccggcatctggggtgagcccgaggaccgacccgaagccctccgcgtgctgaagcggttgaccgagatcggcgtgaacttcatcgatacggccgacagctatggtccattcgtcagtgaggagctgatcgccgaagcgctgtatccttatgacggtctgctggttgctacaaagggcgctctcgtgcggccgggtggcgaacccaacccgtggccgatcgtcggcgacccgcactatcttcgccaagctgtccgcatgagcctgcgtcggctcaaggtcgaacgaatcgatctatggcagctgcaccgcatcgatccgcgtgtcccgcaggacgaacagttcgatgtcgtaaagtccttcatcgatgatggcttcatccgtcacgccggcctcagtcaggtctcggtcgagcagatcgaggcggcacgcaaggtgtttcccgtcgcgaccgtgcaaaacctctacaatctcggcaaccgagccgatgaggacgtgctcgactattgtgaagcgaacgggatcggattcatcccctggtatccgctcgccgcgggcagcctcgcgcgaccgggtggccttgtcgacaagctggcgaaggcgaagggcgtgacacccggtcaaatcgcaatcgcctggctgctcaagcgaagcccggtgatgctaccgacccccgggaccagtcgggtcaaacatcttgatgaaaacgtcgccgccgccagcatcaccctgagcgaagacgagtttgccgagctcgacgcggtaagccgcgcgtga

SEQ ID NO: 7581 - DNA, 924 bp, BradyrhizobiumColbertium
gtgagcgccgccgaaacaaaatcgccggttcatacgccggcagtaacggcgaagcaggttaccttcggcaccatcaaggtcgatgatctgaacatcgcctatcgcgaagccggcgatcccaacgccccgaagcttgtccttctacacggctttccgtcgtcgtcgcatcaataccgcaatctcatacaagcgctctccgggcggtttcatgtgatcgcaccggactatcaaggttttggcaacagcgacgtcccggacccggcgacctatgcctacacgttcgacggtatctccgaaacgatggagaaattcctcgcggccaagggcttcgatcattttggcctgttcgttcaggactacggcggcccggttggttttcgcattgtcggacggcatccggagctgctggattggttgattatccaaaactccaatgcttacgaagagggcttcacgccggcgtgggatggtttccggggagcgctctggaagaatcgctcgcctgagacggagaagcccttggcggcgtttctcacgcgcgatgcgatcaagagtatctatctgcatggtgcaactcatcccgaactgatcagcccggacaactgggaatctgactacgggttcatgcagcgccctggcgcggtgcggttgaacttggacttgttctatgactaccgcaaaaacgtcgagctctatccggtgtggcagaagtttcttcgcgaacgccaccccaagacgatcatcttttggggacaggacgatgtcttcttcaccccgcaaggcggtgaagcgttcaaaaaagatctccccaacgccgagattcaccgtttggcgggcggacactttgctgtcgaggataatctcgactacatcgcctcgaatatgatccgcttctacaacgcaaacgtggccaagaagcgatag

SEQ ID NO: 7582 - DNA, 129 bp, BradyrhizobiumColbertium
ttgacctgctgctcgcctcagatgagcggcaggatcagcgaactcgaatcgagccagcagcaatgcaagcagtcggtcggacgaaaggacgatgctggccacgcgctcatcgagccgcgcaagcgatga

SEQ ID NO: 7583 - DNA, 1098 bp, BradyrhizobiumColbertium
gtgggtccgattctaccgtcgatcatcgatgagtttcgactttcgcacgcgatggcttcgctgctgacatccattccagacattctgatgggtgcgctggcgctgccgagcccgtggctggcgcggcgtttcgggcgtgatcccgttatcctcgccgcgctgctcttgcttgccatatcgatcgcggggcgcgcgtttgcgacgggtgtcttcccgttgcttgtcgcgacggccggcgttggcgctgggatcgccataaccggggcccttattgcaggcttcatcaaagctcgcttcgcgacaaaggcggcactgctgatgggactttacgcgacggctctgtcgctaggcagcactgtgtccgctgccgtgacaggcccgatcgccatccagaccacgggaggctggcgccttgcgtccggaatgtggagcgtgctggcgctatttggaattgcgggatggctggcggttgtcttgaatgagcgacgtcatcgtgcggtggtcccagtctcggggcagagagtcaggcttccgctcggcaatccaacggcgtggctggtgtcgctgttttttgcctgcgtcaatttcctgttctacgcgatggtatcatggacgtcgcctatgtaccgcgaggtcgggttgtcgacgacactcgcaggtcttgtcctggcgagtttcacggccgtgttcacggtcgccaaccccgtcttcggctggttgagccgttcgcatgatcgtcgtgggtggcttgcgatctgtgcggcgctttcgctcgctggtctcgttccaacagcgctcgcgcctggtctcgcaccgttcatttttattccgatctctgcgatcggccttggcggcgcgttcacgctgggcatgaccttgccactcgacaacacgaacagcgtcgaggaagcggatatgtggaacgcattcgctctcaccgtcggttacctcattgccgctggcggcccgcttgtcgttggctatctccgcgatgtcaccggcgacttccgctcgggatggtggttgctggtggccgtttcggccgtcatgctcgctctgacgccgtttcttcatccgagccgttccacacatcattga

SEQ ID NO: 7584 - DNA, 987 bp, BradyrhizobiumColbertium
atgaataagtcgacaatcgcacttccgcgccgttcaatcctcgccggcttggcagcagcgccgggtgcggccatgctcgccagcgcaacgaatgcgctggcgcagaccgcgtcagtcgcgccggcggcgaacaacatccgctatctcacgcagaaggtgggtgacgttgaagtctactaccgcgaggccggccccgccgatgcgccgaccatcctgttgctgcatggcttcccgacgtcgggtcacatgtttcgcgatctgatccctctgctgagcgatcgttacaggattatcgcgccggaccttccgggcttcggtctgaccaaggcgccgccgcacggtcagttcacctatagcttcgatagcctggcccaggtcgtcaacggcttcgttgaggcgatcaatctcaagcgttacgcaatctacatcttcgactacggtgctcccaccggtctgcgcgtggccatggcgcatccggagcgcgtcagcgcaatcatcacgcagaatggcaacgcctatgtcgagggcctgagcgaaggctggaatccgatccagaaatattggaaggatccctcggacacgaaccgccaggcgttgcgtgattttctcaagcccgattcggttcggtggcaataccttcagggcgtgcccgatccgaccctcgtctcgtcggatggctccaacctcgattcctattatctgagccggccgggcatcgacgaaatccagctcgatctgtttctggactaccggagcaacgttgcgctgtatcctgccttccaggcctatttccgcaaggaacagccgccggtgctggcgacttggggtaagaacgaccccttcttcgtgccggccggtgcggaggcttacaagcgcgatcttccgaaggcggaagtccacttcttcgacacggggcatttcgcgctcgaaacgcatcaccgcgaaatcgccgcgctgatcggcgacttccttgccaagaaccgatga

SEQ ID NO: 7585 - DNA, 726 bp, BradyrhizobiumColbertium
ttgctcgtttcgtttgagaaagaggaaatcatgtcaagcaagctcaacggcaagacggttgttcttgtccacggtgctttcgcggatggctccagttgggcgagggtaattccccttctggaagccaaagggttgaaggtcgtcgccgtacaaaacccgctcagttcgctcgaggacgatgtcgccgctgcgcgcaatgcgatcgaccagcagagcggacccgtcattctcgtcggacattcctgggccggtgtcgtcatcgcgcaagccggcgttcacgaaaaggtggagtcgctcgtctacgtgacagcactcgcgcccgatcagggacagtcggtggtggaccttctggcaggaaacgttccggcatgggcagactcgctggaaaaggacgccggcggtttcgtgaagcttgccgcgaatacggtcgggaaatatctcgcccatgatctgccggattccgaggtccgcatcatcgcggcgacgcagggtccgtggaaatgggactgcacatcgcagaaggtgacggaggcggcatggcgcagcaaaccgtcctggagcgtcgtcgcggagcaagatcaactgatccccggtgaattccaggagcagatggcgaagaacatcggcgcgcaaatcgtcaaggtgccatcgagtcacgtcgtcatcctcagtcatcccgagaaggtcgccgagacgatcattgcggcggccgaagcggcgcgctga

SEQ ID NO: 7586 - DNA, 189 bp, BradyrhizobiumColbertium
gtgtcgggcgaggaacgcctcaatgttgcgttcagcctgatcgctgcaagcggcgtcgtggcgaatatcattccggcagggacggcggcacggtcgttcgacgtattcgcctttcattccagcagacgatggagcgggcgtgcctttgcacggagcgccggtccgtggcggggcgatcgtcggctatag

SEQ ID NO: 7587 - DNA, 117 bp, BradyrhizobiumColbertium
ttgatcgtggaagatccgaaggtggaccaggacgccatcactgaagagcgggattggttcgcctcggccgagacctcacacggcgctggtgtctcttcccggctgcaacggctatag

SEQ ID NO: 7588 - DNA, 186 bp, BradyrhizobiumColbertium
atgtcgcacgatctttccctggcccagaaccacgccttccagctcgctcgcacgctgatgatcccggtcaccctcttcaaatcgggcgacgcctatggcgccctgccctcgaacgaactcgatgacggcgacgatgtcgaattcatccacgaattcgatccctacgagcgtggccctgctcaatga

SEQ ID NO: 7589 - DNA, 252 bp, BradyrhizobiumColbertium
atgtccaccagggatcaaaaaccgcgtcatcttcgccgtatcgatccgtcgcagaatatgcgccgcttctacgtgctgtcgctacaaccgactttgttcggcggcgcatctgttgtgcgcagctggggacgaattggcaccttcggccaatcgatgatggagacgttcgatcatctcgatgcggcaaacgatgccatgatccagctggagaaaagcaagaggcggcggggctatcgcgacaccgacatttag

SEQ ID NO: 7590 - DNA, 1221 bp, BradyrhizobiumColbertium
atgcaaccccgaggcaagatcgtcgtcgcgagccagcattacccgcctgacccgagcaccacagcggcgatcatggccgagatcgcctgccgcctgtcggcggagcacgaggtcgtcgttctctcgggctcgccgggtgcattgccggccgcgcagaccggccccggcaagccgcgcgtcgtcgcgatcaggaaccggatggcgggcaaggcggcgctggtgcggcgcggcgcttccgagctcctgttcgcgggccgcacgttcttcgcattggtgcgggaattgaggcgaggggacgtggtgctcacggtcactgcgccgttcatgctgccctatgcggtggcggcggcagcaagggtcaagggcgcgcgctcggcgttgatcatgcacgacctctttcccgacgtgctggtgatggcgggtctgttgaaaccaggctcggtcgtcacgcggacgatgcgcgccgccaacagcctgatgttccgcgcgctcaacgccgtcatcaccatagggcgagatgcggagcggccgctgctcagctattccgggatgaggcgcagcaagattcgtttcatcccgaactgggcgacgctcgcgcccgcgccgcggcccgtcagcgcggacaatccattccgcaagtcgattccggcgcgcttcatcgtggggctatcgggcaatctcggcttcacccatgatccggacgtcgtgttcgaggcggcgcggctcctgcaggaggaggcggacattcacttcctgctgtccggctggggcatcggtttcgagcggctgaagcagttgcaggcgacggcgaacctctccaatgtctccttcgtcgggcgtgtcgaggattccgagctcgaagcgtttctcgcttccgccgatgtctggatcattccgtaccggaaggacgtggcgggagtgtccgtgccgagccggttctacaatctgctggcggtggggcgccccgtggtgctggtgtccgagccggaggccgaggccgccttgacggtcgcggagagcaggctcggctgggtcgtgccgccaggccgtgccgatcggctcgccgaagcgatccgcgccgcgttccgttccgacgacgccaccatcgcggtgcgcgcggtgaaggcggcatcgcgtttcgacaagacgacggcgatgaacgcctatgccgagctgatcggcgaattgttgcgcaacccgaacctttcggagcagggatga

SEQ ID NO: 7591 - DNA, 948 bp, BradyrhizobiumColbertium
atgaacgagcgtcaaccggtcgtgctggtgacgggagcgagcggcttcgtcggtcgtcatctcgtgccggcgctggctcatgccggatggtcggtccgccgtgcggtccggagcccggaaggcgccggcgacgaggtcgtgatcaaatcgatcggccccgagaccgactggcaggccgcgctggaaggcgtcgaggccgtcatccatctcgccgcgcgcgtgcatcacaagcacgaggagcacgcggtccagctgtaccgcaacgtcaacatcgccggaacgctgcatctggcgcgctcggcggcgacggccggcgtgcgccagttcatcttcatcagcaccgctctcgttcacggccgcagcaatgagggccgtgcgccgttcagcgagaacgaggttctgacgccgcgcggcctctacggcatgtccaaggccgcggccgaggctggcctgaggacgctggcgcgcgacaccgatatgaagatcactgtgctcaggccgccgctggtctatggcaccggagccaagggcaatttcgccctgctgacccgtgcgataagcgcggggctgctgctgccctttgcggcgatcaacaaccagcgcgcctttctggccgtgcagaacctgtcgtcgtttatcctgcaccggctcagccatcccgatccagcgagcaacttcgagatattcctggtggccgataccgaacaggtctcgacgcccgaattcatcaggcgcctggctacagcgtccggaaagaacgcgcgtctgttcggcatgtcgccgcgcctgctgtcgacgctgctcaatgtgatgggtcggcaggacacgcaggacagcctgattggctcgctcgagctcaacatctccaaggcgctggcgaccggctggcagccacagatctccatcgacgaggggctgcggcacgcgctttcggatcaggacgcctga

SEQ ID NO: 7592 - DNA, 1020 bp, BradyrhizobiumColbertium
gtgagctccgcagccgatgcgctcgccggcgccccactgctgcttgccgccgcgatcgccgcactgatctcggcgctcgtcacctggatcagccgccccctgctccagcgctacgcgctggcacggccaaatgcgcggtcctcgcatcgcatcccgaccccgcagggcgctggcatcgcggtgattgccgcgactctcctcgtcgcctggatctggagcgcctcggccaatgtcgcgatcccgccggcgctggtcgctgcgaccatcgtgatcgcgctggtcggctttgccgacgacatcgtatcgctgcccgtgctcgtgcggctggtgctgcaggcagcctgcgtcggcgcagtggtgttcacaacgcccgagagcgcgcgcatcgtgccggctctgccgctcgggctggagcgcggcctcatcgtcctggccggcgtctggttcgtgaatctcgtcaacttcatggacgggctcgacctgatgacggtggcggaagtcgtgccggtcaccgctgcgctgctgctgctgggagtgctcggggatctctcttggccggcggtgctgatcgccaccgcgctatgcggcgccatgctgggctttgcgccgttcaaccgtcccgttgcaaaggtcttcctgggcgacgtcggcagtctgccgatcggccttttgctcggctggtgcctgctggagctggccttccgggggcagccggccccggcgctgctattgccggcctattacctcgcagactccaccattacgctgtttcgccgcatcatcaggcacgaaccgttctggtcggcacaccgcacacacttctatcagcgtgcaatcgacaacgggttcacggtcgagcgggtggtcggggagacattcgcgctcaacctcgttctggcaatccttgccatcatcacggttcgcgccggctcgatcacgatcacgatcgttgccttgttcggaggcgcgggcgcggtcgccctcgtgctgcagcggttctcgcgggctcaggcgtcctga

SEQ ID NO: 7593 - DNA, 1077 bp, BradyrhizobiumColbertium
atggcgtccttacacgacggctattgcaagatcggcgccaagaccataccaaagcggccgaattcggcgcctcgcgtcgggttgcctcaattcttcgcaaaccctcatgcgggcgagatgcgccgaatcctgctgtcgacggccaaaatcgtgatttccgtggcgctgctgtatctggcgctgcgcaaggtcgatctatccgaactgttttcgcgcttcaccatcaccagcctgttctggatcggcgtggcgatcgcgatcacgttcctgcagatcttcgtcggcgtgctgcgctggcgcgagatcagcgccgcctgcggagcgccgctcgagctcggccgcgcgatgcgttacaacgtgatcggctcgtttttcaaccagaccctgccgtcggcaatcggcggcgatgcggtccggctgtggctggtcgcacgcgcaggggccggctggcgtgcggcgacctactcgatcttcgtcgaccgcgccatcggcctgatcgcgctcgcgatcctgatcgtcgcaagcctgccctggagctacactctcatcaccgatccgcacgggcgctcggcactgctgctgatcgacctcctggcgctcgcgggcggcgtcggcttcctgattttcggcgcgctgaaatggcgttggctgaagacctggtgggccacgcatcacattcacgcctgcgccgtcatcgccaatcgcgtgatcttcagccgcacccgcgggccgatcatcgcgatcctgtcggtcctcgtccacgtgctggccgtcgtgatcgcctggtgtgtcgtgcagtcgattgcggccccggtccgcttcagcgacgtctttttgctggtgccgccggtgatgctgatcaccatgatgccgatctcgatcgccggctggggcgtgcgtgaagccacgatgagcctggcgttcggcttcgcgggactttccgccaacgagggcgtcaacgtctcgctgctgttcggtgccgtgttcttcatggtcggcgctgtcggcggcctggtctggatcctcagcgcggagaaagccgcgcaaggatctgcccctatcggagtgccggagtga

SEQ ID NO: 7594 - DNA, 990 bp, BradyrhizobiumColbertium
atgacggatcaggcaattttggtcaccggcgcggccggtttcatcggcttccacgtcgcccgccagctcctcggcgagggccggcctgtcgtcgggcttgacaatctcaacagctattatgatccggcgctgaagaaggcgcgcctcgagctgctcaagggcgactcccgcttctctttcgtccaggccgatctcgccgaccgcgagacgatggcgaccctgtttgcgcaacatcgttttgccaaagtcgtgcatctggcggcgcaggccggcgtgcgctactcgatcgagcaaccgcaggcttacgccgattccaatctcgtcggctttctcaatgtgcttgagggctgccgcaacaacggctgtcgtcatctcgtctacgcctcgtcatcctccgtttacggcgccaacacaaaactgccatttgcggtcgcggaccgcaccgatcatcccgtgagcctctatgcggcaaccaagaaggcgaacgaggtgatggcgcagtcctacagccatctctatcgcctgccggtcaccgggctgcgcttcttcaccatttacggcccgtggggccggcccgacatggcgatgtttcttttcgttaacgccatcatggcgggcaagccgatccggctgtttaaccatggcaagatgcgccgcgatttcacctatatcgacgatgcgacgcgtgtcgtatcgaagctgatcgatctcgtccccgcgaatgatgcggctgccgcaaatgcgccgtcaaagctctacaatgtcggcaatcaccgcccggaggaactgatgcatgtcatcggtcttctggagcgggagctgggccggacggcgatcaaagaattgctgccgatgcagccgggagatgtgctggaaacgttcgcggatgtcgaggatttgatgcgcgataccggctttgcaccgtcaacgccgatcgagcatggggtccataatttcgtcacctggtatcgggactacttcaaggtttga

SEQ ID NO: 7595 - DNA, 1413 bp, BradyrhizobiumColbertium
atggacaaacgcataatccccctgatcatgtgcggcggtgccggcactcggctgtggcccgcctcgcgcgaggtgcgcccgaagcaattcctgccgctgttcggcacgcgctcgacgttccaggacacactgctgcgcgtgtccgatccgcagctgttcgatcgtcctattgtcatcaccaatgcgtcctatcgcttcatggtgctggagcaactcgccgagatcggcatcgaggcggacgtgatcctcgagccgatgcggcgcgattccggccccgcgatcgccgccggcgcggtgttcgcgcagaaccgcgccagtgaagcgatcgtgctcgcgctcgccgctgaccacgtggtgcaggacaatgccgccttcgtcgcggcctgccgcgagggacttgcggcggcgaatgccgggcgcatcgtcaccttcggcgtcaagccggagcggccggcgaccgaatatggctacatcaatccgggggaggtgatctcgggcgaggtgcatgccgttgcgcgcttcgtcgagaagccggatgcggtgaaggcatccgactacgtcaattcgggttatctctggaacagcggcaacttcatgttcccggccgccctgctgctcgatgaatatcgcaaggtcgatgctgcgagcgtcgaggccatcaccaacgccgtcaaccatgccggccgcgatctcggcttcgtgacgctggagcccgaggcattcgccgcggcaaaggcgatctcgatcgattatgcggtgatggagaagacctcgcgcgcagccgtggtgccggtgtcctgcggctggtccgacgtcggctcctggcacgcggtgtgggagctgtcggagaaggacgcgctgggcaatgctgcgcatggcaccgccgtgttcgaggactcccgcaactgcaacgtcacgacggattccgcgctggtcgcgctcgagggcgtggacgatctcgtcgtggtcgcgaccgccgatgcgatcctggtctcgcgccagaaggatgccaatggtctgaagcgcctggtgacgaagctgaaggcggtcgcacccaaggtcaccgaggagcatctcaaggtgcaccggccctggggcagctaccagtccgtggacaatggcgagcgtcaccaggtcaagcgcatcgtggtgaagccgggcggacggctgtcgctgcagaagcatcaccatcgcgccgagcactggatcgtggtgcgcggtaccgcccaggtcacggtcaacgagaccgtgaagaccgtgcacgagaacgagtccatctatattccgatgggcgccgtccaccggatggagaaccccggcaagatccagctggaattgatcgaggtccagaccggctcttatctcggggaagacgacatcatccggattgaagacgactaccaaaggtcgtaa

SEQ ID NO: 7596 - DNA, 1005 bp, BradyrhizobiumColbertium
atgagttccaggggatctgcaccggtaaaggccgccttgcgcgtcggcgtcattggtgccggcgtgatgggcagcaaccacgcgcgcgtgctcagcgggcttcccggcgtcacactcgtcggtgtcgtcgacccctcgccggcgcatcgtgcgcgggccatggaacttgccaattgcgagagcttcgagacgctcgaccagctcgtcgccgaaggcgtcgatgccgtcaccatcgcagcgcccacccatctgcatcacgaggtcgcgctcgcctgcatcgccaagaacatccatgtcctggtcgagaagccgatcgcttcgacggtggacgaggggcacgagatcgtcgctgccgcgcaaaaagccggtgtcacgctgatgatcgggcacgtcgagcgcttcaatccggcggtcgctgccgtcaagcaggcgatcgcgggcgaggatatcctctccatcgcgatcacgcgggtcggcccgttcccgccgcgcatgtccaatgtcggcgtcgtcatcgaccttgccgtgcacgacatcgatctgatccgctggttcaccgaatccgacatcgtcgaggtgcagccgcaattgtcgagcgcggtggccgagcgcgaggatatcgcgctgttgcagttccgcaccgccaacggcgtgctggcccacatcaacaccaactggctgacgccgttcaaggcgcgcagcgtcacggtcgcgacccgcggcaaatacgtgatgggcgatctcttgacgcgccaggtcaccgagtgcttcggcttcaagcccgatggcagctactcgatgcggcatctgcctgtcggccacgacgagccgctgcgtgccgagctgatcgcgttcctgaaggcggtgcgccatggcgagacgccggctgtgacgggcgatgaaggcgttgccagcctcgcgatcgccacccagtgcctggagacgccctcgcgtcccgcagccacgtcgccggctcgcaaggctgctcgccgcgtcgccggctga

SEQ ID NO: 7597 - DNA, 1182 bp, BradyrhizobiumColbertium
atgtcgtccgctcaaacgtcacaaggtgccatgaaccagcatctgcgttccgaacctattcccttcatcgacgtcgcctcgcagcggcgccggctcggcgcctcgctcgatgcagcggtgaagcgcgtgatggaccattgccagttcgtcaacgggcctgaggtcttcgagctggagaagcagctggcggcgtattgcggcgccaagcacgtcatcgcctgcgccagcggcaccgacgcaatcctgatggtgatgatggcgaagaatttcggccccggcgatgccgtgctgtgtccgtccttcaccttcatcgcgacagcatcgccggtggcgcggaccggcgcgacgcctgtctatgtcgacgtcgacgaggcgaccttcaacatgagcccggagtcgctgaagcgcggcatcacgacagcccgcaaggcgggcctgaagcccgtcgcggtgattccggtcgacctgttcggccagccggccgatcatgatgccatcgcggagatcgccaaggccgagggcctgttcgtgctcgacgacgcggcgcaaggcttcggcgcgagctacaagggccgcaagctcggcacgttcgggcatgccactgccaccagcttcttccccgcaaaaccgctcggctgcttcggcgatggcggcgcgatcttcaccgatgaggacgaactcgccgccaccttgcgcagcatccgcgtgcacgggcagggcgtcgacaaatacgacaacgtgcgtctcggcctgaccggccggctcgacaccatgcaggccgcgatcctgatcgagaagctgaagatcttcgatgacgagatcgccgcccgcaacgaggtcgcggagcgctacgcgcgcgggctgtccaatgtcgtcactgtcccgcgcctcgcgcccggcaacacctcggtctgggcgcagtacaccatccgcctgcccaaaggcaccgaccgcgacggcttcgcggccgcgctgaaggcccagggcgtgccgaccgcgatctattacggcaagtcgatgcatcagcagaccgcctacaagcactatccggtcgccgagggcggcttgccgggttgcgagagcctgtcgcaggacgtcatcagcctgccgatgcacgcctatctgaccgaagccgaccaggagcgggtgatcgccgccgtccgcggcgcgctcgcggggtga

SEQ ID NO: 7598 - DNA, 1527 bp, BradyrhizobiumColbertium
atgctcggacgcatctttacggtcggtggttacacgctgctctcgcggctgacggggtttgtccgcgacatcatgctcgcggcaatcctcggcgccgggccggtggccgacgcctttttcgtggcgctgcggctgcccaatcatttccgtgcgatcttcgccgagggtgccttcaacgccgcctgggtgccggcctatgcccacgtccatggcgagaagggggaggcggcagcaagcctgttcgccgaccgcatcttcacgctgctcctggcctcgcaggtggtgctgttggtcgttgcctggctgttcatgccacaggccatgagcatcctggcgcccggcttttccgaggacgccgcgcagcgcaagctcgcgatcgagctcacccggatcacctttccctatttactgctgatcacgctggtgacgctctacggcggcatgctcaacgtcatgcagcgctttgccagcgccgcggctgcctcgatcttcctcaatgtcgcgatgatgatgacgctggcgctggccgcctggtttccgaccgcgggccatgcggcggcctggggcgtgctcatctccggcttcctgcaatatttcctgctcgccggcgatctcgcccgccatggcggcctgccgcgctttgcgcccttgaggctcgacgaagacatccgcgacttcttcaaggcgctgggaccggcgacgctgggctcgatgggcacccaggtcgcgctgttcgccgacaccatcatcgcgaccttcctgcccgccggcgcgctgtccgcgctctattatgccgaccggctcaaccagctcccgatcggcgtgatcggcatcgccatcggcacggtgcttttgccggagatgtcgcgacggatcacggcgaacgacgatgacggcgcgatgaaggcgcagcgccgcgccttcgatttcacgctgctcttctcgatcccgttcgtcgcggccttcctcaccgtgcccgacgagatcatgcgcgcgctgttcgcccgcggcgccttctcgcaagccgatgcggtcgcggccggcggcacgctcgcggcctatgccattggcctgatcccgttcgtgctgatccgcagcgctgtcgcgaccttctatgcccgcaaggataccgcaacgccggtccgggcgtcgctgaccggcatcgccgtcaatgtcgcactgaaggtcgccttgatgggatcgctcgcgcagatcggccttgcgctcgccaccgccgtcggggtctggaccaatctcttgctggtgctcttcttcgcagtgcggcgaggtttcctcgtgctggatcgcggctggctgctgtcgctcggaaaattcctgctgaccggattagtcctggctgccgcgttctggttgatcgcgcattttagcggtccgttattgggctcgatacacttccgcgatgagctgacgctggttgtgctcgccgtcggcggcgccatcatttacgcgattgcggtcctcgcgctgttcggccgcaattgggtgatctcgctggtccgtggctag

SEQ ID NO: 7599 - DNA, 2310 bp, BradyrhizobiumColbertium
atggcggctcccatcaagttcggcgttggccaaagcgtgctgcgcaaggaggatgacgcgctcatccgcggcaagggccgctacaccgatgattttgcgccgcaggccgcgcttcgctgcctggtgctgcgctcgccgcatgcgcatgccacatacaccatcgatgcgagccgcgcacgcagcttgccgggcgtcgcgctgatcctgaccgccgaggacgtcaaggatctcggcaacctgccgtgcctgttcaatctcgagaccgatccgttcaccggcccgccttacccgatcctggccaaggacgaggtgcgccatgtcggcgatgccgtcgccttcgtggtcgccgagaccatcgaccaggcccgtgacgccatcgaggcgatcgacgtcaaatggtcgccgctgccggcagtgaccggcgtcgtcaacgcggtgaagaagggcgcgccgcaggtctggccggacaagccgggcaacgtgctgttcgacgtctcgatcggcgacaaggcggcgacggaagctgccttcgccaaggcgcatgcggtggccgagatctcgatcgtcaatccgcgcgtcgtcgcaagcttcctggagacgcgcgcggcggtgtgcgaatacgacgccaagcgtgaccatctgacgctgacggtcggcagccagggcagccatcggctgcgcgacatcctctgccagaacgtgctcaacatccccaccgacaagatgcgggtgatctgccccgacgtgggcggcggttttggcacgaaactgtttccgtaccgggaatacgccctgatggcggtcgcggcgcggcagctgaagaaggcggtgaagtgggcggccgatcgcaccgagcatttcatgggcgatgcgcagggccgcgacaacgtcaccacagccaagatggcgctggccgaggacggcaagttcctggcgatggactgcgacctgatgggcgacatgggcgcgtatctgtcgaccttcgggccctacatcccgcatgggggcgccggcatgctgccggggctttacgacattcaggcattccactgccgggtgcgcactatcttcaccaacagcgtgccggtcgatgcctatcgcggcgcgggccggccggaggccgcctacgtgatcgaacgtctggttgatgcctgcgcgcgaaagctcgacatgacgccggacgcgatccgccgcaagaacttcatccagccgaaggctctgccgtacaagaccgcgaccggcaaggtctacgattccggcgatttcgccgcgcatctgaagcgcgcgatggagatcgccgagtggaaggagtttcccaagcgcgcgaaactcgccaagaagcatggcctgatccgcggcatcggccttgcgagctatgtcgaggtgtgtggcaccatgggcgaggagaccgcgaatgtgcggctcgatcccaatggcgacgtcaccgtgctgatcggcacgcagtcgagcgggcagggtcaccagaccgcctatgcgcagatcgtcgccgagcagttcggcgttgcgcccgagcgcgtccatatccaccagggcgacaccgacgagatcgcgaccggtctcgggaccggcggctccgcttcgatcccctcgggcggcgtcagcgtcgaacgcgccacgcgcgaactcggttcgaggctgaaggagattgcggcgcaggcgctggaagcgagcgccggcgacctcgaaatctccgaaggcgtgatccgcatcgccggtaccgaccgctcaatctccttcgccgatctcgccaagcggcccggcgtggatccgtcgaagctcaacggcagcgcgacgttcgccagcgccgacggcacctatcccaacggcacccatgtcgcggaagtcgagatcgatccggccaccggcatcatcaagatcgtcaactatgtgatcgtcgacgacttcggcaagacgctcaatccgctgcttctggccggacaggtgcatggcggcgccatgcagggcatcggtcaggcgctgatggagcaggtggtgtatggcgccacagacggccagctcatcaccgcaaccttcatggactacgcgctgccgcgcgcggcggacgggccggctttcgtgttcgagaccaacaacatcccctgcaagaccaatccgatgggcgtgaagggggcaggcgaagccggggcgatcggctcctgtccggccgtcgtcaacgccatcatcgatgcgctgtggcgcgaatacaagatcgaccacatcgacatgccggccactccggagcgggtgtggatcgcaatccacgagcaccatcgccgtcacagcctgtga

SEQ ID NO: 7600 - DNA, 159 bp, BradyrhizobiumColbertium
gtggatcgcaatccacgagcaccatcgccgtcacagcctgtgatccccaatcaaacgcggaaagttcgggacaccatattcgacagcgatccaatgcgtgacgatccgccgccgcgctttggatggaatgaaatctgccgggcggtgttagtccattga

SEQ ID NO: 7601 - DNA, 456 bp, BradyrhizobiumColbertium
atgtttcgaatgaagcgagtgttggtcgttgggggcgcgctgttgctcggcatgggcgccgtttgggcgcaacaggactccgtcaaggaggtccaaagcctgatgaagggcaacggcaagaacgccggggcgatgtcggcgatggtcaagggcgagaagccctacgaccaggccaccgtggacagcgcgctcgcgcagttcgaggataccgccaagaagctgccgaacctgtttccggccagcgccaagggcgtgaagctcgatggcgattactcgacctcgcccaaggtctgggaggacagggccggcttcgatgcgaaaatcgcgagttttgccaaggtcgtcggcgaagccaagaccaagatcaaggacctcgattcgctcaaggcaacgatgcctgccatcggcagggaatgcggcggctgccacgagacctaccgcatcaagaacggctga

SEQ ID NO: 7602 - DNA, 1125 bp, BradyrhizobiumColbertium
atggcgaaaccgttcccctcgaagacccacatcggcaaccatatgctgcatcctgagaccttgatgctgacctatggctatgatccgcaattgtcggaaggcgccatcaagccgccggtattcctgacctccaccttcgtgttcaagacggccgaggatggccaggatttcttcgactacgtcgcgggccgccgcgagccgcccgaaggcatgggcgcgggcctcgtctattcgcgcttcaatcatccaaacagcgaaatcgtcgaggacaggctcgcgatctacgagcggaccgagagttgtgcgctgttctcctccggcatggcggccatcgcaaccacgatcctggcgttcgttcgccccggcgacgtcatcctgcactcgcagccgctctatggcggaacggaaaccctgttgacgaacacgcttgcgcgcctgtcgatcggcgccgtcggttttgccgacggtatcgacgaggcggcagtcaagcaggcgtcggaggacgccatgggcaaggggcgggtttctatgatcctgatcgagacgcccgccaatcccaccaacggcctcgtggacatcgcaatgatccgccgcgtcgccgacgcgatcggaaaggcgcagggacacacaccgatcatcgcctgcgacaatacgctgctcggaccggtgtttcagcggccgatcgagcacggcgcagatctctcactgtactcgttgaccaaatatgtcggcggtcattccgacctgatcgcgggtgcagcgctcggctcgaaggcgatcatgaagggcgtcaaggcgctgcggggcgcgatcggcacgcagctcgatccgcattcctgctggatgatcaaccgctcgctcgagacgctgagcctgcggatggagaaggccaacgtcaatgcacgcctcgtggcggacttcctgcgcgagcacccgaaggtggcaaaggtccattacctcggtcatcacgaggagggttcgccggccggacgtgtattcacgagacaatgcctgggggcgggatccaccttctccttcgacatcgccggcggcaaggaagcggcagtcaaattcctcaatgcgttgcagatcctcaaactggcggtgagccttggcggaacctaa

SEQ ID NO: 7603 - DNA, 135 bp, BradyrhizobiumColbertium
atgacccattccggcgttcccgccgacatccgccgcaaaatcggcgttctggattccacgatccggctgtcgatcggcatcgagaacgcatcggacctgatcgcagatctcacacaggcgctgaacgccgcttga

SEQ ID NO: 7604 - DNA, 126 bp, BradyrhizobiumColbertium
ttgagcgcaatcgaacgcgctcagagggcggtgtcgttcgtgacattctccgcgccgaacccgttcggaccgccttccaagagaccgtatttcagtctattcccgttcccggccagggcgagctga

SEQ ID NO: 7605 - DNA, 927 bp, BradyrhizobiumColbertium
atgttgcaacgaacaattctggtggtgctcctcgctgcgattgccgctgccggcgtctattggtggctcagcgcgccggtggttgcggccgcgagcgccacgccctcgcgcacgcctgatctcgccaatggcgaggtgatgttcaacgccggtggctgcgcgtcctgccacgccgttcccaatcagcccgaccgtctgaggctcggcgggggcgtttcgatcaagtcgccgttcggaacgttccacgcgccgaacatctcgccggatccgaacgacggcatcggcaaatggacggaggcggatttcgtcaacgcggtgatgtatggcgtctcgccgtccgggcagcactactttccatcgtttccctacacgtcctatcagcacgccaggcgcgaggacgtgctggatctctttgcctatctgaaaacgctgccggcggttgcgggcaaggtgcgcgaccacgacctcggctttccctttcacatccgccgcaatgtcgggatctggaaacgcctgttcatggacgacaggccattcgttgccgacggtagcaagtcgccgcaatggaatcgcggcgcctatctcgtcaacagctttggccattgcgccgagtgccacagcccgcgcaatgcgctgggcggcatcatcgcaagccagcgctttgccggcggtcctaatcctgaaggcgagggatgggtgccgaacatcacccagaagcgccttggcgagtggagcgtgaaggacctcgcctatttcctgaagaccggcgaactgccggatggcgacagcgtcggcggttcgatgacgcgtgtgatcaagaatacctcgcaattgccggaggcggacctggcggcgatggcggagtatctcaagtcgctgtcgccggcggaggggccgccccggccggcacgcaaggaggggagctag

SEQ ID NO: 7606 - DNA, 246 bp, BradyrhizobiumColbertium
atggttcccttcttcgttcagatcaagtgcaagctcggccagtcttatacggtggccaatgcgcttgccgaggccgagatcgcctccgagatctactccacggccggccagtacgacctcctggtgaagttctacgtcgacaaggacaccgacatcggtcatttcgtcaacgagaaggtgcaggtgctgccgggcatccaggacaccctcaccatcatcacgttcaaggcgttcggtaccggctag

SEQ ID NO: 7607 - DNA, 1980 bp, BradyrhizobiumColbertium
atgtgggcctttttcgaacgtctcctcgactcgtccatgctgtcgccgcacggcatctgcctgctgtgggacccggagttgatctggctccacgtcgtttccgacgcctgcattgccgctgcctatttctcgattccgtttgccctcgcgatactggtcatcaagcgccgggacctcaagttcggctgggtctactgggcgttcgcgatcttcatcatggcttgcggcctcagccatgtgctgtcgatctacacgctctgggttccggtctatggcgtcgagggcatggtcaaggcggccacggcggtcgcgtcggtcttcaccgccgccgcgctctggccactgctgccgagggtcctgaccattccatcaccgttcgagcttcggcaggtcaaggcggcgctcgaggaagaggagatcaagagccgcgacgccgcgctcctgcttcagcaagtcagcgacgcccaacgcgcgctgcgcgccagtgtcgcgcgcctcaccgcgatcgtggagaccgcggttgacggtgtcatcctgttcgatgcgcatgaccgtatcctgctgttcaatccggcctgcgagcgcttgttcggctaccgcgccgacgaggtgatgaaccggaacgtctccatgctgatgccagaggcggaagcaacgcccgacagccgcgcgagacatttcgcgaccggcggcgaggccatcgcccggcgtaaggatggctcgacctttccgatggacctctcggtgggccaggccaggcaggacggcgaactgatcttcgtcggcatcgtccacgacctgaccgcgcgcaagctgaccgagcagcagcttcagcaggcgcagaagatggagacggtcggccagctctccggcggtatcgcgcacgacttcaacaatctcctgaccgtgatcatcggcaatgccgagcacctcggcgagcagctcaaggagcggccggagctgcggcgctttgccgacgacatctgccagtcaggggagcgcggcgccgagctgacgcagcggctgctcgcattcagccgccgccagctgctccagcctcaatcgattgactgccggagcctgctcgattccatgttcaagctgctcaagcgaacgttgcgcgaaaacatcgagatcaggacgacctccggacacggcacggtcctcgcctttgccgaccgcagccagctcgaatccgccgtgctgaatctcgcgctcaacgcgcaggatgccatgccatcagggggacatctgacgctgagcacggagttggctgcgatcgacgacgattaccgtgccctccatcccgaagtcgtacccggcagctacgctttgatctcggtcgccgacgacggcgaaggcatgacgcccgatgtcatcgaacgcgccttcgagccgttcttcaccaccaaggaggtcggcaagggctcgggcctcggcctcagcatggtctacggcttcgcaaagcaatcaggcggccatgtctcgatctacagcgaggcgggcctcgggactacggtcaggatctacctgcctcgcgccagcaccggacaatcacacgtcgatcttcccgaaggcgaggacacggcgccgcgaggctacgagacgatcctgatcgtcgaggacgatccgttcgtccgctcctccgtcattcgcagggtggaagctctcggatatcgcgtcgttgccgcggtcaacggcaaggatgccctgcagcaactgcggagcgatcccagcatcgacctgctgttcactgacatcgtgatgcccggtggcatgagcggctgggagctcgccgatcaggcgcggcgggttcgtcccggtctgccggtccttttcacctccggctacgcgctggagaccctggtcgagcagggccgcgcgcaggcgcaagcgatcgtgctgaccaagccctaccgcaaggtcgagcttgcccagcggctcagggacgcattggtcgtggcagccgttgccacctag

SEQ ID NO: 7608 - DNA, 813 bp, BradyrhizobiumColbertium
gtgtatccggccatgacgaccccggtcgccctcactatcgccggctcggattcgagcggcggcgccggcatccaggccgacctcaagacatttgccgcgctcggcgtttacggcgcctccgtgattaccgcgctgacggcacagaacacgcgcggcgtgagcgggattcacgcggttcccgccgacttcgtcaccgcgcagatcgacgccgtgttcgccgacctcgagattggcgcggtgaagatcggcatggtggcccaggtcgccagcatcgacgccatcgccgccgcgctgtcgcgcttggcgccgcggcacgtcgtgctcgatcccgtcatggtggcgacctccggcgaccgcctgctcgccgccgaggccgtcgatgccctgcgcacgggactgatacccttggcctcggtgatcacgccgaacctgccggaagccgcggcgctgctcgacgaggttgttgcaacgagcgaagccgagatcgaaagccagggccgtcgcctgctggcgctcggctgccgcgccgttctgatcaagggcgggcacggcgagggcgccgagagcatcgactatctggtcgatgcgaacaacaccatcgcgctggcggccccccgggtcgccacccgcaatacccatggcaccggatgctcactgtcgtcggccatcgcggcaggtctcgccaagggcgaagatctcgagcgtgccgtgcgcaatgccaagtcctggatcagcgccgcgatcgaggccgccgaccgcttcagcgtcggtcatggccacgggccggtccaccatttccacaggttctactga

SEQ ID NO: 7609 - DNA, 798 bp, BradyrhizobiumColbertium
gtgagtgacgaaagccaggagcggcgctttcgcacgttgttcatctccgacgtccatctcggagcccgcggttctcaagccgatcttctgcttgatttccttcgctaccacgatgccgacacgatctacctcgtcggcgacatcgtcgacggctgggcgctgaaatcgagctggcactggccgcaatcgcacaacgacctggtccagaagctgttgcgcaaggcgcgcaagggcgccaaggtcatctacattcccggcaatcacgacgagttcctgcgcaactattacggcacgcatttcggcggcatcgacgtggtcgagaacacggtgcacaccggcgtggacggcaagcgctatctcgtcatccacggcgacatcttcgatctggtggtgcagaacgcgcgctggctcgctcatctcggcgacagggcctacgacttcgcgatccagatgaatcgcctggtcaacttcttccgccgcctgttcggcgtgccttattggtcgctgtcgcaatgggccaagcagaaggtcaagaacgccgtcaactatatcggcgcgttcgagcaggcgctcgcggctgaagcacgccgctacgacgccgacggcgtgatctgcggccacatccactacgccgtgatccgcgacgaggccggcattcgctacatgaattgcggcgactgggtcgagagctgcacggccctggtggagcatgacgacggccatttcgagatcatcacctgggcggatcatttgcagaggccggcagtcgtcccgcaggtcgcggcgagagccgcatga

SEQ ID NO: 7610 - DNA, 1047 bp, BradyrhizobiumColbertium
atgatgcgcatcctggtcgcgaccgacgcctggcaccctcaagtcaacggtgtcgttcggacgctgaccaagctggccgacgccgccagaggcctcgacgtcgacttcacgttcctgacgccgcaatcgttccgcaccttcgcgatgccgagctatcgcgacgtgcgcctcgcgatgccacgcccggcccggatcgcaaagctgatcgaggaggcgcgccccgacagcattcacattgcgacggaagggccgatcggactgatggtccgccgctattgccgccagcgcaagctgccgttcacgaccagcttccatacccgcttccccgaatatgtccgtgcccgcgtgcccgtgcctggctcgctgatctggcgtgcgctgcgccgcttccacgagcccagccgtgccgtgatggcggcaacgccggcactggcgcgcgaactcagcgagcgtgggttcgagaatgtcgtgctgtggccgcgcggtgtcgacaccggcttgttccatccccgcgccgtcgatctctgtctgccggcaccggtgtttctctcggtcggccgggtggctgtggagaagaacctcgaggccttcctcgacctcgacctgcccggaaccaaggtcgtcgttggcgacggcccggcgcgcggctcgctggaagaagcctatcccgacgcgatcttcctcggcgagaagcacggcgaggacctcgcggatatctatgcggccgccgacgtgttcgtgttcccaagcaagaccgatacattcggcctggtgctgctggaggcgctcgccagcggcctgccggttgcggccttcccggtgaaggggccccgcgacgtgatcggcgatgcgccggtcggcgcgctcgatcacgatctgcgcaatgcatgctttgccgcgctcgagatctcccggcaggactgcgtcgagttcgccgccaagtacacctgggaggtctctgcgcgggtcttcatcgacagcattcaggccgtcggggcggtgctgccgggccggagcgacgcggaacggccgcgtttcgtcgcctag

SEQ ID NO: 7611 - DNA, 573 bp, BradyrhizobiumColbertium
atgaccgaacagctcctccccatcggccctgccgatatcgacgccgcagcgcgcgtgatcgcgccttatgccatccgcaccccgctgttgtcctttcccgtgctcaacgagcgcgtcggcgcaaaagtgttcctgaagccggagatgcttcagcgcaccggctcgttcaagttccgcggtgccttcaacaaggtgttctcgatcccgcacgacaagcgcgccggcggcgtcgttgcgttctcctccggcaatcacgcccagggcgtggcggccgcggcaaagatcctcgagatgcaggccaccatcgtgatgccggcggatgcgccgctgtcgaagcgcgagcgcaccaagtcctacggcgccgaggtcgtgctgtacgatcgcgaccgcgacgatcgcgaggcgatctcacgcggtatcgccgagaagcgcggtgcgacgctggtcaagccctatgacgatcccttcgtgatcgcagggcagggtacagccggccgcgagatcgcggaagacatggcgccctcggcctcagccccgacatcgtggtggcgccggcctccggcggcggcctga

SEQ ID NO: 7612 - DNA, 438 bp, BradyrhizobiumColbertium
gtggcgccggcctccggcggcggcctgatcgcgggcgtcgccaccgccgtcaaggcccgctatccgcaagccgagatcgtagtggccgaacctgaatccttcgatgaccacggtatttcgttgaccgcgggccaccgcgagccgcatcccccggcgggccgcaccatctgcgatgcgttgatggcactgatgcccggtgagatgacgttcgcgatcaacagcaagctgctcgcgcgtggcgtcactgcatcggacaaggaagtcggtgctgccgttgcgttcgcctatcgcgagctcaagctggtcgtcgagcccggcggtgccgtcggccttgccgcgctgctcgccggacgtctcgacgtctcaggcaagaacgtcgtcatcgtgctctccggcggcaatgtcgacgccgatctgttcgccgagctggtggcctag

SEQ ID NO: 7613 - DNA, 1824 bp, BradyrhizobiumColbertium
atgttccgcctaaagcttttcctgacgacggttagcctgatggggagcctgttcggcttcgcctgggggcctgtttccgcgcaagtcgccccggtccagccggctcccaccgcggtgcagggcccggagcagcgggtcgccttggtcatcggcaatgcgaactaccagaacgcgccgcagcttgcgaaccccgacgacgacgcccaatcgatggcccagttcctgaactcggccggcttcgaagtggtcgcagcgaccgacctgacccagaacgacatgctgcgcgtcgtccaggatttctccgccaaggtcgcatcgcgaggtccgaacacggtggcgatggtctattacgccggtcacggcgtgcagctcgccggcgagaattacctcgtccccgtggacgcgaaagtgtccaaccccaccgatctcgtcaacaattcggtgcgcctcgtcgacgtgatgtcgacgctggagacgatcccgagccggatgcgcatcgtcattctcgatgcatgccgcaacaatcccttccctgaggtcaacgatgccggccgcggcctggccatcgtcgatgcgccgaacggctcgatcgtcggctactcgactgccccgggcgcagaagcgctcgacggcacgggcggccacagcccgtacacgcaggcgttcctgaacgtcgcacgcgagcccaacgtgccgattgagcagctgttcaagcgtgtgcggctgcaggtgaaccagacgaccagcggtgcgcagatcccgtgggagagttcgtcgctgacctccgacttcaccttcttcggcgacaccgccgttgccgccaatcgtgcgccggtgaaggcgccggtggtgcagatggcgtccaatctgccgagccgctcgacccgccaggcctatgactacgtcgtgtccgaaggccggccggaatattatcaggagttcatcaggatgtacccgcacgacccgctgtgcgaccacgtccgctggctgctcaacaatatcctgatctcgcaggcctggcacaaggcggtgctcgccaattcgccggtcgcctataagagcttctatgacagctatggcaacagcccctatgcacagatcgcgctgaagctgcaggcgcagccgaagcagatccccctgatgcaggcgaccaagttcctggctccccagagcattgccccgaccttcaagatcggcaatctgggccagcccaaatacatgccgctgatgcagcagggcaatggcggcgcgcagatgggtggcaacctgccgctggtgcagaagccggtcgacggcagcgtcatcgccaagcccggcaatggcggcccgatcgtcgggctgccctcgggcaacaaccagcccaaccagcacaacggcgcgccgacgcagaccccaggcaagatcgtcacgctccctgcaccgaccaacacgaccaacggcaaggtcggcattggtaagatcttgacgctgcccgcgaccaacaatccgcacggcggcaacaaaaccggcaatgccaacggcacgacgaacggctcgccgggcaagatcgcgaccatgccggtgcatggcggcaagggtggcacgaagatcgatgtgaggcccgttcggacgcagaaccacccgatccgcatcaacaatggcaacaccggcatcgtgaagcccaacaacaatccggtgagcaaggtgcaggtgctgaacaaccgtccgcagctcaacacgatgccgagccgcatggtcagcagcaacaacaacttccgccagtcgatgaaccaggcgccgagcatgagtggcggcagcaaccgccgcggcggcttcatgcgctga

SEQ ID NO: 7614 - DNA, 444 bp, BradyrhizobiumColbertium
atgctgaaatcgatcgatccggtcctcacgcccgacctcctttggctgctcgccgccatgggccacggcgacgatctcgcggtcgtcgacgccaaccatcctgcggcccgcatcgcgcagagcacatcgtcgcagcgcctgatccagttgccgggcctgcagatggagacggctgtccgggccatcatgacactctttccgctcgacgatttcgatcccgatccggtccgcgtgatgatgccagtcgatgaccccgagcgcgtgcccgaggtgcagcgcgcggtgctggccgagatcgaacgtggggccggacgcgccgtcgcgcccggcaagctctcacgcacggatttctatcgcgcggcggctgcggccttcggcgtggtgcaggtgggagacagcaggggctacggctgcttcctgatcaggaagggagtcatcagctag

SEQ ID NO: 7615 - DNA, 384 bp, BradyrhizobiumColbertium
atgtctgagctcccgcgcgtcggcgccttcgcgatcattccgaacaacgatcttcccgcggcgattccgttctgggagcgccttggcttcgcacgcaccggcggcgacgccggctatgtcatcatgagcggctggggatgcgaggtgcatctcacgcaagctggcgacggcccatggcgagtgccgcagcataatcctttcggcattttcattcgcacgccagacgtcgaggcgatcgccgcacgcgtcgaagatctgatcatccgtccgggcggcgtgctgcgccaccgcgaatggggcatgtacgaagtgggcatcaacggccctgacggcctattggtccgaatcggctggccttcggagctgatgcgccgcgctagctga

SEQ ID NO: 7616 - DNA, 348 bp, BradyrhizobiumColbertium
ttgtgtctattcgttgctgtcatcctgtcgttgctgccggccgttgcgcccgcggagcccgcgcaaaagcgccccaagccggtctggaagggctacggcttcctgccgggctatcgccagccgctgagcaacagcattccgctctacaaacagaaggacgcgatgcggcgcatgtcgcgcgccgaccggcgtcactggtacatcgacccggttccgcaatattaccgatggaacggcgagtggcattatttcggccggccaggcttcaacggcggacgctacaatggcggcagtttcggtccgtgctggacgcgaacgccgattggaccgatctggaattgcggatga

SEQ ID NO: 7617 - DNA, 1425 bp, BradyrhizobiumColbertium
atggccaacgaagcattcgccctctcgcccatgtctgcccgcgcggccgagccgaacgagcaggattacgacgcgatccgcgaagccttcatggagaccgcgcgcggccgctggttccttggcgaatatgccaagcgcaaccgcaatgccgacacgcgcatggtgctcgatgcggtcgcgaagatcgaggaaaccctggcggcacagcgccaacccgtcgtcgaggaccgcctgcccgaggcgctggtcgagatacgccgcgcgatcggcgaggctgagacgatcgcgatcgcggcgtccaatcccgcggcgatcgaggccagcctcgcgccgataccgcgcggcgtgcgcatcatcaaggagatctcctggcgctggcgcgagatcggcgccgacgggcggatctgcgatctcattgattcgcagctcgcctcgatcgaggctgcctgcggccagctgtcgaccatcgatccccgcctcgagctcaaggcggccttcgatctgctgagggatcgggtcgagcagcttggcggcgacgctacgccgcaggccgcatcttctgcgcgggctccggagcaggagccgccgtcatccatcgcagaaagcgcgcctgtcgagacggcccctgtggcgatggccagcgaagctcccgtggcttttacggagatgcaggaggagatcgcagcagctcccgacgtcgaagcagctggcgtcgcggaaactgccgccgttgccgatcaggcaacggacgcggccgtcgcgccggagatcgtcgccgaaagccagctcggtcttgcaagagccgctatggacaacgtcgctcccgacggtgccgcgcttgaggacgcctcgcttgaagagccggcgattgaaccgccggccgtcttgacggaggcaatcgacgcggtcgcattcgacgcggcagcggaagccgaggacgaagccatcctcgacgccatcgcgctggagatggccgcgcccgatcctgacttcgacgagatcatcgaaccggtcgagatggtcgcgccaacgccggaaccgattgcggcggaggttgcaacacccgttgccgccgcactgccggagccgatcgcgccagagccagtcgtcgcagcagccgcggaggagcccgcggacgcgccgatcgcgatgaaatcgctcgcgcgcctgaccgacgccattgcggaggccgcggccgagatggagcagccggccccggccatggcggcggcggcgtcattcgccgcagcaccgaccgcgacgctgccgatgccctcgccgctgccagcgtctttgcccgaaccgtcgctcggcgccaccatcctcgccagcggcattctgcaaaaaccccgcgcgccagccaacgacccgctcgccccgatccgccgcatgacccaggccgagaagatcgcgttcttctcgtaa

SEQ ID NO: 7618 - DNA, 1143 bp, BradyrhizobiumColbertium
gtgagcctcgcggtgttctattcggccttctttgcggttctcggcacgcatatgccgttctttccggtatggctgaaggcgatcggcatcgacgcggcctggatcggactcatcaacgcgctgccggcgatcacgcgcttcaccacgctgccgcaggtcacggccttcgccgaaaagcgacatgccatccgcgccggcatcatggtgtcggtgctggcgacggcggtcgggttttcggtcgtaggcctgcagcagcagccgctggcgctgttcctgatctacgcgctgacctgcatgatgtggacgccgacgatgccgctgaccgatgcctatgcgttgcgcggtgttgcgcgctacgggctcgactacggacccctgcggctatggggctcggcggcgttcgcggcgggatcgctcgcctgcggctatcttgtcgacctcatcgcaccgcgcgacctgatctgggtcatcgtcgcctgggccgtcgtcgcggttctcgccagcctgttgcttcagccgctcgacgatcccgggcggcgggcgccggagaggcacgccggcaaggcgctgctgcgcgatgccgccttctgggccgtgatcgcatcggcggcgttgatccagagcagccacatcgccttctacaccttctcggcgatcaactggcagcttcagggtctcagcggactgaccatcgcgaccctgtggacgctgggcgtgttggccgagatcgtcgtgttcgcgctgtcgccgcgcttctcgctgcagccgtccacgctgatggcggtcggcggtttgagcgccgttgtgcgctggatcgtcaccgccagcgagccgccgctcgcgctgctcgcgatcgcccaactcggccacggcttcagcttcggcatgaccatcctcggcaccatgagtctcctggtgcagcgtgtaccctcgcatcagatcgcacgcgggcagggctattacgccgcgtgcaacgggctgctcggagcggcgacctcgatcgcgtcaggcgcgatctacgcgcacatcggcgacagcgtctattacgtcatggccgcgatggccgcagccggggcgcttctgatctggtcggcgcggcaccggctcaaggctcagccccacagcgaggcatccggcgggtag

SEQ ID NO: 7619 - DNA, 996 bp, BradyrhizobiumColbertium
atgacttccacgaaatttcatggtctggcggtgcgaatcgagcgcttcccgatcgcgggcagcttcaccatcagccggggcgccaaaaccgaagccgtgacggtggtggcggaggtgagccaggaccgcctgacgggccgcggcgagtgtgtgccctatccccgctacggcgagacgcccgaggcgacgctggccgccatccaggccatgcagcaggcggtcgcgggcgggctgacgcgggaggccctccaggctgccatgcccgccggagcggcccgcaacgcattggattgcgccctgatcgaccttgaagccaagtcggccggcctgcgagcctggaacctgctcggccgcccggagccccgcgagcgcaccaccgcctacacgatctcgttgggcacccccgaggccatggccgccgcgaccgcccaagcggcgcatcggccgctgctcaagatcaagctcggcggcgacggcgatcctgagcgaatcgcggcggtgcgcaaggccgcccccgaatcggagctgattgtcgatgccaacgaggcctggagcgagaccaatctggagcgcaacctcgccgcctgcgccgaagccggagtgaccctggtggagcagccgctgccatccggcaaggacgaggcactggcgcggatcaagcgcccgctcgcggtctgcgccgacgagagcgtgcatgaccgctcttcgctggcgccgttgcgcgagcgctatgacgccgtgaacatcaagctcgacaagaccggcggcctcaccgaggcgctggccatggccgatgcggcgcgcgcgctcggcttcgagatcatgatcggctgcatggttgcgacctcgttgtcgatggcgcctgcgatgctggtgacgccgcatgcgcgcttcgtcgatctcgacggtcccctgctgctggcgcgcgaccgcgatcacgggctgcgttatgacggcagcctggtctacccgccggatgcctcgctgtggggctga

SEQ ID NO: 7620 - DNA, 1134 bp, BradyrhizobiumColbertium
ttgagcagcgatccgaagctggaacggattgccaagggcaacgcactggcactttgcgcgaccggaacctggacggcgagcttcgcgcccgtcctggagcgcatggtggcggacgccgagaagctcgcaggcaccccgcaaagcattttcatcgacgtctcggaggtcgccaagctcgacaccttcggcgcctggctgatcgagcggctgcgccgcagcctgacccaaggtgccgtcgaggcgcagattgccggcctctcggccaattattccagcctcgtcgacgaagtgcggcgcgtccgggcgacccccgtggtcgacagcagcccgatcaccatcagcggcatgctggagcagatcggccggacggtggccggcatcgccgggaccgtggcgggcctggtcgacatgctcggcgcggtgctcgcggcgggctttcgcgtcctggtccaccctcgctcgttccgtctgacctcgaccgtgcaccacatggagcaggtttgctggcgcgcggtgccgatcatcgtgctgatcaccttcctgatcggctgcatcatcgcgcaacaaggcattttccatttccgccgcttcggcgcagacatcttcgtcgtcgacatgctcggtgtgctggtgttgcgcgagatcggcgtgctcctcgtcgccatcatggtcgccggacgctcgggcagcgcctacaccgccgagctcggctcgatgaagatgcgggaggagatcgatgcactgcgcaccatgggcttcgatccgatcgaggtcctggtgctgccgcgcatgatggccctcgtgctggcgctgccgatcctcgccttcctcggcgcgatggccgcgctctatggcggcggtctggtggcctggctctatggcggcgtccagccggaagccttcctgctgcgcctgcgcgatgccatctcgatcgaccatttcatcgtcggcatcgtcaaggcgccggtcatggctgccgtgatcggcatcgtcgcctgcgtcgaagggctcgccgtgcagggcagcgcggaatcgctcggtcagcacacgacggcgtcggttgtgaaaggcatcttcttcgtcatcgtcatggacggcatcttcgccattttcttcgcctcgatcgggatgtga

SEQ ID NO: 7621 - DNA, 441 bp, BradyrhizobiumColbertium
atgcgcgaatatttgcgcgtctcgcagcggctgatggacgagatcaccatggccaagctcgccatggtcggtctcaagcctgaagtcgccgagcgtttcccctcggaactttccggcggcatgatcaagcgcgtcgcgctggcgcgcgcgctgtcgctcgatccggatctcgtcttcctggacgagccgacctcgggcctcgatccgatcggcgccggcgatttcgacgagctggtccggaccctccagcgcactttggggctgacggttttcatggtaacgcacgatctcgacagcctttacacagcatgtgatcgcatcgccgttttagggaacggtaagatcattgcggcagggtcgatcgccgacatgcaggcctcgcagcatccctggctgaggcagtatttccatggcaagcgcgcccgcgcggtcatgagttga

SEQ ID NO: 7622 - DNA, 861 bp, BradyrhizobiumColbertium
atggaaacgcgggcgaattacatcttgatcgggtcgttcacgctggcggtgatcgccgcggcgatcggcttcgtgctgtggttccagtcgctgcacaccaccaagcagcgcagtccgctgcgcgtcgtgttcgaggggcccgcggccggcctgcgcaacggcggaagcgtcaatttcaatggtatcagggtcggcgaggtggtctcggtgaagctggacaacccgcggcgggttgtcgcactcgccatgatcgagaacaacgccccgatccgcaaggacacgctggtcggcctcgaattccagggcctgacaggcgtcgccgcgatctcgctcaagggcggcgacgaggccgcgcccccaccgccgctcgatcaggacggcatcccgatgctcaccgccgatcccaacaagcttcaggacgtcaccgaggcgatccgcggcacgctgcagaacatcaacaagatcgtcgccgacaaccaggagtcggtgaagaactcgctgaagaatctcgagaccttcaccaactcgctcgcccgcaactccgagaagatcgacggcgtgatggccaaggtcgacggcgtgatgctcaaggccgacaacctcatgctcggcctcaacacgctggccggcggcaaggacggcggcgagctgttccaggccgtgaaatcgatccgcgaactcgccgaagatttcgacaagcgctcgggcgcgctgatggccgacggccgccgcaccctcggcgacatcagccgggccgtgaacaatttcgaccgtaacccgacccgagtcctgttcggcgccagcaactcgtcgcagccggctccgccgcccgagccgccgaagcccgtgccgaggcggtag

SEQ ID NO: 7623 - DNA, 5703 bp, BradyrhizobiumColbertium
atggcgaacactccgaaaaaggtcaaagaccccacagaagttgcgctttctgcgatccaggaagccctgaacatcagtgacacggctgccgataccagccgcaacgccaccatgcgcaacgaagcggcgcctgctgtaccgcccgtgcctccggttttcgatgaaccgagcttcgagccgcgaccggccgccaacgagcggtcgaccgtgttcgatgcagtcgaggagccgctctcatcgcgccgccccgcgaatgacgaccgcgagaccatcggccagctgctccaggcgcttcagaagggccgtcctgcccgcagtgtctacaccttcgccaccatcttcgccggcgtctggctcgccgcctgcgccgcgctgaccatcggcttcctgccgtcgatccagaccgccatgggccagagcggcggggtcctcgtcattgccggcctgattgcgatggtgctcgcgccgatcatgctgttctacttcctcgccagcctcgtctggcgcggacaggaaatgcgcatgatcgcgcaggcgatggcgcaggtcgcgatccgcttctccgagccggaaggctcggcctccgattccatggtcaccgtcggccaggccatccgccgcgaggtcgccgcgatgggtgacggcatcgagcgcgcgattgcgcgcgcaggcgagctcgagacgctggttgccaacgaggtcgccgcgctcgaacgcgcctattccgacaacgaggtgcgcattcgcgacaggcttcaggacatcgcccatcagcgcgacaacctggtcggccaggccgagcaggtccgcagcgccatctccggcgtccagatcgacctgcgccacgacatcgcgctaatctcggacgcgatcgcctcgcgcgtcgacgaggtcgccaagtccatcaccggcgcactggaagagcgcggtgcccacatcacgcaggcgctgagcaatgccggcgacaacatgatcctggctctcggcgaacgcggcggcgacctgctcgaccgcctggaggaagccagcaacgagaccacgcgcgccgtactcgatgcgagcgagcggctgaccaccagcctcaacttcaaaaccggtcacgtccacgacgagttcgtcgatctcgccgaccgcgtccatgagatgctgaacgagcgcatcgaccgcatcaccggcgaattcgagcagcgttccgccgctatcgtcgacggcatctccgagcgcaccgagcaggtgcacgattccctgaagaactcgtcggactcgctgctgctggagctcgagctgcgttccaacgacatctcggccaagatcgacgatgccggcaaccgcctcgccggccagatcatgacgagcggcgacaaggccagcgaagcgctcgacgccaccgtcaacgctctggtcgccaaggtcgtcagccagacagagacagcccacgattcgctgtcgctgcagatgagtgcctttgacgagctggtgcggaaccagggcaccgagctggtcgagaagttcgcccgcgactccggcacgctgggcgcgctgatcacgcgccacatctccgagttcgaccgcaccgtgaagaccttcggcggcgagatcgtcgagcgcatgggccagcgcacgcaggacatcgccgagacgctcaagacctatgtcgacaatttcgacagccgcttcacctccaacggcggcgagataaccgcggtgctcgaccagcgcctcgtgcagttcgagaccacgatcggcgaacgcgtcagcaacctcgacgcctcgctgaacggcaagatcgccagcctcgacggcacgatcgaaggccacatcaggaccttcgacgagcaactcgtcggccgcgtcgccgcgatcgagcactcgttcgacacccgcgcgaagtccatgaccgaaaccatcgacgggcgcatcaacactctggcgacatcgttgaccgacggtgccgcacaggcgatccagtcgatcgactcccgcctgacccacctgacgacgacgctcaccggcggcgcatcgcaggccatcgaaaccatcgatgcgcgcctcaacctcctcacgagctcgctcaccgacggtgcgtcgcagaccatccagtcgatcgatacccgcctgacgcatctcacgacgacgctcaccggcggcgcgacccaggcgctcgaatcgatcgactcccgcctcacctacctgaccaccgcggtcacgaacggcgcctcgcaggccgtacagtcgatcgacacgcgtctgaccctcctcacctcgaccctcaccgacggcaccgcgcaggcgatcgaggcggtcgaccgccgcatcaccggcgtcaccgagatcatcgacggccgcagcatgcatctgaccgacacggtcaccgcgcgcttccaggagatccagcaggccatcgagaccaaggtcggctcggtcgccagcgacatcgacgtgcgcgtggcgcagttcgaggacctgctcggctcgcgcgtcgaggccgtcgccggccgcatcgagagcagcggacgccaggccagcgaggacatgatgtcccgcgccgagatgatctcgaccgcgatccgctcgcatgtcgaggacgccgagcgctcgctcaccaacctcgtcgtcaacaccagcgagacgatccagaccggcgcgcgcaccgcccagcagtcgctgctgacagtctcctccgacgtcaacgcccagctcaagatgacctcggccgaggtcgagcaggcgctgactgcggtgggcacaggcgcggcgaactcgatcctgaccagcgcccgcgaagcgcagtcgacgctggtcgcggcatcgggcgaggcctccagccagatcaagggactcgcggccgacgtcgaacgcacgctgtcggcggctggctccgccaccgcggcctcgatcctggccggcgcccgcgaggtgcagaccaccctcgtcacggcgtcgtcggatgcggccaaccaggtgaagacgctcaccgccgacgtgcagcgttcgctgtcgatggccggcaccgctacggcggaatcgatcaccgcaggggcccgcgatgcgcagagcgccttgatcgcggcttcgaccgagactgccaaccagatcaaggcgctgtcctcggacgtgcagcgctcgctcacgatggcgggcacctcgacggccgagaccatcatgagcggcgcccgcgaagcccagagcacgctggtcacggcgtcgtcggacgcggcgagccaggtcaagtcgctggcggccgaggtgcatcgttcgctctcgcaagtcggtcagtcgaccgccgagacgatcaccagcagcgcccgcgacgcccagagcaccctgctcgcggtctcggccgaacagaccaaccaggtccgttcgctcgcggccgagatgcagcgcgcgctggcaaccgccggcggcgccaccatcgaggcgctcaccagcggcgttcgcgaggcccaaacctcgctcgtctccgcctcgaccgatgcggcgacccagatcaagtcgctgacgacggacatcgagcgcacgttgaccgcggtcggcgccgacaccgcctcgaccatcctcaacagcgcgcgcgaggcgcagatctcgctgacctcgacctcggccgacgccgcgagccagatccgttcgatctcgaccgagatcgagcgcacgctgagcgcggccaccgccaacgcgaccaacgacatccagaccagcgcgctcaacgcccagaacgcgctgatctccgcctccaacgaggcgagctcgcgcgtcaagtcgagctcggccgacgtcgagcggtcggtgctcgccgccagctccagcttcggccaggccatgaccggcaagaccgacgagatcgtcacctatgtgacgcagcaggccgatcgcctgtcgaacatgatcgacgccaagcgcggcgcgctggtggacgcgatcggctcgaaggccagccagctcacgctcgacatcgaccgcgtcacctccgacgcgctgaagtcgatcgagacgcgcggccaggccttctcgcagaccatgatgggcaacggctcggaagtcgcccgcaccatcaatgcggcgagcgagatcgccacgaccgcggtcggcaagtcgctcaaggacctcgagcaggcctcgcggtccgcgatcgaccagtcgcgccaggtttcgatcgcggccgtcacggagatgcaggagaccagcaagatcttgcgcaccgacacggtggccctgttcgagcgcctgcgcgaaggcaacatcctgctccaggaggtgctgaccggtgcgcacgacaacctcaactcgctcgagcgggcgctggtgacgcgcgtcgccgacttcgtctcggcgatgaacgacgtcacctcgcgcaatggcgctgcgacgcagaacctggaagagcagctcaacgtcttcaacagcaagaccacgaaggcgctgcaggatctcggcgagctgtcgacccagttcgacaagcacggccaggcgctggtcgaggccgcccaggtcgtcgagcagagcaacaagaacaccaccgcctcgctcgccgaacgcaagcaggcgctggaatcgctcgtcaccaccatcgacctgcgaacggccgacctcgaccagcggctgtcgcgcttcaccggcctgctcgatgaatcgctggcggcggccgaagagcgcgcccgcgacatcgcccgcgtcgtcgcggagacggccggcgcaggctctgccgcgatcacccgccagttcgaggcggtgcgcgcggcgtccgaggaggagcaccggcagaccatcgagaccatgcacgacatctaccgccagaccacggacgaggcggatgcgatgttcaagcagtcgaccgagaagttcaccaatctggtcgccagcatgaagcagatggccctcgagatgcacaacgagctcgaagccacccgcaatgagctgcgccgcggcgtgctcgagatgccgcaggaggccgccgagagcacggcgcagatgcgcaaggtgatcgtcgaccagatcgaggcgctcgccgagctcaaccgcatcgtggctcagcacggccgcggcctcgacgtcaccaccgctggccgtgccggcgtccatcgccaggaggagccggtgctggccgctgtcggcggccggccgcccgagacccgcacgcgcgacaccggcagcgcctcgacgctgccgccgccggacctcggcatgccggcgccccgccgcaccgaagcgccgccggtggcgcccgccagcaacgatcagggccgcgacggctggctatcggacctgctcaaccgtacggacgcccaccagggcgccccggccggacgtgaggccccgcgcggccgcgctgcacccgcaccgcagccgcaggcaccgcagggtggcggcaatccgctggaatcgctgtcgctcgacatcggccggctgatggaccgcaacctcgccgccgagatgtgggatcgctaccagcgcggcgagaacaaggccttcaccaagcgcctgtacacgcccgccggccagaaggccttcgacgaggtcgcccgcaagtaccgcgccgaccgcaacttcaagggcacggtcgaccgctacgtggtcgagttcgagcggctgctcgatgaagtcgcccgcgacggccgcggtccgcaggagctgcgcactcacctgatctcggagacggggctggtgtacacgctgcttgcgcatgcggccggacggctggggtag

SEQ ID NO: 7624 - DNA, 354 bp, BradyrhizobiumColbertium
atggattggatgccgtcgcccccgcttgcaccgatcgaaagcccgcttgacctcgatcacctctcccggatgacgctcggggacaccgagctggaacaggaagtgctggcgatgttcgccgagcaggcggttcgtctgctcgcggcgatgacgtcggtgccggccgagaccggcgcgctcgcgcacaagctgaagggttcggcgcgagggatcggcgccttcgcggtggccgatgccgcagccagcctggagaccgcggtccgcaccgggcacgggcggccccatgccctcgccgccctgaaagaggcggtgacggaggctcgcgccgccatcgaggcgatcctgaagccgtaa

SEQ ID NO: 7625 - DNA, 321 bp, BradyrhizobiumColbertium
atggccaagattcactttgtcgaccacaagggcgaaacccgcacggtggaaatcgagaacggcgcaaccgtgatggaagccgcgatccgcaacagcattcccggcatcgaggccgaatgcggcggcgcctgtgcctgcgcgacctgccatgtgtatgtcgacgaagcctggcgcgagaaggtcggcagccccacgccgatggaagaggacatgctcgatttcggcttcgacgtgcgtccgaattctcgcctgtcctgccagatcaaggtctccgacgaactcgacgggctcgtggtcgcgacgccggaacggcaggcctga

SEQ ID NO: 7626 - DNA, 492 bp, BradyrhizobiumColbertium
atgcgatatgacggagatcaatcggtgaacgcaccaagccgcctcgatacgacgccgcgcctggaggactatccctaccgcctcagcgacaacgtccgcttcggcgatctcgatcccaaccagcacgtcaacaacgcggtctacgcaacctatttcgagaccgggcgcgtcacgctgatgaagctccctgaatacggcctgaccccgccgggcctcgcgtggatcatggtgcgcctcgacatccatttccgcgccgagctgcattggcccaacacgatcgagcttggcctcggcgtggtgaagctcggaaggacatcagtcaccttcgagcaggtcgtgttctcggaaggaaaatgcatcgcatcggcgacatcggtcggcgtcatgatcgacgaagcgacgcggcggccgacgccgctgacggcagaggtgatcgagaagctcagaccgtggcacaagcgcggcatcgaggtcgcgccgccgagcatctag

SEQ ID NO: 7627 - DNA, 1029 bp, BradyrhizobiumColbertium
atgagcgacgcgatcaaaaccgatgtgctgattattggtgccggcccctgcggtctgttcgccgccttcgagctcggccttctcgacatgaaggcgcatttcgtcgacatcctcgacaaggtcggcggccagtgtgccgagctctatccggaaaagccgatctacgacatccccggcattccgcaggtttcgggccagggcctcaccgacgcgctgatggagcagatcaagccgtttcacccgaccttccatctcggcgagatggtcgagaccgtggagaagatcggcgatcctgcgttccgctgcaccaccgatgccggcaaggtgttcgaatgcaaggtcgtggtgatcgcggccggcggcggctccttccagcccaagcgtccgccggtgccgggcatcgaggcctatgagggcacgtcggtgcactacgcggtgcgcaagatggagacgttccgcgacaagaacgtgctgatcgtcggcggtggcgattccgcgctggactggactctcaatctgcatccgattgccaagcgcatcacgctgctgcatcgtcgcgacgagtttcgcgccgcaccccacagcgtcgagcagatgcgagcgctggtcgccggcggaaagatggatctgcggctcggccaggtcaccgcgctctcgggcgctgacggcaagctcaccggcgcgaccgtcaaggggaacgacaacagcatcaccgagattgcctgcgataccatgctgccgttcttcgggctgaccatgaagctcggcccggtcgcgaactggggcattgcgctggagaacaatctggtgccggtcgaaacatccgccttcgagaccaacgtgccaggcatcttcgcgatcggcgacatcaatacctaccccggcaagatcaagttgatcctgtgcggcttccacgagggcgcgctgatgtcgcaaaaagcccatcgctacgtctatccggagaagcggctcgtgttccaatacacgacgtcgtcctccagcctccaaaagaagcttggtgtcaactga

SEQ ID NO: 7628 - DNA, 606 bp, BradyrhizobiumColbertium
gtgatgacaatgcggacactcgttttcagctttcggctgctctccttcctcgcgctcgcatttccgctcgcggcggtgacaccgtccgcagcgcagacggccgagcccaccgcggcgggcctgtggcagaaggtcgaagacggcaagactgtcggatggttcctcttcgtcgaccgtaacggcgtcttcgaaggcgtgatcgcgaagaccttcccgcggccaaccgacgatccgaacgaggtctgctccaagtgcaccgacgatcgcaagaatgcgccagtgctgggcatctccttcgtccgcaacatgaagcgtgaaggattgaagtacgaaggcggcaacgtgctcaatccgcgcgacggccagatctggaaggccaacatgaaggtcagccccgacggccagaccctgaccctgcgcggctatctcggcatttcgctgctcggcaaggacgagacctggacgcgcctgccggatgcctacatcgcgcaggtggatcctgccatcgtcgcaaaatatcttccggcgcaggcggcggctgcaaagcaaccgtcccccgcgcccaagaagggcggcgcgatgatggcgccggcgcccaagcagtaa

SEQ ID NO: 7629 - DNA, 270 bp, BradyrhizobiumColbertium
atgcgtgttctctcgatgattgccgtcgccggcgccatgattgcgagctcggccggcgccttcgcgaccgagcttccctcttacgaagtgacctcgtttccgatcacggcgacccaggtgcaggtgctcggcggcgccggcgtggaggagcagtcggcaagtcccacgatgatcgtcgccggcatgcctgcctctccagcgcaggtcgcggtgctgtcgccgcgcgcgaagcggcttgcgagcgcaggttctgacagcaaggctcgctga

SEQ ID NO: 7630 - DNA, 114 bp, BradyrhizobiumColbertium
ttggaaatctccgtggacaatgtcaatccgaggtttggtcgcctcgatgccggaacaggttcgctcgtgcgcgaacattcctgtgtccgtgagcgaacctatttgattgcgtga

SEQ ID NO: 7631 - DNA, 666 bp, BradyrhizobiumColbertium
atggaccaggacgtcgcagcgaaagagcagccccgctacatcaggctgaacgagcgcgacaatgtcgcgatcgtggtcaacgatttcgggcttcccgccggctcgcgctttgcgtgcgggctgacgctgcgcgccttcgtgccgcaggggcacaaggctgctttggtcgatattgcggaaggcgcgccgatcgtccgctatggcgaaatcatcggttacgcgctgtcgccgatcctggccggcgaatgggtcgatgaagcgcgcatccgcatgccggaggcccctgccctcgacaagctcgaaatctcgaccgccgtccctgcgccgctgccgccgttggaaggcttcaccttcgagggttatcgcaatccggacggctcggtcggcaccaagaacatcctcggcatctcctcctcggtgcaatgcgtcaaaccggctcgcaccaggagatccgcggcgaagccgacggcggggtttgcagtcacgccggaaaacgcgtcgctgccgccacattgcagcccgatgacgagatcggaagcggggcaggtctcgcgcttgcgggcgttgagcaccttcagccgcgcctcggcctgggtcatgatcgctttagcattgccaccggcgagaagaccatcgaggaatgcggctgggacctgttccgcctga

SEQ ID NO: 7632 - DNA, 1449 bp, BradyrhizobiumColbertium
atgacagcgatcctgaagaacttcatcggcggcgaatgggtcgacggttccggcatcaccaggaacatcaatccctccaacaccaacgatctcgtcggggaatatgccaaggcggacaaggcgcagaccgagaaggcgatagccgccgccaaggccgcctttcccgcctggtcgcgttccacgccgcaggagcgctatgacgcgctgaacaagatctcaatcgagatcctctcgcgcaaggaagagctcggccggctcctcgcccgagaggaaggcaagaccttgccggaaggtatcggcgaggtcggtcgcgccggccagatctttgcgttcttcgccggcgaggcgctgcggctgatcggcgagaagggcgcctcggttcgtcccggcatcgacgttgagctcacccgcgagccggttggcgtcgtcggcatgatcacaccctggaatttcccgatcgcgatccccgcctggaagatcgcgccggcgctctgctacggcaacaccgtcgtgttcaagccggccgagctggtgcccggctcggcacatgctttgtccgagatcatcacccgctccggcattccagccggcgtgttcaacctcgtcgtcggctccggctcggtggtcggccagaccttgctcgagcatccggacgtcgccgcgatctccttcaccggctcggtgcaaaccgggcgcaagatcgcgcaggcctgcgtgctctcgaaccccatgaagaaatttcagctcgagatgggcggcaagaatccgctggtcgtgctcgacgacgccgacctcaagaccgccgtcgaggtcgccgtcaacggcgcctatttctccaccggccagcgctgcaccgcctcctcgcgcctcatcgtcaccgaaggcatccacgaccgcttcgtcgcggcggtcgccgagcgcctcaacagcctgtcggtcgacgacgcgctcaaggccggcgtgcatatcggccccgtggtggaccagaaccagctcgaccaggacctccgctacatcaagatcggccaggacgagggcgccaggctcgccttcggcggcgagctgctcaagcgcgacaaccccggccactacctccagccggccctgttcaccgaggccaacaacaacatgcgcatcgcgcgcgaggagatctttggcccggtcgcggccgtcatccgtgccaagaactacgaggaggcgctcgcgatctccaacgacaccgagttcggcctcgcctccggcatctgcaccaccagcctgaaatacgcctcgcactacaagcgcaacagcgagtcaggcatggtgatggtcaacctgccgaccgccggcgtcgattatcacgtgccgttcggcggccggaagggttcgagctacggcgcccgcgagcagggctcctacgcccgcgagttctataccacggtgaagacggcttatacgtttccgggctga

SEQ ID NO: 7633 - DNA, 1887 bp, BradyrhizobiumColbertium
ttgccgcccggtcgcgccgccgcgcaggacgccggtgccatgcagatcaattgggaggtgcgcaaccgcttccggctgttccgcgaggagcgcgacttcctgctccacgtcgagaacgcgcgtgaccgcagcattctcgccgccgagcaatcgctggagctgcagagcgaaggccgcggctgggcccgcaacgcggtcaaccgcctctgcatcgacctccagggccgggtcaaccagccttgcacccgcgacaacgtcaaagagaactacatcacaccgatcgatcatccggtcaccgtgcgcctcacgggtgcggtgccggtcggcgccacctgtgcatggtcgttcgacgacggcgacgggccgcaacaatcgaccttcgactgcgccgagccgatcaatctgcgcgtccgctacggcaagcagaccgtcgcgacggtcgacgtctcctcgggctccgatccgacccagcgcatccagaccgagattcaggtccgcgacatcttcatcgccggcctcggggacagcatcgcctccggagaaggcaacccagaccggccactggcgctggcggacgaaggcttctgcttccgctcctatctcggcaccgccggcgcgcagtattaccggccgagccgccagggcttcaagggcggccgcgcctgcgaggcgccggatacgctggccaactggcaacgctacagcgcgctctggttcaacgcgccttgccaccgctcgctctacagctaccaggcgcgcaccgcgctggcgctcgccctgcgctatacgcacatcgcggtgaccttcctgccactcgcctgcaccggcgccagcatcagcgatgggctgctgggctcgcagcgcgcccgcgaatgcgcgcccggcaagaccggcgtgtgcaacaccagcgtgaacgcccaggtcgccgagctgcgcgaagcgctcgccgcggcaaagaaacgccagcccgaccgcacgctcgatctcgtgctgctgtcggtcggcgccaacgacgtctacttctccggcctcgtcgccgacgtcatcgtcgataccgcgacggagcgcgcgctgttccgccgctccggcgtgatggcgaccgtcgatgattcccgcgatgcgctggtgcgcgaactgccgcagaaattcgccaggctgcgcgaggcgctcaagccgctcgtcggcggcgacctctcgcgcgtggtctatgtctcctacgccaatcctgcgctcgccgacggcggcgtgccctgccgcggcggccgtgccggcttcgacattcatccatcgttcaatgccgatccgcagcggctcgcccgtgtctcgaccttcgtcgatacggaattcctgccgcagctgaaggggctcgccacctgcagccggggcgcgctctgccgcgatcccgaagccgaccgcatgaccttcgtcgatgcgcaccaggccgcgttcgccgatcacggcttctgcgcccattcgggcaatgatcccgaattcgaccggacctgctttgccgagaacggccagagcttcaatcccgatatcgtgagcgcggcgagccagccgatgctttgcgggcgcggcgcctcggaataccgcgcctacctgccgcgcgcgcgctggatccgcgatgcgaacgacagttattttgccgcaatgacctatccgcagggcttgccggcagcgagccagccgaccgacattcacgacgcgacctggggcgtgctctccgccgtctatggcggcgccgtgcatccgagcgccgaaggacatgctgcaatggcggatgccgcgctgccggccgcgagcgcggtgctcgggctggacgcggtgccgccaagcgtgacgcgcggattcctgccgcagctgctgccgggcacgcagcaatag

SEQ ID NO: 7634 - DNA, 1083 bp, BradyrhizobiumColbertium
atgcacggactgctgaccgcgctgcaacgcggcttcaagagatggattggctggcgacggctcggcattgccgcgagcatcctgatcatcgccttcgcgatcaccacgctggtgcgaaccctcaagggcatcgataccgcggtcatcctgacggcgttgaccgagattccccgcggcaatatcgggctggcggcgatctgcgtcttcttcgcattctgcacgctgaccttctacgactatttcgccttgcgaacgatcggcaagaagcatgtgccctatcgcatcgcggcgctctccagcttcacgtcctattcgatcggccacaacatcggcgccacggtattcaccggcggcgcgatccgtttccggatctattcggactacgggctgaacgcgatcgacgtcgcgaaaatctgctttctgtcgggcctgaccttctggctcggtaacatcttcgtgctctcgatcggcatggccatccatccggatgccgcctcctcgatggatcagctccccgcctcgatcaaccgcctgatcgcgctcggtggcctcgcctcgatcggcgcctatctggtctggctgtgcatgggcgagaagcgccgcgaactcggccagaagggctggaaggtggtgctgccgtcggcatcgctgacattggtgcagatcctgatcggcgtggtcgatctcggcttctgcgccatggccatgtacctgttgatgccggccaatccgccgatcgacttcatgtcgcttgcggtcgtgttcattctggcgaccctgatcggctttgccagccatgcgcccggctcgatcggcgtcttcgatgcggccatgctggtggcgctgccccaattcggtcgagaggagcttctggcgacgctcctggtgttccgcatcctctatttcgtcgtcccgttcggcctcgccatctcgatcatgggcacgcgcgagctctggatgaacgtggtcgccccctggcaggagcggcggcgcctggcggaggcctgcgcccaggccaatctgcccaagcaggtggccgcgatggagcgcgagcggacgctgcggcgggccggcaagcgatag

SEQ ID NO: 7635 - DNA, 114 bp, BradyrhizobiumColbertium
gtgcattcatcctcccggcgggggcaaagaccgaccggaccaggtattggccaatcgggttcgatcacggccaaaggcaggcatcgatcgctaggcatgatccagctcatttaa

SEQ ID NO: 7636 - DNA, 615 bp, BradyrhizobiumColbertium
atgctccgtactcgttgggctcgatcagcaatcgaacatggcgaaataagcggctttctcctgcaagcccgcgccgtcgtgttcccgaaacccgagaggatcggaacgatgggactgttcacaaaagacatcaagaccatgaacgacctgttcgtgcatcagctccaggacatctattacgccgagcagcagctcaccaaggcgctgccaaagatggcaagcaaggccaccgatccgcagctgaaacagggctttttgacgcaccttgaagaaaccaggcagcacgtcgcgcgcctcgaggaagtgttcaagatgcacggcgtcgcggcgaaggcggtcgactgcccggccattgacggcatcatcgaggaagcggacgagaccgccggcgaagttgcggacaaggcggtgctcgatgcagcgctgatcaatgcagctcaggccgccgaacactacgagatcgtccgctacggcagcctgatcgcctgggccaagcagctcggccgcagcgactgcgcagcagtgcttgccaagacgctcgaggaggaaaaggcgaccgacaagaagctgacgactctcgccgagagcaaggtcaatttgcgcgcggcgagctag

SEQ ID NO: 7637 - DNA, 465 bp, BradyrhizobiumColbertium
atggctgagacgacctttttcccgcgccgcctgattctcggtgccgcaatgatctccggagtgttgctcgcgctcgcggtccacatgctgggcgcacgctatgggctcgatctcggcggcctctggcgcggcgacacacgagagttcatacccgcaggcgcggcgatcgcctggtggctgatcgccacggtcggcatttccggcggctatttcacggcgtcattgatgcagagcgcggtctccggacagatcccgcaacggatgcggcaattcctgatcgccgtcggcgtgctgctgctcgcgggcgccggccaggccgcttcggcgccgagcccgatcccgaccgtctcaggggtgctcgccgggcttgctgcgctgtgcctcggcgccgtgatggctttctgcggcgcgcacttcgcgttgcgacgcgctgacgggctgcgccgacccatgcggccacgctga

SEQ ID NO: 7638 - DNA, 582 bp, BradyrhizobiumColbertium
atgctgggttctgaggccgcgccggccacgagctacgcctacaaggcgtcgctgatcggctcggcgcaccgcttcgaactgactgaggagggactgtcctggcacatcgccgggcgccagggcttgtggcgctacgacgagatctctgcgattcggctgtcgttccgcccggtctcaatgcagcagcaccgttttcgcgccgatgtcacccacgccagcggccgccgcatcgcgatcctgtcgacgagttggcagactgcggcgctgatgtcgacgcaggacagcggatttcgcgcattcatcgtcgaattgcatgcgcggatggcgaaagcgggcagccgcgcggttctgaccgccggccttggccgcatcacccatgcggcggtgctggcatgcctcgcggtgctgactgttgcgatggcgggcctgttgatccgcgccctcgtgatcggcgagttcgccggcgcgctgttcattctcggctttgccgcgctgttcgcctggcaggtcggcggcttcgtccggcgcaaccagccgcgctcctataccctggcgaggttgccgcaggcgctgctgccgtag

SEQ ID NO: 7639 - DNA, 591 bp, BradyrhizobiumColbertium
atggatcccaccacccgcccgcttgctgcggacgagatcgccgaaatcaatcgcaggcacctgatcgagacgccgctggtgccggccgacctgctgttcgtgttcggtacccgggaggacgacatgttgcgggccgacactgcggcgcgcctgtggcgagagggctatttccgctggtcgattgttagcggcggggtgacgccgggctcggagcaatccgaatgtacgctgatcaagacggcgatggtcaacgcaggcgttccggcggaacttgtcctcgaagagcatcgcgcgatgaacaccggagagaacgtgatcttctcgctcccgatcatcgatgcggcgctcggccttgccaacattcgcaacgtgatctgcctcggcaacacctggaccgcgcggcgctaccctatgacgttgcaccggcactggccggaggtggagaaaatgctgctcaccgttgacagctttgcgacccctcgcgccctctggcacaccgatgcggaatttcgccgccgcatgctgcacgaatgggacaagatcgagccgtacaaggcgaaaggcttcatcgcggaatggccggaggcgtga

SEQ ID NO: 7640 - DNA, 1344 bp, BradyrhizobiumColbertium
atgtccaagttcgagtacgtgaagcttgccgatgccattgcggccgatatcactaacggcacgttaaggcccggcgaccggctgccgccgcagcgcgattttgcctatgaccgtggcatcgcggtgtcgaccgcgagccgggtttatacggaattgctccgccgcgggctcgttgtcggcgaggtcgggcgcggtacattcatctccggcgacatcaggcgcgaagtcggcacgatgagcgagccggccgaggcgcgcatcaatttcgaggtcaattatccgctattgccgcagcaatgggcgatgatcgccaaaagtcttgcggggctcgagcgcgtcgatgcgctcgaatccgcgctgcgcgtgtcgaccagcaccggcaccaggagcgcacgcactgccgccgccgcctatctcgcgcgcaaggatttcacgcctcagcccgagcaggtcttcttcaccgccaacggcaagcaatcgctcgcagccgcgcttgcggcgctcgttcccaccggcggccgctgcggcgtcgaggcgctgacctatccctacgtcaagagcatcgccgcgcgtctcggcgtgacgctggtgccgattccgatggacggcttcggcgcgcgtcccgacgccatccagaaggcgcatcgcgaggcacatctgtcggcgctgtatctccagcccatcatccagaacccgctcggcgtcaccatgaatgcgacgcggcgcgccgacatcatgcgcgtcgccgagaagctcgatctcaccatcatcgaggacgccgtctacggcttcctggccgacgacacgcctttggctgccctcgaccccgagcgctgcatcgtgatcgacagcctgtccaagaaggtcgcgcccgggcttgccctcggcatcctggtcgcgccggctcacttgcgcgaaagcgtgatgagcgcaatccgcaccgggggctggatcgcctccggccacgctctggcggccggacagcggctgatggccgacggcaccgttgccgagctgacgcggctgaaacgcatcgacgccgcgcggcgccagcagactgcctccaggctgctcgccggctatcagctcgccgccgacacgcgctcataccatttgtggctgacgctgccaccgcattggcgctcccagaccttcgtcgccgcagcagcacggcgcggcatcgcgctgacgccgtcctccactttcgcgatcgcgcatggccatgcacccaacgcggtgcggctcgcccttgccccgccctcgcccgagcagctcgattccggcctgcgcaccatcgcctcgctgctcggcaccaaggaagaggatttcgactcgacggagtag

SEQ ID NO: 7641 - DNA, 114 bp, BradyrhizobiumColbertium
ttggccgaggagagcgagagcaatccgacggcagatgaggtgcaggcgccgacagcgtccgcgccaacggcgcagcttcgccgcgcgggacgacaggccggagaagaaagatga

SEQ ID NO: 7642 - DNA, 237 bp, BradyrhizobiumColbertium
atgaccacgatttcgcaaactgccgggcggagtttacgcccatcctcgtcgggcggatttcttggtgcgctcgcccatggtgtctctgcgctgttcgaccgcctggagcgccgctccgccgtcaagacgctgaatgaactcgacgaccgcgcgctgcgcgatatcggcatcacgcgcagtcagatcgaggacgcggtgtacggacagttcaaggacgagctgtcgcggtatttgtga

SEQ ID NO: 7643 - DNA, 426 bp, BradyrhizobiumColbertium
atgttcaagtccatcctcgtgcccatcgacctcgccgataccgatctggccaagccggcgatcgcaaccgcggcgacgttgtctcagacctggagcggcacggtgcgcctgctcaacgtgctgccgatgacgccggtgatgctcgccgaatacgtcccggccgatttcgacgagcagcagcgcgagacgtcggaggaggccctcgccatcgtcgcgcgcgaatccggcatcgacccggcgcggatctccacggtggtacgccagggcggcatctaccacgagatcctggaggaagccgcgcagatgaaggccgacctgatcgtcatgacctcgcaccggccggcgatgcgcacttatttcctcggctccaacgcagggcacgtggtgcgctacgccaagtgctcggtgctggtggtgaggcactga

SEQ ID NO: 7644 - DNA, 537 bp, BradyrhizobiumColbertium
atgcgccgtttgatgctgctgcgtcacgccaagaccgagaccgacgcgccgagcggccgtgaccaggaccgccgcctggacgaacgcggccacaaggatgccgcacggatcggcgcctggatcgccacccatccaccctttcccgagaccgtgctggtgtcgcatgccgtgcgagcccggcagacctgggacatcgcctgggaggcgatgaaggaccgcgtcccggcgccgcaggtcgagatcctgccggaactctatggcgccgatcctgcggagatcctggacaccattcgcactgcaaccgcgccggccgacccgaagcagttgctgctgatcggccacaatcccggcatgcacgagatcgccctgatgctcacaggcggcggcgatcctgatggcgccaaggcgctcggcgacaatctgcccaccgcggggcttgcgatcttcgactttgacgtcaaggattgggctgatgtggcctaccgccgcggcaggctggtgctgttcgtcagccccaagctgcttcgatcgggatga

SEQ ID NO: 7645 - DNA, 1449 bp, BradyrhizobiumColbertium
gtgccccaggaaggcgccggccttcgcgatcgcgagcggctgtcattcgatctcgacaccgacatctgcgtcgtcggtgcgggccttgccgggttgtccatcgcgctggaagcggcccggctcggggccagcgtcgcggtgctcgagggccgtcaggtcggttggaacgcctccggcaaccagctcgggacggtgatgccgggctttgcattgccgctcaccgacctgatcgagcgcattggcttcgaggatgcgcgcgaattgtggatgctgtcgaaggagggtgccgagttcgtccgggccaatgccacggaagaaaacatgccggggatcggccccagcgacggcgtgctggaggtgtccaacattgatgcgggcgaccggctgatcagccgcttgcaaatgctgaacgaggacttcgacaccgaggtcgagggctggcaggccgagcgcgtccgcgacgtgctcaagaccgatcgctacttccacggcgtatattatcccaaagcgttccaggtcgacggccgcaaatatgtgcacggccttgcggcgctggcgcggcgggcgggcgcccgcatcttcgaggacactccggtcgtcagcatcgatcattccggcatccgcaagcgcatcgtcacgccctcggcgcggctgcgcgcgagccacatcgtgctcgccggcaacgtccatctcggtgcgccgttgaagcgcctgtcggagacgctgctgccggtctggcgctatgccggcatcaccgcgccgctcggcgagcgcctgcatgaggtcatcgccttcaaaggatccgtgatggattctgacggcatcgaccatttccgaatcgtcgaaggcgaccggctgctgtgggagagcccggagacgacctgggcggcaagccccgagcgcttcgccggcgccgtgaggcggcgaatccgcacgatttttcccgagctcggcaacgtcgagatcacccagatgttcggcggcgccaccggccagaccgttcacggaatgccgcagatcggtcagctgcgcaaaggcctttgggtggtgagcgggttcggccgccaaggcatgaacacctccgccatggccgggcagatgatcgcgcgcagcattctatggggcgacgagcgctggaaattgttctcgccattcgagctggtctgggcgggcggtgcaaccgggcgcgtcgcgggccaattggtcgggatgtggggcagggcgagttccgccgcgacaggctcgctcgcccgctaccgcgagcgagcgcgagccagggacagggaccgcgaggcgcggctcgcccaagccaaccgcgccgccggcaccggcccgcgccgcccgccacccggtgttgagccgcggccgacctcgcggttgacgcctgctgcccacgatgcagaacaggcgatggaaccggtctcccacgacgccggcgtctcacgataa

SEQ ID NO: 7646 - DNA, 513 bp, BradyrhizobiumColbertium
atgtttgaccgccgcatcctgctaacgactgccgccggcttgctcggcctttcggccttccgctggctgagagcgtcccccgccgaggctggcgagaaggccgcgcaaaagttcgagatcacaaagacggaggccgagtggcgcgcccagctcacaccgcagcaatatgagatacttcgcaatcacggcaccgagcgacccggctccagcccgcttttgaaggagcaccgcaagggcatcttcgcctgcgccggctgcgacctgccgctgttttcgtccgagaccaagttcgagagcggcacgggatggccgagcttctatgcgccgatcgaaggcaatgtcggcaagaccgtggatcgtacctacggcatggtccgcaccgaggtgcattgccggcgctgcggcggccatctcggccacgtgttcgatgacggcccgaagccgaccggcttgcgctactgcatcgatggtttcgggctggtcttccatccggccgcggcgtcggcgacgtag

SEQ ID NO: 7647 - DNA, 2253 bp, BradyrhizobiumColbertium
atgggtatcttcgatgcaatgaacacctcggtgggtggcctgcaggcgcagtccttcgcgctgcagaacatttcaggcaacatcgcgaactcatccaccaccggttacaagggcatcggtaccagcttcgtcgacctcattcccgactcgtcggtcccaagcaagcaggtcgcaggcggcgtgcaggccaacgcgaaggccaccatcaccacgcagggcacgatctcgtcctccaccgtcgccaccaacatggcgatcactggcgacggtttcttctcgatccagaaggcgagcggcgtcgtcgacaacgtgcccgtgttcaccggggtgacctactacacgaggcgcggcgacttccagctcaatgccaacggcaatctggtcaacggcgccggctattatctgatgggcgtcacggtcgatccgaagaccggcaacccgaccggcagcgtggcgaacgtcctgcaattccagaacaacttcattccggcgcaggcgaccacctccatccagtacgcggcgaacctgccgacgcagccgaacacggtggcgaaaaccacggcgtcgaccggcacgttgctggcggccggcgggctcaacccgtccgatttcgccgcgaacccgctgccggtcggcacgcctccggcgccctatgccaacgcgacggtgtcaggcgcggcagcaaccggcaacatccgctcggcctattcgtcgacgacggcgacgggcacggttgcgctccagaacaattcgtcggcggtcgcttcgacaaccacttcccttgacaatgccgccggcacgcatctcgcatccagcattctgaccgcattgagcggccagacgctgaccatcaacggcaacaccatcacgttcgacggcggcaccacggtctcgaccgtcggcagcaacaccacgatcggtctcggtgcaggcacgaccgcgaccgtcgccgacatcctgaatgcgatccagactgccggcggcgccggcgtcaccgcttcgctctcggtcagcggcaatatccagatctcgagcggcaccggcactgacgtcgcaatcggcagcggcacggccgccaccgcgctcggcatcagcagcgtgacacgcggcggcaacgtgctgtcctcgccagcgatctcgggcgcgactgtgctgagcggcaccgcgaccgccggcggcgcacaggtgctcacatccggcttctccgcgggcgataccatcaccgtcaacggtcagacgctgaccttcatgaactcgggtgcctcgggaccgaaccagatcaacgtcacggacaacgtcacgaccctgctcggcaagatcgacgcgctctccggcgcgtcgggatcgtcggtcagcagcggcggcgtgattaccctcaacaccggcaccgtctcgaacctgacggtctccagctccaacagcgccgccttctcggcacttggcttcacctcgacgatcacccggaatcgcgacggtggcggcacggccggcaccggcggggtgatcggcaacgacatcgccactttcaccaaggaatcgatcagtggcggcgcggtgaccgcctacaacgccgccggtacgccggtgaacctgcaattgcgctgggccaagaccgacagcgcttcgctcggcgcgggtcattcggatagctggaacctgttctaccagaccgacccgaacgcaaccggtacgaccgtcggttgggtcaacaccgggcagaccttcacatttgccgccgacggctcgctcacgtcgccgagcggctcgggcatcaccatcaacaacgtcaccgtcagcggccagtcgctcggctcggtcgccttcaacatctcctccggcgggctgacgcaatatgccagcaccagcggcgcggtgaccatcaacaccatcacccagaatggctatgccgccggtcagcttcgctcggtcgccgtcaacaacaatggcgtcgtggtcggcactttctccaacggccagaacctcaaccttgcccaggtgcagctctcgcacttcaacggcaccaactatctgaaggcgatggacggcggcgcctatgccgcgaccgaacagtcgggagacgccatcgacggcgcctcggggaccatcagcggctcgtccctggaggggtccaacaccgacatcgccgacgaattcaccaagctgatcgtgacccagcaggcctattcggccaacaccaaggtgatcacgaccgcgaattcgatggtgcaggatctcttgaacgtgttgcgctga

SEQ ID NO: 7648 - DNA, 1035 bp, BradyrhizobiumColbertium
gtggtctcttccggccagatcgcggccgacctgaagctgcgcgaccagatcctggtgcaggcgcagaaccagatcgacgagctcgccgccacgatggcgagcgcgctatccgacaagaccacggccggcagcacggtgtccggtccgcctacggggttcgatctcgagctcgccggagcgctgccgggcaacacggtcaacatcacctatacggacacggcgaccaatacccagcgtcagatcacgctggtcaacgtgaccgacccggccgcactgccgcttcagaacccgaccaatgcgaacccgatgcggatcggcgtcaatttctccggcggcatgggcgcgatcgcctccgcgctcaacaccgcgttgtcaggcacgcacctgtcgttctccgccgccccgtccccggcgacagccacgacgctgcggctgaccgacgacaataccggccttgccaaggtgagttcggcctcgaccacaaagacgatctcgtcgctgacctcgggcaatccgcagctgccgctgttcaccgacggcggccaggcgctctataccggcgctttcacggcatcgggctcgcagatgacagggcttgccggacgcatcgccgtgaacacgcagctggtatccgatccgacccggatgtcggtctacagcacctcgccggtgacgcccgcaggcgacaccacgcgttcggactatctctactcgcagctcaccaatgcggtgttttcctattcgccacagagcggcctcggctcggcgagccagcccttcaccggcagcgtttcgaattttctccagcagttcctcagcgtacaggcgaacgccgcgacgcagtcgacccagctccaggagggccagagcgtcgtggtctcgacgctgcaggccaagttcgactcgacctccagcgtgaacctggacgcggagatgtcgaacctgatccagcttcagaatgcctatgccgccaacgcccacgtcatgtcggtggtgcagagcatgatgaacacgttgctccaggcgcaagtgtaa

SEQ ID NO: 7649 - DNA, 1884 bp, BradyrhizobiumColbertium
atgtcgatcagcagcatcaactactcttcgtcggttctcggcgcgcagattcgcaacatcaatcagcagctcaccgatctgtcgacgcagctttcgaccggcaagctgtcgcagaactatgctggcatgggcaccaacgaaggcttcgcaatcgccggtcgcgcgcagctctccaacatcgccgcctacaccgacacgatcaccaacgtcaacgtcagcatcaatctagcgaacactgcgctgcaatcgctgaccaagattcgcagtacggtgcaaacgggctcggcctctaccgcgcaggatctcaatgtcaacggccagacgatcgcgcagaacaccgccgccgcccagttcggctcgatggtcggcgtcctcaacacgcagaccggcagccgctatctgttttccggaacggccgtgaatacgcagtcggtcgcggatgccggcgacatcatcaatggcaccacgacgcaggccggcttcaagaccgtcatggcggagcgccaagccgccgatctgggggcgaacggcatggggcggctggtgcagacgcagccgacgccgagctcggtgcaggtgtcggaagacgtggccggatcgccgttcggcctcaagatcaaggcggtgtcctccacgctgacgggcgcgaccgtcaccggcccgagcggctcgccggtgtccttctcggtcgatctcaacggcgtcaatccgaacaatggcgacaagctgagcattcagttcacgctgccggacggcacgacggagcagatcgacctcaccgcgtccagcgcgacgccgacccctctcggcagtttcgcgatcgatgcgagcacccccgtcaacccgaacaacaccgccgcgaatctcaacacggcactgaacaccgcaatcgccaaactcgccaacacctcgctggttgcggcatcggcgatcgtcgccggcgacaatttcttcaacaccgcgagctcggcgatcggcacgcccgtcaacaaccaggccgcgccgccggcccccatcgccggggcgacggcgctatcgggcccgagcccctcggactcgatctctccgggcttcgttgcgggcgacaccatcaccgtcaacggcaccacgctgactttcgtcagctcgggcgcgaccggcaaccagctcaacgtcaccgacaacgtccagaccatgctcagcaagatcgaccagatcacggggacgtcgaaaccctcgacggttcatggcggttcgatcacgatcaacaccgacgatgcggcgagcctcagtatcacgacctcgaatacgggggcgctgaacgcgctcggcttcggctcgaccccggtgacggccacgcaaccgccgctgcgcgtcggctcctcgcccgcgaactcggcaaccacgctggtgaacggctcggccaacacggtgaaatggtacctgggcaatgacggacccggctcgcctcgctcgacggcgatagcgcgggtcgacgatgccgtgacggtgcagtatggcgcccaggccaatgaggatgcgatccgccggcaattgcaggcgatcgcggtgttcgggaccttctcgacctcaccgacgggacaatattcgggcggacaggtggcggcgctgagcctgcgggtgacgcaggcgttgacccagcagccggggcagcagcgcatcgaggacatccagaccgacatcgcgatggcccagaacacgatgaacgacgcgaccacgcgccagacccaggccaaggcgcagctgcagaccatcatcgaccaggcggaatcggcctcaccggaccaggtcgcgagcgagattctggcactccagaacgcactccaggcgtcctatcaggtgacctccaacctggcgcagctctcgctggtcaagttcctgtaa

SEQ ID NO: 7650 - DNA, 126 bp, BradyrhizobiumColbertium
atgctcgacacctgcccgccgaagcacggcgtggccaccaccaattgcatcctgtccgacatcgtcagccccgccccgctccaatcctcaccaagaggtaaagaggcatggttaacgacgccttaa

SEQ ID NO: 7651 - DNA, 762 bp, BradyrhizobiumColbertium
gtggccacgccgtgcttcggcgggcaggtgtcgagcatctatgcgagctccatcttcgcgctacagcgcgccgtgcacggcatgtccaatctcgagctcaaggtgcatttgcgcgacggcgatgcgctgatcacgcgtgcccgagccaacctggtcgcactgttcctggacgatcccagggcaacgcatttcctgttcatcgatgccgatatcggcttcaagccggagcaggtgttccgcctgatcgaatgcggtgcggacgtcgtcgccggctgctatcccatcaagcgggtcaactgggacaaggccagacgtgcgatggccgctggccgcaccgacgtgccggcagcctcgctcgactacgtgctcgagatcgaggatcccgatcgcatcgtcgtcgtcaacggctttacccgcgtgcgttatgccgggaccggctttctgatgatccgccgccacgtgctggaagcgatgtgccgccatccggcctacgctggcttgcaattcttccgggagcattcgcacgatgcactggcagcgagccagaaccggttcgcgctgttcgaatgcatgatcgatccggcaaccggcacctatctttccgaagacttcgctttctgcaagcgctggaccgatatcggcggcgagatctgggccgacattcagagctcgctcgatcacgtcgggccgtccgtgtttcacggcgatatcgcttcgcaattcgcagccgtgcccgcagcggcggcggccgatgcggcgtga

SEQ ID NO: 7652 - DNA, 1629 bp, BradyrhizobiumColbertium
atgagcggcggcgcatcccgcttgtcggaggcggagcgcgcttccgacggcggctcgcgctatcgcctgcgtgatctcttcacccccctcgatatgctgctcgtctccggcggcgacccgcggctcgcgctcgatcccaaggactcgacgaacgcttatggttgcgcggtctcgccggacccggatgtctgggaattcgcctcctcgaccgcatcgacgatctcgcaagcggcctatgaccgcgccgcgctggcgcgggacgagctgatgcacaagtgcctgttcgacgaggtcgaggtcgctttcgatgcgcgttgcgaggagatgcgcgacgagctgcgcggccatctggagctttcgccgcgcgtcgatgtggtgttctcgccatccggcacggactcccagctccatgccctgttcctggcgcgcgcgatactcggcgcgcgtccggtgaccatcgtggtcggcgccgagcagactggaagcgggacgacccataccgcccgcggtcatcatttcagctccatgacggcgagtggcgttgcggtccgcaaggacggcgccgttgccggactcgccggcgccagcatagcgttgccactgcgcgaggccgcctccgggatcgcgatgcgcgcggacgctgacgccgcggtgctgcaagcgatcgaggctacgatcgcgcaaggtgcaccagtgctgctccagatcatggattgctcgaagctcggctggcgcgcaccgagtgcggcctgcctcgacgagatcgcccggcgctggccgcgcaaggtccagatcgtggtcgacgcatgtcaggcccggctcggccgccgccggctgcgcgcctatctcgaccgcggctacatggtgctgatcaccggctcgaagttcttcggggggccggccttcagcggtgcgctgctggtgccgaaagaccctgcgagatcgctcgaccgggtcgaggggatcgcgccaggcttcctggactacgccggccgttgcgattggccgatcgcctgggcggagctgcgttcgcggttcgagcgccgcccgaacttcggccaatggttgcgctgggaggctgcgctggccgagatcggcagctactacaccgtgcccggggctttccgcgccgcgatgctcgccgaactcgctgcgggcatcggcagcatgatcaggttgtcaccgtcgttccgagccgtgccgaccgcggccgcgacggccggcatggaggacgaggagttcgcccatgccacgatctttccattcacattgctgcgcaacggtcagccggtctcgacggccgagatggcttccgttcatcacgcgttggcgtgtgacgtgatcgcggcgatcggcggcagcgcggcggaccgggaggtcgccgcgcagcgctgcctgatcggccggccggtccggctggagcggcaggacgaggcgccgcaggcagtgctgcgcctctgcgtcggcgcacgcttcgtcaccgaggcctggtcgcccgatgcgcgggagtcgcaacgcaacgtgcagcgccttctcgaccggatcgcgcacgtcctggtgaagatcgagctgctgctcgaccgcggcggagtcgcggccgtgccggccgcgcccgcgttcgaggtgtga

SEQ ID NO: 7653 - DNA, 1254 bp, BradyrhizobiumColbertium
atgcagcatccagtttccgctccgatcggcttgactgcggcgaactatgccgaccgcatcggctttgcgcagctgacacgccgggccttcgaaggtgtcgatctgcatcccttgcgcgaccagctcgtggcgcggatcgcggcggggacggcgctggcaggcgaagcgctggatctgtcgttgatcagccagcttctgggcgacaaggatcaggggcttgcgattcagtctgaagtgctggccttccatcaattgttccgcacgcccagcgcggcgccgaagcccggcttgcgcgtgctcgcgctcgcagccgacatcgacatggggggcaatacgccgatcgatttcctgctcgaagactccgacatcgagctgctgacgctttacgtggtcaagggcgtcggtctgccggaaaccttgcccgagcacgatgtcgccatcgtggtcgcctcggattccgaggaatgccgcgaggcgctcgctctgatcgaaaaggccgcgccgcaatggccgcggccgatgctcaatcgccccgatcgcatcggcaatctcgatcgcgacaagctgtatcggctgctggccggtgtgccaagtctcgatattcctgcgaccattcacgcgacgcgcgcgcaattgtcggatctcgcacgaggcgcaatcgcgtgcgaggacatcgcgagcgacttgcactttcccatgatcgcacggccacgcggctcgcatgccggcgtcggcctcgccaagctcgacgaggcggcggcgcttgcggcctacctcgccgaacggaaagagcaggacttcttcgtcgcacgtttcgtcgactatgtcagcgccgacgggctctaccgcaagtatcgcctcgcgatggtcgacggcaagccctacgcctgccacatggcgatcgccgaccgctgggacatctggtatctcaacgcctatatggcgttcagcgaggagaagcgggccgaggaagccgtcttcatgcgcgacttcgacaacgccttcgccgcgcggcatggcagcgcgctcgacgagatgagccggcgcgtcggtctggattatttcatcatcgattgcgccgagaaccagaagggcgagcttctggtgttcgaggcggacaacaccgccgtcgtgcacaacatggattcgccggtcgtgttcccctacaagccgccgcagatgcgcaagatcttcgccgcgttcactgcgatgctgtcgcggcatgcaaagacgggcaaggagagcgcagcatga

SEQ ID NO: 7654 - DNA, 1500 bp, BradyrhizobiumColbertium
atgaacgagatcatccgcaatacgcaaagctccgtcacgagcacctcgctcgatccgcaggactggagcgaatttcgcgcgctggcccatcgcatgctggacgagacgatcgacggcatcgccaacgttcgggcgcgcccggtctggcggccgatccccgatgatgtccgtgcggcattcagagccgacgtgccgcgcgaggcgagcgaccttgccgacgtctaccgcgagttcgccgagcatgtcgcgccctatgcgacaggcaacgtgcatcccgggttcatggggtgggtgcatgggggcggcaccgcggtcggcatgctcgccgacatgctcgcggcggggctcaatgccaatctcggcggacgcgaccacatgccgatcgaggtcgagcggcagatcgtcgagtggatgcgccgcctgttcgcatttcccgatagcgcgagcggtgtgttcgtcacgggcacgtcgatggccaatctgatggcggtgctggtggcgcgcacggcggcgctcggcacgctggcgcgccagcacggcatcggcaatgacggcgcgctgcttacggcttacacgtcgcaggccgcgcatggatgtgtctccagagcgatggacgttgccgggttcggcaccgatgcgctgcgcaggatcgctgtcgatgccgatcatcgcatcgatgtcgccgcgctacgcgcacagatcgcagttgatcgcgaggtcggcttcaggccgttcctggtggtcgcgtccgccgggacggtcgatgtcggcgcgatcgacgatctccgggcgattgcggagctttgccgcgagcaaggtatctggtttcacgtcgatggcgctttcggtgcgctcgcgatcctgtcgcccgagctcgcgccgatgctcggcggcatcgagcttgcggattcaatcgcactcgattttcacaaatggggccaggtgccttacgatgcaggtttcctgttggtgcgcgacggcgagcagcatcggcaggcctttgcacagccggcggcctatctgcgccgcgaggcgagggggcttgcagcgggggcggtctggccctgcgatctcggccccgatctgtcgcgcggctttcgtgcgctgaagacatggttcacgctgaagacgttcggcaccgatcggctgggtgcggcgatcgcacgaagctgcgcgctggccagatatctcgaggcacgcgtgctggccgaatctcggctggagctgctggcgccggtcaatctcaatatcgtctgcttccgctaccgtgccgatgatgcggtcaatcgcgagatcgttgccgacatccaggaaagcggcaccgcggcgccctcgagcacgacgctggacggcaggcttgcgatccgcgctgcaatcgtgaatcaccgcacagaggagaccgacatcgatgcgctgatcgccgcggtgctggagttcggggaacgacggtgcagcggcccgctgatcgaggtcgaagcgccgcctctcgcggcgcagtag

SEQ ID NO: 7655 - DNA, 441 bp, BradyrhizobiumColbertium
atggccctcaaggtcgagctcagaccgcacgaacgcatcatcgtcggtaactgcgtgattaccaacaccgaccagcgggcgcgcctcctgatcgacggcgacaacgtgccgatcctgcgcgagcgcgacatcctcacgccggagaccgccgatacgcccgccaagctcgtctatctcgcggtccagctcatgtacatctcaccggatccgcagacccagcacggcacctacttcaacctggtgcgcgacatcgtcaccgcggtgccgagttcctggccgatcatcgaggccatcaacaacaacatcctgaacggcgacctttaccgggcgctgaaggacgcccgcaagctgattgcctacgaagagaagctgcgggatcaatatgtggccacacatccgaagccggaagcggacaaggccgacgtgagctcggccgcctga

SEQ ID NO: 7656 - DNA, 624 bp, BradyrhizobiumColbertium
atgccggttaagaccgatcggaatgacgcccgtggcatcgcgcaggtggtgagaacgggatggttcaagcctgttcacgtcaagagcatcggcagccaaagggcacggacgctggctgcggctcgcaagcatatcattcgctccatcgcggccgcagagcaagtcatccgcggacttctgcgtccgctcggtctcaaagtcggaatcgtctcgcggagtctgttcgcgacgagagttcgtgagctggtcggcgacgacgccttgctagaggcgatcatggatccgctgcttgctggacgcgaagcgctgatgcgggagtacgcccgcttacatcgtctggttctgaaggccgtgcgcagtgacccggcttgtcggctcttgatgacgatgccggggatcggcccggtctctgcgttgaccttccgctccactgtggacgatcccgggcgattcctgcattcccaatccgtcggcgcctatctcgggttgacgccccggcgataccaatccggtgaggttgatcgggtgggacggatcataaaagtcggagatggtgagacgcgcacagccctgttcgagctgccaacgtcgttctcaggctatcaacccgatggtctccgatga

SEQ ID NO: 7657 - DNA, 138 bp, BradyrhizobiumColbertium
atgaaggcctgggcggtgcgtgttgctcaccggcaaggaagtaagcgcgcgaaggtcgcgctggccagaaagaaggctgtcgtccttcaccgaatgtgggtcgatggaaccgaattccgatggacggcggtggcgtaa

SEQ ID NO: 7658 - DNA, 1239 bp, BradyrhizobiumColbertium
gtgctagtcgctcgattggaatacttgcagttgctgcaccgctcggaatatcgtcgtgcgggggctacgaaaatggatagaattacatgcaacacgacgggcatgccgtcgacgggtgtcaaagccttttttggtttcctctgcttggcgatcctcaccagccacaccctcacgatgtggcgctggagcgaggcgcgcggcgtctacgacgatgtctgttatctcaggcaagctcatctcttccagcgctttggcgttgtcgggctcaacaccgatgcaacgatggacgatgaccgctactttgtaggcaggttgaaggaaattgcgttgccagatcctgaaaacctcgatcggtggccatgccacgttcggaaaccaagtggcaaagtcattctgcaatatccacccggcaccggcttcttgcttgcggcctttccacaaggcttccaagttgcgccgctctacatcagcgcgagtatagtcgtttgctgcgttgcgctgcttggcatctggatggccaggacactgtctttcgtgatcggtgccgggctctttggtgcgctagccgtctatggcatgatcaacccagcaaaagcgagctactcagttgcgcctacggttgctctctgcagcattataggtctcctcacggccctctgggtgaacagggcatgtggcagctcgtggctgatcgcgctcattggcctcctcctcggcgcggcagtcaatttaaggctgcccaatatcttgctcgcgtccggctatggtttgtttctcggcgttgcattcctgcggtcgcgcaccttggcaagcttcctggatagcgtcggcttcgtcgctggcgtggctctcggaataatgccaacgctgattgcccaggccatcaacgccggcagcccgcttgcaacgacatatggcgccagcgacgctgtcgcgcctgcattcaatattgtagttctcggcgaatatcttcgtgacccgcagtcccttttgatatgcctcgctgccggctggacgttgtggttgctgcgaagtggcctccgttctgcgcatcagatcgctttcctcgtcgcggggaatctcatgatcaaccttggcttctttctgagtcaccctatcttcacgccttactacatggttccgattgcgatgctctgtctttggactgtgtcgttcgcctggttgatacagcctcgcaaatcgagcgaatcggcagcgttccaatgcacggtcccatga

SEQ ID NO: 7659 - DNA, 126 bp, BradyrhizobiumColbertium
ttgcaggattggctgcacttgaagcttgcaaagagcgagctgcgatggccggacggcatgcacatggatgagaggtctgcaatactggccgccaaggcaatcgagcatgctgtcagcgaacgctag

SEQ ID NO: 7660 - DNA, 417 bp, BradyrhizobiumColbertium
atgagcttgaagcgaattctgctgaccgccgcgcttctggctggatttgcggcaccggcactggcgcagccgtttccacgtccggtgctccaatacgccggccagttcgtttttggaccaacgctcattgtcgggctgacggtcgtcaactggaatgactactcgccagcgctgtttgcggcgtcgccgaagctgccgccgtgcgggctcaacgccgctgcatctcgcacgtgggtcgacatctacaatgtcaggaacacgagactctacggattctgcgacctcggcgagccgtttagcctgacgcagctctggttctcgcttccgtccgcccggcgcccgaggtcggtctacatcacgcttaccgaccggttgcggctccgaagagtggtgtcgaacagggtggctattccgtga

SEQ ID NO: 7661 - DNA, 384 bp, BradyrhizobiumColbertium
atgaactcgttcctgacaaccgttgagcgaccgcaactcgggatggtcgctgccctcgttggatcgctgatgtgcgcggtcgcgattgtctggtcgatcgggtcgaccgaccgcgtcacctatctgggtgcggaccacggtcaggaacagacggccgcgcacgtccgcctcaagacgctccctcaaggaagctatgtgatcgagcgaggaccaatctatcaggcgatgcgcgcagggtgccgttacgacctcaatttcagccctcagttcggccgccacgtcagcgaccgccagagaacgaagtatatcaggagcgccgtgctggttgactgtcctccagctaagaccaaagcggccgcttcaactgtccggctcacggaatag

SEQ ID NO: 7662 - DNA, 210 bp, BradyrhizobiumColbertium
atggtgtcgccgggctcagtcgtcgcacaccgcacgccggcgcagtaccgccccgtgatggtgccgcagaccgtgatggtggcgccgcccagcgtccagtacgagcgcatcccgccgcaatacgccacgcgccagcgcgtcgaaatggtctcgcccggctattcctactacgccccggtgcagatgaactgcgcgtcctgcggctactga

SEQ ID NO: 7663 - DNA, 1851 bp, BradyrhizobiumColbertium
atgccagcctatcgctcccgcaccaccacacacggccgcaacatggcgggcgcccgcggcctctggcgcgcgacgggcatgaaggatgccgatttcggcaagccgatcatcgcggtcgtcaactccttcacccagttcgtgccgggccacgtccacctcaaggacctcggccagctcgtggcacgcgagatcgagcaagccggcggagtcgcaaaggaattcaacaccatcgccgtcgatgacggcatagccatgggccatgacggcatgctctacagcctgccgtcgcgcgagctcatcgccgacagcgtcgagtacatggccaacgcccattgcgccgacggcctcgtctgcatctccaattgcgacaagatcacgcccggcatgctgatggccgcgctgcggctcaacatccccgccgtgttcgtctcgggcgggccgatggaggccggcaaggtcaagctgcagggcaagaccaaagccgtcgacctcatcgacgccatggtggcggccgccgactccaaggtcagtgacgaggacgtcaaggtgatcgagcgctcggcctgtccgacctgcggctcctgctcgggcatgttcaccgccaattccatgaactgcctgaccgaggcgctcggcctcgcgctgcccggcaacggttcggtggtggcaacccatgccgaccgcaggcgcctgttcgtcgaggccggccacaccatcgtcgatctcgtccgccgctactacgagcaggacgatgccagcgtgctgccgcgcaacatcgcgaacttcaaggcattcgagaacgcgatgacgctggacatcgccatgggcgggtcgaccaacaccgtgctgcatctgctcgccgccgcccatgaagggcaggtggctttcaccatgaaggacatcgaccggctgtcgcgccgcgtgcccgtgctctgcaaggtcgccccgtcggttgcggacgtacacgtcgaggacgtgcatcgtgccggcggcatcatgggcattctcggcgagctcgatcgcgccggcctgatcgacacctcggtgtcgaccgtgcacgcgccgaccatgaacgaggcgctggaacgctgggacatcaagcgcaccaagagcgaggcggtgcggaccttctaccgcgcgtcgccgggcgggatcccgacccaggtcgccttcagccaggagcgccgctacgacgaactcgacgccgaccgcgagaagggcgtcgtgcgcgatctcgaccacgccttcagcaaggacggcggtcttgccgtgctctacggcaacctggcgcaggacggctgcatcgtgaagaccgccggcgtcgatgcctcgatcctgaaattctccggtcccgcgcgcgtgttcgaaagccaggatgccgccgtcgagggcatcctgggcggcaaggtcgtcgccggcgaggtcgtggtcatcatctacgaaggcccgcgcggcggccccggcatgcaggagatgctctaccccacgagctatctgaaatcgatgggcctcggcaaagcctgcgcgctcgtcaccgacggccgcttctcgggcggttcgtccggcctgtcgatcggccatctctcgccggaagcggccgagggcggcaatatcggtctcgtgcgcacgggcgatatcatcgccatcgacatcccgaaccgcagcatcaacctcgaagtctccgacgaggagctcgccaggcgccgcgcagcggaggaggccaagggcgattccgcctggcaggcgcaaggccgcaagcgcaacgtctcgaccgcgctccaggcatacgctgcgctcacaaccagtgccgcgcgtggcgcggtgcgggaggtgaagcgacgcgtgaagtaa

SEQ ID NO: 7664 - DNA, 861 bp, BradyrhizobiumColbertium
atgaccgatgccacgctgaaggatacgtctgtccgccgccacatcaacctgccggccattcccgtctcggtggcgctggcggtggcctggatcgtcgcgatgctgctgatcgcggccttcgccgagaagatcgcgccgtacggctatacccagctcgacctgcgcaaccggctggcggcgcccggcaatgctgcgcattggctcggcaccgacgagctcggccgggacgtgctgtcgcgtcttctcgtctccatccgcatctcgctgctgatcgcgttcggcgccaccgccatctcggccatcgtcggcaccacgctcggcttcctcgccgcgcatttccgcggggctgtagagcagctcgtgctgatgctgtccgacttccaggccagcatgccgttcctcatcatggcgcttgcggtgctcgccttcttcggcaactcgctgccgcttctggtcggcctgatgggcctgttcggctgggagcgctatgcccgcatcgcgcgtggtcttgccatctcggccaatgcgcaaggttatgcggccgcggtgcgccagctcggtgcgacgccgtcgcggatctatcttcggcacatcctgcccaatatcgcctcgacgctgatcgtctcgaccacgctggtgtttcccgaggtgatcctgatggaatccggcctgtcgttcctcggcctcggggtgcagccgccgatgaccagcctcggcaacatggtcggctacggccgggaatatctgacccgtgcgccctggatcatgctggcaccggcgaccaccatcgtggtgaccacgctggccgtctccgtgataggcgactggctgcgcgaccggctcgatccaaccctgcaatag

SEQ ID NO: 7665 - DNA, 930 bp, BradyrhizobiumColbertium
atgggacgctatctcgccattcggatcggacgcgccgcgctcacgatcgtcctcgtcgtcaccttcgccttcatcgtgctgcgactctccggggatcccgcgctgatgattttgggacccgaggcgccgccggaggtgctcgcagcgttccgcaaggcctggggcctcgatgatcccatctgggctcagtatttcgactatttcggcgccatcgccaaaggcgagctaggccgctcgatgcgcgacggccggcctgcgatcgagctggtgctggagcggattccggcaacgctggcgctgaccttgccggccttcttcttcaaggtcgcgctcggcattcccgccggcatctacgctgcgctgcatcgcggctcgggaattgatcgcgccgtgatgatgacggcagtggccggcttcacggtgccgagcttcgtgctggcgctgctcttggtcctcgtcttcgccgtgcagctcggctggctgccgtcaggcgggcaggacagctggcgtcacgccatcctgccgatcacgacgctgagcctcggcggcgccgcggtgctggcacgcttcacccggagcgcgatgctggaggtgctgggccagccctacattcgcacggcttccgccaagggcgtgccgtggcgcaaggtggtgacgtcgcacgcgctgccgaacgcagcgatcccgaccgtgaccattctcggcttcatggtcggcacgctgatcgcgggcgcggtcgtggtcgagagcgtctttgcctggccgggagtagggcggcttctcgtcgtcgccgtcgccaaccgcgatctcgccgtcgtgcagtgcatcctgttgctggtcgcgatgaccatggtgacgtccaatttgatcgtcgatttcctctacggctttctcgacccgcgcctgcgcaccaaaggagcgcacgcatga

SEQ ID NO: 7666 - DNA, 987 bp, BradyrhizobiumColbertium
atgaggcctccgctcgtcgaagtgtccgcgatctcgcgcagctatgccatgcgctcgggtatgttcggacgcgcgacggccgttcatgccgtcgacggcgtgtcgctcacgattgccaagggagagacgctcggcctcgtcggcgagtccggctcgggcaagtcgaccacgggccgcatcgtgctcggcctcgagccgcccgacagcggcgatgtgcggttcgagggcaggcccatggctgcgccgggaacggccgcgtggcgggcgcagcgggcgcggatgcagatgatcttccaggacccgctgggggcgctggaccggcgcttgcccgtcgcggttcaaatccgagagccgctcgacattcacggcctcggcacgcccgccgagcgcgaagatcgcgtccgggagctgctgcgcgcggtcgagctgacaccggcccacggcgcgcgctatcctggcgcgctctccggcggccagcgccaacgcgtcgtgctggcgcgagcactggccacgaaacccgatttccttgtttgcgacgagccagtcagcgcgctcgacgtctcgatccaggcgcaggtcgtgaacctgctttgcgacctgcaggcacaactatcgctgacgctgctgttcatcagccacgatctgcgcgtcgtcaggcagatcagcaacgtcgtggccgtgatgtatctcggccgcatcgtcgagatcggcagcgccgacgatctgtttgcgcggcccgagcatccctacacccaggcgctggtctcggcctcgcccgcgcctggccgccgcagcgcgggccgtatcgttctgtcaggcgatccgccgaacccggccgcgcggccgaacggctgcgccttccatccgcgctgtccgcgcgccgtcccgcgctgtgccagcgaggtgccggcgctcctggctgtcggcggcaaccgccaggtggcctgccatctcgtcacgggcgccgagacacgggacgccgcctga

SEQ ID NO: 7667 - DNA, 984 bp, BradyrhizobiumColbertium
gtgacgcagctgatcgccattgcaggcctgagcgtcgccttcagcggcgtgccggtgctgcgcggcgtcgatctcgctctgcaaaagggcgaggcgctcggcctcgtcggcgagtccggctccggcaagtcggtgacgtggctggctgcgctcggcctcctgccgcggcatgcgcaggtcgcaggttcggtgcggctggacggacgagagatcctcggcgcgccgtccgcagaactcgatcacgtccggggcgggcggatcgccatgatcttccaggatcctgccagcgcgctcaacccggtgctcaccatccgcaagcagctttgcgaagcgctggcgctgcatcgcgatctctcgggcgaggcggtgaaggcggaagcgcgacggctgctcgacctcgtcggcatccccgacgcgacgcggcggctgtccgcctatccgcacgagttctccggcggccaggtccagcgcgtcatgatcgcgatggcactcgccggaaatcccgatctgctgatcgcggacgagccgaccacggcgctggatgccactatccaggcccagatcctggagctgctctcgctggtccgccgcgagatgggcatggcgatggtcctgatcagccacgatcttggcgtcgttgccgagaattgcgatcgcgtcgcggtgatgtatgccgggcgcatcgtcgaagcggcgccgagcaaccagcttttcgccgatcccgtgcatccctatgcgcagggcctgatcggcgcattgccgccgctcgacgggccgcgtcggcgcctcactgccattcctggaacggtgcctgatccggcgcacatgccgagcggctgcgcctatgcgccgcgctgcgcgcttgccggcgaatcgtgtggccttgctgcgccgaccctggcgccgatcgccgatgaccgcagcgtcgcctgtgtccgcgccgaggcttcgcgccgcgcggtgctcgggatggctgcggaatga

SEQ ID NO: 7668 - DNA, 1638 bp, BradyrhizobiumColbertium
atgagcaaactcacccgtcgtaccatcctgaaatccggcggcgctgccgcgagcacgctgctgctgccgcgctttgcgatcgcgcaaggcgacaaccgtccgtcggtgacgatcgccgtgcagaaggtgaccaattcgaacgtgctcgacgtgctccgcgagcagtccaatgtcggagagcgcgtgttcttctcctcgatctgggaaggcctgatctccaagaactggcgcggcaatctcgaagccgtgcccggccttgccaccgaatggcgccgcatcgacgatcagaccgtcgaagtgaagctgcgccagggcgtcaagttccacaatggcgacgagctcacggcggaagacgtcgtcttcaccttcagccgcgagcgcatgttcggcgagaccgaggccaagaaccgctccaccatcagggccttcgagaagatcccgacgccgcggccgggcaaggagctgccgcccgacgtgccggccgtcgcccggcgcatctggccggacctcgtgcgcgtcgatgccgtcgacaagtacacggttcgcttctacaacgcgacgcccgacgtcaccatcgaggggcggttgtcgcgctacggctccgacatcatgaaccgccgcgcctgggacgaatcggcgagctatctcgactgggcgcgcaagcccgtcaccaccggtccgtacaaggtcgtcgagctcaagcccgacgtgtcgttgaccctcgaagcgcatgacgaatattggggcggccgcccgccgctcaagcgcatccgtttcctcgaagtgcccgaggtcgcgagccgcatcaacggcctgttgtcgggcgaataccagttcgcctgcgacatcccgccggatcagatcgccggcatcgagaagaactccgccttcgaagtgcagggcggcaccatcctcaatccccgcctcaccgtgttcgacaagaaccacgccgtgctcgccaatcccttggttcggcgcgccttcacccatgcgatcgaccgccaggccatcgtcgacagcctgtgggccggccgcacccgcgtgccgaaggggctgcaatgggagttctacggcgacatgttcaacgccgactggaacgtgcccgcctatgatccgaagctcgcgcaggatctgctcaagcaggccaattacaagggcgatgcgatcccctatcgcctgctcaacaattactacaccaaccaggtcgcgaccgcgcagatcctggtcgagatgtggaagtcggtcggcctcaacgttcagatcgagaccaaggaaaactggtcgcagatcatggagcgcggaccggcacgcgccgtgcgcgactggtcgaactcggctgcgttcaacgatccggtgtcctcgctggtcgcccagcacggcccgaacggccagcagcagcagatcggcgaatggaccaacgccgaactgaacaagctctcggagttcctggagacctcgaccgaccgcgccgcgcgcaagaaggcgttccgccgcatgctggagatcgccgagcgcgaggaccccgcctacaccgtgctgcaccagaacgcgaccttcaccgccaagccgaaatcgatcaagtggaaggcctcgcctgccttcgcgatggatttccgcgccggcaatttcgaggcctga

SEQ ID NO: 7669 - DNA, 816 bp, BradyrhizobiumColbertium
atgtcgaagccggtgctgggcgccgcattgtccatcaaatcgatccccgcgcatcgcgactggcttctcgaacggcagcgtgacctcgaaatacaggatttcttccgggccgatctgctcgacagcgattggcggagcaccgcgggcgagatcaagcagatgctcgcaggccataccgggcgcctcggcattcacggcccgttctggggattcaagatcgacagccacgatcccatgatccgccaggcggtgaccaagcgcttgctgcagggcctcgacgccgccgaattcctcggcgcgacgcagatggtgatccattccccgttcacgacctgggaccacaacaatctcgatctctatcctgacaatcgcggcaatctggtcgaacgcgtcaaagcaacgctcgccgaggtgatcgcgcgggccgagacgattggctgcgagatcgtgatcgagaacatcgaagacaaggatcctcgtgaccgcgtgcgcctcgccaaggcgctcgaaagcagcaaggttcgcgtctcgctcgacaccggccacgccaattacgcgcatatctccaccggagcgccgcccgtcgactattacgtcgaaactgcgggcgacatgctgacacatgtgcatctgcaggacaccgacggatttgccgaccggcactgggcgccgggcgaaggcaacatcccgtgggtcgccgtattccgggcgctgggacggctcacgtcgaacccgcggttgatcctcgagctccgcaatcacgacgacgtccgcgccggcgcagcccatctcgccgcgctcgggctcgccgaataa

SEQ ID NO: 7670 - DNA, 612 bp, BradyrhizobiumColbertium
gtgacgcagctgaagctcgagcgattcgtgatctaccttcatgatttcggctcaccgatcggggccaggctggcgatcatgcggcctgagagggtggtggcccagatcatccagaacggtgacataccttacgaagatgcgcttggtccgaaatacgcggacatcgagaaatcctggtcgctgcccgatcaagagttgcgtgcggcgatgagggaggctgttaccgaaggaaactttcgcgacgaattcctgaatgatgtgcgtgcagaattggcgggactcatcccgccggatctttggcaattgcactggtcgttggtgaccgaacggaggaaagacgcgatctcagaccttctgtttgacctcaaggcgaaccgtcaatggtttcccgagcatcgccgttatctccaacagcacaagccgcccacattgatcctgtgggggccgcaagatcattacatgcccgaagagtccggccgcgcctatttgcgcgacctgcctgatgccgaattgcatctcctggacggggggcattggctgctggaaaccaacctcgatgaagttgtctcgttgatgaggtcgttcctcgagcggattcaacctgactggtag

SEQ ID NO: 7671 - DNA, 234 bp, BradyrhizobiumColbertium
atggccaggagacgcacgacagatacggacgccgacgacctgccgcgctatttcgtctgggtccgcggcctcgagggccctgagccgcagaaatggatggcgatggattttggcgtcggcgactggaagcggcccctcgtgctcgcctatctggagctgccggcggacgaacgacagctgtcattgtcgatgcttgcccggcgatatccgccgccacgtgtcgatcttccctag

SEQ ID NO: 7672 - DNA, 690 bp, BradyrhizobiumColbertium
atgatcatgaccgaacagggcgagacgggtgaggccatcaccatcctcctcgtcgaggacgatgcgccgacctgctggcggctccaggatgcgctggtcaaggccggttacgaggtgcggagcgccggcacgctcgcggaggcgcggcaggccttgggcggcggcgcaccgcgcgtgctgctgaccgacctgcggctgcccgacggccacggcatcgaactgatccgcgagatgaggcagcgctttcccgacagcgagatcatggtgatctccgcgctgggcgacgaggagagcgtgatttccgcgatcacggtcggcgccaccggctatctgctcaaggatgcctttcctaccgacatcgccactaccgtgcgcgacctggtcgcgggacattcgccgatctcggcttcgatcgcccggttcatcgtgcggagaacacagggcgccgcacagaactcggcagagcaaccgcccggacctgcgctcaacacggcgaggctgaccccgcgcgagatcgacatcctgtggggcatcgcgaagggcttcagctatgccgagatcgcgagccatctcggcctgtccaagcagaccgtgcccggccacatcaagaacatctatcgcaagctcgaggtgcacacgcgcagcgaagcggtgttcgaggcggtgcagcagggcctgatcaagctgtga

SEQ ID NO: 7673 - DNA, 1938 bp, BradyrhizobiumColbertium
gtgagcgagctcgccgccaaggcacccatgaaggcaccggccaagtccgcacggcgccggcttttggcctcgcgactcgtgccctatctgctgttccaggcgctgatcgtggtcgccaccgttatgggcttgcgcctgctgcagccgagcgaccccgaggattctgcgctcagcggattctcgctgagggaggacggcttgatccgccccgtgacgctgccgcatttcacatcctcgcgctattccgtggcggacccgccattctacgccagcacctttacctaccgaagcgccgatgcggctgcgggctggtcggtgtacctgccgcgcttcagcaacgcggtggaggtcgccgtcaacggcgtcgtcgtgctcgactcccggcgcgacgccaacgccaaccggcccgaccgcaacacgccgcagatcgcagcgatcccggcttcgctgctgcacgaaggcgcaaacgagatcacggtgcggctgttcgtgtggggaccgctgaagggctttctcgacactgtctatgtcggcccggacgccgctttgcgcccggccttcgagacccgcacgctgctgttcgtcacgctcccggtggtattctccgcctggcaggcgatcctggccgtcatcctcgcgatcatgtggctgatgcggcgccacgagccggtctatggcgtgctggctgcagcgatggtgcttggcgtggtgcaggcgttcgcgccgccgccggtgccgcccgtcaccgtctcccggctggccgcggtgctgctggcgtcggcaccgatcgagagtgcgctgatcgtcatgttcgccgtgctgttcttcggctggcgctggccgcgctacggcacgctgctgttcgtgcccggcatcctggtgttcgcggtcgggctgctggggggcccgccgctgccgcgcattctcttcctggtgctcgggattcccacggtcgggctctgcctgttcctgatggcctgcatcacggcaaccgcggtggtgcggcggcaggatgctgcgagcttcacgatcggctgcgccgtgaccatcgtgctggtctgctggatccaggacatactcacggtgcttgagatcgcgaccaacgatcgcatcttcgtctcgcgtttgtcctattcggcgatgctggtcgcgatcggcgcggggctgacctggcgctttgcccgcgcgttgaaccaggtcgacagctttgccggccagctcgtgacacgcgtgcgcgaagccgaggagcggctgaaggcgagctttgcccgcgaggaggagcgcgcccgcgctgcggcgctcgccaacgagcgcacccgtctgatgcgagacctgcacgacggcctcggcggccagctggtgagcatcgtcgcgctgtccgagcgcggcaatgagggcgcgaccatcgcggacgccgcccgcgcggcactgaaggacctgcgcctcgtcatcgattccatggacgacattggcggcgacctgatgctcgcgctcggctcctggcgcgagcgcgcgacagcccagttgcgaccgcacgacatcgcgctagactggcgcgtggcgacgccgcagggcctgccgctgcatcccgaactcaggccgtggcatgtcatccagatcatccgtatcctcgacgaggctgtgaccaacgcggtcaagcacgcgcaggcccgccacgtcgcggtcaccatcgagacacgtgacggcagcgacagaccttatggcgtgatcagcgtggcggacgacggccgcggcttcgcgctggccggcaatagcacggccgcgggcaccggccagaccgcgcgcggcctgcgcaacatgagaagccgcgcggcgcgctgcggcgcaatgctcgatctgagctcggatgcctcaggcacgcgcgtgcaactgcaattgccgcagcgctttcccgacagcgacatggctgcgggctga

SEQ ID NO: 7674 - DNA, 291 bp, BradyrhizobiumColbertium
atgtcgaagagagctggagcgctgagcgccgggctgacgatcatggccctggcgggcgcggcgatggtctcgctgggcacgagcccggcgcaggcggtggtttattgcaagaccgttggggtgcccaagggctgcgtggtgcggccgactgcggcggtggtggtcgcgccgggagctccggttgcgcgggctgcggtcgcgacccccggcgtcggtgcgcccggcgtcggcgtgcgcgcaggtacgccgatgaatcgcggcggcccggtcaatcgcgtcggccggcgctga

SEQ ID NO: 7675 - DNA, 225 bp, BradyrhizobiumColbertium
atgaagatttcggttcttgccgcgctgctgctcactgccaccgccctgcccgctgctgcgcaatccggtccatcggcccaggagcaaatggcctgccgcggtgacgccagcaaattctgcgccgagcacatcggcaagccgccgcagatgaacgcctgcctccgcgagaacaagtcgaagctctcggattcctgccgcaaggtcgttgaagcgcgcggaggctag

SEQ ID NO: 7676 - DNA, 423 bp, BradyrhizobiumColbertium
atgaaacatgtcggaaactgcttctgcggcgcggtcacggtcgaagtcgcgggcgcgccggaggcgatgggctattgccactgccgttcctgccgctcctggtcgggcggcccggtcaacgccttcagcctctggaagccggaggcggtgcgcatcaccgagggtgctcagaatgtcgagaccttcgtcaagacgccgctcagccaacgcaaatattgcaggaagtgcggcggccatctcatgaccaaccatccgccgctcggtctggtcgacgtcttcgccgcaaccatcccgacgctcgcattcacgcccggcgtccacgtcaactattccgagaccgtgctgccgatgcacgacggcctgccgaagctgaaggatttcccagccgaattcggcggcagcggcgagatggtgcaggaatag

SEQ ID NO: 7677 - DNA, 789 bp, BradyrhizobiumColbertium
atgacccaaattgatcaccaggttcattccatcggcccggatgttgcgggctctcgcattttcaagttcctcgcctttctgtacggaattgcggcctatctcgtgtttttcgtcaccattctctacgccatcggcttcgtcatgggggtgatggtgcccaagacgatcgacagcggagccgaagcgcctgtcgttcgcgcggtcatcgtcaacctgctgctgatgtcgctgttcgcggttcaacatagcctgatggcgcgccagcagttcaaggcttggtggacgcagttcgtccccaagccggtcgagcgaagcacgtacgtgctgttcgcgagcctgtcactgctcctcctgttctggcagtggcgcccgctgccgtccgtcgtatggaacgtcgaagatccggatcttgccgtgacactggtcacgctgtccctcggcggctgggtgctggtgttcacctcgaccttcatgatcaaccactttgaactgttcggcttgcatcaggtgaccaaccaactcgtcggcaaggagacggcaccgccgcgtttcaagacgccgctgctctacaagttcgtccgccatccgatctatctcggctttatcgttgcgttctgggcggcgccgaccatgaccgcggggcatctgctgttcgcggccgtgaccacgctctacattttcgtcggcatcgcgctggaggagaatgatctcgtcgctctcttcggtgacgagtaccggcagtacaggcagcgggtctccatgcttattccgtggcgccggtcagtatag

SEQ ID NO: 7678 - DNA, 1545 bp, BradyrhizobiumColbertium
gtgcgatttcactttgaaaacaacgttcttgacggcgatctgcgggagctcacccgcgatggagcagccgtgccgctgcagccgcaggtgttcgatctgttgctctacctcgtcacggagcgcgaccgcgtcgtcagcaaggatgacctaatcggtcggatctggagcgaccgcatcgtctcggattcagcgctgaacagccggatcaacgcagcgcgaaaggcgctgggcgacgacggctcgacccagcggctgatcaagaccattgcgcgcaagggattccggttcgtcggcgaggtccgggaagaagcggcggcatcctgtgcgcaggcggaagccgagggaacgcccccgcgcgtggtcgaccgcccggccgtcgcggtactcgccttcgagaacctgagcggcgatcccgcgcaggactatttcggtgacgggatcagcgaggacatcctcaccgcgctgtcgaaacagcgctggttcatggtgatcgcccggaactcgtccttcacctacaaggggcgcgcggtcgacatcaggcagatcgccgaggaactcggcgtccgctacgtcgtcgaaggcagcgtacgcaaggcggacaatcgggtgcgcatcacagcgcaactcaacgacgccgtatcgggacgccatctctgggccgagcgctacgaccgcgagctcgtcgatgtattcgccgtgcaggacgagatcaccaatgcgatcgccgcggccatcgagccgcagatccacgcggcggagaatgttcggagccgtcgcaagccgcctttgagtttggacgcctgggacctcttgatgcgcgcgttgtcgcattactggcgcgtgacccggcaagatcacgacgccgcacgggcactgctcgagcgcgcgctgacgatcgatccgaactatggccaggcgctgtcgctgctcgccgttaacgacatgttcggcgtgcatctcggctgggttgagctggccgtggtcgccccggccgcggaagctgccgcgctcgcggcgctgcgctgcgatcatgaggattcctgggcgcatgcgctcggcagcgtctgcttctcgacccgcaggcttgcggatgcgctgtcggagttcgagcaggcgctggcgctcaatccgaacttctcgctggcggagggctactacgcgctggcgctgtgctatgctggacgaccgaaggattcgttcgaggccgcgcaacgggcgatccggctgtcgccgcgcgatccgtccttggcggtctatcacggcatcgccgcctatgcgcgtttcaccgaacgtcgctatgaggaggccatcgcgctggcccgcgaggcgatccgccaccgcggcgatctcaccggcgcctaccgcgtgctcgctgtctgcgcgggaatgacgagtgacggagcgcttgcggagatggcactgggcgagctccgccgtactcagcccggtatctcgctgcactggatctctacacagctgccgtgggccaacgacgcggatcgcgagcactatctggagggatttcgccgggccggattgcggtga

SEQ ID NO: 7679 - DNA, 486 bp, BradyrhizobiumColbertium
atggacattcaggccacgactatcccagccgatgacgatcacggacctgatatcgctggcctcgatgtgacggcaaaggcgggcctgcaacactgcctgcaattgctgggcaatgccggtctgcgcccgacgcgccagcgcctggcgctcggccagttgctgttcctgggcggccatcgccacgtcacggccgagagtctctacgaggaggcgatggcggcgaatacgtacctgtcgctcgccactgtctataacacgctgaaccagtttaccgaagccggcctgctccgccgcatcgcggccgacggtctcaagtcgttcttcgacaccgacacgtccgtccatccgcacttctatctcgaaggcgaggatgtgctggtcgacgttgccgacggcctcgccttcaccaagctgcccgaggcgcttcccggccacgagatcgcgcggctcgacgttattgtccatttgcgccggaagcgtacatag

SEQ ID NO: 7680 - DNA, 312 bp, BradyrhizobiumColbertium
atgtccaagccgattcccgacaaggcagagatcgcgctcgaataccctgacaagttctatgtcggcaccttcgagcattcgtcccgcttcgaggcacggctcgacggcagcggcgtcacagtggtgcttcagcatccgggcgcgacggacgaacgcaaatcggtgcatctccacatcaatttcggcctgctcgccggcatcctgcgtgacctcgcaggcagcgtcgctggcatacccaaggacgacatcgcgcaccgcgagcagctggccgaggcgctcgatgagctgcggcgggcgctcggcaccaattag

SEQ ID NO: 7681 - DNA, 1551 bp, BradyrhizobiumColbertium
atgccgaaaagagtgttgcttggtcttctcctggcttgcggcctcacggccccgacactggcgcaggagcccaaagcggggggcgtcatcaatgccgtgatccagcccgaaccgcctggcctgatgcttgcgatgatccagaacggtccgacccagatggtgtcgggcaacattttcgaggggctgctgcgctacagtcccaagctcgagccgcagccggagctcgcggaaagctggagcgtcagcgaggacgccaagacctacaccttcaagctcaagaagggcgtgacctggcatgacggcaagcccttcaccgccgccgacgtattgttttcgatggagatgctgaagcagacgcatgcgcgggcccgcaccaacctcgcgcaggtcgacagggtcgaggcgcctgatgactacaccgtcgtgttcacgctgaagcagccgttcggccccttcctcggcatcttcgaggtcggctcgatgccgatcgtgcccaagcatctctatgagggcaccgacttcaagaccaacgcatacaacaatgcgcccgtcggcaccggtccgttcatgttcaaggagtggcagaagggctcgttcatacgcctcgtcaagaacccgaactaccacgagaagggcaaaccctatctcgacgagatctattggcagatcattcccgacgccgcggcgcgctcggtggcgttcgaaacgggcaaggtggacgtgctgcccggcgggtcggtcgagaatttcgacgtgccgcggctgtccaagctgaaggacacctgcgtcaccggggccggctgggaattcttctcgccgttggcctggctgtggctgaacaaccgccagggtccgctcgcggacaagcgggtccgccaggcgatcatgtacgcgatcgaccgcgacttcgccaaggacgtgatctggaacgggctcggcaaggtcgcgaccggcccgtccgcctcgaccatcaagtactacaccgacgacgtgaagaagtatccctacgatccagccaaggccaaggcgctgctgaaggaagccggctacaagggcgagaagatccgcctcatgccgctcgcctatggcgaaacctggcagcgctggggtgaagcggtgaagcagaacctccaggacgtcggcatgaacatcgagacgatcgccaccgacgttgcgggcggcaaccagaagatcggcgactgggattacgacatcgccttcacctatctctaccagtacggcgatcccgcgctcggcgttggccgcaactacatttccagcaacatcgccaagggccaggtcttcaataatgtcgagggctactccaacccggagatcgacaagctgttcgccgagggcgccgtcgccaccccggattcgaagcgcaaggagatctacgagaaggcgcagaagatcctggtcgaggacgtgccggtggcctggatgctcgagctgcaattccccacgattacgcggtgcaaggtcaagaacctgatcaccacgggaattggagtcaatgacggcttcaaggacgcatggctcgacaagtga

SEQ ID NO: 7682 - DNA, 972 bp, BradyrhizobiumColbertium
atgcttaccttcgttgctcagcgtgtcgtcaagggcgtgatcgtcctgctcgcgatcgtcgttctcaattttttcctgatccggctggcgcccggcgatcccgcggtcgtgatggcgggcgaggccggcgccagcgatcaggtcttcgtcaaacagctcagggagaagttcggcctcgacaagccgctgcccgagcagctcttcatctacgtcaagggcgtcgtgtccctggacctcggcttctccttccgccagcaggcaccggttgcaaagctgatcggcgaacggctgcccgcgacgctgctgctgacgctgaccgcattcgcgatttcgctcatgctcggcatcctgttcggcactttcgccgcacgctttgccgggaccttcctcgacacggccatcaccgtgttcgccctgatcttctacgccatgccgatcttctgggtggcgctgatgggcatcctgttgttctcggtcacgttcgattggctgccgagcttcggctacgacacggtcggcgggaattatacgggtcttgcccatgtggtcgacgtcgcaagacacctggtcatgccgggcatgacgctgggcctgttcttcatggcgacctacacccgcatgacgcgcgcctcgatgctggaggtgaaacgcctcgacttcgtcaagacggcgcgtgccaagggtctcgccgactccgtgatccagcgccgccacgtgctgcggaacgcgctgcttcccgtcgtgacgctcgccggcgtgcattccggcacgctgatcggaggcgcggttatcaccgagaccgtattcgcctggccgggcatcgggcggctgatgtacgacgccctgctgcagcgcgactacaacctgctgctcggagtcttcgtgatctgctccgccatggtcctgatcttcaacctcatcaccgacctggtctatcgactggtcgatccacgcatcgaattcgcctcatga

SEQ ID NO: 7683 - DNA, 840 bp, BradyrhizobiumColbertium
atgaaacagttctggaaatcgatactgaagagtccgagtggcgtcatcgggctcgtcatcctgctgttggcgatctcggtcgcggtgttcgggccgatgttgttcccgaactcgccctggcgcatggtgcagcggcccttcctgccgccgttcacgctctcgacggtgccgagcggcaccgacgcgctcggccgtgacgtgttcgcgggcatgatcttcggcgcacgggtatcgctgctggtcgggctcgtctcgacgctggtcgcactggtcgtcggcgtgccgatcggcgccatggccggctatttcggcggcaaggtcgatgacgccttgatgcgcttcaccgaattcttccagaccattccgagcttcgcgctcgcgatcgtgctcgtcgcgatcctgcagccctcgatctactcgatcgttgcctcgatcgccctggtgagctggccgccggtcgcccggctcgtcaggggcgaggtgctgtcgctgcgcacccgcgaatatgtccaggccgctgtggtgaccggccagagcaacagctggatcatcctccgcgaaatcctgccgaacgcgttgtcgcccgtgatcgtgctggcttcgctgatggtggcgaccgcgatcctcctggaatcctccctgtcgttcctcggcctcggcgatcccaacttgatttcctggggttacatggtcggcgccggccgcaccgtgatccgtcaggcctggtggatcacggtgtttcccggcgtcgccatcctgatctcggtgctcgggctcaatctgatcggtgaaggcctcaacgatgcgctgaatccccgcctgtcccgggagggccgctga

SEQ ID NO: 7684 - DNA, 276 bp, BradyrhizobiumColbertium
gtggccgacgaagccgtctccgcgctcgacgtgtcagtgcaggcgcaggtattgaagctgctcgaagatctcaaggcgcgcctcggcctctcgatgctgttcatcacccacgatctgcgcgtcgcagcccagatctgcgaccgcatcgcggtgatgcaacgcggcgccatcgtcgagctgaagccgaccgcgcagttgttcgccgcgcccgagcacgcctacacgcgcgagctgcttgcggcggtaccgggtcggaagcaagcgtccgccgcctga

SEQ ID NO: 7685 - DNA, 285 bp, BradyrhizobiumColbertium
atgaaagccatcaacctcgccattgcggcgctcgttacgtccgggctgcttgtcgcgccgttcgcggctgaagcgaagaaggcccggccgagccggacttacaccactggcgtgggggcgccgacctatagcggtgccggagcgccggtcgcgcagccgaggtcgtcctacgggtcgtccggacagacggtcggcacagtcacggcgccctcgttcggatcatacaattggccatcggtcggcgtgaccaactcggtccccacatggagcaacaccacgcgatag

SEQ ID NO: 7686 - DNA, 321 bp, BradyrhizobiumColbertium
atgaccggcgccgaactgaagcagcttcgcaacgatctctccgacgccctggagcgaaagctcactgcggccgacatggccaagctttgcggattgcctgagagaggcggcgccgacacgatccgacgctgggaggtcagcggcccaacacccgaggcgacaaagatattgcgcgtcctcgcgatggcgagcgagcgctatccgatcctggagaagttcgacgtcttcgatcgtcatgacgtgcgcgaggaagaccggccggcgaagcgcgccgcgttccgcgagcagatgcgcgatgaggcgcggcggcggcttggttaa

SEQ ID NO: 7687 - DNA, 780 bp, BradyrhizobiumColbertium
gtgacggcgcggaaagcgcgcctgccgggacctgacgtgttggagttcaagaccatgaagaagattctgtttgcgaccgtagcgctgctcgcggtgggcgcggctgcgcctgccgtcggcgccgatctcggcaaccgcaactactacaagacgcccgcgccggcctacgctgcgccgatctacaattggacgggtttctacatcggtgcgcatctcggcggcgcgttctccagcgacaacaatttcaacggcctctccactggaaacaacggcaacggccgcttcctcggcggcgtgcaggtgggcgcggactggcagctcaacccgtacttcgtggtcggcctcgaaggccagtattcctggctgtccggcagcgtcggcgcagtgttccccggcggcgtcgcctataccaacgaccagcgcggcctcggctcgatcaccggccgcgtcggctacacatggggtccgggcctgctctacgtgaagggcggctacgcctattcggacaacaacgagaaggtgaccgtcggcggcgtgcccaccgccttcgtcatcacgggcgatcaccgcaacggctataccgtcggcgccggcctcgaatacatgttcgcccagaactggtcggccaaggccgagtaccagtactacaatttcggcgacgcgagcttcaccggcggtccgctcgcgggcaccggcagcttcaccaccgacgaccataccttcaaggcgggcgtcaactaccgcttcaattgggcaagcccggcggtcgcgcgctactga

SEQ ID NO: 7688 - DNA, 384 bp, BradyrhizobiumColbertium
gtgaagagcctggcgagccagactgcgaaggcgacggacgagatccgcacgcagatcgccagcatgcaggaggtcaccacctccgcggtcggcgccatccagggtatcggccggatcatcggcgagatcaacgacgtcaccacgacgatcgcggccgctgtcgaggagcagggcgccgccacgcgcgagatcgcccgcaacatccagcatgcggccggcggcaccagcgaggtctccagcaacatcgtcggcgtatccaccgcctccgccgaggcgggcgccgcggctggcgaagtgctgagcgcctcggacgcgctccggcgcgaggccgatatgctgcgcggggagatcgacgcgttcctcaacgacatccgggcggcctga

SEQ ID NO: 7689 - DNA, 1062 bp, BradyrhizobiumColbertium
atgagttcaaaaaccgacaccgcacaatcctcggccgaggccctgcgctacccctgggaacagcaccccggccccgaacagatcgtggagatcaggcccggcgtgttgtgggcgcggctgaagctgccgttccgcctcaaccacgtgaacatatacctgctcgccgacggcgacggctatgcgatgatcgacgccggcttcggcaacgaggaaacgatcgaagcctggacgaagctgtttgatggtccgttgaagggcgtcgacatcacgcggttgattgtcacccactcccaccccgaccacgtcggcctcgcgggatggatcgtcgagcgtttcaactgcccgctggtgatgtcgcaggtcgaatatctgcagtcggtctatcaccagaaccgcggcaccgacgagcggcgcgaggcccagcggctgttcttccgccgccatggcatggacgagtcgctcaccgaaaagctgctcggtcgcggccaggactatctcaagcgggtctccgtgctgccgccatcctaccgacgcatctcccacggcgaggatgtcgtgatcggcacgcgccgcttcagggtaatcaccggcggcggccacgcgctcgaccaggtgatgctgtattgcgccgacgacaagctgttcctctctgccgaccaggtgctgagcaagatctcgccgaatgtcagcgtctgggcggtggagcccgagcagaactcgctcggcgagtatctggcctcgctcgccagcctcacgacgacgcttccctacgacgtgctggtgctgcccggccacggcgtgccgttctacggcttgaagacccgcatcaagcagctcgccgaccatcacgaggagcgctgccggctgatcgccgaagcctgccgcgagatgccgcagacctcgcgcgcgctggtgcctgtggtgttcaacaagcacgtgctggacgagcaccagatgggctttgccgccggcgagctcgtcgcccacgtcaactacatgatcgtcgagggccggctgacggccgagatgcaagacggcgtgctgcgatttcggacgacgtaa

SEQ ID NO: 7690 - DNA, 1413 bp, BradyrhizobiumColbertium
atggacatggtgacgccggccgggcaggccgaccaattgctcggcgccctgcgcgacagacttggtgcggccgcggtactgatgggcagtgaagtgcccgcccgcaattgcaacgattggagcgcgagcctgccgcagacgccgctggcggtgatccgcccgctcgatgcgcaaggtgtggcggatgcgatcgcggcctgccggcaggcgcgccttcccttcgtgccccagggcggactgaccgggctgtgccgcggcgcttcccccgaggcgggctgggttgcgatctcgctggagcgcatgaccggcatcgaggagatcgatcgcgcgtcgatgacgatgacggtgaaggcaggcacgccgctggagacgatccagaaggctgccgacgaggccggcttcttctttccgctcgacctgggctcgcgcggctcctgcgcgatcggcggcaatctctccaccaatgccggcggcaaccgcgtgatccgctacggcatgacgcgcgagctggtgctcggtctcgaagtggtgctgccggacggcaccatcatcactggcctcaacaagctgatgaagaacaatgccggctatgacctgaaacatctgttcatcggctcggaaggcacgctcggcatcatcacccgcgtggtgctcaggctgtttccgaagccacgctcgaccatggccgcgctctgtgcactgacggactatgcggcggtgatcgcgctgctcgacgccgcgcgcagcgggctcggcccgctgctctcggctttcgaggtgatgtggccggactattgggacgtgatcacgaatcgcgcgggggtgaagccgccggtcgcggcgggccacggcctctacgtgctggtcgaggcgcaaggcaccgatgagagcgtcgatgcgccgcgcttccaggcctggctcgaagagctgatggagcgcgggctgctggcggatgccgccgtcgcgcaatcgctggcgcaaacgcaggccttctggcgcgtgcgcgacatctgcgccgaatttggccaggtgctggggccgcacatcgcctacgacatcggccttgcagtggcgcgcatggacgagttcgtcacgcgctgcaaggcggcgcttgcctccggcatcaagggttgcgagagcgtctattacggtcacatcggcgacggcaatctgcatctcgtctcctgggtcggcggcctctcggtcgcgcagcagccgaaggaggagatggacgcgatcatctacggtctcgtccgcgacatgggcggcagcgtctccgccgagcacggcatcggcaccttgaagaagcagtggctgggccacgccaggagcgaggccgagatcgcgctgatgcggacgctgaaggcggcgctcgatcccgaccacctgctcaatccaggcaaggtgatctag

SEQ ID NO: 7691 - DNA, 120 bp, BradyrhizobiumColbertium
gtggaacagctcgaaaaggcgccatcggttgaggatcgcgacaagatcgagcgccagctcgagcagatcaacaccgcgctggactttctggacggaccgggagcgaaggatgagcggtga

SEQ ID NO: 7692 - DNA, 2034 bp, BradyrhizobiumColbertium
atgcgtagcatcatggacacccagatgatcaccgccgcaaagccgctgatggctcacgcgcgcccgcccaagccggcaccgttcctccccatgagccgcgccgagatggatgcgctcggctgggacgcttgcgacatcgtgctggtgaccggggatgcctatgtcgatcatccaagcttcggcatggcgatcatcggccggctgctggaagcgcaggggttccgggtcggcatcatcgcgcagccggactggcactcggccgagccgttcagggcgctcggcaagccaagagtgttcttcggcgtcaccggcggcaacatggactcgatggtgaaccgctacaccgcggaccgccgcatccgcagcgacgatgcctacacggccggcggcgaaggcggcaagcggccggaccgctgcaccatcgtctacgcgcagcgctgccgcgaggcgttcaaggacgtgccgatcgtgctgggcggcatcgaggcctcgctgcgccggatcgcgcattacgattactggtccgacaaggtgcgccgctcggtgctggccgacgccaaggcggacctcctgctctacggcaatgccgagcgcgccgtcgtcgaagtggcgcagcggctcgctgccggcgaggcaccgcgcgaactcgacgacatcaggggtgtcgcgctgttccgcaaggtcccgcccgattacaccgagctgcacgccgacgatctcgattccgccgacgaaggcgcgtcgcgccaacgcgggccgaccgtgatccgcctgccgtcactggagcaggtcgagcaggaccgcgaggcctatgcgcgcgcgtcacgcgtgctgcaccgggagagcaatcccggcaatgcgcggccgctggtgcagcgccatggcgaccgcgatctctggctcaacccgccgccgatccccctcaccaccgaggagatggatgcggtctacgatctgccgtacgcgcgcgggccgcatccgtcctacggcgatgcacgcatccccgcctgggagatgatccgcttctcggtgacgatcatgcgcggctgcttcggcggctgcaccttctgctcgatcaccgagcacgagggccgcatcatccagaaccgctcggagggctcgatcctgcgcgagatcgagaagatccgcgacaagacgccgggcttcaccggcgtcatctccgacatcggcggccccaccgccaacatgtaccggatggcctgcaaggacccgaaggtcgaggccgcgtgccggcggccgtcctgcgtcttccccgagatctgcccgaatctcaacacctcgcatgacgatttgatccggctctatcgcaaggtgcgcgagaccaagggcatcaagaaggtgatggtcgcctcgggcgtgcgctacgacctcgcggtggagagtcccgaatacatcaaggagctcgtcacccatcacgtcggcggctatctcaagatcgcgcccgagcataccgagcgcgggccgctcgacaagatgatgaagccgggcatcggcgcctacgacaagttcaagcggatgttcgacgaggcggctgagcgcgccggcaagaaatattacctcatcccctatttcatcgcggcgcatccgggcacgaccgacgaggacatgatgaacctcgcgctctggctgaagaagaaccgctatcgcgccgaccaggtgcagaccttcctgccctcgccgatggcgaccgcgaccgcgatgtaccacaccggagtcaatccgctgcgcggcgtgcgccacggcggcagcgacaaggtcgaagcgatcaagggcctgcgccagcgccgcctccacaaggcgttcctgcgctatcacgaccccgacaattggccggtgctgcgcgaggccctgatcgagatgggccgccgcgacctgatcggctcgcagccgcaccagttggtccccgcgcaccagccgcccggcaccggcaaggccgcgggcaccaagcgtccgctacgatcaggcggcaggacgcagcggttcacgaccaagggcctgcgggtgatgaagtag

SEQ ID NO: 7693 - DNA, 294 bp, BradyrhizobiumColbertium
atgcaggtttacaatgtggtcaagttcaaggtgaagtccggcgcagaagccactttcctcgatgcgcaccgagacgggaaggcgaaatggccgggcctggagcacggcgtcatcatcaggaccggcgatcgaaccttctgtctcgtcggcacctgggccagtcaggatgcgctggtcgccgcccgatcggcgatgatcaggaccctggacagtttcaggtcggtgctcgaggaccagggcaacggacgcggcgtgactgatgcggtgtcaggcgaggtcgtgctcgcgctgtag

SEQ ID NO: 7694 - DNA, 414 bp, BradyrhizobiumColbertium
atgaacctcgtcgaaatcaccctgcaagcccttgacgctgccgagcgcgcgatctccccgggccagcctgtctatatgctcaatctgctgcgctaccgcgcgtatgctcgatacgaggagggattcgacgccgcgccctgctcgggccgcgaagcctatcatgaacgctataggccggcattccggcgtctcgcggccggcaagccgctcgtgcggatgttttccgggccggtcctcacgagcctcgtcggctcgccgagcgaacgctgggacgaagcggcgatcaatgaatacggcgatttcaccaccttccgctcgatcgtcgacaccgagacttaccggcgcgaagccgcccctcatcggcatgcggcgctggaggatttccggctgttcgcgctcgctaaggcgatgtga

SEQ ID NO: 7695 - DNA, 936 bp, BradyrhizobiumColbertium
atgtccacaacgaccttacctcccgacgtctcgcgtctcctcgccttcgtccgcgtcgtcgaggcaggctcgttcgccgaggccgcgcggcgggcggggacgaccacctcggcaatgtccaaggcggtcgcccgcttcgagaagtctcgcgggttgcggctcttgcatcgctccacccactcgttggcgctgaccgaagagggcgacaggctgatggcggcgggacgtgcgttggtcgaaagtctcgcccgtgtccaatccgtgctcggcgaagtcgcgcgcgacgatggcgggcgggtgcgtgtgactgctccggcctcgttcgcgcgggcctgcatcctgccgcgactgcccgcgttcctgcgggaacggccggaaatcgagatcgaggtcaaattccgcaacgagattctcgatctcgcggcggaaggcgtcgacgtcgcgatccgctcggggcccctcgaccgtgcgcccggccatcaggcgcggcggctttgcacgttctcctggatcgcttgcgcctcgcctgcctatctgaacgcgcgcggcgcgccggcgactccatacgagctttccgctcacgaccatgtcggcttccggaatcccgcgagcggtcagatcctcacctggcgcttcgccgacccgcgcggcaaaggccccattcgagtcacgcccaagcccaagcacatttgcgacgatgcgcacgcttcgctcgctttgatcgcgaatgggtttgggatcggatgggggccagcgtggctcgtcaacgaagaccttcgcgccggccggctggtcgaagtgctcgcgccctggcgcgcgtctgccgaacccctatggatgctgcgcacctccgaccgccgcccgcccccgcgcacgcagcgcgtcatgtcgttcctcgccacgcttcccgccgcgttcaccgaaaaggcggtgtga

SEQ ID NO: 7696 - DNA, 459 bp, BradyrhizobiumColbertium
atgaaacgagattcccgcctctccggcgtgctgcacgtgctgctgcacatggcgcagcagccggggccattcacgtccgagaccctggccaaggcgatggacaccaaccccgtggtgatccggcgcatcatggccggtctgcgcgagctgggttacgtgcgctccgagaaggggcatggcggcggctggcggcttgcgtgcgacctctcgaaggtgacgctgcgcgacgtctatgccgcgcttggcagtccctcgctgctggcgatgggcaaccggacggagtcgcccggctgcctcgtcgagcaggccgtcaatgccgcgctcgaccaggcctttcacgatgcggaggcgctgctgctgtcgcgcctcggcgaagtgacgctggcgatgctcggcgaggacctgcgcaagcggctcgggtctcgaaagatccacgacatcagcgcgcaccgcgcgtga

SEQ ID NO: 7697 - DNA, 684 bp, BradyrhizobiumColbertium
atgaccgacattcaagccgcattctcggatccgcaattcgtggctcgctacaccgaagggccgcggcgcttcgtgcccggctatgaagcgatgcagtccatggcggcgattctgctggccgaaagcgtccccagcggtgggcgggtgctcgtcctcggcgccggcgggggcctggagctcaaggcctttgcgcaggcgcatcccggttggagcttcgacggcgtcgacccgtccgcggcgatgctggcgctcgcagagcagaccctgggaggacttgcatcacgcgctcgctttcatcaaggctatatcgacgatgccccgccgggaccgttcgacggggccacctgcctgttgaccctgcacttcgtcgatgtcgccgaacgacgtcgcatcgcctcggaagtccgccgccggctcaagccgcgcgcaccgttcgtgatcgcccatctgagcgcgcccgacggagagaaggaacgtccgctgtggctggcgcggtactccgcattcctggcctcatccggcgtcgagccggaccaggccgcggccgcgaaggatgccgtcagcaaccatctgcagatcctggcgcccgcgcaggacgaggcgatcctgcgcgaggccggtttctccgacccgacgctgttctatacgggtttcgccttccgcggctgggtggcttacgcctga

SEQ ID NO: 7698 - DNA, 114 bp, BradyrhizobiumColbertium
ttgaacggaatcaaatctgtcgaagagaagggctcgcagccgccaatgactgttgacttccgcttgtggccctttgccggcatgcagcagcgagccgacgatgtccggttgtga

SEQ ID NO: 7699 - DNA, 588 bp, BradyrhizobiumColbertium
atgagcgcaaactcggaaatcaaatctgcgggcgccaacattcaggcaagcactatcagcaccattgtacttggctttgcagccgatccgatggcgcgttgggtttggcccgattcatccgaatatctcaggattatgcctcagttcgtcaaggcatttggcggacgggcattcgagcatggcacagcttacatcacagaaggggctcgcgcggccgccctgtggctgccgcccggcgtcgagcccgacgaaatggccatggacgcactcatggcgcaatccctgcgtccggagatcgccgatgatattggacacatgctccagggaatggccgaacatcatccccgcgagccccattggtatctgcccctcattgcctccgatccgaactggatcggccaaggtctcggcacattgttgatgaagcacgctcttcgacgatgcgacgaggagggcatcgccgcctacctcgaaagttcgaatccgcgaaacatctccctttataaacgccacggcttcaagatcatcggcgagatacaacatggtacttcgccgacgatgacgccaatgttgcggacagcttcttga

SEQ ID NO: 7700 - DNA, 207 bp, BradyrhizobiumColbertium
atggcgatgagagcggaaatcaagcgagcaatcgaagctgcatcacggggggaaacacaacaactctactggtcgctggtggtgatgggcaatctcctgagcaacgctctggacaggattgacgcactagagaaggtcgaggtcatcgacggtcaaagcgaagtcgatccttgtgaggtgcgcgcgctggtggatgcgcagccctga

SEQ ID NO: 7701 - DNA, 459 bp, BradyrhizobiumColbertium
atgctgagaatggcgttgttgggcctcgtcatcctgctaagtgtgggcgtgctgtccgccatggagctgaccgctccaccgcgtcgcgcggtcacgatacttcagccgcctgccgagcagagcctgaccatcccggcttcccatagtccgttgccgaaggccgatcgtctcgaggtcgctgtcagcggcgcgatgccgacagaggccgtttcggtcgagaattccgctgctcaggacgtgcttatcagctcactcccgccagcgccgaacgtgcgtcaaagaagtaagccgaagccggtcgcaagcgacgagcgtccgaagccgaaaccgaaggcaagtgttgtcaagcgaaccaccaacgctcagcgtgcgaggattgcgagcgagaccaagtcctgtcgactcaaggcgttcggtggcctgctcaaggcactgaatttgaacggctgtgagatctga

SEQ ID NO: 7702 - DNA, 486 bp, BradyrhizobiumColbertium
atgcagcgcgccaatcctgcttcgttccgcgaggccgcctcgcgctttgcgaccggcgtcgcggtgctgaccgcgctggacgagcacggccgcatctgcggcatgaccgccaacagcttcgtcaccgtcagcctgtcgccgccgaccgtgctggtctcggtcatgccggggcggatgcaccgggcgatctcggcgaccgggcgctattgcgtgaatgttctgcccgaccatggccgcgacctgtcgcggcatttcgccagccagccgaacgcgggcgctgaccccgactacgagatcgtggatggcctgccgcgcctgttcggctgcatcgcctatttcgcctgcgaggtcacacgccacgtcgatgtcagcgaccacacgctgatcatcgccgaagtctcggcttgcgatcatcgcgacaccacgccgctggtgttcttttccagccggtaccatcgcggagcgggggtgccggtggatcggtga

SEQ ID NO: 7703 - DNA, 1251 bp, BradyrhizobiumColbertium
gtggcacgtaacgtcggaatcgtcggcgccggaatcgccggcctgcatctcgcgctttacctgcaaaaacatggcgtggacgccaccatcatcaccgaccggccgcccgaggactatcgcaacatccggctgctcaacaccgtcgcgcatcaccacgtgacgctcgcgcgcgaggattatctcggcgtcaatcactggcccgatccgaaagaccattactattaccacgaccatgtcttcaattttccgcagccgttgagctttcgcggcgatttctcgaagccgagccgtgcagtcgactatcggatctatcttccggccttgatgcaggacttcaccagtcgcggcggcaggatcgaatatcgccgcatcgaggagcgcgacatccgtccgctggtcgcccgcttcgacctgctggtggtctcgaccggcaagggcccgctgggccagctcttcacctaccgtccggagcacacgccctattcgcagccgcagcggcggctctgcgtcgggctctacaccggcgtgcggcagcccgacccgatgaacgtcacgctgtcggtctctcccggccacggtgaaatgatcgtgattccgaccgtcaccttcggcggcattgccagcgcgctgctgatggagaacgtgccgggcggcgacatggaggagcttgcgacgctcagctacgacgacgacccgaagcacttcctgaaggtgttgctgggcaagctggagaagcatcacccgacgacctatgaccgtatcgacacggcccgcttcgatctcgcgcagccgcaggacctcctgcaaggcggcgtggtcccgaccgtgcgcaacacggtggtggaattcgacggcggcaaatgcgcgatcgcgctcggcgacgtccatgcggtcgtcgatcccatgatgggtcagggcgccaatgtcgcctcctatgcggccttcgtcctcggcgaggagatcgtcaatgcggacgcgctcgatgcgcgactgtgcgagaagatcgatctgaagcggcaggaccgtgtgctcgcggcctcgcgctggaccaacgtgatgctgcagccgccgagcgaagcgctgggcatgctgatcggcgcgatgagccagaatccggcgctggcgaacgagttcaccgagaatttcaactaccccgaccggcagtgggaccgcatctcgacgccgcagcgcatccaggcctggatcgaacgcatgtcggcgccgccggagccggtcagggcgatcgcgtga

SEQ ID NO: 7704 - DNA, 930 bp, BradyrhizobiumColbertium
atggaccgcatcgattgcctgcgcgctttcgttcgcaccctcgaggccggcagcttctcggccgcggcgaaggagctcggcatcggccaacccgccatcagcaagcgcatcgcgatgctggagagcgagttcggcacgcagctgttctcgcgcaccacgcgcacgctcaagccgacggccgaggcacatcgcatctacgatctcgcgcggcagatcctcgacaatttcgacatggcacggtcgagcgtcgaagcggcagcccctcgccccagcggcacgctccggatcggcgtgccatcctcgttcggccgccgcttcatgatgcccgtcatcgccgaatatgtgcggcactatccggaagtgcgggtggacatccgcttcagcgagcggttcgtcaatctggtggaagaaggcatcgaactggcgctgcggattggaaagctggaggcgagcacgctggtcgcccgccggctcggcaccgtgcagcgctacctggtcgcgacgccgacctatctgcacggccgcccgctgccgcggacgccggatgacctcggctcgcaccaatgcatcgtctattcacggctgtcaccggcccagcaatgggccttcgaatccgagcatggccgtcacgtcgcgacgatcaacgggcccatccatgtcgacgatgccgatgcgatgcaggcggcgacgatgcatcatctcggcatcgccatcctgcccgactggaatgcggcagagggccttcgcagcggcgagctcgagcatgtgcttcctgactacacgatcgcggcactgcccctgcatgcagtctatccggagacgagctggatgtcgttgcgggcccgaagcttcctggacctgctggtcgagcgcgccgaacattttacgccggctccatatcatggccgtgccgccgtttccggcggttga

SEQ ID NO: 7705 - DNA, 1032 bp, BradyrhizobiumColbertium
atgacgccaatgaagaaaatcgatttcctctccttcggccactggacgccctcgccgcaatcgcagacccgctctgccagcgacacgctgctgcagtccatcgagcttgcagtcgcggccgagctgctcggcgccgacggcgcctatttccgggtgcatcatttcgcgcggcagctcgcctcgccctttccgctgctcgccgcggtcggcgccaggaccagcaggatcgagatcggtacggccgtgatcgacatgcgttacgagaacccgctctacatggtggaggacgcaggcagcgccgacctcatcgccggcggacggctgcagctcggcatcagccgcggctcgcccgagcaggtgatcgacggctggcgctatttcggctatcggccggccgacggccagagcgatgccgacatgggccggcgccatgcggaggtcttcctcgacctcttgcggggcgaaggctttgcggagcccaatccgcagccgatgtttccgaatccgccgggactgctgcgactcgagccgcattcgcaaggcctgcgcgaacgcatctggtggggcgccggctcgaacgccaccgcggtgtgggcggccaggctcggcatgaacctgcagagctcgacgttgaagaatgacgagaccggcgaggcctttcacgtgcagcaggccgcgcagatccgcgcctatcgtgccgcgtggaaagaagccggacacagccgcgagccgcgcgtctcggtcagccgcagcatcttcgcgctgatggacgatcgcgaccgcgcctatttcggctcggagcgcggaggcgaggaccagatcggcttcatcgacccgcggacacgcgcgatcttcggccggagttatgcggcggagccggacgtgctgatcgagcaattgcggcaggacgaagcgatcgccgaggccgacacgctgctgttgacgataccgaaccagctcggcgtggattactgcgcgcacgcgatcgaggcgatcctgacgcaggtggcgccggcgctcggatggcggtag

SEQ ID NO: 7706 - DNA, 192 bp, BradyrhizobiumColbertium
atgcggcgctgcgatgaactcgccatcggcttcgccgttccgagcgagagcggaacgtttgccattttttcccgtttactcgacgggagctgcgcattggaggagaggaaaatgcccgtactgattctttgggccgtgccggccgtcctcgtcatcggcggtggcatctatctcatcggccacatgcaatga

SEQ ID NO: 7707 - DNA, 345 bp, BradyrhizobiumColbertium
atgaagaagctcatgctgatttcggccgccgctttgctcgtgtcgacgagcgcgatggcacaaaccaccgtgacgacgacgaccggcgcgggacacggcgccaccgtgcagatcgagccggagtatcgcacccggatccggtcctacgtcaccgagcacaagatccgcccggtcgagacgcgcgagaagatcgtggtcggctcgccggtgccgcgcgacgtcgagctcgcggccgttccgagcgattggggtccctcgctcaccaagtatcgctacgtctactcgggcagccgcgtgatgctggtcgatccccagacccgcatggtcgttcaggaggtggaatga

SEQ ID NO: 7708 - DNA, 156 bp, BradyrhizobiumColbertium
gtggatgcgaatgctggtgcgatcgatcaaccggccggcggcatgaccgccaagcaacggcaagcagcgatccggtgggcacggcagcgccaccgcgaaactgccttcaagcagcacaatgtgaacgacgcggaaatcggcacgaccgtgacatga

SEQ ID NO: 7709 - DNA, 534 bp, BradyrhizobiumColbertium
atgaggatactgaagctatctgcggctgcggccgcgctgttggccggcaccgcacttgccgttgcgcaatcgagctcgacggtcggcaccggcggctcgtccgcgggcggcggcaccagcaactcgaccgttggcaccggcggctcctctgccggcggcagcggctccggttctgcttcgacgctcggcaccggcggctcatcggccggcggcggcaccagcagctcgacggtcggtaccggtggttcggcggcgggcaccggctcgggcagcggctcggcttcgacgctcgggaccggcggctcctcggctggcggcggcaagagctcatccagcgtcggcaccggcggctccgcggcgggctcggggtcgaactccgcgtcgacggttggtaccggcggctcgtcagccggtgacggcaagagcggctcgacagtcggcgccgcaggctcctctgccggtcatgccagcgacaagggcatggagaagggcaagggccataacaaggacgagtggaagaaggacaagaactag

SEQ ID NO: 7710 - DNA, 381 bp, BradyrhizobiumColbertium
atgttgaggaggagacgcaatgaacagatcaatcgttgcgatcacggcgctggctctgatgagcggcgccgcatcggcagaagccatggaaaagaccggcaagacggcatccggcgagacctgcaaggtcacggtcgagaagcatgccgacggcagcatcaccgcggccggctcgtcgcgttcgggcacgaccggatccacctcgtcgagcggctcgctgtcgagctcgagctcggccggcggatcgtcggtgaatgtgcaggccggcggcggcagcgtatcgagctcctcgtcgacggcgggcgggcctggctccaccagcgccagcaccatcaccgtcaacggctgcacgatctcgacctcgtcaccttaacttcgtag

SEQ ID NO: 7711 - DNA, 429 bp, BradyrhizobiumColbertium
atgagaactctgcttacgacatcggcggtcgccgttctgctcgctgccgcttcacccgtggtggcgcagaccagcatcaccggcggaagcggcggatcggcggcagcaggcggcacttcggcctcgacggttggtactggcggcacgtccacgtcaggcaccggccgtaccggctcgtcgatcgcggccggcggaagcgccgctgcagcgagcggcaagacccagaccggcgtcagcatgaacaagggcaatggccccgtgctcaactccaacgcccgcgcacaggctcatgacggcggcaccttcagccgctcgcacacgcgcaccaaggtcaaggccggtgaacaagtcggctcgaccaccaagacgatgtcgcacgtaccgggctcaaagccgaccatgtcgagaacgacgacgaccgcgcgctag

SEQ ID NO: 7712 - DNA, 459 bp, BradyrhizobiumColbertium
atgaagaccacggctgcggcgaccatcgtgctgcttgccagcctgtccggagcgcgggcggaaagctggacaacctaccggatcgccgagaccggaacatcggtcgacattcccgcttcggtcttcaccgacatcgtcggcaagcccgacggctatggcctgcagtttcgcacgtccgacggcagagccgatctcaccgtacaggccatctccaacaggtccaggctttcgccggccgcattcctggccggcaagaatccgccgtccggaattatctacaagcgcattacgccgagcttcttcgtggtctccagcgtcaagcgcgacaagatctggtacaaccgctgcaacttttctcggggctatgtgcactgcgtgctgatcaattatcccgcggccgagaagcggcgctgggacgccgtcgtcacgcggatcagccgcagcctgcgtgccgactag

SEQ ID NO: 7713 - DNA, 219 bp, BradyrhizobiumColbertium
atgaagaacttttccaacgccgaattctctcccgaggtgatcgagatcatgacgcgagccctggaagctgccgtcgcgagcctgccggaacccgtgcattcgtcgcacgtcaacgccctcgccgaatccatcctgcgcaccgcaagtgccggcgaacgcaacgtcgccgacctgcaacggatcgccttgatggagctgcaactgatgccgcgcaactga

SEQ ID NO: 7714 - DNA, 1527 bp, BradyrhizobiumColbertium
gtgcaggccgcgacagcgccgccggcctggcgggagctggttccgaccttctgcatcgccacggcaacgatcggctttgctccggttctgcacctggccaatccggccctcgccatcacggtcgaggtcctcgtcggcatcgcgattgtcgtcagcgtgccgacctatgcgccggccatcgcgatcttcgtcctgttcttccagaacatgttcgtctcgatcctgtcgccgctggtcccgcttccgtccgatctcgacttcatcaagggctacaattttctcgtctgctccgtcatgtggctcgccacgttcgccctctacctgctcggccagaggaatcagtcggccgaagtgaaccggatcatgcgcttcggcgtcgtcaccctggcggtggtgtcgctgtacttcgcgatcggcttcggccagaccggacaggcggccgcggtctatctgcgcaacatcgtgcttccgctgtttctgtttcaattgtcgctcctcacggctgcgacctatgaggtgcggatcacgccgttcctggcgacgctcgccgtcatcctcatgctgtgcggttacgtggagctcgcattccgcgatgtctggctcgccatcaccaatggctacaccttctggggcttcgacgagctcaaggcgacccattcgggggtttgggaagcccagatgcgcgccaccggaaacgtgcccgtcgacctcaaggaccgtttcagcttcgacttcctgaacacgccgctgctcgaaggattcggcctgtcgaagatgctgcgcattcacggcccgaacatgcacccgatcagcttcgcctacgggatcggctttctcggcctgttcctgttctcggtgggccggccgctccttgccctcgctgcattgcccctgctggtcttctgcagcgtgaagggagcgctcatcgtcgtggtcttcgtagtcgcgggctggatatcgacccgtctgctcggcgccgtggtgacgctgttgctcggcctcctgggcctgatcgcattcgcagtcgtcgcgatccggatcggcctgcagatcggcgactatcacgtcatcggcctgatgggcggcctgaacggattcctggagaatccgttcggccggggtctcggcgtcggcggcaatctctcggagagctatttctcgatcgactggagtgccgcgcaggcggccgggacgatcgatggcgcggtcgagagtgcggtcggcgtcctgttgtaccagatgggcattgccgccttcgtgccgctcgcgttctatttcacggtggccctcaaggcctggcgcctctacgcctcgtctggatatctgacgcaggggctcgccggcttcggcgtcatggtcgttctgctcaacggattgtttcaggaagaggccttgtttgcgccgctcgcgctcgggctgatgctctcgctcgctggcctcgtcatcggcagcgatgtgaggatgcggaccgttgccgtcgaggatgccgcgcttgcccagctcaccggctaccagcccgtgacatag

SEQ ID NO: 7715 - DNA, 1149 bp, BradyrhizobiumColbertium
atgacatcttgcggtcgcctgctgttcgcggcggtgttgctgtcgatttcattgagccggccggtctccgccgacgattgcgtgcccttgccctcgacggttgcgcccgagcggcttgccgcgctgtctcgcggcttcaatgccgacggctggatcaacggcgcgccgcccagccgcgccttgctgcagcagctgcgcaaggcgggaatgggccatgtccgcttgcccgtgccggccgaacgcgtgatgccgcgtttcgcggcgaaggccgaccgcgacgagacgctgcgcgtgctcgacaacgcgttgaagcagctcacatcgctgggctattccacctccgtcgatcttcatccgggagagcgcttcaaccgcctgcacaaggatgatccggacgcggcggtgcacgagctgcaggaggcctggagtgctctggcgcaggtcatccggtcttttccgcccgatcgcatcttcgccgagctgctcaacgagccggatatcgaggcggacaggtggcaaagggaggtcgaggcgcttgccgcgttcgtccggcgattgctgccggccaccacgctcatcatcggcccggtcaactggcagcgtgcggattcgctgccccgatttcgtccgctggccgacccgaacatcgtctacgccatccatttctacgatccgatggtgttcacccatcagggccattgggacgcgcacgatccgctgcacgacatccgcgacctgccttatccgatcagggccgacgatccggccgtgcaggcgcttcgccaggacttgcaggacaggaatgcgaccaaggcgctcgccatgctcgacacggcgattgccgccgccaaggacaagccgggcgccgatcgctggctcgcgcccgccctcgcctggcagcagcaattctcacggccgatcatcgtcaacgagttcggcgtgttgaaagccggcgcgcccagggagagccggcttcgctggctggcggaggtcacagcctatgcccgcgaccattgctggggctgggcgcattgggagctggcgcagggcttcggcctggtcgacagccaaacgggcaggcccgatcccgacgtgatgcgggcgctgctcggcacgccccgcgctcccgccgcacggcgctatcgttaa

SEQ ID NO: 7716 - DNA, 2064 bp, BradyrhizobiumColbertium
gtgaccccggcgccgggcggcaccgggccggcgctgatcaagggatcgctgaccgtctccggcacactcgtctttctgcgcgagaatggccggcgcattttgacgctggccgcggcgctgttcgccctcggcgtcgtcgttctgatgattcttccggtccgctacgccgcgacggctctggtcgtgctcgatccccgcgagctgcgcgtgacctcggatcaggaggtgctgccgggcatcggccaggatgcggcggcgcttcagagccagatcgagatcgccaaatccgacggcttcctccgccccctgatcgaacggctcaagatcgctgacgatgaggatatcgcgggcggtcataccgacatgacgcgcctgctcaaaagttcccgcaaccgcctcgagatcacccggcgcgggctcacctacgtcattgcgatttccttcacgtcgaatcggccggaccgggccgcctactatgccaacgccatcgccgaggcgttcgttgccagccagggccgcgttcgcaccgaggcgacggacgaggccgccgactggctgaaggaccggctgaagacgctgagcgagcgcctgcgggcatcggaagatgcggtcgccgccttccggctcgagcacaacatcgtcaatgccggcaaggaatccacgacgcagcaattgcgcgtgaccgatctgacccagcaggtctcggccgctcgtgcgcgcaccgaggaggccaaggcgcgctacgaccaggtgcaacgcgacgtcaaggccaatgtcgaagggcctgtgaagcaggatctgctcagcatgctgcgcgcgcagcgctcggccctgaatgaccagatcgcccagaagaaggcggtgtatggcgaccgccatcccgacctcgcgatctcctacagccagctggcggacatcaaccggcagatcgagatcgagcggaagaagaatatcgagacggccaagtccgaatatgaggcccagcgtgagcagcagaacgcgctggagaagcagctcaaggcggtcgagaccaagatgctggtcgacggccaggcgctggtgaagctgcaggagctgcagcgcgatgccgatgccaacaggaacatctacgagcagttcctgtcgcgcttcaagaccaccaacgagcagcgtcagctgcaggcgtcccagaccaagatcgcctcgcccgccattccgccgctgcgttcgacgcgcccgccgcttgccttgttgctcgcagcattggcgatcggctcgctcctgacgtccaccgctgccgttgcggtgatgacgagcgtgtccgccgacaagcccgcgaccgtgcaggctcctgctcccgtggaagcggaggacgcaggtcaggaagttcatcctccggccgcagccgtgcgccagaccgaggcgatgcccagccttccggtctgggtccggattcccgagctggcgtccgcagccgggaccaacacggtctggcagcgacctgtcgccgccgcgggcgagcccgatctcgccccgcatctgcagccgctgctcgaacgcatcgaccgtttgccggtacgcggctgcaaggtcgcgctggtgctgtcggttggcaagagcgccggcggcaataccgttgcccgctctctcaaccgcgccgcggtgaagcgcggcatgatgagcgtgctgatccggctccagccggaattcgcaggcagccagcccccggtgaccgaatggcacgacggttcgaccacggcgggacttcaatccatcgacgagcttctgagtgccggccgaaagccggatgcggcgcccgaggacgacatccgctcggagttcgacctgatcgtcgtgcacgccagcgatctcgccttgcagcccgacgccatcgccctggccgcccatgcggacgtcatcgtcctggtcgcgcgcgccggcgagctcggttcggccgcgatgcgcagggtaaccgcgtcgctgtcgaaatgtgctggcgtgccgaccggcatcgtcgtcaatcacgtccctgcgggctcagcggcgcctcagcccgagggcggcgcattgggtcttgcggtttga

SEQ ID NO: 7717 - DNA, 1044 bp, BradyrhizobiumColbertium
atggacatcaagactgccaaggcggccattctcgtcgagtccggcaagccgctgatcgtcgacgagttcaatttgcccgagacgctcgagcacggccaggtgctcgcgcacgtccacacgtcgagcatatgcggcgcgcagatcaacgagatcgatgccgtcaagggcgtcgacaagttcctgccgcaccttttgggccacgaggcgctggcaacgatcgtcgaaaccggacccggcgtcgtctcctgcaagcagggcgacaccgtcgtcatgcattggcggccgggcaagggcatccagtccaacacgccggtctattcctggcgcggcaagcggctcaacgcgggctgggtcaccaccttcaatgaatatgccgtggtgtcggaaaaccgcgtcacgcccgttcccgcctcgatcgatcgcaccagcgcgccgctgctcggctgcgccgtgacgaccgcgctcggcgtcgtcaacaacgatgcgcaaatcgccatcggcgaagctgtggtcgtgttcggcgtcggcggcgtcggcttgaacatcgtgcaattcgccgcgatggtcggcgcccatccggtcattgcggtcgaccgcctcgacaacaagctggcgatggcaaaggatttcggcgccacccacaccatcaactccgaaggggcgaaggatgtggccgccgaggttcggtccatcactggtgccgacggacccgacaaggtcgtcgagaccaccggcgtcaagaatctgatcgagctcgcctacgagatcacggccaagaaaggccgctgcatcctggtcggcgttccccgcgagaaggccgaaatctacaccctgccattgcacttcgagaaggtgctgaagggctccgaaggcggccagtgccagcctgcacgcgatatcccgcgccttgttcgcctgagcgatgccggaaaggtgagctaccgcggcatcgtcacccacgagttcgcgctcgatgacatcaacgacgcgctcgacttgatgcgcagcggcacgtcgggacggatactcctgaacatcagctga

SEQ ID NO: 7718 - DNA, 666 bp, BradyrhizobiumColbertium
atgggacgacttctgaatattgtgacgccgctgcataccgcgaccaagcgcgactacatggctcgcatgaatgacgacaagatcggctgctcgctgaaggcgcgggaatacgaggccgattattgggatggcgaccgccgtttcggctacggcggctaccgcttcatcgaggggcgctgggccccggtcgcgaaggcgctgatcgagacctacggcctgaaggatgggtccagtgtgctcgacgtcggctgcggcaagggcttcttgctgtacgagatgcagaagatcctgccgggcctgaaggtcgtcggcttcgacatttccaagcacggtctcgccaatgcccacgagcaggtgaagccgtacctcttcaattatcgcgcccaggacatctatccctacggcgacgacagcttcgatctcgtcatctcgctcggaacgctgcacaatctccggctctacgagctcgaggcggcgctcaaggaaatcgagcgggttggcaagaacaaatacgtcatggtcgagggctaccgcaacgtcgccgagctgcacaatctcgaatgctgggcgttgacggcggagtcgatcctgcacacctcggaatggatctggctgtacggcaagctcggctacaccggcgattacgaattcatctatttcgagtga

SEQ ID NO: 7719 - DNA, 327 bp, BradyrhizobiumColbertium
atgccgaccaaaccgaccatcgcccgcatctggcgcggccgcacccgccgcgatctggccgacgcctaccaggcctatctgcaggccgagggcattccgccgctgctcgagaccgcacttggggtgcaacaattgcgcgaggaccgcgacgcggagacctggttcacgaccatctctgattgggcggacatcgccgcgatgacggccttcaccaggggcgagccgaccaaggtccatcatctcccgcgcgacccggaattcctgatcgagctgcctgagcgcatcgagatccaccacattctgatcgacgaacagggcctgcggtga

SEQ ID NO: 7720 - DNA, 357 bp, BradyrhizobiumColbertium
atgaccattcgtagaactttcattgctctcgcggccgctggagcgatgctctcgacggctgcctcacccgggcttgcggcgcctttgccgatcggaaatccgggcgccgaatccggcgtgcagcaggtgcagtaccggcatggacatggctaccggtacgggcaccatcaccgccgtcacggcaccggcgctgccgtcctcggcggcctcgctgcgggcgcgatcatcggcggtgcaatcgccaacagccaggctcagtccaatgccgcctcctactgtgcgcagcgctatcgctcctacgatcccggctcgggaacctacctaggccgcgacggtctccgccatccgtgcccatga

SEQ ID NO: 7721 - DNA, 792 bp, BradyrhizobiumColbertium
atgtcgcagaccgaagaggctggcctgacgcctggtcaggtccagaatttcatcgccgacggtttcgtcaagatcgagaacgccttcagcgccgagcttgcaaagcaatgcagggacgcgctgtgggcggatatcggcctgtcgccggaccgtcccgagcagtggacccgccccgtggtccgggtgggatccaaggcgtcacccccattcatcgaagctgcgaatgtggcgtcgctccacagagcctacgatcaactcgtgggcgaagggcgttggcttgcgcccagagggcttggaacgtttccgatccgctttccgtcgacggaatcccccggtgatgacggctggcatgtggacatgagttttggcaccgccgatccggacttcatggaatggcgcgccaatgtcaaaagcagcggccgtgcgctgctgatgctcttcctgctctcggatgtcggcgccgatgatgcgccaacgcggatccggaaaggctcgcatgccacgatcgcgcgggagctgctgccccatggcgacgcaggtgcaaccctccggcagctcgcttccgagaactgggcatcgacgaaagattgcaagatcgagctggcgacgggggcggcaggcagcgtctatctgtgccacccgttccttgtccatgccgcgcaaccgcaccgagggacacggccgcgcttcatggcacaaccgccgctgctgccgaaaggcgagttcgatccggcattgccaccgtcgccggtccagatcgcgatccggcaggcctgcgggctgacggtgtag

SEQ ID NO: 7722 - DNA, 357 bp, BradyrhizobiumColbertium
atgaggatatcgcaggcgttcaagttcgaggcggcgcatcggctgccaaacgtgcccgagacacaccggtgcagccggctgcatggtcattcctatcgggtcgaggtccagctggacggtccggtggacccgcacaccggcttcgtcgcggacttcttcgacatcgaaaaatgcttcgccgacatcatgggcgcgctggaccatcactgcctcaacgaagtcgaaggactcgagaacccgaccgccgagaacatcgcggtctggatctgggatcgattgcagccgagccttccgcagctatcggcggtccgggtctacgaaacggcggattgctgggccgaatatcaggggcggtga

SEQ ID NO: 7723 - DNA, 74 bp, BradyrhizobiumColbertium
gcgcccgtagctcagctggatagagcatcagactacgaatctgagggtcggacgttcgaatcgttccgggcgcg

SEQ ID NO: 7724 - DNA, 1500 bp, BradyrhizobiumColbertium
gtggcagccacagatcgccagccgatccaggatctggatcagccggagcagccggccatggggccccgtgggtcgcgcgggctcgggctgtccggcaagctgctgctgctcaccatccccctcgtgatgatcgccgccgtgctgctctacgtacccgcgatcgccaatttctgggtcaaccggctgaatgaccgcgttgcggcggccaatacggcggcgctggtgctggacgctgcgccgctcggcatggttcctgattcgctctcgcgccagatcctgaagagcatcaacgcccgcgccgtcgccatcaagatgggccagcagcgccggttgctcgccagcgacaacattccgaccgccatcgagcacgacattgacctgcgcgacatgacggcctgggaggcgatcaccggctcgttccggatgatgctcgaaaccggcaatcaggccatccgcatcgtcgggcccggggtcggcaatgctcagttcatcgagatcgtcaccgacgaactgccgctgcgcaagcagatgtaccgcttctcccgcaacctcgtggtggtcgcgctgatcatcgcggtgctgaccgcaggcctcgtctatctcgcgcttcattatctcttcgtgcggccgatgcggcggctgactgcgagcctggtcggcttccacgagaatcccgagagctcggccgggatcatcgtgccgagccagcgcagcgatgagatcggggtggccgagcgcgaattgtcggacatgcagcgcgacctcatgtcgatgctgaatcagaagagccggctcgccgccctcggcctcgccgtctccaagatcaaccacgatctgcgcaacctgcttgcctcagcccagctcctgtcggaccagctcgccagcgtgccggatccgcgggtgcagcgcttcgcgcccaagctcgtgcgctcgctcgaacgcgccatcgccttctgccagtcgacgttgtcctacggccgcgcccaggaggccgcgcccgatcgccgcatgatcctgatcgagccggtggtgatggaggtgcgcgagacggccgggctcgccaacgacgcctcgatcgcctgggtcgctgcgatcgagcgcgggctcgcggtcgatgccgatccagaccagctgttccgcgtcttgctcaacctcgtccgcaacgccgcccaggcactcgaaagccatgcggcgggcgagggccgcgtgcagcagatccggatcaccggaaaacgcgagggcgccgtcgccattctcgaggtctccgacaccggtcccggcgttccccagaaaacccgggaacacctgttcgaggcgttccagacctccggccggcccggcggcagcggccttggcctcgccatcgcggccgaactcgtccgcgcccatggcggcgacatccacctggtcgaaggcaccatcggcgccaccttccgtatcgtcatccccgaccgcccggtggaactgctctccgtccgcaacgagcgagccagggcgtaa

SEQ ID NO: 7725 - DNA, 135 bp, BradyrhizobiumColbertium
gtgaagcggacttatcaacccagcaaactggtgcgcaagcgccgtcacggcttccgcgcccgcctcgccactgctggcggccgcaaggttctcgccgcccgccgcgcccgcggccgcaagcgtctgagcgcctga

SEQ ID NO: 7726 - DNA, 387 bp, BradyrhizobiumColbertium
atggatcggctgaggcagcgggcggatttcgtcgccgttgccaatggcgcgcgggtgaataatcccgcgttcgtcctgcaaagccgccgccgcgatgaccttggcccggtccgcatcggcttcaccgtcaccaagaagaacggcaacgcgcccgagcgcaatcgtatccggcgccggcttcgcgaattggtgaagcggctcgatccggtgtcgatgcagccccatcatgattatgtcctggtcggacgaagagacgcgctctcgcgcgacttcgccaccatgctcgacgatctgcgcatagcgttcacgaagcccgcgcggcatacggccaaagcgcgcggccacaggccaggtcccgccgcagcgaccagccgcaaaccggattga

SEQ ID NO: 7727 - DNA, 1854 bp, BradyrhizobiumColbertium
atgaccgacaatcgcaataccatcctcgccgtcattctgtcgggcctggtgctgatcgcgtggcagtatttctacaacgtgccgcagatggagaagcagcgcgcccagcagcagacccaggccgagctgcaaaagggcagcacgccgcagccgagcgcgtccacgacgcccggcagcgcgccgcagcccggcgctgcccagccgtcgacgccggccgtgaaccaggcccagccggtcgtcgcccgcgagaccgccattgcagcaagcccgcgcgtgaagatcgagacgccgcggattgccggcagcatctcgctgaagggcggccgcatcgacgacatcgcgctggtgcaatatcgcgagacggtcgatccgaagtcgccgccgatcatcctctattcgccctcgggcacggcggagccctattacgccgagttcggctgggtggcggcgacgggcgtgacggcaaagatgccggatgcacagaccgtctggcagcaggagggcagcggcagcctgacgccgtcgacaccggtggtgctgaaatgggacaatggcgacggcctgaccttccgccgcaccattgccgtcgacgaccattatctcttcaccatcaaggacgaggtgagcaatgtcggcaatgcgcctgtcacgctctatccgttcgcgctgatctcgcgccacggcgcgccgcacgtctcgggctattacatcctgcatgaaggcctgatcggctatctcggcgacgagaagctgaaggaatatggctacaagcaggtcgacgaagccaagcaggtgaatttcaacaatgtcaccaatggctggctcggcatcaccgacaagtactgggcctcggcgctactgcccgacaccaatgcccggctgcaggcgcggttctcgtcaaaccccgtcggcaaagttcacacctatcagaccgactatctgctcgatcccgtcactgtcgcgatcggcggcacggcgaccgcgaacgcgcggctgttcgcgggcgcaaaggaagccggcgtggtcggcatcaacttcccgctcgccggcctcggcggctacaacaaggagctcggcctcaaccatttcgatctgttgatcgactggggctggttccacttcctcaccaagccgatgttcctcggcctcgacttcttcttccgcttcttcggcaatttcggcatctcgatcctgctcgtcaccgtgatcgtgaagctgttgttcttcccgctggcgagcaaatcctacgcctcgatggcgaagatgaagtcgatccagccgcagcttttggcgctgaaggagcgctatcccgacgacaaggtgaagcagcagcaggagatgatggagatctaccgcaaggagaagatcaatccggtcgccggctgtctgcccgtgctgatccagatcccggtgttcttcgcgctctacaaggtgctgttcgtcaccatcgagatgcggcacgcgccgttcttcggctggatcaaggacctctcggcgccggacccgaccaatctcttcaacctgttcgggttgatcccgttcgatccgaccacgattccggtgttcggctattacctcgcgctcggcatctggccgatcatcatgggcatcacgatgtggttccagatgaagctgaacccgacgccgccggatccgacgcagcagctcatattcaactggatgccgctgatcttcaccttcatgctggcaggcttcccggcagggctcgtgatctactgggcctggaacaatctgctctcggtggtccagcagagctacatcatgcgccgcaacggcgtgaaggtggagctgttcgacaatctcaaggcgacgttcgtgaggaaggcgacgtaa

SEQ ID NO: 7728 - DNA, 369 bp, BradyrhizobiumColbertium
gtgatggccgcgcaccgcctgatgcttgggcttgccggcttgatgggcgccgccggcgtcgcgctcgccgccgcctccgcccatggcgccgatgccacccggctcgcctcggcaagcgcaatgctgctgtttcacgcaacagccatacttgccaccggcgccttgctcgcgcgcggccttctgcatggcggaattggcctcgttgcggcgttcggcttcgtgatcggcgccgcgctgttcgcaggcgacctcgccttgcggcaatatgccgggcactcgctgtttccgtacgcggcgccaaccggcgggacggtgatgatcgcgagctggctgacggtgacgttggcagcattggtggcgaagagctaa

SEQ ID NO: 7729 - DNA, 888 bp, BradyrhizobiumColbertium
atgaccgacatctccccgctcgaccaggcccgcatcctgtccgaagcgctgccgcacatgcagcagtacgacgaggaaaccatcgtcatcaagtatggcggccatgccatgggcgacgaggagaccgcgaagaactttgcccgcgacatcgtgctgctcgagcagaccgcgatcaatcccgtggtggtgcatggcggcggtccgcagatcgcgaccatgctcaagcgcctcggcatcgtctcggaattcgcggctggcctccgcatcaccgatgccgcgaccatcgagatcgtcgagatggtgctggccggctccgtcaacaagcagatcgtcggctacatcaacgaagccggcggcaaggccgtgggcctgtcgggcaaggacggcaacatggtgaaggcgtcgaagacgacgcgcaccatcatcgatccggattcgaacatcgagaaggcgatcgatctcggcttcgtcggtgatcccgagaaggtcgacctcacgctgctgaaccagctgatcggctacgagctgattcctgtgcttgcgccgctcgcgacgtccaaggacggccagacgctgaacgtcaacgccgacacctttgccggcgctgtcgccggcgcgctgaaggccaagcgcctgttgctgctcaccgacgtgcccggcgtgctcgacaagtcgaagaagctgatcccgcagctctcggtgaaggacgcgcgcaagctgatcgccgacggcaccatttccggcggcatgatcccgaaggtcgagacctgcatctatgccctggaacagggcgtcgagggcgtcgtcatcatcgacggcaagatgcagcacgcggtgctgctcgagctcttcaccaaccagggcacgggcacgctgatccacaagtga

SEQ ID NO: 7730 - DNA, 987 bp, BradyrhizobiumColbertium
atggcgctaccggctgcggtcgtctcgttcttcttttcctccgcgcccgccatcgcagacctcaagatctgcaaccgcatgtcctatgtcgtggaggccgcgatcggcatcgacgacaaggcggcaaccgcgacgcgcggctggttcaggatcgaccccgccacctgccgcgttgtggtgcagggcacgctttcggcggaccgcatcctgctcaacgcccgcgcgctcggcgtctacggcgcttctccgattccgcaaaccggcagcgacatgctttgcgtcgcgcaggacaatttcgtcatcgccgcggcgcggcaatgccgtagcggtcagacccaagtctcgttcacgcaggtgacgccgacacaaggcgccgacggcaacctcattgcctatctcgccgaggattccgaatatgacgacgagcaggcgcgcctcgccggcatccagcggctgctggtgatcgcgggctacgacgcggcgccgatcgacggcgtcgacgggccgaagacgcaagcggcgctcgccgccttcctgaagagccgcggattgtcgccggacatcgtgaactcgcagaccttcttcaagaccatggtcgatgcggtgcagacgccgtctgccgcaggcctcacctggtgcaacgacacgccgcacaaggtgatggcggcgatcgcgaccgacgacggcaagtcggtgacgagccgcggctggtatcgcatcgaccccaagacctgcctgcaccccgacgtatcaggccagccgaagcagatcttcagtttcgcagaggcggtcgacgccgacaaccgcgtcgtgaagctcagggaccggccgctgaattggggcggcgacaggcaattctgcacgcgcgagaccaagttcgaaacgagcgagcagaccgattgcggcgcgcgcggatttgcgccgacggggtttgtcgccgtggacatgtcgagcggcggcaagacgctgcgctttgcggtgccgtga

SEQ ID NO: 7731 - DNA, 654 bp, BradyrhizobiumColbertium
gtgttcgacctcgacaacacgctctatccgcatcacgtcaacctgtggcagcaggtcgatgcgcggatcggggagttcgtctgcagctggctgaatgtcggccgggaggaagcgcgcaagatccagaaggattattacctgcgcttcggcaccaccatgcgcggcatgatgactctgcacggcgtctccgcagacgattatctcgcctacgtccacaagatcgaccactccccgctcgagccgaacccggcgctcggcgcggccatcgcaaagctgccgggccgcaagctgatcctgaccaacggctcggtcgatcatgtcgatgccgtactggcgagactcggcttcgcctcgcatttcgacggtgtgttcgacatcattgccgctgagttcgagcccaagccggctgagcagacgtaccggaagttcctgagcgaccatgccgtcgatccgacccgcgccgccatgttcgaagaccttgcccgcaacctcacggtgccgcaccggctcggcatgaccacggtcctggtggtgcctgacgggacgaaagaagtggtgcgggaagattgggagctggaaggccgggacgccgcccatgtcgaccatgtcacggatgatctggcgaggttcttgggtaagctgtcgccaggctga

SEQ ID NO: 7732 - DNA, 165 bp, BradyrhizobiumColbertium
atggattggggcgctttttcgggatttgcaggggtggagtcaaggcgtactccgccgttgcctacactccgctgtcgccccggatctgcgctgacgcctgtccaggagacgacacgggtcagcctggcgacagcttacccaagaacctcgccagatcatccgtga

SEQ ID NO: 7733 - DNA, 846 bp, BradyrhizobiumColbertium
atgtcccttgcagccctcgaatccaccatcaacagcgccttcgacgcgcgcgacggcatctcgacctcgaccaggggcgaggtgcgcgaggccgtggaccagtcgctggagattctggacaagggcgaggcgcgcgttgccgagcgcggcgccgacggcaagtggaaggtcaatcagtggctcaagaaggcggtgctgctgtccttccgtctcaacgacatgggcgtcattcccggcggtcccggcaaggcgaattggtgggacaaggtgccctcgaagttcgagggctggggcgagaaccggtttcgggatgcgggcttccgcgccgtgccgggcgcggtggtgcgccgctcggctttcatcgccaagaacgtcgtcctgatgccctccttcgtcaatctcggcgcctatgtcgatgagagcacgatggtcgatacctgggccaccgtcggctcctgcgcgcagatcggcaagcgcgtccacatctccggcggcgccggcatcggcggcgtgctcgaaccgctgcaggcagagcccgtgatcatcgaggacgattgcttcatcggcgcgcgcagcgaggtcgccgaaggcgtgatcgtgcgcaagggcgcggtgctggcgatgggcgtgttccttggcgcctccacaaagatcgtcgaccgcgagaccggcgaggtcttcatgggcgaagtgcccgaatattccgtggtggtgcccggcgcgctgcccggcaagccgatgaagaacggccagatcggccccagcaccgcctgcgccgtcatcgtcaagcgcgtcgacgagcgcacgcgctccaagaccagcatcaacgagctgctgcgggattga

SEQ ID NO: 7734 - DNA, 1167 bp, BradyrhizobiumColbertium
atgaccgatgctctctcgatcgcccaggacctgatccgctgcccctcggtaaccccggccgatgccggcgccctcggggtgcttgaaaagatcctgaccgcagccggcttcgcctgccaccgcgtcaccttcagcgagcccggcaccgccgacgtcgacaatctctatgcacgcatcggcaccgaggggccgcacatcacctttgccggccacaccgacgtggtgccgccgggggacgagagcgcctggagcgtcggcgcgttctccggagaggtgaaggacggtgtcctgcatggccggggtgcggtcgacatgaagggcggcatcgcctgctcggtcgccgcggtgctggagcatctcgccggcaatggcggcaagccgcgcgcggacggaaagggctcgatctcgttcctgatcacgggcgacgaggaagacgtttccatcaacggcacgatcaagctgttgaaatgggccgccgagcgcggcgagaaattcgaccattgcgtgctgggcgagccctccaatgtcgagacgctcggcgacaccatcaaggtcggccgccgcggctcgcaatcgggcacgctcgtcgtcgacggcgtgcagggccatgtcgcctatccgcaccgcgcctccaatccggtgccggacatcgcgcgcttgatcgttgcgatctccgacgagcctctcgaccatggcagcgcgcagttccaggcctccaacctcgaattcacttcggtcgacgtcggcaacaaggccagcaacgtcatccccggcgaggcccgtgcgaaattcaacatccgctacaacgacaaccacacccaggccagcctgcgcgagctggtcgaagcgcgcctcgccaaggcctgcggcaaccgcatcaaggcccgcatcgtctgggagccgtcgaactccaacgtgttcgtcaccaagcccggcccgttcaccgatctcgcggtggcagcaatcgaggaagtgacgggccgcaagccggagctgtccacctcaggcggcacctcggacgcgcgcttcatctccagctattgcccggtgatcgagttcggtctcgtcggccagaccatgcaccaggtcgacgagcgcgtgccggtggctgatttggagaggctgacgcgggtgtatcgggggatactgacgcggtattttgggtag

SEQ ID NO: 7735 - DNA, 738 bp, BradyrhizobiumColbertium
atgccccgctacaagctcaccatcgaatatgacggcgcgccattcttcggctggcaggtgcaggagacgctgccgtcggtgcagggcgcgctgcaggcggcggtgaaggcgatgacaggcgcggatttgcgcgtgcacggcgccgggcgcaccgatgccggcgtccatgcgcgcggccaggtcgcgcatgtcgacgtcgacaagcagtttccgccgggccgttttcgcgacgggctcaacgcgcatctgcgcccgcatccgatcgcggtgctcgaggccgagatcgtgcccgacagcttcgaggcgcgcttctcggccatcaagcgccactaccgctatcgcatcgtcaacacccgcgccaatctcgcgctcgacgtcggccacgcctggcgcgtgccgcgcaagcttgatgccgatgcaatgcatgcggcggcgcagcgtttgctcggcaaacacgatttcaccacgttccgcgacaccgaatgccaggccaagtcgccggagaagacgctcgatcagctcgacgtgatgcgcgacggccgcgagatcacgatcgtcacctcggcgcgctccttcctgcacagccaggtgcgctcgatggtgggctcgctggtctgggtcggcgagggccgctggagcgccgatgatctgtcggccgcactcgccgcccgcaagcgcgccgcctgcggcatcgtcgcaccgcccgagggcttgtacctgatgaaggtggattattaa

SEQ ID NO: 7736 - DNA, 936 bp, BradyrhizobiumColbertium
atgcccctccgcctcatcttcatgggcacgcccgatttctccgtgcccacgctgctcgagctggtcgcacacggccacgagatcgtggcggtctacacccgcgcgccgaagcccggcggccgccgcggcctgcaattgcagccgaccccggtcgaggacgccgcgcgaaagctcggcgttcccgtcctgacgccaaagacgttgaagacccaggaagcgctggacgaatttcgcgccttggatgccgacgccgccgtcgtcgtcgcctatggcatgatcctgccgcaggcgatcctcgatgcgccgaagctcggctgttacaatctgcacgcgtcgctgttgccgcgctggcgcggtgcggcaccgatcaaccgggcgatcatggcaggcgatgccgagagcggcgtcatggtgatgaagatggacgtcggcctcgacaccggcgacgtcgcgatggccgagcgcatcgcgatatcagacagcatgaccgcacgcgacctgcacgaccgtctctcccggctgggtgccgacctgatggtgcgcgcgatggccgcgctcgaacgcggcggcctccagctccgaaagcagagcgaggagggtgtcacctatgctgccaagatcgagaaggccgaggcgcggatcgactggagcaagccggcccgtgccgtgctgcgccacatccacggcctgtcgccgtttcccggcgcctggagcgagctcgcgaacatcagcgaaaacgcgcgcgtcaagatcctgcgctgcgaactcgccaagggcaccggcgcgccgggcgaggtgctcgacgatcagctcaccatcgcctgcggcgagggcgcgatccgcatcctggagctccagcgcgaaggcaaggcccgggtgcaggccgccgactttctccgcggcatgccgctgaaggcgggcgcgaggttcaactga

SEQ ID NO: 7737 - DNA, 528 bp, BradyrhizobiumColbertium
atggccctcagagaaatcatcatcctgcccgacaagcagctgcgtctggtctcaaagccgatcgagaaggtcacgaccgagatccgcaagcttgccgacgacatgttagagaccatgtacgacgcgcccggcatcggcctcgctgcgatccaggtcgcgcagccgctgcggctcatcaccatggatctcgccaagcgcgacgagaacggcgagaccaagccgctcccgcgcgtcttcatcaatcccgagatcatcgcctcgtccgaggaactgtcggtgtatgaggaaggctgcctgtcgatccccgaatattacgaggaggtcgagcgccccgcgaaggtgcgcgtgcgtttcaccgacctcgacggcaaggtgcacgaggaggatgccgaaggcctctacgccacctgcatccagcacgagatcgaccacctcaacggcgtgttgttcgtcgactatctgtcgaagctcaagcgcgaccgcgtgatgaagaaattcgagaaggccgccaagcgcgcggcggagtaa

SEQ ID NO: 7738 - DNA, 1200 bp, BradyrhizobiumColbertium
atgaacgaaatcatcttcatggttggcgactggccggtacgtaccgttgacgtgctgatcggcttcggcacgctcgtcctcattctgctgattgtgatcgcggtggtgatcgcgcgctcggggcggcgcggcgcggaactcgccatggccaatgcaatccgtgccgacgagctcgaggaacggctgagcgaggtgctgcgggcgcagagcgagtcgtcgggccgggtcgatgccatgacccaggcgctggccggccgccaggccgagatggctcgtgcggtcaacgagcggctggattcagtgacccatcgcgtcggcgagtccatggaacacaccacccgcaacacgatggagagcctgcgcgccctgcatgaacggctcggcatcatcgacaacgcgcacaagaacctcacggacctcaccacgcaggtgaccacgttgcgcgacgtgctcgccaacaagcagtcgcgcggcgccttcggccaggcacggatggaggcgatcgtccaggacggtctccccaaaggctcctacgagttccagttcacgctctcgaccggcaagcggcccgactgcgtcgtgttcctgcccgaccagcgcccgctttgcatcgacgccaagtttccgctggaggcgatgaccgcgctgcacgacgcccgcaccgacgaggagcggcgggttgccacgcagcggctgcgcggcgacgtgatgaagcatgtcagcgacatcgccgagaaatatctcgtggccggcgagacccaggagatggcgctgatgttcgtgccgtcggagtcggtctatgccgagatccacgacggtttcgacgacgtgatccagaaggcctatcgcgcccgcgtcgtgctggtgtcgccctcgctgctgatgctcgcgatccaggtgatgcagcagatcatgaaggacgcgcgcatgcgcgacgccgccgaccagatccgcaccgaagtgatcaagctcggcgacgacctcggccgtctgcgcgaccgtgtgctgaagctgcagaagcatttcgccgacgtcaacgaggacgtccgccaggtgctgatctccgccgacaagatcgagaagcgtgccggacgaatcgaggagctcgatttcagcaagagcgacgcgccggagggtccgcggctggtggcgacgggagcggcagagctgttcccgcggaagctccaggcgggggagtga

SEQ ID NO: 7739 - DNA, 1362 bp, BradyrhizobiumColbertium
atgaccgcccccgacgcgacctctcctgccgcaagcactgcacccgtcgcctcctggcgcgaaagcctttccgtttacctgcagccgcgggtgttgatcgtgctgttcctcggcttctcctcggggctgccgctggcgctgtcgggatcgacgctgctggtgtggatggccgaggcgggggtcgatctcggaacgatcgggctctttgcgctggtcggaacgccatacaccttgaaattcctgtgggcgccgctggttgacgcgctgcacgtgccgttcttcacgcgtgccttcggacgtcgccgcgggtggctggtgttctcgcaattgctgctgatcggcgcgattctgctgttagcgctgaccgatccggcacgctcacccttgttcgtcgcgctcggtgcgctgctggtcgcgacaatgtcctcgacgcaggacatcgtcgtcgatgcgttccgggtcgagagcctgcccgaaagcgagcaggccgccggcatggccgcctatgtcgccgcctaccgcatcggcatgctgatatcgaccgcgggcgccctgttcatcgtgacgggtttcgagacgatcgtcccgcgtggcgcagcctggatgtggggctacgtggtgatggccgctctggtgctgatcggcacggtgactgcactggccgccaccgagcctccacaatccgagcgcgcggaggccgccacacaggacgagggcgcgatatcgcgggtgcttcatgccgcgctgggcgcattctcggagttcctgcggcgcaaggaagcatgggtcgtgctcgccttcgtcgtgctgttcaaattcaccgacgcgttctccggcaacatgacggtgccgttcgtgatcgatatcggcttcacgcggaacgactatgccgtgatcgtcaagggcgtcggcattgtcgcgacgttggccggcggcttcgccggcggctttgtggcgcggcgctattcgctcgcaacgagcctttggatcggcggcatcgtccaatcgatgtccaacctgtcgttcacgtggctggcactggtcggcgtcaatgaatgggcgctgactctcgcgatcacgtccgataatttctgcaacgccatcggcacggtgattttcgtcgcctatctctcggcgctgtgccagaacccgctgcacacggcgacccaatatgcgctgctgacggcgctcgccgccgtgggacgcacctatctgtcatcgggtgcgggttatctggcgaaagcgacgggctggccgatgttcttcgcgatctcggtgctcgtcgcaatcccgagcttgatgctgctggcgtacttgcagaagcgcgggcatttcgaaaccttggagcccgcgcgggtgtag

SEQ ID NO: 7740 - DNA, 435 bp, BradyrhizobiumColbertium
atgacgacacgattcgccaaacggctggccctggttgcgatgatgatggcggtggtgaccccggctgtttccgcgcagcaggacgatggagtcccgccgccgtccaagcccggcaagccgatcaacaccggcgacgtgctgtcgggcgaattgaatgcaatgaaggtgcgcgacgtcaagaacggcaaacgcgttgcgacctaccagatcaccaccgagccgcgccgcctgccgccgccgaacgggctgtgcaatctcgagaccggccccgaaaccttccagctcgtcacctccagcgatgcgcaggccactcagctgaagtcgttcgtcggcaaggagatctccgtgaaggtcgacgagatcgcctgcgccagcgatcccggccagatgagcgaggccgtgatcaccaagtggagcctgatcaagaagcagtag

SEQ ID NO: 7741 - DNA, 603 bp, BradyrhizobiumColbertium
atgagcgctgttgcaggtcctgagatcgagcggctggtccagctgctcgcgcggctgccgggcctcggtccgcgctcggcgcggcgcgcggcgctgcatctgatcaagaagcgcgaagcactgatgatgccgctggcctcggccatgcaggtggcgctggacaaggtccaggtctgcaagacctgcggcaacatcgacacgcaaaatccctgcaccgtctgcacggatccgaagcgcgatccctcgatcatcgtcgtcgtcgccgacgttgccgatctatgggcgctggagcgggcaaatgccacccaggggcgctatcatgtgctgggcgcgacattgtcgccgctcgacggcgtcggcccccaggacctcaccatcgacgcgctggtggcgcgcgcgcatgattcgcaggtgcacgagatcatcctggcgctgaatgcgacggtcgacggccagaccacggcgcattacatcaccgacctgcttcaggacgccaatgtgaaggtgacgcggctcgcccacggagttcccgtcggcggcgagcttgattatctcgacgaaggtacgctatcggctgcgatgcggcagcgtacgctgttctag

SEQ ID NO: 7742 - DNA, 321 bp, BradyrhizobiumColbertium
atggctgattttctcggcatgatgaagcaggcggcgcagctgcaatccaagatgcaggagatgcaggagcagctcgccaacgtcgaggtcgagggcatctccggcggcggcctcgtcgccgtgcgcatgacggcgaagatggacgtcaagggtgtcaggatcgatccctcgttgatgaaggcggaggagcgcgaggtgctggaagacctgctcgtcaccgccttcggtgatgcccgccgcaaggcggagaccgcgatgcaggagaagatgcaggccctcaccggcgggctcggcctgccaccggggttgttcggccagtaa

SEQ ID NO: 7743 - DNA, 1839 bp, BradyrhizobiumColbertium
atgaccgacgctggcgcccctcccaatcccgatagcgccggccaggccggcaatgcaccctaccgggtgctggcacgcaaataccgcccgtcctcattcgatgacctgatcggccaggaggccgtggtccgcaccgtctccaatgcgttcgagaccgggcgcattccgcaggcctggattctcaccggcgtccgaggggtcggcaagaccaccacggcgcgcatcctcgcccgggcgctcaactacgagatgccggatggctcggtgaagggcccgaccatccacatgccgaccttgggcgtgcattgccaggcgatcatggaaagccggcacatggacgtgctggagatggacgccgcttcgcataccggcgtcgacgacgtccgccagatcaacgacagcgtgcgctatgcccccgccagcgcccgctacaaggtctacatcatcgacgaagtccacatgttgtcgacggcggcgttcaacgccttcctgaagacgctggaggagccgccggagcacgccaagttcgtgttcgcgacgaccgagatccgcaaggtcccggtcaccgtgctgtcgcgctgtcagcgctttgatctgcgccgggtcgaggcggacgtattgatgaagcacctcgccaatatcgcgacgaaggaaggcgtcgagatcgagcccgaggcgctcggcatcatcgcccgcgccgccgaaggctcggtgcgtgattcgctgtcgctgctcgatcaggccatcgcgcatgcggcgggccaggtgaaggccgatgccgtcaggcagatgctggggcttgccgaccgcacccgcgtcatcgatctcttcgagtcgctggcgcgcggcgacatcgcggccgccttcaaggagttccgcgaccagtacgacgtcggcgccgatccggtcgtggtgctctctgacctcgccgaattcgtcaatttcgtcacccgtgtgaaggtcattccggcggttgccgacaacgtcgcctatggcgaaaccgagcgcgtgcgcgccaaggagttcgcttcgaagatctcgatgcgcgtgctgtcgcggatgtggcagatgctgctcaagggcatcgccgaggtgcaggcggcgacgcgccccgccgcggccgctgagatggtgctggtgcgtatcgcctacgttgccgacctgccgacgccagacgaagccatcaaaatgctcgagcagaacggcggcggctcgccggtcgtgaacggcggcagcgcagcgcgcagcagtgcgccgtccgcgccgatgtcctccgcagcgccggtttccgcagcgccggttcgcatgccgacatcctcgccctcctcgttcggcgggggcggtgcccggccgcagatggcggcccccgcgccggatccgcaggccgcagcgcccgtgctgcgcgtcaccagcttcacccagctcgtcgccctcgcaggccagaagcgcgacatcatgaccaagagcgcgctcgaaggcgacatgcgcctcgttcgtttcgaggaaggccggctggaagtcgcgctcgagcccaacgcctccaagaccatgatctcggagctcgcaaagaaattcgagctgtggaccggccggcgctggaccgtgatcgtctccaacgagcagggccagccgacgctgcgctcggtgaaccaagcggccaagcaggagcatgcccgtaccgcggaagccgatccgcgcgtgcaggaggtgctgtcgcgtttccccggcgccaaggtcgtcgaggtccgcaggcttgcccccgaggcgccggaatccaatattaacgcggactacggcagtgacgatccgcccgacggttccgatggcgacgatctctga

SEQ ID NO: 7744 - DNA, 420 bp, BradyrhizobiumColbertium
atgcccgaacctgcctggtcgctgcactcccgcctgaaagaggacaccatcgacatcggcgacctgcccctgtcgaaggtgctggtcatcaaggacgcgcattatccctggctgctgctggtgccgcggcgccccgacgcggtcgagatcatcgacctcgacgaggtgcagcaggcgcagctgatgaccgagatctcccgcgtatctcgcgccctcaaggagatcaccaagtgcgacaagctcaacgtcgccgccctcggcaatctcgtgccgcagcttcacgttcacatcatcgcacgccgcaccagcgacgcggcctggccgcgaccggtttggggcgtcatgccgccgctggcgcacgatgccactgaagtgcagaatttcatcagcgcgcttcgccgcaagatctggttgggttga

SEQ ID NO: 7745 - DNA, 939 bp, BradyrhizobiumColbertium
atgtcagcattcgacgcatttccgctgggacagccggccttcgtcaccaacgtcctcgaccgcgccgcgcatctgcgccgagacgacgagaagctgttcgcgatggagcagaagccgtcctcacgcgcctacgtggtctatcgcgactcgctgctggtgaagcgcgacggcgacaaagtgcgcgcgctgctctcgatcgacgaggcgctgaaatgcggcgccaatcccggcacggtcttcctgggtctgcgcgagggcgcggccgtgttcggaatggggatgccgcaagccgctgccgagaagctggtcggccgcgaggactataccgtgaccgaactccgcggcatggcgatgcagggtgcgcttccgccacaggagctgtcagccatcgcaatggcgaagtcgatggtcggctggcatcagcggcacggctattgcgccaattgcggtgcacgtaccgcgatgaaggaaggcggctggaagcgcgactgccctgcttgcaaggccgaacactttccgcgcaccgacccggtcgtgatcatgctggtcgcctccggcgaaaaatgcctgctcggccgccagaagcagtttccgccgggcatgtattcctgcctcgccggcttcgtcgaggcggccgagaccatcgaggacgccgtgcgccgcgagatcctggaagaatcaggcattcgctgcaccgacgtgcagtactacatgacccagccctggccctatccgtcgtcgctgatgatcggctgcagcgcgcgggcgctcaacgaggacatcgtcgtcgatcgcatggagctggaagatgcgcgctggttcacgcgcgaagaggcggccaagatgctgacgcggacgcatccggacgggctcgccggtccgcatccgttcgccatcgctcatcacctgctcggccgctgggtgcacgacaagagctga

SEQ ID NO: 7746 - DNA, 510 bp, BradyrhizobiumColbertium
atgaccgatgccgctgtgcagatccccgagaccagccgccgcctcgatgccatcgaccgcaagatcctgatggtgctccaggaggatgcctccctgtccgtcgccgagatcggcgaccgtgtcgggctgtcctcgaccccctgctggaagcgcatccagcggctggaggccgacggcgtgatcatcaagcgggtcgccctggtcgaccagaacaagatcggcctcggcatttccgtgttcgtgtcggtggagagctccgaccattccgaggcctggctcaagaaattcgccgaagccgtcagcgccatgcccgaggtgatggagttctaccggatggccggcgatgtcgactacatgctgcgggtcgtggtcgcggacatgcaggcctatgacgtgttctacaagaagctgatcagcgcggtgccgctgaagaacgtcacctcgcgctttgcgatggagaagatcaagtcggtgacggcattgccgattccggcggtggtggcggcctga

SEQ ID NO: 7747 - DNA, 1353 bp, BradyrhizobiumColbertium
gtgatgctgcgcgtgacgctcgccgcgcggctcgctctgatcgggctggtggggattaccctggtgatcacggtggtcgtcgcgatcttctaccgcacgaccctccgcgaaaacgagctgacccggccttcgcccgcgcgtctcgatgcgctggccacgctcctggagcgaacggacgcgggttcacggcaggccgtgctcgatgcggtgtcttcgccgcagttcaccgtgcgcatcgtgccgtcgggcgcgccggtcggcggcgagacgccgccggagcagcaggaactgcgcgagacctatgcggcgggccttgcgggccgccccgttgagatcgtgccgccgtccaatcatcggggcagccgggtgtttccccgcctcgcgcggttgatggccaacgcgatcgaattccgcatcggcctgcgcagcggagagttgctgatcatcgacgcctatacccgcctgccggtgagcccgttcggccttcccgtcggcttcggcgcaggcctgttcggcacgattgtggcgctgctggcgctgctggtcatgcagcgcgagacgcggccgctggcgcggctcgccgccgccgtcgatcgtgtcgacctgtcggccgatccgctgccgctgccggatgcgcggcgcagcgcgccggagatccgcgccgtcatcgccgcgttcaaccgcctgcaggggcggcttgccgaaatgctgcgtgcgcgcatgacgctggttggcggcattgcgcatgatgtcaggaccttcgcgacgcggctgcggctgcgcgtcgagcacattcccgacgatgccgagcggcagcgggcagtggccgatatcgacgacatgatccggctgctcgacgatgcgctgttgtcgacgcgggcgggcgccggcggcctgtcgcaggaaatgatcgagctccctgcgctggtcgctgccgaggtgcacgatcggcgcgttcagggcgcggcagtcgagttggtttgccacgagcggacgcggaatgtgatcgtgctcggtgacaggctggcgctgcgacgaatctttgcgaacatcgtagacaacgcgctggcctacggccgcaccgcgcaggtggagattgccatgaaggacggagccctcgtcgtctcgatcgacgatgagggacccggcattcccgccgatcagcgccacactgtgctggagccgttccatcgtctggagaagtcgcgcaaccgcgcgaccggcggagccggtctcggcctcgcggtggtccgcaacctggtcgaagcccatggcggcacgatcgagatcggcgcagcgccaagcggaggtacgcgcgtcaacgtcacgctaccggtgtttcagctgtcctga

SEQ ID NO: 7748 - DNA, 723 bp, BradyrhizobiumColbertium
atgaacgcgccttcggccacgatcctcatggtggaggatgatcccgagatcagccgtctcgttgccgacttcatgcggcgcgaggggttcgaggtcgcctgcgtcgccgacggcaagtccatggattcgatgctccagcgcctgcggcccgacatcgtcatcctcgatttgatgctgccgggcgaggacgggctttcgatctgccgccgcttgcgcgccgacgatgccatcccgatcctgatgctgaccgccaagagtgacgagatcgatcgcgtggtcggtcttgagatgggcgctgacgattatctcacaaagccgttcggtccgcgcgagctcttggcgcgggttcgcgccatcctgcgccgcgccaacggaactccggccaagccgcttgtccggcgatatgccttcgaccgcttcgtgatcgatctcgatgcgcgcagcgtcgagacgaccgaggccgagacgccggaactgcaattgaccagcgccgagttcgacctgctcggctgcttcgtgcagcggccgcgaagggtgctcacgcgcgaccagatcctcgactggacccgtggccgttcggcggagccgttcgaccgcaccgtcgatatgctgatctcgcggctgcgccgcaagctcgatggtgcaagtcccggctccaacctgatcacgacggtgcgcaacggcggctatctgttcaccgcgacagtcaagcaggtgtcgtga

SEQ ID NO: 7749 - DNA, 222 bp, BradyrhizobiumColbertium
atgaccaagcttttcctcacctccctcgtcatcggcaccctgtcggtcgcggcggcagccgacgccaatgcctggacgcggtcggcgacggcgagcgggccgcgcggcacctctcacgtcaccgcgacgggaagctgcgcctacggaagctgcacgcgcaccgtgacgcgaaccggtcccgccggcaatacctacacccgcaccggcacggtctcgcgctga

SEQ ID NO: 7750 - DNA, 318 bp, BradyrhizobiumColbertium
gtgccgtcgattttccgttctctgccgcaagccgcaaccgtcgtcgccctcggccttgcaacctcgacatccgtgctcgcccagacgcaattgcagacgcagatcacgccgcagatgcgcagcgaagcaaggaccatcgtgcaggcgtgtcgcaccgaccttgaccgcctgtgcagcagcattgcaccgggtggcgggcgcatcatcgcctgccttcaatcccatgccggccagctctcctcatcctgtgcgcaagcgctgccgcgcgcgcaggcgctgcgaaacaatgccgccagcgccgccgcggcaccgaaatag

SEQ ID NO: 7751 - DNA, 840 bp, BradyrhizobiumColbertium
gtgggctacgcttcactgctgctcgacccgatgctcaggcaactgatcctcgcaaccgcgctcggcctcatgctgctcgaatacggcatcggacgactcgcacgtcacgatacccacgactggcgcgaaagcgctgcctcgttcggcgtggcgttgggacagagcctgctccgcgccatcgaggccggccttctcgccgtgcccttcgcgttcctgtacgagcaccgcctgttcgactttgcgcagaccacgccggtcgcgctcgcaggattattcctgggcagcgaattcctgtactattggcagcatcgcgcgtcgcatcgcattcgctggatgtgggcgacgcatgcggtgcatcactcgacgacgcggctgaacctgactgcggcgatccggctcggttggaccggcaacatctcgggcaatttcctgttcttcctgccgctcgcgctgatcggatttcatccgtttgcgatcgtggcaatgctcggcatcaacctgctctatcagttcttcatccacagccagttcgggccgaagctcggcgtcttcgaatgggtgctcaacacgccgagccaccatcgcgtgcaccatgcctgcaatgagccgtgcctcgacaagaactacggcggcatcctgatcgtgttcgaccgcctgttcgggacctttgccgaacatccctccgaccagccgctccggttcggcctcgtcgggggcgtccaatccttcaacccgatccggatcgcgctcggcgaatggatcgcgatgctggacgacgcctggagggcgccgggggcgggcgcgaagctccgcgccctgttcggcccgcccggaggctga

SEQ ID NO: 7752 - DNA, 1500 bp, BradyrhizobiumColbertium
atgttcccgaagccgaaatccgtattgttgcccaacacctacgccttcgaatccgagccgatggtgaagccgacgggctttcgcgaatacgacgcgcgctggttgttccagaaggaaatcaacctgatgggtgtgcaggcgctcggcatggggctgggcgcgctgatcgccgagctcggcgtccgtcaggagatcgtcaccgggcacgatttccgcggctattcggcgtcgatcaaatatgcgctgatctccggcctgatggcggcggggtgcaaggtgcacgatatcggcctcgccgtgactccgatggcctatttcgcgcagttcgacctcgacgtgccctgcgtcgccatggtcacggcctcgcacaacgacaatggctggaccggcgtgaagatgggcgccaaccgcccgctgaccttcggccccgacgagatgacgcggctcaaggagatcgttctcaacgccgagttcaagaacaaggccggcggctcctaccaattccacgagaactatccggcgcgctacatcgccgatctcacctcccgtcccaagctgacgcgcaagctcaaggtggtcgcggcctgcggcaacggcaccgccggcgcgttcgccccgcaggtgctggaagcgatcggctgcgaggtgatcccgctcgacaccgagctcgaccacaccttcccgaaatacaatccgaaccccgaggacatggagatgctgcacgcgatccgcgacgcggtgctgcatcacaacgccgatgtcggcctcggcttcgacggcgacggcgaccgctgcggcgtcgtcgacaacaccggcgaagagatcttcgccgacaaggtcggcgtgatgctggcgcgagacatgtccgcgattcacaaggatgcgcagttcatcgtcgacgtgaagtcgaccggcctcttcatcaccgatcccgtgctgcaggagcagggcgccaggaccgcctactggaagaccggccattcctacatgaagcgccgcaccaacgagacgggcgcgctcgcggggttcgagaaatccggccatttcttcttcaacaagccgtatggccgcggctatgacgacggcctcgtgtcggcgatcgcgatctgcgacatgctcgaccgcgcgcccggcaagtcgatggccgacctgaagaacgcgctgccgaagacctggtcgtcgccgaccatgtcgccgcactgcgccgacgaggtcaaatacggcgtcatcgacaaggtggtgaagcacttcgagggcttgcaggagagcggcgccaagatcgggggacaggcgatccgtgatctcgtcaccgtcaatggcgtacgcgtcacggtggaggacggcagctggggcttggtgcgagcgtcctccaacaagcccgagctcgtcgtcgtggtcgagagcccggtctccgagcagcgcatgcacgacatgttcgagatggtgaacagcgtgctgcgcacgcatcccgaagtcggcgagtacaatcagaagatttga

SEQ ID NO: 7753 - DNA, 501 bp, BradyrhizobiumColbertium
atgatcatcgcggccgtcatgatcggcctcggcaccttcatggcgcagatggcggacaagatgagctcggcatccgccacctcggtgccgcgcacgacagtcgccgttgcagccacagagcccgccggcggccgcagcatcagcatcccgcgcgacggccgcggtcatttccagacggagggccgggtcgacggccagcgcatcggcttcatgatcgataccggcgcttccgtggtcgcattgaacgagagttcggcagcccgctttggcctccgtccctcgcgcagcgactacaacgcaaccgtctccaccgccaacggcaccatcaaggccgcgcgcacccgcatcgccatgctcgaagtgggtggcctggtcgtgcgcgacgtcgatgccatggtgctgcctgacgcagcactgtcggagaacctgctcggtctctccttcctgtcccgcctgaagcgcttcgaatacgccaacggccagatggtgctggagcagtaa

SEQ ID NO: 7754 - DNA, 2475 bp, BradyrhizobiumColbertium
ttgccccgcagcttcgccaccccccttccgatcgatgccgtgctcgacgatctgtcgcgcacgctggaaaccaacaacgctgccgtgctggtggcgccgcccggcgccggcaagaccacgcgggtgccgctggcgctgctcgatgcgcactgggcgaaggacaagaagatcatcgtgctggagccgcgccgcatcgccgcgcgcgccagcgccgaccgcatggccaagtcgcttggcgagcgcactggcgagaccgtcggctattgcgttcgcttcggctcgaggatctcgcgcgcgacccgcatcgaggtggtgaccgaagggatcttcacccgccagatcctggacgatcccgaactgacaggcgtcgccgccatcctgtttgacgaatttcacgagcgctcgctcgacgccgatctcggcctcgcgctggcgcgcgatgcgcaaaccggcctgcgcgaagacttgcgcatcctggtgatgtcggcgacgctcgatggcgcgcgcgtggcaagattgctcggtgatgcccccgtcgttgaaagcgagggccgcgcctttccggtcgagacgcgctatctcggccgcaaggcggacgcgccgatcgagcggcagatggcggacgcgatcgcatccgcgctgcgcgccgatagcggctcggtgctggcgttcctgccaggcgccgccgagatccgccgcacccagaactttctcggcgagcgcgtgcaggacgctgccatcgagatcgtgccgctgttcggcgctctcgatgccgccgtgcaggaccgtgccatcgcgccggcgccgacgggtacgcgcaaggtggtgctggcgacctcgatcgccgagacctcgctcaccatcgagggcgtgcgcatcgtcgtcgattcaggtcttgcccgtgtcccacgctacgagccggacatcggcctgacgcggctcgagaccgtgcgcgcctcgcgcgcggcggtggaccagcgccgcggccgcgccggccgcaccgaacccggtgtctgctaccggctctgggacgagccgcagaccgcctcgctcgcaccctacacccagccggaaatcctcagcgccgatctgtcttcgctggtactcgatctcgcgcaatggggcgtgagcgatcccgccacgctgtcgttcctcgatccgccaccccagccggcctggaaggaggcgaagagccttctcaccgagctcaacgcgctcgatgttgacggccgcatcaccgctgaaggcaagagcctgcgtgcgctcgcgctgccgccgcggctggcgcgcatgatcgtggattcgcatcgcgctggaagcggcgaggccgcggccgagatcgccgcgatcatcaccgaacgtggacttggcggcgacagcgtcgatctcgagcaccggcgcgaccagtttcgccgtgaccgctcgccgcgtgccgcgagcgcgcgcgatctggcgcgccgctgggcctcgcaggttgcggtgtcggagaaggcaggaccgcaggaggatctctcgaccgggttgatgctcgcttatgcgtttcccgaccgcgtcgcgcgcaatcgcggcaatggcagtttcgtgctcgccaacggccgcggcgcttcggtcgagcagacgtcctcgctcgcccgcgcgccctacatcgcgatcggcgaaatgacgggaacggcggcgagcgggcgaatcctgctcgcggctcagatcacgcaggacgagatcgagaaccatttcgccgagcatatcgagaccaccgacgagatctcgttcgatcgtggcgcgatggcgctgcgcgcgcggcgcaagcgcgtgttgcatgccatcaccctgtccgaggcgacgcttgccgtgtcgccttcggaagataccgcacgcatcttcgcggacgggctgatcgcagccggcctcgaccggctgccctggtcgaaggccgccaagcagtggcgcgaccgagtgacgttcctgcgcaaagccgagggcgacagctggcccgacgtgtcggactccgggctgatcgcgcgccgcgaggattggctggtgccggcgctctacgacaagatcgcgctcaaggatgtttccgcgggcgatctctccgatgcgctgatgtcgctgttgccctgggacatgcgtgcgcggctggaccgcgaggcgccgacacatttcgaggcgccgaccggcagcgtgctcgcgatcgactatgaggccgagcaggggccgaccatcgcggtacggctccaggaattgttcggcctcaacacgcatccctcgatcgccgccggcaaggtgccgctggtgctggaattgctttcgccagcgcagcgtccggtgcaggtgacgcgcgatctccccggcttctggcgcggcagctatgccgcagtccggtccgacctgcgcggccgctatccgcgtcacccctggccggacgatcccgccaatgcgctgccgacccggcgggcaaagccgcgcgggacgtaa

SEQ ID NO: 7755 - DNA, 1317 bp, BradyrhizobiumColbertium
atgcgcattgcgatgatcggcacgggttatgtggggctggtgtccggggcctgctttgcggatttcggccacgacgtcatctgcgtcgacaaggacgagaagaagatcgcggcgctccatcgcggcgagatcccgatctacgagcccggcctcgacgagctggtggcgaacaatgtcagagccaagcggctcgatttcaccaccgacctgaccaagccggtggcggatgccgatgctgtgttcatcgcggtcggcacgccctcgcgccgcggcgacggccatgccgatctctcctacgtctacgccgcggcaaaagagatcgcgcagtcgcttcaaggcttcaccgtcgtggtgacgaagtcgactgtcccggtcggcaccggcgacgaggtcgagcggatcatccgcgaagccaatcccaaggctgacgtggtcgtcgcctccaaccccgaattcctgcgcgagggcgcggcgatccgcgatttcaagttccccgaccgcatcgtggtcggcacttcggacgagcgcggccgcaaggtgatgggcgacatctaccgcccgctgtcgctgaatcaggcgccgctgatgttcaccgcgcgccgcaccgccgagatgatcaaatacgccgccaacgcgttcctggcgaccaagatcaccttcatcaacgagatcgccgatctctccgaaaaggccggcgccaacgtgcaggaggtcgcgcgcggcatcggtctcgacaaccgcatcggcaccaagttcctgcatgccggtcccggcttcggcggctcgtgcttcccgaaggacaccaaggcgctgatcaagatcgcgcaggactacgacgtcaacctgcgcatcgtggaatccgttctggcggtcaacgagaaccgcaagcgtgcgatggcgcggaaagtcagccaggcgctcggcggctcgctgcgcggcaagaccatcgcggtgctcggcctcaccttcaagcccgacaccgacgacatgcgcgacgcgccgtcgatcccgctggtgaccggcctgatcgacatgggtgcgaaggtgaaggcgttcgatcccgtcggcatggagcaggccaagggcgaactgcccaacatcacctattgcgaggatgcctattcctgtgcgcaaggtgccgacgcgctcgtcatcgttaccgaatgggtgcagttccgtgcgttggacctcgaccggctgaaggcgaccatggcgcagcccgtcatcgtcgacctccgcaacatctaccgccccgaagacatggaagccgccgggttcacgtacgagagcgtcggccggccccctgtgcagggctga

SEQ ID NO: 7756 - DNA, 1065 bp, BradyrhizobiumColbertium
atgacacgatcgggcacaatcggcggcgccgggctcacagcctcttctgccgcgcgtgtcgactgggtcgactacgccaagggcatctgcatcgtcatggtggtgatgatgcattcggtgctgggggtcgagcttgccgccgggcagaccggcttcatgcatgtcgccgtggccttcgcaaagccgttccggatgccggacttcttcctgatttcggggctgttcctgtctctggtgatcaatcgggactggcgaacctatctcgaccgcaaggtagtgcatttcgcctatttctatgtcgtctgggtgacaattcagttcggcttcaaggcgccggcctttgccgcggagaccggctggcccgccgttggcgtcctgtaccttgaatccttcatcgagccgttcggcacgctgtggttcatctatctgctgccgatcttcttcgtcgtcacgaaactgacacgaaaagctccgccgctcgcgatctggcttctcgccgccgcgctggagaccgcccgcatcaacaccggctggaccgtcatcgacgaattctgctcgcgcttcgtctatttctattcaggttatctgttcgcgccttacgtgttcgccctgtcggatcgcgcgcgcagccatccgggtctcgcacttgcggcgctcgcgatctgggcgctggtcaatgccggcctggtcgcgtggggcgccagcgagtgggcgatcgtctctctcgtgctcggcttcgccggcgcatgtgccatcatcgcgaccggcacgctcctggcgcgcgcgcaatggctgagcttcctccgcttctgcggcgagcattcgatcgtgatctatctcgccttcttcctgccgatggcggcgacgcggacgctgctgctgcgcacgggcgtcatccctgacatcggcacggtgtcgctgatcgtcaccatcgcaggcgtgctcggagcgctggcgatctggcgcgtggcgctgcgtttcaatgtgcgcttcctgttcgagcggcccgatgcgttctggatcgcgccgaagaaggtcggcgtgcggttgcagccggcggagtag

SEQ ID NO: 7757 - DNA, 3132 bp, BradyrhizobiumColbertium
atgcccgcaaaaattcatacattgcggcccatgcccaagacctcgcccgagacctcgccgaagacatccccgaagaccagcgccaaagctgacaccaaggccgcgtccaaagtcgccgccgataccaagcccgccgcgacagcccctgccaaaccggtggcctcgaaggcggcaggcaagggcgaccacgtcttcctcgtcgacggttcctcctacatcttccgcgcctatcacgcgctgccgccgctgaaccgcaaatccgacggccttcaggtcaacgccgtgctgggcttctgcaacatgctgtggaagctgctccgcgagatgccggaggacaatcggccgacgcatctggcgatcgttttcgacaagtcggagatcacgttccgcaacaagatctatccggactacaaggcgcaccggccgccggcccctgacgatctcatcccgcaattcgcgctgatccgcgaggctgtgcgcgccttcgatctgccctgcctggaacagaccggcttcgaggccgacgatctcatcgcgacctatgtgcgacaggcctgcgagcgcggcgccagcgccaccatcgtctcgtcagacaaggatctgatgcagctcgtcaccgactgcgtcaccatgtacgacaccatgaaggaccgtcgcatcggcatccccgaggtgatcgagaaattcggcgtgccgccgaacaaggtcgtcgaggtgcaggcgctcgcgggcgattccactgacaacgtgcccggcgtgcccggcatcggcatcaagaccgcggcgcagctgatcaccgaatacggcgatctcgatcaattgttgttccgcgccggcgagatcaagcagcccaagcgacgcgaggcgctgctggagaatgcggagaaggcgcggatctcgcgacagctcgtgctgctcgacgacaaggtcgatctcgaggtgccgctggacgacctcgcggtgcacgagcccgatgcgcgcaagctgatcgccttcctcaaggcgatggaattcacgacgctgacgcggcgcgtcgcggagtatgcgcagatcgatcccgccaatgtcgacgccgaccccggctatgccagcggcgccagcgtgttcacaacgctgccgccctcggacgtcgtgcccgcaccaggcacgggaaccccggcgcgggcccgaccgaatgaaccaaacaaatcggccggcaaggaggacaaggctgcgagcctgaagggtgcaccgatctcgctcgccgccgcgcgcgaggaagcgctgcgcaagcttccggtcgatcgcagcaaataccagaccatcaagacgctcaaggagctcaacgccttcatcgcgcgcgtccatgatgccgggcaagtcgcgatcgagacgagagcgaactcgatcgatccgatgcaggccgatctttgcggcatcgcgctggcgctggcgccgaacgatgcctgctatgtgccgctggcgcacaagcagtccggcggcggcgccggcctgttcgatgcgggccttgcgccggaccagatcaggcacactgatgccatcgaagcgctgcggccggtgctggaatcatcaggcatcctcaagatcggcttcgacgtcaagttcacggccgtgatgctggcacagcacggcatcacgctgcgcaacatcgacgatgcgctgctgatctcctacgtgctcgatgccggccgcggctcgcacgcactggtatcgctgtccgagcgctggttcggccatgccatgctgaaggaaagcgagctgctcggcagcggcaagggcaagatcaccttcgaccaggttccgatcgacaaggccgcaccgctttcggccgaaggcgtcgacgtcgccttgcgcgtctggcgcgtgctgaagccgcggctggtcgccgagcacatgaccgccgtctacgagaccctggaacggccgctggtgtcggtgctcgcccgcatggagcgccgcggcatctcgatcgaccgccaggtgctgtcgcgcctgtcgggcgactttgcccagaccgcggcccgtgtcgaagccgagatccaggagatcgcgggcgagccggtgaatgtcggcagccccaagcagatcggcgatatcctgttcgggaagatgagcctgccagggggcaccaagaccaagaccggcgcatggtcaaccaccgcgcaggtgctcgacgaactcgccgagcagggccacgacttcccgaagaagatcttggagtggcgccaggtctcgaagctgaaatcgacctacaccgacgcgctgcccacttacgtcaatccgcagacacatcgcgtgcatacgacctacgcgctggccgcgaccacgacgggacgattgtcgtcgaatgagccgaatttgcagaacatcccggtgcgcaccgaggatggcaggaagatccgcagggccttcatcgcgacgcccgggcacaaactcgtgtccgcggattattcgcagatcgagctgcgtctgctcgcggagatcgccgatattcccgtgctgaaacaggcgttccgcgacgggctcgacattcatgccatgacggcatcggaaatgttcggcgttccgatcaagggcatgccgagcgaaatccggcgccgcgccaaggcgatcaatttcggcatcatctacggcatctcggccttcggtctcgccaaccagctcggcatcgcgcgcgaggaagcctcggcctatatcaagaagtatttcgaacgcttcccaggcatccgcgcctacatggacgagacgcgcgacttctgccgcagccacggctacgtcaccacgctgttcggccgcaagtgccactaccccgacatcaaggcctccaacgcctcggtgcgtgccttcaacgagcgcgccgcaatcaacgcacggctccagggcaccgcggccgacatcatccgccgcgccatgacccgcgtggaggacgcgctcgccgagaagaggctgtcggcgcagatgctcttgcaggtgcacgatgaactgatcttcgaggtgccagacgccgaggtcgaggcgacgctccctgtcgtgcagcgcgtgatgcaggacgcgccgttcccggccgtgctgctctcggtgccgttgcatgtcgacgcgcgcgccgccaacaattgggacgaggcgcactag

SEQ ID NO: 7758 - DNA, 636 bp, BradyrhizobiumColbertium
atgccccacacccactcgctgctcggcttcgccctcgtctgccttggcctcgttctcacgcccgggccgaacatgatctatctgatctcgcgctcgatcacgcaaggcgccgcggcgggcatcgtctcgctcggcggcgtcgcgctcggcttcgtgttctacatgctgtgcgccgcgttcggcatcacggcgctgctgctcgccattcccttcgcctatgacgcgctgcgctttgccggtgccgcctatctgctgtggctcgcttggcaggcggtgaagccgggcgggcgttcgccgttccaggtcagaaagctcgcggtcgacagcccgcgcaaattgttcgccatgggcttcgtcaccaacctgctcaacccaaagatcgcgatgctgtatctggcgctgctgccgcaattcatcgatccctccgccggcagcgtgctggcgcagtcgctggtgctcggggccatccagatcgcgatcagcgtcagcgtgaatgcgatgatcgcgctcgcggcaggatcaatcgcactgttcctggcgacgcggccgagctggatgctggtgcagcgctggctgatgggcacggtgctggccgggctcgcggtgcggatggcggtcgaagcgaagaaggtgtag

SEQ ID NO: 7759 - DNA, 627 bp, BradyrhizobiumColbertium
atgaccatcgagctctacacctggaacacgccgaacggccgcaagatctcggtcgcgttggaggagatggggctgccttacaaggtgatcccggtcaacatcaccaagggcgagcagatggcgcccgagttcctcaagctctcgcccaacaacaagatccccgcgatcgtcgaccccgagggccccgatggcaagcctgtcagcatcttcgaatccggcgccatcctgctctatctcggcgagaagaccggcaaattcctgccgaaatcgcttggcggccgcatcccggtttacgaatggctgatgtggcagatgggcggcttcggcccgatgccgggccaggttcaccatttcatcgcgctggagaacgagcaggatcgcgcctacggcctgaagcgctacatggccgagacgcgccggctctatggcgtcctggaccggcagctcgagggtcgggagttcgtggccggcgagctctcggttgccgattttgccatcctgggctgggcttggcgtcaccctcgccacaaggttgatctggccgacttccccaacgtcaagcgctggtacgaggcgctgatggcgcgcccggcggtcaagcgcgggatggaagcgaagctggattga

SEQ ID NO: 7760 - DNA, 564 bp, BradyrhizobiumColbertium
gtgtcgaaatccgcctcccgcgcccgcctgttcgaaatcatccgccggcgctcattcggccgcggcgaggtgacgctcgcgtcgggccgcaagagcgatttctacttcaacctcaagccgaccatgctcgaccccgagggcgcaacgctgctcgccgaactcacgtacgaggcactgaaggatgagcagctcgatttcatcggcgggctcgagatgggcgccgtgccgctcgccggcgcgctggcgcagatctcctggatcaagggccatccgatcgcggccttcttcgtgcgcaagaaaccgaaggagcacggcgccaagctcgcgatcgagggcctgcccaagggcgagacgctggcgggcaagcgcgtcgtgatcgtcgaggacgtcacgaccactggcggctcggcgatgaaggcggtggaatcggtgcgcgaggccggcgccaaggtggtgctggtgctgacgatggtcgaccgcgaggaaggcgccaccgacacgttcggtgcggccggcctgccgttccgctcactgtacaaggcgtcggagttcttgaaggggtag

SEQ ID NO: 7761 - DNA, 777 bp, BradyrhizobiumColbertium
atgcttgtagccgccacgctggcagcgccgctgcttgcagtcccggccccagtctcggccgaaggcctgttcgacttcctcttcggcggcatgccgcagcagcggccgcagcgcgaggtgccgcagcaggcaaactcctacgccgatcccttcaccggccagcagaatggggcgacaccgcaatatgtgccgccaacccgctcggcggcggccggcggctcggggccggccttctgcgtgcgcagctgcgacggcaaatatttcccgctgatgcgcggcctcgtctcaccggcgcagatgtgccaggcgttctgtcctgccagcgcgacaaaagtctatttcggctccagcatcgagggcgcttattcgcagaccggcgagcgctatgcagacagcgagaacgcgttcgcctatcgcaaggcgctccgcgccgactgcacctgcaacggccgcgagccggtcggcctggctccggttgaccttgcgctggattcctcgctgaaggcgggcgacgtgatcgccaccaccgacgggctcgtcgcctataccggcattcgcgtcggcaacgaccaggctgccgacttcaccccggttgcttcctatcccggcctcaccgcccaggtccgcgcgcggcttggcgagatgaaggtggcgccggtgcgcgccgagacggtgtcggccgatgcgccggccgcagccgagatcgtgcgcgagccgctgccggatgtgtcggtgccgaagacccagaagcctgccaagcgggcgggattggattaa

SEQ ID NO: 7762 - DNA, 432 bp, BradyrhizobiumColbertium
atgtccaccatcgccttcgatcagtttgccctcacccggatcgccgatttcgcgcgctcgctgtcgcggctgcatcaggcggcacggcgccatgccgtcgatgacgaccagttcgaccgcgagttcaacgcagtgtgccagtcgatctggggctacaccatcgacgacatcagcgacgatctgttctcgacggaggaccatctgtttctcgacacgctcgacgaggcgcatgcgcgcatcttcgcggccgagcagggttatgatctcgtcggcgatcagggcatgctgaccgactggtggggcttttgctggatgatcctggccgagaagcgcggcctcctgaccccggaaaaccgcgccgctgcgcgggtggcgatcgaggagaaatatctggcagcgccgaacgtgatcggggtgatcatcggaaggtga

SEQ ID NO: 7763 - DNA, 699 bp, BradyrhizobiumColbertium
atgacggacaacgttgcgctatcgctctcttcggcgcttgcgctcgatatcgcaggtgtatcgctccaagccgatctctccggcgcgctgttctgggaagagcagcgcctgctcgtcgtctcggacctgcatttggagaagggctcgagctttgccacgcgcggcgtgctgttgccgccttacgataccattgcgacgctgagccggctcgctgctgtcatctcccgccacaatccgcaagtcatcgttgcgctgggcgacagttttcacgaccgcagcgcgcatgggcgcctatcggcggaagaccgcgacacggtcgccgcgctccaggccggccgcgactggatatggatctcaggcaatcacgatcccatgttgccgcccgatctcggcggcaccgtcgcggacgaggtcgcgatcggcccgatcaccttccgccacgagccgaccggctcggatggcgagatcgccggtcatctgcacccgaaggcgcgtgtctccgcgcgcggccgctcgctggagcgccggtgctttgcgagcgacgggatgcgcgccgtgatgccggcgttcggcgcctatgccggtggcctcagcatccgcgacgccgccttcgcaaagatcttcccgaagaacggctttgtcgcccatctcctcggcgatcgccgggtccatgccatcgcggcctcccgctgttattga

SEQ ID NO: 7764 - DNA, 2577 bp, BradyrhizobiumColbertium
gtgccgccccggattctacaaaaatcggtcgagacgcctgcccttctgcccgatcgcttccagcgatggtttgcagcccgcggctggtcgccgcgcgcacatcaattggcgctgctcgagaaggcgcgcgaggatgccagcgcgctgctgatcgcgccgaccggcgcgggcaagacgctggccggatttctgccgacgttggtggagctgtcgatcgatcccatcgaacgcgaggcaagcacgaagcaaagcctcgtctccaccggccgcggcctgcaacggaccggcggcttgcacacgctgtacatctcgcccctcaaggcgctcgccgtcgacatcgcgcgcaacctcgagcgtcccatcgccgagatgggcctgccgatcaaggtcgagacccgcaccggcgacacgccggtgtcgcggcgccagcggcagcggcgatatccgccggatgttctgctgacgacgcccgagcagctcgcgctgttgctctcctcggacgatgcgccgttcctgttttcctcgctgaagcgcatcgtgctcgacgagctgcatgcgctggtgacgtccaagcgcggcgatctgctctcgctcgggctggcccgactgtggcgtcttgcgccgcagatgcgcgcgatcggcctgtcggcgaccgtggccgagccggatcagcttgcgcgcttcctggtaccgcagcccgacggcacggaagccgcggccgacatcgtcgtcgccggcggcgctgcgccgcccgtggtcgagatgctcgatacccgcgagcggctgccctgggccggccacagcgcgtggcgcgcgcttcccgagatctacgagctgatcaaggcgaacaagaccacgcttgtcttcgtcaatacccgcagccaggccgaaatgctgttccagaatctctggagcatgaacgacgacggcctcgccatcgcgctgcatcacggctcgctcgacgtcgcgcagcgccgcaaggtcgaggacgcgatgtcggcgggccggctgcgcggcgtggtctgcacctcctcgctcgacctcggtgtcgactggggtgacgtcgatctcgtcgtcaatatcggtgctcccaagggctcctcgcgcctgatgcagcgcatcggccgcgccaaccaccgcctcgacgaggcctcgcgcgcggtactggtgccggccaaccgattcgaggtgctggagtgccgcgtcgccatcgacgccattgccgagaacgcccaggatacgcctcccttgcgcaccggtgccctcgacgtgctggctcagcacgtgctgggctgtgcctgcggcgagccgttcctttctgacaaactgtatgccgaggtgcgcacagccgcgccctacgccggcctgtcgcggcaggatttcgacgacgtcatcgattttgtcgcctccggcggttacgcgctgaagacctatgagcgcttcgcccgcatcaagcaggacaaggaggggcattggcgtgtcgccaatcccaaggtgcggcagagctatcggatgaacgtcggcaccatcgtcgaggacgacatgctgaaggtgcgcctggtgcgctcccgcggcggcggtgcaggttctactggagtgattgcgcgtggcggccggctgctcggcgagatcgaggaagccttcatcgagggcctgagccccggcgataccttcgtgttttcgggcgaggtggtgcgctacgagacactggtcgaggatcaggtctatgtctcgcgcgcacacgacaaggatccgaaggtgccgtcctatatgggcggcaaattcccgctctcgacctatcttgccgagcgcgtgcgccgactgctcgacgacggccgcgcatggggcggcctgccggagcaggtgcgcgactggctgtcactgcagaaggacgtctcgcgcgtgcccgcggtgcgcgagcttctggtcgagagctttccgcgcgccaacaagcactacctggtctgctatccattcgagggccgtcttgcgcatcagaccctcggcatgctgctgacgcgccgcctcgagcgcgcccgtgcgcggccgctcggcttcgtcgccaacgaatatgccgtggcgatctgggcgctcggcgacatgtcgttcatgattcgtgacggcaggatcgacctcgacgcgctgttcgaccccgacatgctcggcgacgatctggaagcctggctcgccgaatcagcgctgatgaagcgcacgttccgcaactgcgcgatcatctccggcttgatcgcgcgccgccacaccggtgaggagaagagccgccgccaggtgctgttctcgaccgatctcgtctacgacgtgttgcgcaagcaccaggcggatcacgtgcttttgcgcgccgcgcgggccgatgccgccaccggtctgctcgacctgcgccgactgagcgacatgttgatgcgcatccacggtcgcatcacgcaccgggaactcgaccgcgtctccccgctggcggtgcccgtgatgctggaaatcggccgcgagtcagtttatggcgaagctgcagacgaactgttggcggaagccgccgacgaactcgtcaaagaggcgatgtcgtaa

SEQ ID NO: 7765 - DNA, 366 bp, BradyrhizobiumColbertium
atgaccgaccacaccgccatcgccctttgctatatcgatgtctggaacgagcgcatggcgagccgccgccgcgagctgctgagcgaaacctggacggcggatgccagctatgtcgatcccgtcatgaagggtgacggccgggacggcatcgaggcgctgatcgcaggcgtgcagcagcgcttccccgatttcaagttcaagctgatcggcgaacccaacggctacggcgatcacatccgcttttcgtggggacttggtcctgacggcgccgacagcccgatcaaaggcactgatttcgcggtgctgagggacgggcggatcaagagcgtgatcggattcctggaccaggtgccggcggaggtgtga

SEQ ID NO: 7766 - DNA, 351 bp, BradyrhizobiumColbertium
atgagcattcagcgtttcgaaaccggcccgcgcatgagccaggtcgtcgtgcacggcaacaccgtctatctcgccggcgtcgtcgccaacaaggcggccggcgagagcgtgacgaagcagacccaggatatcctggcgaccatcgacgcccacctcgccaaggccggcaccgacaagtcgaagctgctctcggcaacgatctacatcaccgacatgaagaccttcggcgagatgaacgcggtgtgggacgcctgggtctcgcccggcaacacgccggcgcgcgccaccgtcgaagccaagctggcggcgccgcaatacacggtcgagatcatggtcaccgcggcgaagtga

SEQ ID NO: 7767 - DNA, 894 bp, BradyrhizobiumColbertium
gtgtttcttgcggcgttgatcgccgcctcggctgcatccgccgagacgatcgacgtcaacggcgtgaagcgctcctacacggcgcagctgccgggcaagaggctggtaccgctcgtggtcgtgctgcatggcaagtcccggcgcggtgccgacatgatcgcgcggacgacctggcctcaggttgcgaagcgcgagggccttgctgtggtctttccggacgggctcaacaatgcgtgggcagacgcgcgaacgaaggccgggcctgccctgcgcggaccgccagcgggtaccgacgacgtcgcgttcatcgcgaaaatcgtcgacaagctggtggccgacggcacggctgacgcaaagcgcgtcttcatcgcgggcgtctccaacggcggcgccatggcaatgaccatggcctgcgcgcgcgccgatctgtttgcggcagctgcgagtgtgatcatgaatctcaccgacgaggccgccgtcacgtgccatccgtcgcggccgctcccgatgctgctcatgaacggcaccgccgacctgctggtcccctacgccggtggacgcggaacgagctatttcgccgcggatggattctggtcgaccgacgagacgctggcgttctggcgcaggctcaatggctgcgaggttgaagacgcggagacgaccgatttgcccgacagggcgcccgcagaccattccacggtgacgcggatctcctcgcgttgcccccaaggacacgacgtggtgctctatcgcgtcaatagtggcggccaccgcgtgcccggatttgttccggatgcccgctttccgaagatcgcagccggcctgctggggccgcagaacatcgacatcgacggtgccgagacgatctggacgttcttcagcagttttccctga

SEQ ID NO: 7768 - DNA, 1659 bp, BradyrhizobiumColbertium
atggctgaagagactgatgtcatcgtcgttggcgcgggactgtcgggcctcgtcgccgcgaccgagattgcggatgcgggcaagcgcgtgatcgttgtggaccaggaaggcgagcagtcgatcggcggccaggcgttctggtcgttcggcggattgttcctggtcgattcgccggagcagcgccggctcggcatcaaagactcgatcgagctcgcgatgcaggattggctcggcacggccggcttcgaccgcgacgaggacttctggccgcgcaaatgggccgaggcctatgtggcgttcgcagcaggcgagaagcgtgactggctgcgggccatgggccatcgcatcttccccgtggtcggatgggccgaacgcggcggctacgacgcgatgggccatggcaattcggtgccgcgctttcacgtcacctggggaaccgggcccggcatcgtcgagccgttcgcgcgccgcgcgcgcgaggcaatgaacagcggccggttgctcttcagattccgccatcgcgtcgacgcactgtccattaccaacggcactgtggatggcgtcagcggcaccgtcctcgctccggaccctatcgaccgtggtaagagttcctcccgcaacgcgaccggcgagtttgccctgaaggcgcaggccgtgatcgtcgcctccggcggcatcggcggcaaccacgaactggtccggcagaactggccgaagcggctcggcgatcccccgaaattcatgatctccggcgtgcccgagcatgttgacggccgcatgatcggcattacggaaaaatcgggcgcgcggctgattaatcgcgatcgcatgtggcattacgtcgagggcatccagaactggtcgccgatctggccgcgccatggtatccggatcctgcccggcccctcctcaatgtggttcgacgccacaggcaagcggctgccggcgccgctgctcccggggtccgacacgctcggccagctcaaatacatcatgtccaccggctatgactattcctggttcatcctgacccagagcatcatcaagaaggagtttgcactgtcgggctcggagcagaatcccgacctcacgggcaagagctggcgcatgacgttgcgccgcgccaccaacaagggggcgccggctccggtggaggcgttcaaaagccatggtgtcgacttcatcgtgcgcgacaagctcgacgaactcgttgcggccatgaacaagctcgccggcagcgatctcctcaagctcgagcacatcaagatgcagatcgaggcgcgtgaccgcgagatcgccaacccctacgtcaaggacgcgcaagtgatgaacatccacaatgcgcgccgctatatcggcgacaggctgatccgcaccgctcccccgcaccgcatcctggatcctgcgcatgggccgctgatcgcggtgaagctcaacatcctcacccgcaagacgctgggcggcttcgagaccgatctcgattcgcgcgtgttcggcgaagagggcagcgtgatccccggcctctatgccgtcggcgaagccgccggcttcggcggcggcggcatgcatggctatcgctcgctggaaggcacttttcttggcgggtgtctgttctcgggccgcaaggcgggccgcgccgcgtcgaaagcggtgggttag

SEQ ID NO: 7769 - DNA, 522 bp, BradyrhizobiumColbertium
atgaagtttctgacggggttgcttgcgtcggttctcctgatggcgggcatgggggcttctcacgcagtggttcgtatcgcggacgaccgcggcggccggatcggaacctacgtcgacaaataccaggacctcaggcaatcgggcgaaaccgtcatcatcgacggcctttgcgcctccgcttgcaccattgtccttggcgccatcccgcacgaccgcatctgcgtgacctcgcatgcgacgctcggcttccacgctgcctgggatttcggcgccaacggccgcgccgtcaccaatcccgaagcaacgcagatgctgtatgcgatgtatccctctcaggtgaggcggtggatcggccagcggggcgggctcactcatcgcatgcttttcctgaagggcaagcagctcgaggccatgtacaagccctgctacctggacgcgcaggcctcgacggccaagccgtcgcgccggtcgctgccacagacggagccacttgaatccgctcggggccagctcctccgctga

SEQ ID NO: 7770 - DNA, 126 bp, BradyrhizobiumColbertium
gtgctggtctggggcggcacggccgttggcggtcttgtggtgatcggtgcgctggcactttggttccactatggcagccacgtgttcttcgaaatgatcaggactggccttgccgcctgtttctga

SEQ ID NO: 7771 - DNA, 591 bp, BradyrhizobiumColbertium
atgagctccgccacccgtgcgctggtgattgcgaccgccttcgccgcaagcctgattgtcgggctcctgatcatgttctgggcgatgggcggggtcggcaaaatggcgcaaccggccgcgatcggcggcccattccagctgaccgaccagaacggcaaggccgtgaccgacaagagcctgaaaggcaagccgaccctgatcttcttcggctacacccattgccccgacgtctgcccaacctcgttgttcgaaatctcggaagtgctgcgcgtcatgggcaaggatgccgacaagatcaacgccgtcttcatctcggtcgatcccgagcgcgataagcctgcaacgatgaaggattatctttcgagcttcgatccccacctccagggcctgtccggcgatccagccgagaccgccaaggtcatcagctcctaccgggtctacgccaagaaggtcccgaccaaggacggcgactacactatggaccacaccgcgctgatctatctgatggaccgcgaggggaggttcgtgtctccgttcaatctgaagcggacgcccgaggaagccgcggcggatttgaagaagtatctctga

SEQ ID NO: 7772 - DNA, 924 bp, BradyrhizobiumColbertium
atggcaccatcgcaacaggcgaaatcgtccaaatctgcccgtggcttgctgaccgggctggccgtggccgcatgcttgctcgcgagcctgcctgccgccgaggcccaggcgcccgccaagcggcctccagccgcgccgcaagccgcgccccaagcagccccgcaggccgtgcccggcttctgggacccgcgccgacgaccggagcggccggacctgtcgcgcctcaccgtcatccgattcctgacggagaccgactatccgccattcaatttcaccggtgccgacggcaatccggccggcttcaatgtcgatttcgcccgcgcgctttgcgaggagatcaaggtcacctgcaccgtccagatgcgccgcttcgagacgctggtcgatgccctcacctccaaccggggcgatgccatcatcgcctcgatggcggtgagcccgcagctccgcgcccgcgtcgatttcaccgatccctattaccgcgtgccggcgcgcttcgtctcgcgcaaggatgccgtgatgccggagatccggcccgaatatctcgagggcaagaaggtcggcgtgatcgcgggctcggcgcatgaggcttatctcaaggcgatgttcaccgacgccgagttgcacgcctatcccggcgacgacgcggtgcgcgcagctttgcgcaggggcgaggtcgatttcatcttcggcgacgccatctcgctcgcattctggatcaacggtacggattccggcgattgctgcgccttctccggcggccccttcgtcgagagccgtttcttcggcgagggcatcggcattgccgtgcgcaagggcaacgacgtgctgcgtcaggccctcaactgggcgatgttccgcgtctgggagaaaggccgctataccgatctgtggctacgctatttctcggtgagcccgttctaa

SEQ ID NO: 7773 - DNA, 1641 bp, BradyrhizobiumColbertium
atgtccgttatcgatctcgccgcgaacccgagcgacttgcgtgcgctcgccgaacaatccaacgcctggccgttcgagcaggcgaaggccattgtcgcgcggctgaagaaaagcccgaaggacgaggtgctgttcgaaacaggctacggtccctccggcctgccgcatatcggcacgttcggcgaggtcgcgcggacctcgatggtgcgccatgccttccgcgtgctgaccgaggacaaggtcaagacgcgcctgctcgccttctcggacgacatggacggcctgcgcaaggtgcccgacaacgtgcagaaccgggcgccgctggaagccaatctcggcaagccgctgacgcgcgtgcccgatcccttcggtacgcatgacagcttcggcgcgcacaacaatgcgcgcctgcgcgccttcctggatcatttcggcttcgactacgaattcgcgagctcgaccgactattatacgtcaggccgcttcgatgcgacgctgctgaagatgctcgcggcctacgacaagatcatggcgatcatcctgccgacgctggggcccgaccggcgcgccacctattcgccgttcctgccgatcagcaagaccacaggtgtcgtgctgcaggtgccaatgatccgtcgcgacgtcgcggccggcaccgtgacctatgtcgaccccgatacgaaccaggaagtcgagactcccgtcaccggcggcaacgtcaagtgccagtggaaggccgactgggcgatgcgatgggtcgcgctcggcgtcgactacgagatggcaggcaaggacctgatcgactcggtgaagctgtccggcgcaatcgccagggcgctcggcggcacgccgcccgaaggcttcaactacgagctcttcctcgatgagaagggccagaagatctcgaagtcgaagggcaacggcctgaccatcgacgaatggctgcgctacgcctcgccggaatcgctgtcgctgttcatgtaccgcgagccgaaggcggccaagcggctgtatttcgacgtcatcccgcgcaatgtcgacgactatcagcaattcatcgacggttttgccaagcaggatgccaagcagcagctcggcaatccggtctggcacatccacaacggcaggccaccgaagggcgacatgcccgtcaccttccagctgctgctgacgctggtgtcgtcgtcgaatgcggagaatgccgagacgctgtggggcttcatcggtcgctatcgacccggcgtgagcccgcagacgcatccgaagctcgatgcgatggtgggttatgccatcaactattatcgcgacttcgtcgcgccgacgaagcagtttcgtgtgcccacggataccgagcgcgccgcgctgcaggatctgcgcgatgcactgtcgcagctcgcgccaaacgcatccgccgaggacatccagaacgtcgtctacgaggtcggccgccgcgagccgtttctcgaccaggtcaagaagggcaaggacggccgtccgggcgtcacgctggactggttcaacatgctctaccaggtcctgctcggccaggagaaagggccgcgcttcggctcgttcgtcgcggtgtacggcattcagaacgcgatcaacatgatcgacggcgcgctggcaaggagcgcgtga

SEQ ID NO: 7774 - DNA, 657 bp, BradyrhizobiumColbertium
atggtcaggcaggccaaagcacagaggatgctgactcaccaccagatctgggccgcgctggatcggctggcggcgcgcgccgggctgtcgccgtccggccttgccaagcgtgccgggctcgaccccaccacgttcaacaggtccaaacgtgtcactgtcgatggccgcgagcgctggccatcgacagaatcgatcgcaaaggcgctggccgcggccgacgcctcgatcgacagctttgcgaagctgatcgatgacggcggtgtaagcgaccgcggctcggtgccgctgctcggcctcgcgcaggccgggaccggcggggccttcgatggggccggccttccatccggcaggggctggaccgagatcgcgcttccgatcgccgaggacggtcaggtctttgcgctggagatttccggcgcagcgctactgcctgcttatcgcaacggcgacatcatcctggtctcgcctgcggcgccgatccgcaagggtgatcgcgtggtggtaaagatcaagacgggcgagatcacgatcgcgaccctgaagcggcgcacggcaaaggccctggacttggcgcccttcgatgcgtcgcaggcggcgcgaagggtcgcgtcgagcgatgtcgcctggattgcgcggatcctctgggcgagccagtga

SEQ ID NO: 7775 - DNA, 345 bp, BradyrhizobiumColbertium
gtggtcaagatctacaaaatctgtccggcctcggcttggcgcgaggcggaacggcagggtgtctaccggggcagcgcagacgacgcgcgcgacggattcatccatttctcgaccgccggccaggttcccgagaccctgcgcaagcactatttcggacagcgcgcgctgttcctggtcgaggtcgacggcgatgcactcggcagcgagctgcgctgggagcgctcgcgcaatgacgagctgttcccgcatctttacggcgagctcgatctcggcacggtggtcacggtgatcaacctcaccatgcgttccgacggcagccacgacgttccggagctgctgccgtga

SEQ ID NO: 7776 - DNA, 1098 bp, BradyrhizobiumColbertium
gtgatccgcgcgttcgacgccttctcgctgccggtgctgcgctggttcgatcccgaggacgcccatcgcctcgcgatccagggcctgcgcttcctgccgccgatcaagccccgccccgacgaccccaagctcgccgtgcgcgccttcggactcaatttccccaatccggtcgggatggccgcggggttcgacaagagcgccgaggtgccggacgcgctgctgcggctcggcttcggcttcgtcgagatcggctcggtgacgccgaagccgcaagaaggcaatccgcggccgcggctgttccggctcgagcgagacgaggcgatcatcaaccgcatggggttcaacaatgacggagcagaggcagctctgcgccgccttgccgcgcgcgcacagcatggcggcatcgtcggcgtcaatgtcggtgccaacaaggattcgccggatcgcgtcgccgattacgtcaagctgatcgagacctttgcgccggtggcgagctatttcaccgtcaacgtgtcctcgccgaacacgccgggcctgcgcaacctccaggaaggcgcactgctcgacgagctcctcgcccgcgtgatcgacgcgcgcgagcgggtgcgccagaaggccggcgacacgccggtgctgctcaagatcgcgccggatttgagccttgcccagctcgacgacgtcgtgcaggtcgcgcgctcgcgccgggtcgacggcatgatcgtatcgaacaccacgatcgcgcggccgagcacgttgcgcgagcaggcgcgcgccaaagagcaaggcggcctgtccggccgcccgctgttccgtctgtcgacgcggatggtcgcagaaacctatgtgcgcgtcgaaggcgcgttccccctgatcggcgtcggcggtgtggattccggcggcgccgcgctgacgaagatccgcgccggagccagcctgattcagctctattcgtcgctggtctacaaggggctcggcctcgtcgacgagatcaagcgcgacctgacctcgacgctgctgcggacagggcgcgattcgctgtcggagatcgtcggcgcagatgccgcgacgctcacggcggaagactggccagggatgtga

SEQ ID NO: 7777 - DNA, 1287 bp, BradyrhizobiumColbertium
gtgttcgccatcgcgggaccggccatggtcgcgaacctcaccacgccgctgatcggggtggtttcgaccaccgcgatcggacggctcgacgacgccgcgctgcttggcggcgtcgcgatggcctccatcatcttcgactgcctgttctggctgttcggcttcctgcgcatgagcacgctcgccttcaccgcacaggcactcggcgcgggcgtgactgaggaactgaatgccatcctcgtgcgtggcttcatcgtcgccggcctgatcggcaccgggctgatcgcgctgcaattgccgctgacctcggtgctattcgacctgatgggcggcagcgaaggcgtgacgcgcgcggcgaagacctatttcatgatccggatctggtcatcgccgttcgccttcgccaattacgtcgtgctcggctggctgatcgggcaggcccgcgccaatcccgcgcttgcgctccaggtcgtcatcaacctcatcaacatggcggcgacgatcctgctggtgttggtctatgacaccggcattgccggcgcggccatcgccgcactgctgtcggagacgaccggcttcgtgcttggcgtcatcgtctgccgtcgctatgcggtgggcggctttgccgttccccgcgcccgcctgttcgaccgggtcaagctgatgcgcctgctggcggtgaattccgacatcatgatccgcaccgcggcgctgatcgtcgtattcctgttcttcaccgcaaagggcgcacgtgccggtgacgtgacgctggcggcgaactctgtcctcaacaatttcctcctggtcagcgccttctttctggacggcatcggcaacgcggcccagcaactctgcggccgcacgttgggcgcgcgcgacgccaagggtttcctggattccacccggctggtgctgctgtgggggctcggcttcgcgctggtcgttgccttgctgttcgcgctgttcgggccggggctgatcaatttcatgaccgccagtgaagacgtccgccgcgcagcgcgcgagttcctgccgttcatcgtgcttgcgccgttgccgggcgtattcgccttcggcttcgacggcatctatgtcggcgcaacctgggcacgcgagatgcgcaatctgatgctggtttcgctcgcgatcttcttcggcgtctggctggcgctgcaatctctcggcaatgccgggctgtggagcgcgctgatcgcgttctatgtggcgcgcggtgggctgcagggcgcaaggtatccggcgctgtatagggcgacgtttccgaaatcgtag

SEQ ID NO: 7778 - DNA, 735 bp, BradyrhizobiumColbertium
atgcaattgcgtttcgtcggctgcggtgacgccttcggctccgggggcaggctcaacacctgcttccatgtctcggggcgcgccgcgaatttcctgatcgattgcggcgcgtcggcactgccggcgctgaagcggctcgagatcgtgcgcgaggacatcgacctcattctcatcacgcatttccatggcgatcatttcgcagggctaccgttcctgctgctcgacgcgcagttttcgcggcggacgcggccgctgacggttgcgggcccgcaaggcatcgagacgcggctgcgagaggtgatggaagcgctgttcgagcactcctccaaaaccaggcagcgcttcgagctcaacctggtcgagctcgccccagagcagcgtcgagccttcggggcaataacggtgacaccgtatccggtcgtgcacggcgaatccggcgggcctttcctcgcctatcgcgtcgaggctgagggccggacgctggcctacagcgccgacaccgaatggacggagacgctcattccgctggcgcatggcgcggaccttttcatcgccgaagcctacatgtacgagaaggttgtcaagaaccatctcagcttgaagaccttggaacagcatctgcccgcgatcggcgccaagcggctcgtcctcacccatatgagcgacgacatgctgtcgcgtctgggcgacgtgccgcatctggctgcagaggatggcatggtgctcgtgttctga

SEQ ID NO: 7779 - DNA, 306 bp, BradyrhizobiumColbertium
atggtccaagacgtcagagatttgccggccggccgcagcgacggcctgcaccgctttctcggcggctccccgctgacggtcgcgttccggctggtcatgctctcgatcctggtcggcgtcgtgctggcggcgatcggcttcgatccctggaacatcatctacagcatccagctgctgttccagcgtctgtgggatctcggattcgacacgatcaattggctgtggcgctacttcctgctcggcgcggtcatcgtgatcccgatctggctgctctcgcgcgtgttcggcgcgccgcgcggccggtaa

SEQ ID NO: 7780 - DNA, 1662 bp, BradyrhizobiumColbertium
atgaaccgcttcgccgagctgcttgaccgtctcgcttatgagcccggccgcaacaacaagctgcggctgatcaccgggtatttccgcgaggtcagcgatcccgatcgcggctacgcgctcgccgcgctcactggcgcgctcagcttcaagcacgccaagcctgcgctgatccgcgacctgatcgcggcgcgcacggatgaggtgctgttcgggctgagctacgactatgtcggcgatctctcggaaaccgtggcgctgatgtggccgaaggcgccatcggccgcccacaacaacccgccgccaccaacgctcaccgaagtcgtcaccacgttgcgcacgctcggcaagaccgagctgccaaagcagctcgaacgctggctcgacgagctcgacgaaaccggacgctgggcgctgctgaagctcgtcaccgggagcttgcgcatcggcatctctgcgcgattggccaagaccgcggcggccgcgctcggcgacaaggacccgcatgaggtcgagctgatctggccgggccttgcgccgccctatctcgacctgttcgcctggctggaaggccgcgccgaaaagccggtcaaccgcgaccctgcgccgttccgccccgtgatgctggcgcatgccatcgaggacacggacttcgcggcgctcgaccccgccgactacatcgcggaatggaaatgggacggcatccgcgtgcaggcagtggcgggccgcgacgaccgcggccacatcacgggccggctctattcgcgcaccggcgaggacatcaccggcagctttccggatctcgtgccgtcgctgcggctgcccggggccatcgacggcgagcttctgatcctgcgcgagggccgcgtgcagagcttcaacgtcctgcagcagcggctgaaccgcaaggtggtctcgccgaagctgatcaaggaattccccatccacctgcgcgcctacgacctgctcggcgacgacgagaacgatctgcgcgagctgcccttcgcggagcggcgggaacggctggagaccttcattgcgaagcttgacgatccccgtatcgatctgtcgcccaccgtccgcttcgcgagctgggaggcgctgactgccgcgcgcgccgatcccgcgagcgccggtgcgggcgaggacgccgacgccgtcgaaggcgtgatgctgaagcgccgcgatgcgccttatctgccggggcggccgaagggccaatggtggaagtggaagcgcgatccgcacatcatcgatgccgtgctgatgtacgcacagcgcggacacggcaagcgctcgtcctattactcggactacacgttcggcgtctggaccggcggcaatggcggcgacgaactggtgccggtgggaaaagcctatttcggcttcaccgacgaggagctcctgcagatcgcccgcttcgtccgccgcaacaccaccgagaagttcggcccggtccgccatgtcgtgcatgagccggacaagggcctggtgctcgaggtcgccttcgaagggctgcaacgctcgccgcggcacaaatccggggttgccatgcgctttccccggatcagccgcctgcgctgggacaagccgccgcgagaggccgaccggctggaaacgctggagggaatgttgaaggccgaaccggcggagattgatctatga

SEQ ID NO: 7781 - DNA, 1047 bp, BradyrhizobiumColbertium
atgtctcacatgcgcccgcaagacatcctgttgccaaatgctgccggcctgtgctgcaagcctggcggcttccacatcgatcctgtgcgcccggtcaaccgggccgtgatcacccacggccattccgaccatgctcgcgccggccatggcgccgtactggcgacgcaggaaacgctcgacatgatgcggttgcgctacggcgagaattttgccggatcgacccaagcgatccgctatggcgaggaaatccggctcggcgatgtctgcgtgaagtttcacccggcaggccatgtgctcggctcggcgcaaatcgcggtgatctgcaaggacacctgcatcgtcgcctccggcgactacaaggacgcgcccgacccgacctgcacgccgttcgagctcgtgccctgcgacgtcttcatcaccgaggcgacgttcggactgccggtgttccggcatggcgatgccgcggacgaggtgaagaagctgctggcttcggtcgcgctgtttccggagcgcgcgcatctggtcggcgcctattcgctcggcaaggcccagcgcgtgatcgcgttgctgcgccggagcggctacgacgcaccgatttacctgcatggcgccatggagaagatcaccgaatactatcagagccgcggcatcgaactcggcgagctcaggccggtgaagggcatgaagaaggcggcgctcgccggtaccatcacgctggcgccgccctcggcgacctcggatatctggacgcgccgctttcccgatcccgtcaccgcctttgcgtccggatggatgcgcgtgcgtgcccgcgcacggcagcgcggggtcgagctgccgctggtgatctccgaccatgccgattgggacggcctcaccgccacgatcggggcgaccggcgccggcgaggtctgggtcactcacggccaggaagacgcgctggtgcattggtgccggagcaggggcctcaaagcgcagccgctcgacctcgtcggctatggcgacgaggaggagagcgaagtgcctattccaggcgaggccgaggcatga

SEQ ID NO: 7782 - DNA, 927 bp, BradyrhizobiumColbertium
atgcccctgcgcctgttccagtcctccggcgatctcatggcggaccgccgcttcgagttcgcgcgcgacctccagctcaagggcgatctgcccgcggccgccgatgtgctggagcaggccatcgagctcgcgcccgatttcacctcggcatggttcacgctcggcgaaatccgaatgcagcttggcgaacgcgacaaggccatcgcggcgttccaggaatcgcggcggtgcgacccggaggaccagcacggcgccggcctgcatctgatccggctcggcgatgcgccgctatctgaaatgccgaaagcctatgtgcaggccctgttcgaccaatacgcgccgcgcttcgagcacgtgctggtcaacgatctcggctatcgcgcccctgcgctgatcttcaaggcggtgctggccgcgcgcgttgcggcgaagaagccggcttacttcaagcgcaccatcgatctcggctgcggcaccggccttgcggcggccgccttcgccaaacaggtcgatcatttcatcggcatcgatctgtcccccggcatgatcaaggaggcgcgtgcgacgaacctctatgccgagctcgaggtggccgacatgatcgacggtctgcgtgccaaggctgacgccagcgcgaacctcgtcgtcgccgcggatgcattcgtctatctgtccgatctcgcaccggtgctgaacgaagcgaggcgcgtgctcgtaccaggcggcgtgatcgccttcacgctggagacgcatgacggcagtgggatcgtgctcggcgcggggttgcgctatgcccactccgcggaatatgtccgcgacgccattgccagggcggatctcaaattgctgacactggagccggcttccccgcgcaacgagaacaacgagccggtgcgcggcctcgtcgtcgtcgccgagaaaacttga

SEQ ID NO: 7783 - DNA, 1230 bp, BradyrhizobiumColbertium
atgacgaagaatccatcgcggcgcgatttcagcgccgctgcgctcgctaccatcgctgcctccaccttgcctgcaccttatgtctgggccgccgagaagaaatacgatgcgggcgccagcgacaccgagatcaagatcgggcagaccgtgccgcattccggccccggctcgctttatggcgtgctcggccggatcggcgaggcctatttccagatgctcaatgagaagggcggcatcaacgggcggaaaatcaagttcctcaccatggacgatgcctacagcgcgccgaaatgcgtcgaagcgactcggcgtctggtcgagcaggaagaagtgctggcgctctacggctcgctcggcaccgcgccgcagactgccgtgcacaaatacctgaactccaagggcgtgccgcagcttctgctcaacaccggcgcctcgaagtggaacaatccgaaagagttcaaatggaccatggcgggcctgccgctctatccgaccgaggcgcgcattctcgcgaggcacgtcgtcagcgtgaagccgaacgccaagatcggcatcctctaccagaacgacgatttcggccgcgacttcctggcgccgttcaagaaggtgctggccgatgccggcggcaccgctcaggtgatcatggagcagacctacgatctcaccgagccgactgtcgactcccagctgatcaatctgtcgaagtcgggcgccgacgtcttctacaacatctccaccggcaaagcctcgtcgcagtcgatccgcaaagtggccgagctcggctggaagcctctgcagctgctgtcggcggggtcgaccggccgctccatcctcagcgccgccggcctcgagaatgccgcgggcatcgtcgccatccgctacaacaaggaggtcggccttcccaaatgggagaaggaccccgacgtgatggcgttcgaggagctgcgcaagaagtacacgccggcgatcgatcccgacaataccatcgctttcgccgggtatggccaggctgcgaccatggccgagatcctgcgccgctgcggcgacgagctgacccgcgccaacgtgctgaagcatgcctcgacgctcgcgggcttccattcgccgtacttcctcgacggcgtcacctacagctacacgcccgagaactatacgccgatgaagacgctgttcatctccaccttcaccggcaaggactgggacatctccgacaaaccgatgtcggaatag

SEQ ID NO: 7784 - DNA, 852 bp, BradyrhizobiumColbertium
atgatcatcgacgctcaccagcatttctgggatccggcgcgcgccgactatccgtggatggacgcgcccgagctcgccccgatccgtcgcgccttcgggcccgccgatctcgcgccattgctgaaggcaaacggcctcgacgccagcatcctggtgcagtgccgctccgcgctggaggagaccgaggaattcctgcgcatcgcgcatgcgacgccctccgtcatcggggtcgtcggctgggccgatctgacggatggggcgctcgacgaaacgctcgaccggctgcgtgctttgccgggcggcggcaagctggccggagtccgccaccaggtccatgacgaggccgatcccgagtggttgctccgcgaggacgttcagcgcggcctcacggcagtcttcgcccacgatctcgcctatgatttcctcgtccgcacccgcgaactgccgtcggcgatcgcaaccgcgcaagcctttccggaagcgcgcttcgtgctcgaccatgccgccaagccgccgatcgccgccggcgggagcgccgaatgggccgacctcatcagggcgttggcggcctgcggcaatgtctggtgcaagatctctgggctcgcgaccgaggcggtctggactgactgggacgcggaacggctgcttccattcgtcgcgcacgccgcagaatgctttggcgaggacaggctgatcttcggctccgactggccggtgtgcctgcttgcgggaagctacggcaggatcaagaccgcgttggaggattgcttgatgggccttggcccgcgtgtgcgggacaaggctttcggcgtgaatgcgacgcgggcttatcggctggcgatcgcaggttag

SEQ ID NO: 7785 - DNA, 978 bp, BradyrhizobiumColbertium
atgaaatggtcgcggctcggcgctctcgatgtcacctcaatcggtctcggttccgccccgctcggcggattgttctcgcccgtcagcgatgctgacgcgcaagcgacgatcgagcgggcctggtcgctcggcgtccgcttcttcgacaccgcgccgctctacggctttggcctcgcggagcggcggctcggcgcgttccttcggcaacaaccgcgcgaatcctatgtcatctcgacgaaggtcggtcgcctgctgcgagcaccggatggcgctcccgccgaggacgagcactacaagggcacgccgcgcgagcggccggtgttcgatttcagccatgacggcgtgatgcgatcggtcgaggagagccttgagcgtcttggcctcgaccgcatcgacgttctgctcgtgcatgatcccgacgaccactatgacgatgccgtcaccggcgccttccgcgcgctgcagcggctgcgcgagaacggcacggtcaaggccatcggcgccggcatgaaccagtcggagatgctggttcgcttcgcggaagccgtgccggtcgactgcttcctgctcgccgggcgctacacgctgctcgaccagggcgcgcttgatgcactgtttccgctatgtcaggccaagcatataggcatcctgctcggcggcctctacaacagcggtatcctggccaatcccaccacgagcgcgaagttcaactatcaggatgccgacgcggcgctgctcgcacgtgcgctggagctcgatgcgctctgccgcaagcatggcaccgagctcaaagccgccgcgctgcagttctgcatggctcatccggccgtgacggtcgcggtcatgggcgcgcgcaatgccggtgaggtcgccgacaacatggcgatgacggagaaggcggtgcctgccgcgttctggcaggagctgcgcgctcgaaagctcgtcgatgtgcgcgcgccgctcccgggcggagcgtag

SEQ ID NO: 7786 - DNA, 933 bp, BradyrhizobiumColbertium
atgaggaagcttcttcttgcaggcatcgcggttgcgatgatggcgacgccgacgttcgccgcgaactaccgcttcgtcatcgtgcccaaggcgatgaacaatccgttcttcgacttcgcgcgcgacggctgcctgaagcgtgccaaggagctcggcaatatcgagtgcatctacaagggaccggtcgagcacgagccggcgacgcaggcccagatcatccaggacttcatcacgcagaaggtcgatggtctggctatctccgtcgcggatgtcgcagcgatgaccaagtcgatcgaggccgcgactgccgccggcattcccgtcatcaccttcgatgcggatgcccccggctccaagcgcatcgcctatatcggcaccaacaacaaggagttcggtgtcgcgctcggcaagcaattgctgaagatgcggcccgacggcggcaaatacgccatggtgtccggcggtcccggcgccaagaacctcgccgagcgcgtcgacggcgtgcgcgaggcgctgaagggatcgaagtggaccgaggtcgcgggttccccgaccttctgcaacgacgatcccgcgctcgcggtccagcagatgacggacatgcgcaccgcaacgcccgatctcgccgcgatcgttcccatcggcggctggccgatgttcgcccccgaaggcttcaaggcctttgcctcccgaaacaagaaggacatcgattccgggaagttcacgctggtcgtggccgatacgctgaagatgcagctcgagctgctgcgcgacggctatgcgaatgcgctgatcggtcagcgtcccttcgagatgggcgagaaggcgatggatgcgctactcgccatcaagaaaggcgagaaggtgccggagatcgtctataccggcctcgacctcgtgaccaaggacaacgtcgcgcagatgctgaagtag

SEQ ID NO: 7787 - DNA, 1083 bp, BradyrhizobiumColbertium
atggccatgcccatggaatccccgatcaccttcaccaatgtcggcaagatcaaatggtggcagcgtggtctcttcgcgtcgcagaccggctatgtcctgctcgcgctagcggtgctgctgttggtcatgcatttcgccagcccctacttcttcacccagggcaacatgcagaatgtggcgaagaacttctccttcatcgccatcgcgacgctcggcgtcaccttcgtgatcatcaccggcggcatcgacctctcgatcggctcgatgatgtgcttctcggccatgatcacctcgatggtgatgaccgagctgtcgatgcccggctcgcctgcaggatcgctgttcgtgcacatggcgtcggacggcaagaccgtgctcgccaacgcacccggcttgatcctgctggtctctttcctcgccggcctcggcgcagcgttggtcgtcggtctcgtcaacggtttctgcatcgccgtgctgggcctctcgcccttcgttaccacgctcggcatgctctcgatcgtgcgcgggctcggttatgtcgtttccaacggacgcggcagtttcccaggtgggccggacgccgactacttctacgcagctacttcgggtgacgtgttcggcgtaccggcgccgttcatctatctcgtgatgctcgcgctggcgatggcggtggtgctgcaccacacttcgttcggccgccacgtcttcgcactcggcggcaatgagaaggcggcggagctgaccggcatcccggtggtccgggtgaagatcgaggtctacgtgatctgtgcgcttgctgcgggcctgcagggcatcatcatctccggctggctcggatcggcgccggccaacatggcgacatcctacgagctcaacgtgatcgcggcggccgtcatcggcggcgcgaaccttgcggggggcatcggtggtccgctcggggccatcgtcggctgcgtgctgctggaggtgatccgcaacggcctcgtgctcgcccaggtcagctcctactggcagcagacgctggtgggcgtgatcatcatcctcgccgtgctggtcgaccgcatccgctcgcgggtgagctga

SEQ ID NO: 7788 - DNA, 759 bp, BradyrhizobiumColbertium
atgacaaagcctgacgcaacaccggcgctcgagctcaccggcatcggcaaggagttcggcgccatccgcgcgctgcatgacgtcgacatgcagatccggtctggcgaggtcgtcggcctgatgggtgacaacggtgcgggcaagtcgacgctggtcaagatcatcgccggcaacttccggcccagccatggcgagatccgcttggccggcaatgcagtccacttcaatcgaccggtcgatgcccgtgccgtcggcatcgaggtcgtctaccaggacctcgcgctcgccgacaatctgaccgcggccgccaacgtcttcctcggccgcgagttgaagcgcaggttcggaccgttcgccttgctcgaccacaaagccatggcggcgcgcgcgctggagctgttcggcgagctgcgctcggagacgcgtcccgacgatctcgtcaagcagatgtccggcggccagcgccaggccgtcgcgatcgcgcggacccggctctccaatgcgcggctggtcatgatggacgagccgaccgcagccatctcggtgcgccaggtcgagcaggtgctcagcctgatccgtcggctcaaggagcagggcgttgcggtgatgctgatctcgcaccgcatgcccgacgtgtttgcggtgtgcgaccgcgtcatcgtcatgcgccgcggcgagaagcgggccgacaagccgatccatcagacgtcgcccgaggaagtcaccgccctcatcaccggcgcgaaggaggcggcgtga

SEQ ID NO: 7789 - DNA, 1323 bp, BradyrhizobiumColbertium
gtgaacgcgccagccaaattcttcgatgtaagtgcgcccgtcgccttcggaggcaaggacgcggaaggcgcgcctgccttccgctggtatgacaaggaccgcctcgtgcatggccgccggctggaggaccatatgcgtttcgcggtctgctattggcattccctgtgctggccgggcggcgatcccttcggtggcgagaccttcctccggccttggcagcacggcactgatccgatggcaatggcacgcgccaaggccgatgtcgccttcgaactgttccgcctgctggatgtgccgttcttcaccttccacgatgtcgatgcggcgccggaaggcgcttcgctcgccgagtccgtcgccaatctcaatgccatcgccgacctgtttgagcagaagatggcatcgagcaaggtccggctgctctggggcaccgcaaacttgttcacgcaccgccgctacatggcaggcgcggcgaccaacccggaccccgagatattcacctatgccgccggccaagttcgcgccgcgctggaggtgacgcaccggctcggcggccagaactacgtgctctggggcggccgagagggctacgagacgctgctcaataccgatctcaagcgcgaactcgaccagctcggccgcttcatctcgctggtcgtcgagcacaagcacaagatcggtttcaaggggccgatcctgatcgagccgaagccgaaggagccgaccaagcatcagtatgatttcgacgccgcgacctgctacggcttcctcgaacgctacgacctgctcaaggacgtcaagctcaacatcgagcagaaccacgccattctcgccggccattccttccaccacgaggtcgcgctggcagaggcgctcggcgtgttcggctcgctcgatatcaaccgcggcgacgatctgctcggctgggacaccgaccagttcgcaatgaacgtgccggagctggcgctggtgttccacgagatcctgaatcgcggcggcttcaccacgggcgggctcaatttcgatgccaagatccgccgccagtcgatcgaccctgatgatctcatctatgcccatgtcggctcgatggatgcctgcgcgcgcgccttccttgccgctgccgacatgctcgacgccggtacgctcaccgcgccgcttgcaacacgctacgccggatgggcctgccccgagggcagggccattctcgccggccagcgttcgctggccgatctcgccgaccgcgcgcttagccccggcttcgatccgcagccgcgctcgggccggcaggaatacatggaatccctggtcaaccgttatgtctga

SEQ ID NO: 7790 - DNA, 1455 bp, BradyrhizobiumColbertium
gtgtatctcgggatcgacattggcacgtccggtgtgaaggcggtgctcgtgagcgaagccggcgcagtcgttgcgaccgcctcgcgcgagcttgcgctgtcgcatccggcgccgctgtggtccgagcaggatcccgacgcatgggtcgaggcggccgttggcgcagtcgacgatctcgccgcgcaccatccgcacgatgttgcgcaggtccgcggtatcgggctgtcaggtcagatgcatggcgcgacgttgctcggccaggatggcaggccgctgcgtccggccatcctctggaacgacggccgctcgcaggccgaatgtgtcgcgctggagcggcgctgtccctcgttgcacgcgatcgccggcaatctggcgatgcccggcttcaccgcaccaaaactgctctgggtcgcgcggcatgagccaaagatcttcgaccgcctggcaaaggtgctgctgccgaaagcctatgtccgctatcgcctcaccggtgagatggtcgaggatatgtcggacgcggctggcacgttgtggctcgacgtcggcctgcgccgctggtcggccctgctgctgcatgccaccgggctcgacctgcatcacatgccgcgcctggtcgaaggcagcgcggccagcgcggtgctcgcgccggattacgtgcagcgctggggcatgcagaaaaatgtggcagtcgcgggcggggccggcgacaatgccgccagtgcgatcgggctcggcgccattgcgccgggcgacgccttcttctcgctgggaacgtcgggcgtcctgttccgcgttaccgatcgcttcgccccagcgccggccctggccgtgcatgccttctgccacgcgctgcccggcctctggcatcagatgggcgtgatgctgtcggcggccgcctcgctggcatggcttgccggcgtgatggagactcagcctgctgcgctgttgacgcggctcggtgagcgcgtcgatggaccaagcccggtcaaattcctgccctatctcgatggcgaacgcacgccgcacaatgacgcggccgcaagcggcgcattcgtcggcctgcgaggcgcgaccgggcgcggccagatcgtgcaagccgtgctcgaaggcgttgcctttgccgcgcgcgacaatctggcggcgctgagcgcggccagcgggccgatcgccgagctcgatctcgtcggtggcggctcgcgctcgccgctgtgggcgcagatctgcgccgacgtgctcggcattcccgtccatcgggtcgaggaaggcgaggtgggtgccgcgctcggcgctgcgcggctcggccggctcgccgcgacgggggaagacccagcagacgtctgcacccgtccgcgccgcctcgcgagtttcacgccccgcccgttcgtcgctgcggcctatgacgaggcctatcgtcgctggcgtgcgctttatcccgcgttgaaggagtcttcttaa

SEQ ID NO: 7791 - DNA, 1071 bp, BradyrhizobiumColbertium
atggccgacacgctcacaccgactgcgctgacgctgaaggacatcgcccgcgaggcgggggtcagtctcgcgaccgtcgaccgcgtgctgcacaacaggccgggggtacgcccggatacggtccggcgcgtcaaggaagccatcgctcgcaactccttccagccccatgtggccgccgccgagctcgcgcgcggccgcgcccgccgcttcgcgttcgtgatgccgtcggggccgaacccgttcatgcagcagatcgaggcctatctcggcgagatggcggcctggctgtcggcccgccgcctcaaggtcgagatggtcgcaactgacgtgttcgagcccgccgcgctggcggcctcactggaggcgctgtcgggcgactacgatggcgttgccgtggtggctctggaccaccccagtgttcgtgccgccatcaacgatctcgtcgacgccggcaccaaggtggtgacgctggtctcggacgtgccgtcctcgcgcaggcatcattatgtcgggatcgacaacatcgctgccgggcgcaccgcaggcgcgctgatcgggcggctggtcggccagaggtccggcaaggtcgcgatcgtcgcgggctcgcagggcctgcgcgaccacgccgagcgcatcttcggcttcaaccaggtgatggcgacggaattccccgatctcagcgtgctgcccgtgctggaagggcgcgacgaggacgaacgctcggagcaaatgctggcacggctgttcggcggacatgccgacattgtcggcctttataatgtcggtgcgggcacgcagggcgtcgccaaggcgctgaacgacaaggcgctgaacgacaaggcgttgagcgagaccggtcgcgacaaggtcgtgttcgtcggacacgacgtcactgcgttgacgcgccgattgctgctccaaggcttgatggatgccgcgatctcgcagaatcccggacatgaagcgcgcgcggccgtccgcgtgctgctcgcgctcgcccgcggcgagccgatcttgagcgaacaggagaagatcaggatcgacatcgtgatgcgggacaatctgccttag

SEQ ID NO: 7792 - DNA, 528 bp, BradyrhizobiumColbertium
gtgcgcagcgacatcacccatcattccagcgagggcctgagcccgacgctcgaacgcaacatccaggcgctggtcaagcggcggcgccgggagcagcaggcggcaagaggccaggacaaggtcgcagacgccgtcacgaccttcaccggcagcatgacgttcgtctgcctccacctcgccgtgttcgggttctggatcatcgccaacctgcactggatccccggccttccggcttgggacgagagcttcgtcgtgctggcgatgatcgcctcggtggaggcgatcttcctctccaccttcgtgctgatctcgcagaaccgcatgaccgcggccgccgacaagcgcgccgacctcgacctccagatcagcctgctcgccgagcacgagctgaccaaggttgcccgcctgctcacgcagatcgccgagcggctcgacgtcaagccggagtctgagcgcgatatggaggaagcggcgcgggacattgcgccggagcgcgtgctcgacaagatcgaggagacgcgctcctga

SEQ ID NO: 7793 - DNA, 474 bp, BradyrhizobiumColbertium
atgcagatccgcaccggtgacacctatgatccccgcgtgatcgcgctgctcgatcatcacgtcacggcagcgcgggcgcagacagcgccgggcagcgcacatgcgctcgatctcgcgggcctgcgtgcacccgatatcgccttctggaccggctgggacggcgaagcgctggtcgccaccggcgcgttgaagacgctttcgtccgaccacggcgaggtgaaatcgatgcacacgctgcagaccacgcgccggcgcggcttcggcagccagatgctgcgccacatcatcacggaggctcgtgcgcgcgggatgacccgcctcagcctcgagaccggctcgtgggactacttcaagccggcgcacgcgctctatcaggcgcacggcttcgtcatctgcgggccattcgagggctacgtcgaggatccgaacagcctgttcctgaccctggacctgtcggcgccggcgcaccggtag

SEQ ID NO: 7794 - DNA, 582 bp, BradyrhizobiumColbertium
ttggaccagcagaaactcgaccgcgcgatcggccggcgcctgaagacgctgcggacgcaggccggcatgacgttgaacgagctcgcgggccgctccggcgtcagccgggccatgatcggccgggtggagcgggcgcagagcagtgcgacggcggcgctgcttggaaagctctgcgccgcgctcgacgtgtcgctgagcgatgtggtcgcgctggccgagaagccgcccgagcggctggtgcggctggccgaccagccgcactggcgcgatcccgaaagcggctatcgcagacggcatgcttccccgacggatgcggcgagcggcatcgagatcatcgtcgtcgacctgccggccggcgcgcgggtgccgtacagcccctggggccgcaacgccttcacccagcagctcctgatgctgcagggcgcgatcgccgtgcacatcgatgccaaggcggtgcggctgcgcgagggcgattgtctggatttcgacgtgatgcgtgccgtgatcttcgagaacgaaaccaggcaggacgcgcgctacatcatcatcacgcggcgcggcgccgcctatggaaagatgtga

SEQ ID NO: 7795 - DNA, 71 bp, BradyrhizobiumColbertium
gcgggcgtagttcaatggtagaacggcagcttcccaagctgcatacgagggttcgattcccttcgcccgct

SEQ ID NO: 7796 - DNA, 579 bp, BradyrhizobiumColbertium
atggtggagcgggcttacgcgatattcgacacggcgttggggcgctgcggcatcatctggagcagcaccggcgtgatcgcggtgcagctgccggaggcgcgggaaatcgacacccgccgccggattttccaggtccatcccgaggcgcgggagcagcggccgtccgagaacgccgagcttgcgatcgagggcatcacgggcctgctgcagggcagcgatcccgatttctccgatgtcagcctggacgccggcggcgtgccgggcttcaaccagcgcgtctacgagttcgtctgcaccattccgcgcggggagacgcgcacctatgccgaagtcgccaaggcgctgggtgcctccggagcggtgtattcggtggcgcaagccatcgcgaagaatcccttcatgctgatcgtgccctgtcaccgggtgctggaagccggcaattacaccgaccggctctcgccctatggcggcgtgatctcgaagcggcggctgctggcgctcgaaggcgcccatcccctcgccagcaagactctgttcgatgttctgctgcccgttgccccgccgcgcgcctcgacctag

SEQ ID NO: 7797 - DNA, 840 bp, BradyrhizobiumColbertium
atggacgccaccgcgctgctgacgacgccatcgatgactgtcttcgagtttcgctgcgatgcgggaccggacgacacgccctttgaggaatgccgcaccggccattccatcgcctatgtccgttccggcagcttcggctgccattgccgcgccggcttcttcgagctggtggcgggctcgatgctgatcggcgcaccgggccaggaatatacctgcacgcatgagcacgtgtccggtgacgtctgcctgtcgttcttcctgagcgaacacctcgtcgattcgctcggcggacagcgcaaggtctggcaggtcggcgcgacgccgccgctgcccgagctgatggtgttgggcgagctcgcccagacggcagcagatggcaacagcgacatcgggctcgacgaggtcggccagatcctcgccggccgttttgttgacgtcgcctcgggcaagacccgcaagccagccacgcccaccgcccgcgatcgccgccgcgccgtggaggccgcgctgtggatcgacgacaactcgcatgccgagcttgatctcgagcaggcagcaaaacaggccggcctcagcccgtttcatttcctccggctgttctcgagcgtgctcggcgtcaccccgcatcaatatctggtgcgctcgcggctgcggcacgcggcgcggttgctcaccgacggcgacatcgcggtcacagacatcgcctatgacgtcggcttcggcgatctctccaacttcgtccgtacgtttcatcgcgctgccggcgtgtccccgacgaaattccgccaggcctcgaaaggggagcgcaagattctccaagagcggcttgccctcaactga

SEQ ID NO: 7798 - DNA, 360 bp, BradyrhizobiumColbertium
atgtacgaccacatcggacttcgcgttgccgacctcgacgccgcgacgcgcttctacaccgcagtgctggcgccgctcggctatgtcctgtgctcgagcggcgacggttatgccggcttcgggccgaagggcgagccggcgctgtggctgcacctgaacaagggccgcaaggccgacggtgcccacatcgctttccgtgccaaaaaccaagacgaggtgaaggcgtttcacagcgaagggctgaagagcggcggccgcgacaacggcggggccgggccgcgcaaggactacagtccgacctattacgcggcgttcctgatcgatcctgacggcaacaatgtcgaggcggtttgtacgtaa

SEQ ID NO: 7799 - DNA, 126 bp, BradyrhizobiumColbertium
gtgatctgccaagcagccgccgagctgcttggcggcagcaatggcagcgacatgatggcgatgatcccgcaatatcgacgcggctcgccataccggcggccccatcgccgcgacaagtcccgctag

SEQ ID NO: 7800 - DNA, 1446 bp, BradyrhizobiumColbertium
atgtccgacatcgccgagatcccggtcgatgagcaagaacgcccgttgccgccacctccgccgccgatcaggagcgcgctgaccgacggcccgatcctgcgcacgctgctctcactcgcctggccgaacgtgatcggcctgtccgccggcatctgcgtggtgattgcggaaacctcctatgtcggccggctcggcgtcgaggcgctggcggcgatggcgctggtgtttccgaccatcattctgaccatgaccatgtcgggcggggccatgggcggtgcggtggcctcggccatcgcgcgcgcgctcggcgccgggaaccgcgagcgcgccggcacgctcgcggtccatgcgctgctgatcggcgtcagcttcggcctcgtcttcatgctcggcatgctgatcttcggacccaaggtgctcgaaatgcttggcggccgcggcgatgtgctgacgcatgcgatcgcctacacgcaggtgtttttcggcggcgccgttctgccctggctgctcaacaccatggccggcgtcttgcgcggcaccggcaacatgaagctgccgtccttcctcatcctcaattcggcggcttggcaaatcgtgctcggcggcacgctgggcctcgggctcggacctgtgccgcgcctcggcatgcacggcgtcgccgccggggcgctgatcgcctattccatgaacatctgcatcatgggctggtaccttttctctggccgggcgcggatcgtaatgaggctgcgcggcctgcgcattcaatgggcgatgttcttcgacatcctcaaggtcggcgccatcgcctgcttctcgccgctgcaatcggttctgacgatctcgatcttcacccacatgctggcgaagttcggcaccgcggtcctcgccggctacggcatcggggcgcggctcgaatttttgctgacctcgatcgcgttcgcgttcggcatcgcctgtgtgccgatggttggcatggcgattggcgcgggccgtatcgcgcgcgcccggcgcatcgcctggaccgccagtgctgccgcattcgtggcggtcggcgcgccggcctgcctcgttgcgatcttccccgacctctgggtcaacatgttcacggacagccaggcggtgcgcgcggcgagccatcaatatctgtccacggtcgggccgttctacgccttcttcggccttgccacgacgatgtatttctcctcgcaaggcgcagccaaggtgatcgggccggtgctggcgcagacggcgcggctggtctacatcgcgggcgtcggctggtggctgtcgacgcacgacgcgagcgcgcagagcttcttctggctcgccgcaagctcgatggtggtgctcggccttctgtcatgctccagcgtggtgctgacgcgctggggaccgcgcaagggcaagccggggatcagacctgcactgtcgggcgcagccgactag

SEQ ID NO: 7801 - DNA, 1053 bp, BradyrhizobiumColbertium
atgaccgccgcatcagatacagcgcaggaaacccaatggaagcgctggcgcgcgatcgccgatctctaccacgcttactttaccggtctgatcctcaccgtggtcacgcggcgcggcaccgcggatgcagctgaattcgtcttccgcgtgttccgccgtcagcagcaggaacgcttcctgccgggtctcgagaagctcggcctcgaccatctgccgccggcggtggccgctgcgcaatatcactatctctccaactggatcggcggcgtgcatgtcgagtacatgtatgagagcgacaccaaagcctggatccgctacccgccgccacgctggatctggaaaggcactgcgatctgcggcatccccggcgaggtgtcgcgggcgatgttgcgcggctggcacgccaacaacggcgtcgccctcggcgatctgcgtctgggcttcgtctgcaccaagcagagcgtcgacggacaggacgggctcgaaggttattatcatcaatacgaccatccgctcgaggtcgaccagcggctcgtcttcgcgcgtcacctcgaagcgccgctgttcgacgcgaacagtgccccggcgctgcctgtcgcgagctggccgaagccgcgtctggagaaggcctatcgcaactatgcaatggaatacgtccgcacggcggcgcccgtgctggtgcagctgtttggtccggaagatggcgggtatctcctgcacctcacggggaagctggtcggcatgcaatatttcgatgaggtcgcagcagctctgacgatgcgccgcggtggcgcacacgagttcgcatcgttcctgaatgcgctgttcgctgcgcaggatgacgtggccgagaccacacagtccgagggtacgttcgaaatccgccagcagagctggaagctgatggacgacgtcgccgactatcaccccgcctgcgcggaagtgcttgaaggattgttcgaggggctggctgcgggatgcgggcggcacatcggcgtgcacctgcggccttccgtcggcgggcgtccgccgctggtgtggacgatccagtaa

SEQ ID NO: 7802 - DNA, 414 bp, BradyrhizobiumColbertium
atgagcaatccatccgatctcgacatacgtatcatcgaagacgttgcggacgcgctgatctattcggatcgctccggcacgatcacgcgctggaatcgtgcttcgaccgtgctgtttggcttctccgccgccgaagcgctcggccagaatctcgatctgatcattcccgaacatcttcgagccgcgcactggaagggtttcgaggccgcgcttgcgagcggcaccacgaagcttgcaggcaagccgaccctgacccgcgcgctgcacaagagcgggcgcaagctctacatcgagatgaccttcgcgctggtgcgtgattccggcggcaacgtgctgggatcagcggcgatggcgcgggacgtcaccgaacgcaccgagcgcgagcgagcggccaaggctgcacaaaattcgtga

SEQ ID NO: 7803 - DNA, 1107 bp, BradyrhizobiumColbertium
ttgacgttcacggtcgccgccgacgccaatggtatcctgcccgaccgcatgatcgcggcgatggcggaagcggggctcattttgccggcgtacgacttcgtcgaaagccagatccagccggcgagcctcgatctgcgccttggtgatatcgcttatcgcgttcgcgccagcttcctgccgggccctggtgccacggttgccgaacgcatcgacgagttgaagctgcacgagttcagcctcgccgacggcgcagtgcttgagaccaactgcgtctacatcgtgccgctgctggagagcctggcgctgccgccggagatcgtcgcggccgccaacccaaagagctccaccggccggctcgacgtcttcactcgcgtgatcgccgacggcacccgccgtttcgacatgatcggcgccggctatcatggtccgctctatgccgagatcagccccaagacgtttccggtgttggtgcgcgagggctcgcgcctgagccaagtgcgcttccgcaccggtgacgccatcctcaacgccgacgaactcgatgcgctgcatgccgccgagcgtctcgtcgacgtcgacgatgccgatctctcgggcggcgtcgccgtctccgtcgatctctccggcgagaagggcggcggcttcgtcggctaccgcgccaagcgccataccggcgtcgtcgacgtcgatcgtcgctccggttatgcggtggaagaattctgggagccgatctcggcgcgtcccgacggcagcctgatcctcgaccctggcgagttctacattctggcctcgaaagaggcggtgcaggtgccgcccgattacgccgcggagatggtgccgttcgatcccttggtaggcgagttccgcgtgcactatgccggattcttcgatcccggcttcggctatgccggcgcaggcggacagggcgcacgcgccgtgctggaggttcgctcgcgcgaagttccgttcatcctcgagcacggccagatcgtcggccgcctcgtctatgagaagatgctggcccgtccggacgccatgtacggccagcgcatcggctcgaactaccaggctcagggccttaaactatcgaagcattttcgggcgtag

SEQ ID NO: 7804 - DNA, 1188 bp, BradyrhizobiumColbertium
atgtcaaagtcgcctgctgcctaccgtcccgaaacccgcctggtccattccgggaccctgcgctcgcaatatggcgagacgtccgaggcgctgttcctgacacaaggctacgtctacaacagcgctgaggagtgcgaggcgcggttcaagggcgaggatcccggcttcatctattcgcgctactccaaccccaccgtcgcgatgttcgagcgccgcatgatcgagctcgagggcgccgaggctgcccgctcggcggcgaccggcatggccgcggtgacgaccgcgatcctggcgccgctgagggcgggcgatcacgtggtggcctcgcgcgcgctgttcggctcgtgcctctacgtcatccaggacctgttgccgcgctacgggatcgagaccacgctggtcgatgggctcgacctcgaccaatggcagcgtgcacttcggccgaacaccaagacgttcttccttgagagcccgaccaatccgacgctcgacgtgctcgacattccctccatcgccgagatcgcacacggaggcggcgcacggctcgtggtcgacaacgtgttcgcgaccccgatctggcagagtccgctggcgctgggcgccgacgtcgtcgtctattccgcgaccaagcatatcgacggccagggccgctgcctcggcggcatcatcctgtcctcggaggccttcatcgccgagcacatccacaacttcatgcgccagaccggcccgtcgatctcgccgttcaacgcctgggtcctgctcaagggtctcgagacgctcggcgtgcgcgtgcgcgcgcagaccgataccgctgcgcgcatcgcggaggtgctggcgagccatccgaagatttcgcggctcgtctatcccggccgctccgatcatccgcaggcagcactggtcaagaagcaaatgcgcggcggctcgacgctggtcggcttcgaggtcaagggcggcaaggcggctgccttccgcgtcctcaatgaactgaggcttgcgaagatctccaacaatctcggcgacgccaagagcctcgtcacgcatccggcgacgacgacacaccaacgcctgaagccggaagaccgcgccgctctcggcatcagcgaaggcttcatccgcttctcggccgggctggagcatcccgacgatctgatcgaggatctgacggcggcgctggcgaaggcgtga

SEQ ID NO: 7805 - DNA, 981 bp, BradyrhizobiumColbertium
atgagttctctccgccctttttgcctgacgacatggctggccgcgcccgcagccgcagcgctgttgctgctggcgccggccgcatacgctcagacgccagccgcacagccgacaccggcgcagccggctgatccgacttccgcttcgcctgcccagaccaccgttgccgcgaggtcgtccgagcagcgcggcgtcacctcgcgtgccatcgacaaggtgaaggaggtcgcaaagtcggccgccgacatcttcaaccgtgtgccatgcctgccgccgaagggcggttcgaagacgatgggctcgctgccgcacgttgcgggcaagctcgccgccggccagtccgtcgttatcgtcgcgttcggctcgtcgtcgacccaagggttcggcgcgagctcgccggagttcaactatcccaatcgtctcgccgcgcagctgcgccggcactacccgaccgccgacatcacggtcatcaatgccggcgtcggcggcgaggatgcccccgagatgatgaagcgcctccagacgcaggtgatcgacgtgcatccggatctcgtgatctggcaggtcggcaccaacgccgtgctgcgcaatctcgatcccggcgacaccgtgaagctggtcgaggagggcatcagccgcatccaggccgccggcggcaccgacatcgtgctggtcgatccgcaatattcgccggccgtcaatcagcgcgccgagagcgccggcaagatggtgaagctgctcggcaaggccgccgagctccgtcacgtgggcatcttcccgcgcttcgaggtgatgcgcgattggcacgagaagcaggcgattccggtcgagggcttcgtcatcgccgacggcctgcacatgaacgattggggctatgcctgcttcgcccagctattgggtgacgacatcatccggtccgtcgaccagatcaagctcggtgtgaacgtgcccgcggacgtgaggacataccggccgatgtga

SEQ ID NO: 7806 - DNA, 780 bp, BradyrhizobiumColbertium
atgaaggcgaaggttctcctgagcctgatcctgctttgcggtagcctcaccgcgccgacggcgcgagcgagcgatgctgcgcccacggcttccgttgcgcccgcttcgtgtgatttgccggcctatctgctgaccagcgaaagcccgctgcccaaggtcgccgccgccgtcaaggctggcaagccgctcgagatcctcgtcataggcagccgctcgacgaccattccatcttcggagaacagctcgtaccccgcgcgcatggaggcgatcctcaaggagaagctgccgccgtcggaagtggtgcatgtctccgtagaaatacagagcaagaaaacggcagaggagaccgccgccaccttcgttaagctgatggaagcaaaaacgcctaccttggtgatctggcagaccgggaccgtggatgctattcgagccatcgatcccgacgactttcgcagcgccgtcaccgaaggcgttgttgcattgcaaagtgcggggactgacgtcgtcttgatgaacttgcagtacagtccacggaccgaaaccatgatttcggcccagccttttctcgataatatgcgggtcgtggcacaggagcacgacatcccgctgttcgatcgtttcgcaatcatgcggcagtggaatgatcagggtcagttcgacctgttcagcccgtcccgcgggcccgaactggcgaaacaggtccatgattgccttggccgggcgttggcacaattcgtgatcgacgcagctcaccgcgagccggcccagcagcaaaattga

SEQ ID NO: 7807 - DNA, 1257 bp, BradyrhizobiumColbertium
atgaccattgccgaccaagtgacgggaccgacgatcgcgggcgccgctggccccaagcccgcggcggccaagccacgcaccgccgtacccgccattacgctgccggccatcggcgagcgcgagctccggctcgatctgtttcgcggactcgccttgtggctgatcttcgtcgaccacctgccgcccagtctgctgacctggttcacgatccgcaattacggattcagcgacgctaccgagatcttcatcttcatttccggctataccgccgccttcgtctacggccgggcgatgctggagagcggcgtcgtcatcgccaccgcgcgtatcctgcgccgcgtctggcagatctacgtcgcccacgtcttcctgttcacgatcttcctcgccgaaatctcctatgtggcgacccgcttcgagaacccgctctataccgaagagatgggcatcatggacttcctcaagcagcccgacgtcaccatcgtgcaggcgctgcttttgcgtttccgtcccgtcaacatggacgtgctgccgctctacatcgtactgatgctggcgctgccctttatcctctggtcgatgaagtggcggcccgacgtcacgctcggcctctcggtcgtgctctacgcagtgacctgggagttcgatctttatctgtcggcctatccgaacggattctgggccttcaatccctttgcctggcaattgctgttcgtcttcggtgcatggtgtgcgctcggaggtgcgcgccgcatgtcgcgcattctgtcgtcacgcgtcacgatgtggatggcgatcgcctatctcgtcgcgtcgttctacgtgacgttgacctggtatgtgccgcagctctcccagttcatgccgaagctgatcgagcaatggatgtatccgatcaacaagacagatctcgacgttttgcgcttcacgcatttcctggcgctggccgcgctcaccgtgcgtttcctgccgcgggattggccgggcctgaagtcgccttggctgcggccgctgatcctgtgcggtcagcattcgctcgagatcttctgcctcggcgtcttcctggccttcgccggccacttcatcctggcggaagtctccggtggcgcagtcatgcatgctttgattagtctctgcggtgtcctgatcatgtggggcgtggcgtgggtgatttcgtggtataagcgcgtggctgacaagagcggtgcgaaaagcaaaaacgccgtcggcaacgccgatctggcgggagggggctga

SEQ ID NO: 7808 - DNA, 393 bp, BradyrhizobiumColbertium
atgtaccgcgccgtgacccgccagatcgaagtgaccgtcgagccgaactttgttccggagcagtcgtcggcggaccgctcacgctatttctggtcctaccccatcgtgatcaccaattcgggcgaggagaaggtgcagctcaagacgcggcactggatcatcaccgatgcctccggccgccaacaggaggtaaagggggagggcgtggtcggcgagcaaccgatcctggcccccggcgagcgcttcgaatacacctccggcgtgccgctctcgaccgcctccggtttcatgaccggtcggtaccagatggtcagcgaaaccggcgagcgcttcgaaatcgacgtaccgacattttcgctggacagccccgacaacaagcgggtgttgaactga

SEQ ID NO: 7809 - DNA, 987 bp, BradyrhizobiumColbertium
atgaaaaccgggccggaaggtccggttcgcgcaccatcggccgttccgatcgacgacgcggtgctgccttacgaggtcgacgcgctcgacgtgcgcgggcggctggtacggctcggcccggcgctcgacgacattctcaccaagcacgattatccggcgccggtcggcaagctgctcggcgaggccatcatgctgacgacgctgctcggcagcgcgcttaaattcgagggccgcttcatcctgcaggcccagaccgatggtccggtctcgttcctggtcgtcgattacgtggcgccggatcgcctgcgcgcctatgcgcgcttcgatgccgcgcgtctcggcgaagccaaggattccggcacgctgcttggccgcggccatctcgccatgaccatcgaccagggccccgacatgagccgctaccagggactggtcgcgctcgacggcggcagcctggaagacgccgcgcatgaatatttcctgcgctccgagcagatcccgacgcgcgtccgcctcgcagtcggcgaggagtggcgctcgagcgacggcggcaagcatcgctggcgcgccggcggcatgttgatgcagtttctgcccaaggcccccgagcgtgcccggcaggccgatctgcatcccggcgatgcccctgacggtaccgaggtgcacagcgtcgccgaagacgacgcctgggtcgaggcgcgctcgctgatcgaaaccgtcgaagacatcgagttgatcgatcccgagctctccggcgagcggttgctctaccgtctcttccacgagcgcggcgtgcgcgtgttcaatccgcaggtccttcaggcccggtgctcctgctcgcgcgatgcggttgcctcgatgctgaagagcttctcgcccgacgaccgcgccgcgatggtgaaggacgacagggtcgtcgtcacctgcgagttctgctcgtcggtctaccagttcacgccgcacgaggcgggcgtcgaggacgcttaa

SEQ ID NO: 7810 - DNA, 936 bp, BradyrhizobiumColbertium
atgagcaagacgcccgacaaagctcctaagcacttcttggacatcaacgagctgccgttgtcggagctcaagcgcatgctcgccgcatcctccgccatgaaggccaagcagaaggcgcatcagccggtcaggccgctcgaaggcaagacgctggcgatgatcttcgagcgtccctcgacccgcacgcgcgtctcgttcgacgtcggcatgcgccagctcggcggcgaagcgatcatgctcaccggcgccgagatgcagctcggccgcggcgagaccatcgccgacaccgcgcgcgtgctgtcgcgctatgtcgatgcgatcatgatccgcatcctcaatcacgatgcgctgctggagcttgcggccaacgccaccgtgcccgtcatcaacggcctgacgcggcgctcgcatccttgccaggtgatggccgacctcatgacctatgaggagcatcgcggcccgatcgagggcaggacggtggcctggaccggtgacgacaacaacgtgctggcgtcctgggcgcatgccgcagaacgcttcaagttccagctcaacgtcgcaacaccttccgagctcgcaccgaagaaggcgatgcgggactggatcaaggcgaccggcgcgccgatcgtgctcggcaccgatccggaagccgccgtgcgcggcgccgactgcgtcgtcaccgacacctgggtgtcgatgggcgacaaggaaggcgagcaccgccacaacgtgctgaagccgtaccaggtcaacgccaagctgatgtcgctggccaagccggacgcgctgttcatgcactgcctgcctgcccatcgcggcgaggaggtcaccgatgaagtgatcgacggcccgcaatcggtcgtgttcgacgaggccgaaaaccgcctgcatgcgcagaagggcattctggcctggtgctttgacgcggtgaaataa

SEQ ID NO: 7811 - DNA, 1209 bp, BradyrhizobiumColbertium
atgactaacagcgccgcgccgcatttgctccccgttttcgccagggccgacctcggtttcgagcgcggtgaaggctgctggctgatcgcgaccaacggagatcgctatctcgatttcacctcgggcgtggcggtgaatgcgctcggccatgttcatccggcgctggtcaaggcgttgcaggagcaggcgacgaagctctggcacatgtcgaacctgttccagagcccggacggcgagaagctcgcaagccggctctgcaacgagagctttgcggacttcgtgttcttctgcaattccggcgccgaggcgctggaaggcgtgatcaagctggtgcgccaccatcacttctccaaggggcatcctgatcgttatcgcatgatcaccttcgagggcgccttccatggccgcacgctggcgacgctcgccgccaccggatctgcaaaatatctggagggcttcggtccgccgatggaaggcttcgaccaggtgccgcatggcgacctggaagccgtgaagaaggcgatcggcccacacaccgcgggcatcctgatcgagccgatccagggcgagggtggcgttcgttcgtcgtctcccgccttcctcaaggcgctgcgcgagctctgcaacgagcacggcctgctgctcgccttcgacgaagtgcagaccggcatgggccgcaccggcgagctcttcgcctacaagcgcaccggtgtcgtgcccgacgtaatgtcgctggcgaaggcgctgggcggcggcttcccgatcggcgcggtgctcgcgaccgcggacgcggccgccggcatggggcccggctcgcacggttcgaccttcggcggcaatccgctcgcgatcgccgcggccaatgccgtgctcgatgtcatgctcaagcccggcttcttcgaccacgtgcagaagatgtcgctgctgctcaagcagaagctcgcctccgtgatcgaccggcaccccgatgtcgtcagcgaggtacgcggcgagggccttttggtcggcatcaaggccgtggtgccttcgggcgatctcgtcgcggcgctgcgtgctgaaaaattgctcaccgtcggggccggcgacaacgtagtgcgcttcctgcctccgctgatcgtcaccgaggccgagatcgaggacagtgtcgggcggctcgaacgcgcctgcgctgcgatctcgtccagccagaccaagcgggcggcaagctga

SEQ ID NO: 7812 - DNA, 513 bp, BradyrhizobiumColbertium
atgacggttttgacctggtccgatgatcgcgtcgagcagctgaagaagctctgggaggccggactttcggccagccagatcgcggcggagctcggcaatgtgacccgcaatgccgtgatcggcaaagtgcaccggctcggcctgtccggccgcgccaagagcccttcatcggcagcgccccggccgcgcaaggcacggcccgcgcagcacatgatgcgagtcactcgccccgtcgcgcgcggcaacaccgcgctggcgcaggccttcgaggtcgaggttgaggctgaacctgttacctacgacaacgtggtgccgatgagccaacggctgtcgctactggaattgaacgaggcgacctgtcactggccggtcggcgatccctcgagcccggatttcttcttctgcggcggcaaggcgctttccggcctgccctactgcgcccagcattcgcgcgtggcgtatcagcccgcagcagaccgccggcgcgcgccggcgaagccgggcacgcgctga

SEQ ID NO: 7813 - DNA, 708 bp, BradyrhizobiumColbertium
atgggcgcacgcattatggtggttgaggacgaggaagctctcaccgagcttctccgctacaacctcgaaggcgacggctatgacgtcgagacggtgatgcgcggcgacgatgccgatacccgcctcaaggagcacattcccgatctgatcgtgctcgactggatgctgcctgggctatcgggcatcgagctgtgccggcggctgcgcacgcggcccgagaccaagcagctcccgatcatcatgctcaccgcgcgcggcgaggagagcgagcgggtgcgggggcttgcgaccggcgccgacgactacatcgtcaagccgttctcggtgccggagctgctcgcgcgcgtgaaggggcttctgcggcgcgcgagccccgagcggctcgcgacggtgctcgcctatggcgacatcgagctcgaccgcgacaagcgccgcgtggcgcgctcgggccggccgatcgatctcggcccgacagaatatcgcctgcttgagttcttcctggagcatcccggccgcgtgttctcgcgcgaacagctgctcgacagcgtctggggccgcgacatctacatcgacgagcgcaccgtcgacgtccatatcgggcgcctgcgcaagctgctcaatctgggtcgcgagcaggacccgatccgcacggtccgcggcgccggctacgcgctggatgatcggttcgccaaggcggagcagacgtaa

SEQ ID NO: 7814 - DNA, 717 bp, BradyrhizobiumColbertium
atgggttctgaacataccgcaaaggccttcgacagcgacctccaggagctcacgcgcctggttgccgaaatgggcggcatcgccgagcgcatgatcgtcgattccgtcgacgcgctgatccgccgcgacgtcgcgctcggccagcgcgtcgtcgccaccgacaccgagctcgatgcgctgcagaagcgcatcgaggagcgcgcggtgctcaccatcgcgcgccgccagccgatggcggttgacctgcgcgagatcgtcggcgccatgcgcgtcgcgaccgatctcgagcgcatcggcgatctcgccaagaacatgggcaagcgcgtcgcggcgctggagacggatttccatccgctgaagctgttccgcggcctggaacacatgaccgacctggtgcagcagcaggtcaagtcggtgctggacgcctacgccgcgcacgatctgccggcggcaatggcggtgtggaagggcgacgaggaggtcgacgcgatctgcacctcgctgttccgcgagctcctcacctatatgatggaggatccgcgcaacatctcgttctgcatccatctgatgttctgcgccaagaacatcgagcggatcggcgaccacgccaccaacatcgccgagaccgtgttctacatgatcgaggggcaggcgatcaccgacaagcggccgaagggcgacatgaccaatttcgccaccacgataccgaatacctga

SEQ ID NO: 7815 - DNA, 822 bp, BradyrhizobiumColbertium
atgagtgaaatgtctgtttccgtcagcgcgccgaccgtccatcccggctcgcagcccctgcccgaggcgcccgccaaggttacggcgcgcaacctcaacttctactacggtgagcaccatgcattgaagaacatcaatctggcgctcggcaccaaccgcgtcacggccttcatcggcccgtccggctgcggcaagtcgaccctgctgcgcatcttcaaccggatgtacgatctctatccgggccagcgcgccaccggtcagctgctgctcgaccacaccaacattctcgaccccaagcttgatctcaatctgctgcgcgcccgggtcggcatggtgttccagaagccgaccccgttcccgatgacgatctacgagaacatcgcgttcggcattcgtctgtacgagaagatctcgaagtccgagatggacgaccgcgtcgagaaggcgttgcgtggcggcgcgctgtggaacgaggtcaaggacaagctcaatgcttccggcctgtcgctttccggcggccagcagcagcgcctctgcatcgctcgcaccgtcgcggtccggcccgaggtgatcctgttcgacgagccctgctcggcgctcgatccgatctcgacggcgaaggttgaggaactgatccaggaattgtccgagaactacacgatcgcgatcgtcacccacaacatgcagcaagcggcgcgcgtctcggacaagaccgcgttcatgtatctcggcgagctgatcgagttcgacgataccagcaagatcttcacgtcgccgagcgaccggcgcacgcaggattacatcaccggccggttcggctga

SEQ ID NO: 7816 - DNA, 846 bp, BradyrhizobiumColbertium
atgaacccgatctatgcacgtcgccgccgctgggacatcgtcatccgcgggctctgcatcgctgctgccgcgtttggcgtcacctggctcgcgctgatcctgatcacgctgttctacaacggcctggccgggctcaacttccaggtcttcaccgctgacaccccgccgcccggatcgaccgagggcggcctgcgcaacgctatcgtcggctcgctgatcatgaccgcgatcggcgtcggcatcggcgcgccgctcggcctattcgccggcacctatctcgccgagtacggccgcaacgacaagctgacctcggtgatccgcttcatcaacgacattttgttgtcggcgccctcgatcatcattggtctgttcatctacggcgcggtggtggtgccgatgcgaggcttctcggcgatcgcgggcgcgctggcgctcgccgtcatcgtgatcccggtcgtggtgcgcaccacggaagacatgctgctgctggttcccaacccgctgcgtgaggccgccagcgcactgggcctgccgcgctcgctggtgatcaagcggatcgcctatcgcgccgcgcgttccggcctcatcaccggcgtgctgctcgccaccgcccgcgttgccggcgagacggcgccgctgctgttcaccgcgctctcgaaccagttcttcagcctgggcctggacaagaccatggccaacctgccggtgaccatcaacaatttcgtgcagagcccctacgcctactggaagcagctcgcctggagcggcgcgctgctgatcaccctgaccgtgcttgccctgaacattggcgcgcgcatcatcggcgccgagaggactgcaaaatga

SEQ ID NO: 7817 - DNA, 990 bp, BradyrhizobiumColbertium
atggccgttcagagcgatgtaatcgacgatgccggaccgtatgatcgcgccaaggccttgggcgcgttcaagctcggcgacgtcactttctattggatcacgcggctttccgcgatctcggtgctgctgatcctcggcggcatcatcctttcgctggtcgtcggcgcctttcccgcgatgaaggagtacggcctctccttcctgtggacgcagcgctgggcaccgtccgccgatcctccggtgctgggcgcgctcgggccgatctacggaacgctcatcacctccttcatcgccatgctgatcgccattccggtcggcctcggcattgcgatcttcctcaccgagctctgtccgcaatggctgcgccgcccgatcggcatggcggtcgagctgctcgccggcattccctcgatcatctacggcatgtggggcttcttcgtgctcgggccgttcctggccaacaccttccagcccttcatgatcaaggtcttcgacggcgtccctgtgctgggcgcgatctttgccgggcccccctcctatctcagcctgttcaacgccgcgctgatcctcgcgatcatggtgctgcccttcatcacctcgatctcggtcgacgtgttcaagacggtgccgccggtcttgaaggaagccgcctatggcgtcggctgcaccacctgggaagtcgtccgcagcgtggtgatcccctacacccgcgtcggcatcattggcggcgtcatgctggcgctgggccgcgcgctcggcgaaaccatggcggtgaccttcatcataggcaattcgttccgcatctcatcgtcgatcttcgccccgggcaccacgatctcggcggcgatcgcgtcggagttcgccgagagcgacggcctgcaccagtccggcctgatccttctcggtctgctcctgttcgtgttgacgttcttcgtgctcgcagccgcgcggctgatgctgatgcgcctggaaaccaaggccgggaagtaa

SEQ ID NO: 7818 - DNA, 1014 bp, BradyrhizobiumColbertium
atgaatttcctcaaaactatggtcgctgctggcttggtagccgcatcgacgacggccgccttcgcggccgacatcaccggcgccggcgcgacgttcccgttcccgctctattccaagtgggctgacgcctacaaaaaggagaccggcaacggtctgaactaccagtcgatcggttcgggcggcggcatcaagcagatccaggccaagaccgtgaccttcggcgcgagcgatatgcctctcaagcccgagcagcttgaaaaggacggaatgatccaatggccgcaggcgatgggtgccctggtgccggtcgtcaatctcgaagggatcaagtcgggcgagctggtgttttccggcgagctgctgggcgacatctatctgggcaaggtcaagacttggaatgacccggcgatcgccaagcttaatcccaaggtgaagctcccctcggacgccatcaccgtcgtgcgtcggtcggacggttccggcaccacgttcatctggaccgatttcctttccaagaccaatgccgagtggaagacgaaggtcggtgccggtaccgcggtcgaatggccgacgggcgttggcgccaaaggcaatgaaggcgtcgcgggcaatgtcagccagaccaagaactcgatcggctatgtcgagtatgcctatgccaagcaaaacaagctgacctacggtgccctgatcaacaagtccggaaagaccgtgcagccgaccgttgcggccttccaggctgcagccgccaacgccgactgggccggctccaagaactactatgtgatcctgaccgaccagccgggtgaagcgtcttggccgattaccggcgcgaccttcatcctgatgcacaaggatgcgaccgacaaggcggcctcccaggaagccctcaagttcttcaagtgggcgttcgagaagggcgacaagatggccgaggagctcgactacatcccgatgcccgacactgtcgtgaagcagatcgagaagacgtgggctgccgagatcaagagctga

SEQ ID NO: 7819 - DNA, 1299 bp, BradyrhizobiumColbertium
atggcgatcgacgccccatcttctcccaacgttcagccatggtcggaccggctgcggcactcgaccatcatcctcatcgccgcggcgctggcgctgtcagtcgtggtctcgctcggcgaattgtcggcactgcacgccgcgatcgtgttcctctgcatcgcggcggctgccctgatcccctggcggctgcacgatcccgccgcttcccgggacgacgtcaggcgcatcaacccggtcgagagcgcggcggtggccgcggtggtcgccggcatgccggatccggctgtgctgctcgaccgcgccggtcgcgtcatccacctcaatgccgccgccgctcagctcgccccggcgctgcgtcggaacgagctcgcccagttcgcgctgcgctcgccggagatcatcacggcactgcgcgaggcgatcgcgaccaccgagccgcggcgcgcgacctatctcgaccatgttccggtcgatcgctggatggagctcatgatcacgccggtgccggttccgaccagcttcggcggtaccgacaaatgcatgctgatgaccttccacgaccagacgccgctgcgccgggtggaggagatgcgcgccgacttcgtcgccaatgcgagccacgagctgcgtacgccgctggccgcattgtcgggcttcatcgacacgctgcagggccaggccaaggacgaccccaaggcgcgcgagcgcttcctcggcatcatgcacaaccaggccacccgcatggcgcgcctgatcgacgatttgctgtcgctgtcgcgggtcgagctgtcggcccatgtccggcccgacaccctggtcgacctcgtgccgatcatccgccaggtcgccgacgggctcgagccgctggcccgcgagcgccaggtcgtggtggaaatccagctgccggatccgccggtgatgatcgccggcgaccgcgaggagctgctccgcctgtttgagaacctgatcgagaacgcgctcaaatacggcgcctccggcgggcgcgtcatcgtgtcgctgacatcaggcgccgcctctgatggaactcaggaaatccggatcatggtacgcgatttcggccccggtatcgcgcccgagcacctgccgcggctgaccgagcgcttctatcgggtggacgtcggcgacagccgctcgcaaggcggtaccgggctcggattatcgctggtgaaacatattcttaaccgccatcgcggccggcttttgatcgaaagcgtgcccaagcagggtgcaactttcacggcgtgttttccccaggcgaagatttcggccgcggcctaa

SEQ ID NO: 7820 - DNA, 987 bp, BradyrhizobiumColbertium
gtgatcagcatcgcggtcatcgggatcgcttgctatgtgctctaccacatgctgcggggcatcgatttcaacgaggtcctcgaagcgatcaagagcaccgagccgagccagattgcgatggcggcgctgttcgtcgctgcgggctatttcaccctgaccttctacgacctgttcgccacgcgcgcgatcggccacgcccaggtgccctaccggatcaccgcgctcgcggccttcaccagctactcgatcggtcacaatgtcggcgcatccgtcttcaccggcggcgcggtgcgctatcgcatctattcggcctatggactgaacgcgatcgacgtcgccaagatctgcttcctcgccggcctcaccttctggctcggcaacgccgccgtgctcgggctcggcatcgcctaccatccggaggctgcagcctcgatcgaccagcttccgccctggctgaatcggacgctggcgctgatgatcatcgcggcgctggtctgctacgtggtctgggtctggacccagccgcgggtggtcggccgcggcccctggaccgtggtgctgccgggcggccccctgacgctgctccagatcgcaatcggcatcatcgatctcggcttttgtgcgctcgccatgtacgtgctggtcccggacgagcccaatctcggtttcgtcgtggtcgcgatgatcttcgtctcggcgaccctgctcggctttgccagccattcgccgggaggccttggcgtgttcgacgccgccatgctggtcggcctctggcagatggaccgggaggagctgctgggcggaatgctgctgttccgcctcctctattatgtgtcgcccttcgtcatatctgtaatcttgctgacgtttcgcgaagttataatcggcacacgttcgaagcgcttgcagcaggcggcactcaagctcgaccccggcccggcgcgtgaagccgcctatgtgagagagcgtagcgacagcggtgcctga

SEQ ID NO: 7821 - DNA, 261 bp, BradyrhizobiumColbertium
atgcaggacttgcttctcgcgcagaaacgacgtcgccctgcgtatggcttccagcatctagacctcgaacaacgcttcagcggccagggtggccggcggacgggcggacgactcacaggcactcaacgaaccttcgccgccggcaccggcatcgcgcatgccccctgcccctccactagcgcgttttcgggcggagtggaattcgccagttcgaacaaaaacacgtgccttcagtattttaggcagggtcatggctcctga

SEQ ID NO: 7822 - DNA, 303 bp, BradyrhizobiumColbertium
atgccctatctcgtctctttccacctgggctggctgatcggctcgttgctgctgggcttttgcatgggctggatctcggtggtccagcgcggcaacggcacctcgaaggtgacggcgcgctggctcgccgcgcttgctgtggctctgatcgcggcctcggtcgcccatgttgtccccggccgcttcggctactggctcgaccttgggctgatcatgttcgcctgctatctcgtcggttgcaccattggtgcatggctgcgcgaccgcgtcgtctcgcgcaccgcaccgccggcggctccgtga

SEQ ID NO: 7823 - DNA, 1335 bp, BradyrhizobiumColbertium
atgtggggatttgcggcctggaataacaccttaccggttgaggccgacctgtctgcccgaagctcggcggtgctgaagaataccgtcctggacaaaacccgcatcgcggtcgatggccgcgacgtcagcctggccgcggacgccttctccgaggaagggcgccgcgacgccgtgatggcggtcgagaccgtgcccggcgtgcgactggtcgacgaccggacccgacttgttcccgaggccaagcctttcgtctggaatgccgagcgtgacgtggtgcgggtgacgctgtcgggctctgcgtccttgccgtcgatgaaggcccggctgaccgaggcggcccgcaaggaggtcggcggcgccgaggtggccgaccaaatgggtctggcacgcggcgcgccgccgcggttcgaggcggccgcgatgctcctgctggaccagatcggcaagctcaaggacggcaagatcacgataacggacaccaaggtcaatctgtcgggcatggcgcgcgagctcggcggccgcgaggcgatcgcagcagcgctgaagaacctgcccgagggcttttcaatcgccgccaacgacatcaaggcgcccccttatatcttccaggcctacaaggacccggtggcggcgaaggtgacgctgaccggctacgttcccgacaacaatgtccatgcggcaatcgccaccagcgcctcgcgaaagttcttcaccgaaaaggtcgtggacaatctcaaggccagcgtcggcgcgcccggctccttcagcatggcggtcgtcgcagcgcttggcgcgctgtcgcggctatcgaccggcacgctcgtcgtctccgatcgcgaggtgaagctgtccggtgatgcgctctacgagggcgccgccaacgacattcgcgctggcctcggcagggacttcccgaaaacctggcaatacaagccggagatcacggtgaagcccgcggcaggccccgtcgacggcaccgtgtgccagcaattgttcacagagcttctgaccaagggcaaaatccgcttcgcaaacaggcgcgcggatatcgatcccgactccgcggccatccttgatcgtctcatcgagaccgcactgcgctgccccaccaccaatatcgtggtcgtcgggcataccgacgcggacggtgaggattccttcaaccaggctctctcggaaaagcgcgcacaggcggtgatcgactatcttgtcaaggccggtttgccggccagccggttcacggcggtcggccatggcagcacgcagcccgttgccagcaacgacaccgatgaaggcaaggcgcggaaccgccgcatcgaatttctggtgaggtga

SEQ ID NO: 7824 - DNA, 219 bp, BradyrhizobiumColbertium
ttgtttcatgaccggctgagggactctggcattccgccttcaacttacggaagaacccttgaagaaaaagttatttggattgtccaggcagggccttcggaacggcaccatttccggtttgacagcctgccaagggtttgttttgtctccgtttccagagttcgggtcgtcgaatgcaaaagcttttctcgtgggccagcaaatggtggccggggctga

SEQ ID NO: 7825 - DNA, 1059 bp, BradyrhizobiumColbertium
atgaaacaactgcgtaacaacgtcatccgcgccgggctgggagcactttatttcagcggggcgcaccacctgttgcgcccgctcttgtcgggcgtcggcgccattttcatgctgcaccgggtgcggccggcccgtgaggccgcgtttcagccgaaccggcatctcgaagtcacccccgaattccttcgcgcgacactgtgccatttgcgctcgcgcgacatcgacatcgtcaccatggacgagctgcacgagcgattggcgcagggacggttcgaccgccgcttcgccgcctttaccctcgacgacggctatcgcgacaatctggaccatgcactgccggtgctgcgcgaatttgacgcgcctctgaccgtctatgtcgcgagcgactttgccgacggcaccggacgcctgtggtgggcggcgctggaggccgtcatcgcgaaggccgagcagatcgacattacaatcggcaattccgcattgcggctcgatgcgacgacgcctgcggccaagcaggcaacgttcgaccgcctgcacgactggctgcgcgcgctgccgggcgagcacgacctcaagcgcgagatcgaggcactgtgcacgacgtacgacgtcgacatgggagcgctgtgccgcagcctctgcctgtcctggaccgagttgaagacattcgccgccgatccgctggtcacgatcggcgcgcacagcgtcagtcattgcaacctcgccaagcaggcggaagacgttgccgcgcaggagatgacggtgagccgcgagcggatcgagcaggcgctggagcgccccgtgctgcatcttgcctacccctatggcgaccgcgaggccgcggggatgcgcgaattcacccttgctgcagccgccggcttcaagaccgcggtgacgacgcggcccggcatgctgttcgccgacaatgccgcccacatgacggcgctgccgcgcgtctcgctcaacggcaactaccaggacgcgcgcatcctgccggtgctgacctcgggcgctgcgaccgcgatgtggaacggcctccgccggatcgcggcggcatag

SEQ ID NO: 7826 - DNA, 864 bp, BradyrhizobiumColbertium
ttgactcccctccccgccccgctcacaacaagcgccaatcaagggaggcaccatgttcaacgatctgttctcgctcaaaggccgcatcgcgctggtgaccggcggctcgcgcggcattggcaagatgattgcggcgggttcctcagcgccggcgcggcgaaggtctacatcaccgcgcgcaaggcgggaccctgcgaagccaccgcgaaagagctcagcgcccaatacgacggcgagtgcatcgcgctgccgatcgacatctccacggtcgccggctgcgagctgctggcgaatgagtacggcaagcgcgaggccaggctggacatcctggtcaacaatgccggcgcggcctggggcgcggagttcgacgaattccccgagagcggctgggacaaggtgatgaacctcaacgtcaaggcgccgttcttcctgaccaaggcgctggcgccgacgctgcgcgcgtcgggaagcgcggagcggcccgcgaaggtgatcaacatcgcctcgatcgacggcatcttcgtcaatccgggcgagacctattcctatgccgcgagcaaggccgggctgatccatctgacgcgccgcatggcggtgaagctcgtcccggaccacatcgtggtcaccgcgatcgcgccgggcccgttcaagtccgacatgaaccgcgccgcgcgcgaccacgccgacgaggtcgcaacgcgcgtacccgtcggccgcatcggcaccgacgaggacatggcgggcgccgcgatctatctcgcctcgcgcgcgggcgattacgtcgtcggggcgaccatcgcggtcgacggcggcatcgtctatgcgaacccggggatcaagggcagcgggtgggacagcgattga

SEQ ID NO: 7827 - DNA, 1452 bp, BradyrhizobiumColbertium
atgaacgtcaacatcatgaacgtcgactactcgaccaagattcccaacaacgtcaatcttgccgaagaccgccaggtgctcaaggcgctggaaggctggcatcccggctacatggactggtggagcgacatggggccggaaggtttccaggaatcgctggtctatttgcgcacggcctattcggtcgatccgcgcggctgggccaagttcgactatgtccgcatgcccgaatatcgctggggcatcctgctcgcgccgcaggaggaaaaccgcgtcgtgccgttcggcgagcactacggcgagccggcctggcaggaggttccgggcgagcatcgcgccatgctgcgccgcctgatcgtgatccagggcgacaccgagccggcctcggtcgagcagcagcgccatctcggcaagaccgcgccctcgctctacgacatgcgcaacctgttccaggtcaacgtcgaggaaggccgccacctctgggcgatggtctatctgctgcagaaatatttcggccgcgacggccgcgaggaagccgatgatctgctgcgccgccgctccggcgatgccgatgcgccgcgcatgctgggcgccttcaacgaggcgacgccggactggctgtcgttcttcatgttcacctacttcaccgatcgcgacggcaagatgcagctgcacagcctcgcgcagtccggcttcgatcccctgtcgcgcacctgccgcttcatgctgacggaagaggcgcaccacatgttcgtcggcgagaccggcatcacccgcgtcgtgcagcgcacctgcgatgcgatgaaggcggccggcatcaccgatcccaccgacatcgccaaggtccgcgcgctcggggtgatcgatcttcggaccatccagaagaagctgaacctgcactatacgctgtcgctcgacctgttcggctcggaggtctcgaccaacgcggccaacgccttcaacgccggcatcaagggccgctaccacgagacccagatcgaagacgatcaccagctcaagaactccacctatccggtgctcaagctgatcaacggcgagatcaagctggtcgacgagccggcgctgaccgcgctcaacatgcgcctgcgcgacgattacagccaggactgcgtcaagggcatgctgcgctggaacaaagtgatctcgaccgcgggctacgatttccagctcaagctgcccaacgttgccttccaccgccacatcggcgagttcaaggacgtgcacgcgacgcccgacggcatcctgatcgacgatgccacctgggccaagcgcaaggacgagtggctgccgtccgccagcgacggcgacttcatcacctccctgatgcagcccgtcaccgagatcggccagttcgcgtcctggatctccccgcccaaggtcggcatcgacaacaagcccggcgatttcgaatatgtgaagatcgagtcgtaa

SEQ ID NO: 7828 - DNA, 1689 bp, BradyrhizobiumColbertium
atggccggggaagatcggcgcctcgcaggcggcgcgacattcatcgatttccagaccgaaccgtcccgctacaagcactggaagctcacggtcgacggcgacgtcgcgacgctgaccatggatgtcgatgagaacggcggcctgttcgagggctacctgctcaagctcaattcctacgacctcggcgtcgatatcgagctggctgacgcgcttcagcgactgcgcttcgagcatcccgaggtgaaggtcgtggtgatgcgctcggccaagaaccgcgtgttctgcgccggcgcgaacatccgcatgctcgcgggatcgacccacgcgcacaaggtgaatttctgcaaattcaccaacgagacccgcaatggcatggaggattcgtcggaaaattccggccagcgcttcatcaccgtggtgaacggctcggccgccggcggcggctatgaactggcgcttgcgacggatcacatcatccttgccgatgacggctcgtccgcggtggccttgcctgaagtgccgctgctcgccgtgctgcccggcaccggcggtctgacgcgcgtcgtcgacaagcgaaaagtgcgccgcgaccatgccgattttttctgcaccatcgaggagggtgtgaagggaaagcgcgcggtgcagtggcgtctcgtggacgagatcgcgccgaactccaagctggaagccaggatcgccgagcgcgccagggaattcgccgccgcttcgaagcggcagggcagcggcaagggcattgcgctgacgccgctcaaccgcgtcattgacgagaccggcatccgttatggcttcgtcaccgtggacatcgatcgcgcggcccgcatcgccaccatctcgatcaaggcgccggaggctgcaccgcccgccgacatcgacggaatgatggcgcaaggagcgtcgttctggccgctccaggtcgcgcgcgagctcgacgatgccatcctgcatcttcgcatcaacgagctcgagatcgccatgctggtgttcaagagccatggcgaccgcgcccatgttctcgcctgcgacgccttcctcgaagccaacaaggcgcactggctcgtcaacgagatcaggcactactggaagcgcgtgctgaagcgcatcgacgtcacctcgcgcacgctggtgacgctggtcgaaccgggctcctgctttgccggcacgctggccgagctcgtgttcgccgccgaccgctcctacatgctgatcggcacgcgccagggcgacaaccgtccgccgccgtcgatcgaactgtctgcgatgaacttcggcccgtatccgatgagccatggcctgacgcggctgcaatcgcgcttccaggccgatccgtccgacgtcgaccgcgcggaagccacgctcggcaccgcgctcgatgcggagcaggcggaagagctcggcctcgtcacctttgcgctcgacgacatcgactgggacgacgaggtccgcgtgttcctcgaggagcgcgccagcttctcgcccgacagcctcaccggcatggaagcgagcctgcgcttcgtcggccccgagacgatggaatcaaagatcttcgcgcgcctcaccgcctggcagaactggatcttccagcgtccgaatgccgtcggtgaggaaggcgcgctgcgccgctacggcagcggccagaagccgaaattcgatatgacgcgagtctag

SEQ ID NO: 7829 - DNA, 819 bp, BradyrhizobiumColbertium
atgaccaatctcacccccaccggtttcctcagcatcggcaccgccagcctcgaatacaaatggctcgcgccaccggccgcggatgcgccgaccatcgtgatgctgcacgaaggcctcggctccgtcgggctctggagcgacttcccggagaagctgcagcaagcctccggcgccggcatcttcgtctattcgcgcgcgggctatggtcaatccagtccggtcgcgctgccgcggccactcgactacatgcaacgcgaggcgctggacgtgctgccgaagctgctcgacttgatcggcttcaagcgtggccttctgctcggccattccgacggggcctcgatcgccacgatctatgccggagcgcatcaggatcatcgtctcagcggcctcgtgctgatcgcgccgcatttcatcgtcgaggatatctcgatcaaatccatcgccgcgatcaagacgacgtttgagaccaccgacctcaagacgaagctcgcgcgctggcacaaggacgtcgacaacgcgttctacggttggaacggcgcctggctcgacccgaagttccgcgattgggacatttcagactacctcgcctacatccgcgtccccgttctggtcgtgcagggtgcggacgatcaatacgggacgctgcgtcaggtcgagatcgcgcaggaggagtgctactgcccggtcgacgtgaagatcgtttccggcgcggggcattctccgcatcgcgaggcgccggcggcgacgctggaggcgatcgagcagttcgcaggagcggccctgcgcgacgatcagggtctgcaagggcgcgccgcgtga

SEQ ID NO: 7830 - DNA, 1542 bp, BradyrhizobiumColbertium
gtgagcgagggatcctataacgcggtgacctggctgctcgaccgtaacgtcgaggaggaccgcggcagcaagctcgccttcgacgacaccgtctcgcgcatcacctatggcgagctccagcgccagacccggcgcgtcgccaacatgctgcgccggctcggcgtccgccgcgaggaacgcgtcgcgatgatcatgctggatacgatcgacttcccggtcgtgttcctgggcgcaatccgcgccggcatcgtgccggtgccgctgaacacgcttttgaccgccgaccaatacgcctacatcctcgccgattgtcgtgcccgcgtgctgttcgtgtccgaggcgctctatcccgtcatcaaggacgtcgtcggccgcatgcctgatctcgagcatgtagtcgtctccggtgccaagcagaacggccacaagcagctggccgaagagatggccggcgagagcgaccagttcaccaccgccgtgacccatccggatgagccggcgttctggctctattcgtcgggctcgaccggcatgcccaagggcgtgcgccatctgcattcgaacatgcaggcaaccgccgacacctacgccaagcaggtgctcggcattcgcgagagcgatgtctgcctgtcggccgcaaaactgttcttcgcctacggcctcggcaatgcgttgacgttcccgatgtcggtcggcgcgagcgtcatcctcaacagcgagcgtccgacgccggcacgcatgttcgacctgatgaaccgctacaatccgtcaatcttctacggcgtgccgacgctgttcgcggcgatgctcaacgacgagacgatgaagggcgagcgctgcggcgaggcgttgcgcatttgcacctccgccggcgaggcgctgccggaatccgtcggcaacagctggaaagcgcggttcggcgtcgacatcctcgacggcgtcggctcgaccgagctcttgcacatttttctctcgaatgcgcccggcgatatcaagtacggctcctccggcaagccggtgccgggctacgcggtgcggcttgtgaacgaggccggccaggacgtcgccgacggcgaggtcggcgagctcctggtcgatgcgccttccgccggcgagggctattggaatcagcgtcacaaaagccgccgcaccttcgaggggccgtggactcgcaccggagataagtatgttcgcgacggcgagggccgctacaccttctgcggccgtgccgacgacatgttcaaggtctccggcatctgggtctcgccgttcgaggtcgagagcgcgctgatcacccatccggcggtgctggaagccgccgtcgtgcccgaggccgatccggaaggcctcctgaagccgaaggcgttcgtggtgctgcgcccgggcgcgacgacgacggacttgcaggagatgctgaaggaacacgtcaagcaaaagatcggcccttggaaatatccgcgctggatcgacgtggtggagtccctgcccaagaccgcgacggggaagatccagcggttcaaactgcgggaaggcgcgaattga

SEQ ID NO: 7831 - DNA, 909 bp, BradyrhizobiumColbertium
atgagcgaaagtcccgacgccgaatcccgcttcctcgaacagctcggccagcgcgtgcgcaccatgcgcgcgctgcgcggcatgtcgcgcaaggtgctcgccaaggtatcaggaatatcggagcgctacatcgcgcagctcgagagcggcaagggcaatgtctcgatcgtgctgctgcgccgcgtctcggacgcgatgggcgcgcatctcgaagacctgctcccttcggccgatccaacgccggactggcagatgtttcgcgatctcttgcgcaaggcaaccccggcgcagatcgctcaggccaaggagctgctctccggcggcagcgcctccgccccgcgacgcgcgccattctgcggcatcgcgctgatcggcctgcgcggcgccggcaaatccaccctcggcaagatcctggcgaagaagatcggctggagcttcgtcgagctcaacaaggaggtcgagcagcagaacgggctctcggtcgccgagatcatcgcgctctacggccaggaaggctttcgccgcatggaacaggcggcgctgcaacagttgctcgcgcgcaacgagctgatggtgctggcaaccggcggcggcatcgtctccgagccgctcaccttcgaccaggtgctatcctcgttctacacgatctggctgaaggccgagcccgaggagcatatggcgcgcgtgcgccgccagggcgatctgcgccccatggccgatgaccgctccgccatggcggagctgcgcaacatcctgctcagccgcgagccgctgtattcgcgcgcggcggcggtggtggataccgcggggctgtccgtcgatgccgccgccgtgcggctgatcgatgcggtgcggcccgtgctgcagaacgaggcgcgcagcttcggcctgcgcagcgtggcgctgtga

SEQ ID NO: 7832 - DNA, 396 bp, BradyrhizobiumColbertium
atgaccaatatcgacgcctcggtctcgctgttcgatcggatcggcggcagcgcaacgatcgacgccctcgtcgaccgcttctacgaccgcatggacacgctaccggaggcgaagatcatccgcgcgatgcacgcggaggacctcggtccgatccgcgacgtcctgaagcgctatctcaccgaatggacgggtggcccgaagctctattcccccgagaaaggtcatccgagattgcggcagcggcacttcggctttgccatcggcgatgccgagcgcgatgcgtggatgctctgcatgcgcggggcgctggcggagacgatcaccgatgccgccgcgcggcagcatctcgatcgcgcaatgtcgggcctcgccgactggatgcgcaaccggccttag

SEQ ID NO: 7833 - DNA, 834 bp, BradyrhizobiumColbertium
atggacgcaagcatcgcgccggaagtcatcagacgtcctgttcccgcgcatatgacgcacatcgtctcgtcgatctcctgctatcgcgagcgcggggccggcctgaccaattttcgccacgccgcgccgctgtcgctgccgtttctgatcaaccttggcagcccgttccgcatcgcgctcgggcgtgagcccgatcggtcggatatccagccgagcttcgttgccggcttgtttcccggacccgtgcagatcgaatccgatggccgcgccatgtgtgtccagatcgacttcacgccgctcggcgcttaccggttctacggcggcgccgtacctgacctcaccgcgcgcatggtcgatatcggagatttgctcggccgcgacggtcgagaactgggcgagcgggtggcggaagcagacaattggcagcgacgcctcgacatcatcgagaccttcgtgcttgagcggacggtgcacgagccctcccccgcaatcgctgcggcgctcagccggctctggcgcagcgctggcgcggcgcgcatatcggacatcgcatcggacatcggctggagccgtaaacatctcgcgcgccggtttcacaacgagatcggcgtttcaccgaagacattggcgcggatgctgcgctttcaccgcgcctgcgaactggcgcgcaacggggataggcgaggctgggccggtattgcgatcgaggccggctttgccgaccaggcgcatctcgcccgcgatttcaaggagttcagcggcgagaagccgaccatctgggccgcgcggctggagcagcttgatccacgcctgatccgcgaagccggcggatag

SEQ ID NO: 7834 - DNA, 435 bp, BradyrhizobiumColbertium
atgtccagtccaaccggaaacgaaccccctcgcctctatcacacgatgcgctgcaaggacgcggaggcgatgatcgtgtggctgaaggacgtcctgggattcaccgagcgggtggtctaccggcgcgagaacatcgtcgcgcatgcggagttgtcgttcgggtcatccattctgatgctcggagcgcatcggcaggatagctatggcaagagcgtcggcgaactcgacgggcgccgaaccgacgcggtgtacatggccgttgacgatcccgacgcgctttatgccagggtgaaggcatccggagctcgaatcgaaacggaattgcaagacaccgactacggcagccgggacttctcggcgcgggaccccgaaggcggcctctggagcttcggcacctactggccgaaagccggcgaagatccgttgccggcctga
